United States Patent Application Publication US 2004/0123343 A1 - sequence listing, part 30

SEQ ID NO: 82918 - DNA, 3234 bp, Oryza sativa
  Clone ID: PAT_MRT4530_822C.1
ctatttaactgttgtcgacttggcggtctgaagtgctgactcgtagtcgacaacagggtagccttcctcctcgaatccacatccggcgagatcaaagacagcgctatgtctctcctgacagtatccgtagacactcttatatgcatttccatagaaaattggaccaaactgccatttttccccgcttcttccttcttcccctttctccttcctcctcttttcgttctcagcggcggcgagtggtggcaacagcagcagcagcaacgcggttgcgagcggcagcgcggcggcggcagcagcagccgcagcgacgcggctgcgagcgggggcggcagcagtaaggttgtaggcaaagcaacacgagattttacctcctgagaaggatagcagagtagcgaccggcaagagaagaggcatcaccagctccctgctcatgcgctcccaccgccgccttgcccctgtttgcaccgtcagctcgcccttgctcatgcgctcccgccaccgtttcatccctgctcgcgccgccggctcgcccctgctcccgtcgccgcctcgcgcgctggccgccgattcgcccctgctcccgccgctaaccctagaacgtagtcagagcgcaatacaacagtacacatctaccatcaagtgcgcaaatggtgactggcccaagttgcgagaaatcatcatcttccagcagatgaataaagaatccatcggtttagacaaggagtatgcattataccttgacaccattgtcggaggatcattcctgcataaaactccttcggaaggacaaataattctagatcgaattatggaaaatacttccttcatagagcaatataatgaatccctccctaaggcatcgatgcgtaaaattaaggaaccttcgatagctgaatctgagactgaaccgcctacatcaatagattcggctaaggagtcctcctccaaaccatcaccagcaaagagcaaagaaattcaaactctggaatgtgctataatgttcaggaatgatcttgatgaagattttggaaacacccagaattatttcagtaaaaagaaacctcctatggccttgccacctcctgatctaatcgaagatgaatatcttaaagaaatagtctgggagctgaccacagtcatgagcaacgaatggttaaaagaggcagagctttcttccgaagtaattcggaataattccactcctcgaaccatcccttgcaacttagaagggaatactgttggtattctatatagtccaacagtcggagtcaaccttgtctcagaatcattcacatttgcttatttgagtgacaaggccattactccgatgaacaaattcttcaaacacccgaataggaagttaattgaaggatttgggattgttcaagatgtatctgtccaatacaacgataaagaggccatcttggattttcatgtctttgaaatccaagactttgacgtcctaattgggcatctgatcaagaaacttctcatcaactgccctcgattaggtagcctaaaattctctttagtagggaacaaattctctatttcattttcacaatcaagatttgccttgactgattccctgcctgaagacgaatatgcaaaggaagtaacaactattattccttttgagtctcccgaatcacttcttgaaaataatgtctcagatttcattgaggaagaagaagattccggtgaaacttttgagctacatgcccgtatggaacctatgtttatcagttgtatggtgtctatcttttcggacatgatcgaatacattatggaggttttcatggatgacttctctgtctatggaaaaactttcggtcattgtctccaaaatttagacaaagtcttgcaacgatgcgaatagaaagacctagtgcttaaccgggaaaattgccatttcatggtccatgaagagattgtccttagacatcgtgtgcctgagagaggtatagaggtggatcaagctaagatagaggtgatagatcaacttccacctccggtgagtatcaagggaatccgtagcttcctcggtcatgctggtttctatagaaggttcattaaggacttttctacaattggcagacctctgaccaacctgttagttaaggatgtgccctttgagtttaacgacgagtgccttaattcctttgaaatcctcaaaaaggcacccgtttctgccccaatcatccaacctcctgatgggacactcccattcgagattatgtgtgatgcccgtgattttcctgttggtttgagctgccgccgccatcgccaccgagttgccaagcccaagttcttcgagcagagtactctgttcttgtattacaaatctcaccaactctccttctctctcacgcaagttcaagctaatgcaagactgtattggatctattacaaggcccatttcggcccacaatacttgatgttcgtcgcggtagcgccagtgccatctctgagtcttcctgtacatcatccggcaggttatgctcttcagtctccagcccttcttcttcagtagttctttggcactccttgatcaccagccgcccgacacagatatacccgtacagacatattccatgagcatctattgcgagcccgtcaccgatgagacctaggcccgggaaaaaatcagcttctcgtgtggcgtggaaaaattcctcacgacgggagccgggaggcgacgtgcaacacgcgcagtggcagcacgacgcggaggcaattcgaggtggcacaacggcgggagcggcgcgacgcgaggcgacggcgggtggaccacttaagtcgtcattcgtcggcgctcgaaaaacaatttttacaagtgcggctccgacgaacgacgacggcgccggcggctcccccctcctcgcctcctcgggcgccggatccgccgccggctcccctcctcgcctcctcgggcgccggacgccgacgaacgacgacgacgcctccttgagtggcggcggctccgacgaacgacgacggcggcggctcccccctcctcgcctcctcgggcgccgaatccgccgccggctctcctcgccgctggccggtctcggggaggggaggggagtggaggggagggaaggcggcgacgaggagaggagacgcgacgatgacggcgccgacgacgacgacgacgatggcgacgacgcgacgacgacgacgacgacgacgacggcgacgacgcgagtacgacgacgactgctgcgatga

SEQ ID NO: 82919 - DNA, 651 bp, Oryza sativa
  Clone ID: PAT_MRT4530_82300C.1
atggctattgttttgatcctcattggcggtgtgaaattttcagattttgctagaatgaggaaaaagttacctatgcatgagaggttggggccaattcatcaagattattttgaggaaaaagctgaagataagcctagagtcagaaatccacaatgttgtccctatggtatttttacaaagaacaagaagagacgagttcaaaggatgagaaatagggagcagatgcaggaaattgaagaggagattgataatcggctgaagcgcactaaggagtggtgggttaagagcaaagtggtgccagccgatgaggtcagagccgataaaacaaaagatcaagcatcttcttcaataaacatggtttttgtgctaccagcagagtacaacgcaaaacaagctggtgacgatgtttttgaagaatctctagccaagttgaggcattatctactttcaaatgagtgcacagtggtttgcaaagccgatgtggtcaggtacatgctaacggctcctgtgttgaaacggaggattggaaagtggattttggatttgacggaatttgatctaaggtatgaatcaactaaggcggtaaaaggacaaacggtagcagatttcattgtggaataccgcaatgattcacttggatatgttgagtga

SEQ ID NO: 82920 - DNA, 291 bp, Oryza sativa
  unsure (1)..(291): unsure at all n locations
  Clone ID: PAT_MRT4530_82301C.1
cccgggtgcgtacccacgcgtgccgtctcctacctgcancaccggatggcggccggaccatgtcaggacggctgaggtaagttccacccggcggtcaaggtcgtccgaggtaagtcagctggtcgacgtaaggacggtcgcgtcaagtcggtccccgtgccactcggcggcggtgaagaagccccaccgcgttccgccccggcatccgtcgcgctaccggtgagatccgcaagtaccagtaagagcaccgtagctgcgtgatccgtcaaggctgccgttaccagtcgcctg

SEQ ID NO: 82921 - DNA, 474 bp, Oryza sativa
  Clone ID: PAT_MRT4530_82302C.1
gcacttgctgaagtaactactgtattttctggatctacataccccacagcaaatgttttttatccaagcattgtgaatgtgaagagggcattgcttgctgcatctaagtctactaatagggacaaggttttgaagaatatggttgaagctattttggaaaagtttgataaatattggaaagagaagaacaaccttatgatcattgccactacccttgatcctaggtttaagataaggttccctgttgtgtcaaggttggcaaagagattcttgactgttccagcgtctagtgtatcatctgaaacaacttttagtgctggtggaagagtgcttgatgattaccgaagttccttgcgcccatcaatggttcaagcactaatatgtgcttctagttggatacgtggttctcaagataacaagacacctccaatggctgtggcggaagatgataaggatgatgttgctagcaactag

SEQ ID NO: 82922 - DNA, 411 bp, Oryza sativa
  Clone ID: PAT_MRT4530_82303C.1
atggtggagaactttgtggctgaatatttttctatcacattgactgtaacatcaaaacaatctactgctagaaaatactataaagtttctaaatggaggagatgtggaggttattgcgacctttacctgcaaagatactttagagtgcaggtgggcccaattattgcagccgttggattcggtttggatgaccgagatgcacgggtggaaaataacaataggcccatctcacccgcgcaagccgaggatctgaataataccacctcggggagttgtgcgggagcgggtgtgaggaggctacaaataggagcgttgatcgagttgctgttgtataaaattgacgcgtatcagaaaattactctgccaactggaccaatcaactgccagcggttccgccagcttgagaaggat

SEQ ID NO: 82923 - DNA, 241 bp, Oryza sativa
  Clone ID: PAT_MRT4530_82304C.1
tcgtgacgatccagaggttctggttttgtttctttcagaaatcagcaggacgcacataatgccataaatgaactgaatgggaagtggctcggtaactcgcaagtgtcgtgcaattgggcggcaaagggggctaatgcatgggaggagaaacctgactcatacttcacgggtctgatacgtttttgactaatgcgcacggctcattgttttatgggtgtcactgattgagatggtcgtggat

SEQ ID NO: 82924 - DNA, 242 bp, Oryza sativa
  Clone ID: PAT_MRT4530_82305C.1
aatgcccttccaaaagtttataaacccggttggcctgtttaaccgaagggaatccccacccccatcccacaaaccacctttggaaagaatttaaggctttccagggccgtttggtccaaaccaataaatgccaattaattattgccatacttgctttgtaatttgtaacagggagctttgctccagtaactcagtatcattggtccacctactctcacttagaagttagaatgcccccaaaa

SEQ ID NO: 82925 - DNA, 264 bp, Oryza sativa
  Clone ID: PAT_MRT4530_82306C.1
atggggatagcaatgcctggttgcagagaaggaagggtttgcggtgtcgatggtgggggtggagtggatgcggcgtcggattgccacatcgagaggtggggacggaggggttggcagcgccgggtggtgggaaaggagcagattttgtggcatcgggtggcggcggggaaggagcgatgcagtggagactgcagggccagtggaaacagcgagaggatttggggatcaatccggaacttgcatgaaggaattgaggagcgttga

SEQ ID NO: 82926 - DNA, 537 bp, Oryza sativa
  Clone ID: PAT_MRT4530_82307C.1
atggagtacagctcaaggagggtctcctgctgcgtcgcgctggccgccgtgctgctcctgtcgtcgcgcacgctcggcggcgccgccggcggcgcgccgcggcggctgctgcagatcagcgaggcgcagcagttcgtggtgccgcagacgcacctccgcgcgatctacggcctgcacccgctcaagtggagcagcgacctggcggacctggcgacgcggtgggcggaccagtacaagggcgactgcgcggcggcgtcggcggcgtcggcggcgggcggcgtgaacgtgttccgcggctacggcggcgaggcgtggcagccgagcgacgcggtggcggcgtgggcggaggaggcgcagcactacgactacggcgccaacgcgtgcgcggcgggcaaggagtgcggccactacaagcagatgatgtggcgcgacagcacgcaggtcggctgcgccaccgtcacctgctcctccggcgagacgctcatggcgtgccactacgagccgcagggcaacatcatggggcagaagcccttctga

SEQ ID NO: 82927 - DNA, 171 bp, Oryza sativa
  Clone ID: PAT_MRT4530_82308C.1
cagaccaaaagatcttgctgcatgcatattcttcacttaggaggtcttgattaggcaaggtttcctctatatacagtgctaacagaaattatggtcttgctgagctcactgaattgaacccacctacaaaagccacgagatcatatactattggggttttaccatgtaccc

SEQ ID NO: 82928 - DNA, 213 bp, Oryza sativa
  Clone ID: PAT_MRT4530_82309C.1
atgaataataataataataataatgatgatgatgatgatgatgatgatgatgatgatgatgatgatgatgatgatgaaatgaaattacaatcacctttgcaatttttagaaagcttagatgtggctgcgttcagcggtacaggtacaggatgggaattaatctcttctacacgcaaaacagaacggtctattagggcaagtctaatagaacag

SEQ ID NO: 82929 - DNA, 229 bp, Oryza sativa
  unsure (1)..(229): unsure at all n locations
  Clone ID: PAT_MRT4530_8230C.1
ttatttcgtatatattcatcaatcaggtcaccaattcaccaatattacataaaggagtggcaatattgcggacaaccaaactagnataacactaggagccgacaacctacatnttacaagttatcactgcaaanttattcccacgtgctattgctgcatgaacaccacgnacattaacatcaaaaaggcatttgggtccaagtttangatcgaatgagttngtattttt

SEQ ID NO: 82930 - DNA, 426 bp, Oryza sativa
  Clone ID: PAT_MRT4530_82310C.1
cgggcggaacaaattgtgctcaactcggttgaacaactttaaattgtgctttaaactccgcataaggaaaaaggcatgcatggggcccaggtttaaaactagtactagaaaatggagtttttgtaagaactatgaagtcgtttcagcttagcaattacagaccagagatcgacagaagcaaaaacaaacgacacatggtctatgccttaacttcctccaaaaaaaaagagagagctttattttttgagagctcgaggaaaaggctgctggtaagagccatctgtctgctgctgttgatttgggagctccccaccaaattgctgcattgtcggcaatgcccagacgtgcactattaaatccataaagcccccacaaatatgactttaaagaagagagcccacgatgcccctgcaagctaaacgagaa

SEQ ID NO: 82931 - DNA, 348 bp, Oryza sativa
  Clone ID: PAT_MRT4530_82311C.1
atgcggcgtaggagaaggcggggcgcgcgcgcagaggcatggcgccgcggtgccgacggcacgtgcacggagaaaggagcggcggtgacggcggctgtggcgagcggaaggagcagcagcggctcgatgacgacgaggaggagcaacggcggtagagctcgggttgtggcggtggatgatccgtcagcggctgggcgtgcaagccgcgaatccggcggcgtcaaggcatgcgggttgcgtatctggtggcggcgggttgatgatggcggtgcggcagtggtctcagagactgcagggctattaaaatggcttgaggttcacaagctacttgagctcggctcgccctag

SEQ ID NO: 82932 - DNA, 680 bp, Oryza sativa
  Clone ID: PAT_MRT4530_82312C.1
gcacgagggcgctgctcaatctcccacactgctcggcagcttagctagctcgcggctcgcttgatcacgccatttttcttcgattcgatcgatctcctggtgtgccagccatggcgagaatgctccttgaggcggccgcctccggctcggtggaggactcactcaactcggacctcgtcgtcatcctcgccgggctgctctgcgcgctcatctgcgtcctcggcctcggcctcgtcgcccggtgcgcgtgcacgcgccgctgggcgcgggccgccggcggcgggacagcggctggcggcggcggcggtggcgccgccgcggcgaacaagggcgtcaagaaggaggtgctgcggtcgctcccgaccgtgacgtacgtctccgacggcggcggcggcgaggcggaggagtgcgccatctgcctcgtggagttcgaggacgggcaggccgtgcgcgtgctgccgcagtgcgaccaccgcttccacgccgcctgcatcgacacgtggctgcgcgcgcactcgtcgtgcccgtcgtgccgccgcgtgctcgtcgccgccgagatgccccccggcgagcggtgcggccgctgcggcgcgcgctccggcggccgcggcatcggcgcgctgctcttgaattactggaaggcgccggcctgcgacgccgaggggccagagttggcgtag

SEQ ID NO: 82933 - DNA, 356 bp, Oryza sativa
  Clone ID: PAT_MRT4530_82313C.1
tttggggttttttttttttttttttttttttttttttttttttttttggttggttgttctttgaaaacccataggagaagtcgtgccaggttgttttgtcaataaaccaagaacagcaaggaggcagttttccccgcaggtacttaaaggctaccgagaccggggggggaaaaagggcattcttggggggttcaaaggggaacgatgacttggccaagccaaaccgaaaccgaggggaaggggagggaacagaaaattggcataaaagagaatgtggaccccggccttgggctcgggggggagggggaacttgaaggggaccggaaacagggggggtccgaaatgggggggcacgg

SEQ ID NO: 82934 - DNA, 526 bp, Oryza sativa
  Clone ID: PAT_MRT4530_82314C.1
gcggtgtccagccgcgcggagtgctggtccctcgacaccggggacgggggcgagctcgccgccgtggagtccatcatcgagtggtgggtcaaggagaggcaccccaaccagctcgccggcctcccgctcgtcgggatcggcgcctcttcaggcgggtacttcctctccgcgctggcggcgagggtcaggttcagcagcgtcgcaatcatgatcgccgagggcgtgttcgccacgatggaggagatcccggcgaggtacccgccggcgctgttcgtgcaaatgcccaaggacggcgagagggcgcgggaggtggcggcgagcatgggcaagctcagagggagccgcgtcagcgtgcgggagatccaatgcggcgagttcgccgtgagcgcccagttcttggcggcgaggatacccgggttgacccctcgcgtcgccgatgggctggtcgtgtgcttcgccggaaggggttcgtggatgaggaggggttctgaagaatgacgggaggagcacgccgtggagaaggcgg

SEQ ID NO: 82935 - DNA, 560 bp, Oryza sativa
  Clone ID: PAT_MRT4530_82315C.1
gcagtagctagctagcaactctgatcacatcgccggggaagaaaagtaggaggagatcgatggccaagccaagcgccggtgcggtgaccggcgtccccatcggctccgccgcctggtccaccggcctctgcgactgcttcgacgactgtggcctatgctgcacgacgtgctggtgcccgtgcatcacgttcgggagggtggcggagatcgtggacagggggtcgacgtcgttcggcaccggcggcgcgctctacgcgctgctgtgcgcgttcaccgggttccagtggatgtacctgcacctaccgcggcaagatgcgcgcccagcacggcctcggcgacgccgcctgcggcgactgctgcgtccactgctgctgcgagtcctgcgcgctgtgccaggagtaccgcgagctcgtcgcccgcggctacgaccccaagctcggatggcacctcaacgtcgagcgcggcgccgctgccgccgccgccgccgccgcggcaccggccgtgcagcacatgggccgttagaaaaagcttcacttcatgcactctccatcccaaaataa

SEQ ID NO: 82936 - DNA, 432 bp, Oryza sativa
  Clone ID: PAT_MRT4530_82316C.1
atgacgacgaggaggagcaacggcggtagagctcgggttgtggcggtggatgatccgtcagcggctgggcgtgcaagccgcgaatccggcggcgtcaaggcatgcgggttgcgtatctggtggcggcgggttgatgatggcggtgcggcagtggtctcagagactgcaggtcggcaacgacgcgcgacaccttctccactccggcaagctctccagcgctcgccgccgctcgccgccgtcctccgcgcctctctccccgcgcgcgcgccgtcaccactcgtcctccgcgcctctcgcctccgctcgcgtgttgccgccgcccgccctccgcacgccgacgagctcgagctctgcacagggcgccgcttcctccctcagcggctattaaaatggcttgaggttcacaagctacttgagctcggctcgccctag

SEQ ID NO: 82937 - DNA, 455 bp, Oryza sativa
  Clone ID: PAT_MRT4530_82317C.1
aaggaaagtaggagatcgatggccaagccaagcgccgccgcctggtccaccggcctcttggactgcttcgacgactgcggcctatgctgcatgacgtgctggtgcccgtgcatcacgttcgggagggtggcggagatcgtggacaggggctcgacgtcgtgcggcgccagcggcgcgctgtacgcgctgctggccatggtcaccggctgccagtgcatctactcctgcacctaccggggcaagatgcgcgcacagtacggcctcgccgacgccgcctgcggcgactgctgcgtccactgctggtgcgagtcctgcgcgctgtgccaggagtaccgggagctcgtcgcccgcggctacgaccccaagctcggctggcacctcaacgtcgagcgcggcgccgccgccgcgcccgccgtgcagcacatgggccgttaaatagcgtcatctctcctcgt

SEQ ID NO: 82938 - DNA, 504 bp, Oryza sativa
  Clone ID: PAT_MRT4530_82318C.1
atggcaacatatggacgacgagcaacatcacgtatcagcgtcgcgtgtcaccgcgggcagagcatatatgcttgtgatgcccatcgacggatgattgacagactcatcaagatggacacagaaaccagaaaaagaaaaattccccccgaatcgcctgaattttacaggaaaacagttcgtttcctttttaaaaatcgtgaaaaaggaatactagtgaaaaaggagaactgcatatggcgcacacaacacgagggaatacgcttctgcaggagagaatacgctttccagtccagctctcccatcatcacgctgaacaagctaccggccgccggccggcggttggtcaggcggtggccgccgtcagtctggtccggccaagtgtccatgattctgcaacgcgagaatgcaagccagctgtggcgtcgcctcgcgacagacagacaggccgaccggccggagaattattccctggcgcctgaagcctccaacgcattcggacgataa

SEQ ID NO: 82939 - DNA, 119 bp, Oryza sativa
  Clone ID: PAT_MRT4530_82319C.1
caacgcacgcggtcggcaccacatatgggaatgtcaaaggccatggaggcttcgatatcgggttcgtaccaacctataaacaagaatgcgcattctcaccaagcacacagttatcgtag

SEQ ID NO: 82940 - DNA, 435 bp, Oryza sativa
  Clone ID: PAT_MRT4530_8231C.1
gaggccccccaggctagccccctccccctccccctccctctcctctcctttgcctcaagccgacggcggcgagctgtccgtcatctaccccgtcgccggcggcgggaagccaccaccggtcgcctcctcctatcactttttccgctttgcccccgcctcctacaccggcccgccgcttgctcccgaccccacggctttggcggcggtgccgccgcctcgccgcccgcccgatcagccgcccaccgccgggctgccacctcccatggccatccctctaaagccgaccctaattcgtcggccctctgtcggagtttgggttcaccaacgccggagaagaagaggtgatcgccggagtttgagaagaagagcacgaatcatgaagcacatccagcatatccagtgatctaaaatttgcaagatttgaggttgtatttt

SEQ ID NO: 82941 - DNA, 171 bp, Oryza sativa
  Clone ID: PAT_MRT4530_82320C.1
atggaggccagctgggtggcctcttcctcgaggaggctctgtcggaggaggccctcagctgagtattcatggaagcccgcagctaagcattcatggcgagaagatgggccattaagggcacattcaatgcccacaactatctgccgatacactcgtggtgggagcaggtag

SEQ ID NO: 82942 - DNA, 208 bp, Oryza sativa
  unsure (1)..(208): unsure at all n locations
  Clone ID: PAT_MRT4530_82321C.1
ncctcgcnaacttttctttccacctcctcctcctcgtggtggtgctcgcngccgccgccnatgcggtgacgttnacnatcgtnaacaagtgcgggtacaccgtgtggccggcggcgctgccgtcgggcnacgnaatnagctcgacccggggnanagctgggccgtntacgtgccggcgggcacaagggcgcgcgcttttgggggcgca

SEQ ID NO: 82943 - DNA, 222 bp, Oryza sativa
  Clone ID: PAT_MRT4530_82322C.1
atggccgccatgcttctgctcaaagctgtaaccggctttggggagagtgtgcagcggtggcgcctactcatgccgcatgaccacttcgtcggctacccgaatattggccatccacgaataattgcggcggcacgggtgcggcgtccaggcccaacagcgcggagcttgtcccggtgggcactgtctcccacggagtcctcgctgacgccgatgtcgctgtga

SEQ ID NO: 82944 - DNA, 192 bp, Oryza sativa
  Clone ID: PAT_MRT4530_82323C.1
tttccctctactatcatagtgtatacaaggcttgcccgaaggagcacttcgccgcattattttgactgcatcagggggtgctttcagggtttagaagttattgaagcacattatttatttggtgctgaatacgatgacattgaaattgtgatccacccacaatctatcatacactctatgattgaaacccag

SEQ ID NO: 82945 - DNA, 419 bp, Oryza sativa
  unsure (1)..(419): unsure at all n locations
  Clone ID: PAT_MRT4530_82324C.1
ggcatttgggagtcggtgggcttcggcagtggcctagcagaggcggcggcagcggctggtggcggtggcgccctcccctttactggatccggccggaggggaggtggtggacctctggcgatagccggcggcggtccggtggaggcggcggcagccgccgcgcgtgtcctcccctcctctagatccgactggatgggagacggcggacctcagggacggcaacggcggcggccgcgcactcccctccgtcggatccggtgggaaggggagtggcgcgcaggcancggngcccgaggatttttttgggatgatttgtagattcttttaagatattttttcatttatgggtgatttttttaatatatttccgatctggatctgaggatgatctgtgatgtggtgatatgtggatttcaaat

SEQ ID NO: 82946 - DNA, 2120 bp, Oryza sativa
  Clone ID: PAT_MRT4530_82325C.1
ctcaaaacaaggagagaactctgtgcccctctttcgtcattttttttttttttttttttacacaaaacaggtagctccatatcttgttcatattgacatacacaatccttgatgatgacaaaaaacaaattacaggacagctcttggtccccctcaccataagctatagcagggcagagcaccacccaaagtagtcgattctagcattatctcagtcagggtcgccatggcgctcaaggtcgtctctttccccggggacttgagccgcaggtctcattcctcgactccaacagaggaggagctttcaaccagctcaaagtggacctcccgtttcaaacgagggacagaagagcagtttccctgagaaggacttgctgttcaatgcaacaggctccaccaccagcatggcctggtcgagccgttggtgaacctgggaggaggtcatgggatggccccaagcctatctcaattgttggctcaaccggttctattggcacacagacattggacatagttgcggagaatccagataaattccgggttgttgctcttgctgctggctccaatgtgactcttctagctgatcacggtgaaaacattcaaaccaaagcttgttgctgtaagaaatgagtcattagttgatgagctaaaggaagccttagctgattgtgattggaagccagaaattattcctggtgagcaaggtgtcatagaggttgctcgccacccagatgcagttacagttgttactgggatagtagggtgtgcaggactgaagcctacagttgctgcaattgaagctgggaaagatatagcattggcgaacaaagagacacttattgcaggtggtccttttgtgcttccccttgcacaaaagcacaaagtgaaaatacttcctgctgattctgagcactctgctatatttcagtgtatacaaggcttgcccgaaggagcacttcgccgcattattttgactgcatcaggtggtgctttcagggactggccagttgacaagttgaaagaagtaaaagttgctgatgctttaaagcacccgaactggaatatggggaagaagattactgtagattctgctacattattcaacaagggtttagaagttattgaagcacattatttatttggtgctgaatacgatgacattgaaattgtgatccacccacaatctatcatacactctatgattgaaacccaggattcatctgtgttggctcaactgggatggccagatatgcggataccaatcttatacaccatgtcttggccagacagaatctattgctcagaggtcacctggccccgactagatctttgcaagctgggttcactgacattcaaagctcctgacaatgtgaaatacccgtcgatggatctcgcctatgcagctggaagagctgggggcaccatgacaggagttctgagtgctgctaatgagaaggctgtggagttgttcatcgatgaaaagatcgggtacctggacatcttcaaggtggtggagctgacatgcgacgctcatcggaatgagctagtaacaaggccatcactggaggagatcatacattatgatctgtgggcgagggagtatgctgccagcctacagccatccactggcctcagccctgtacctgtctagtacttgtagcaatacaaaattacagtagcattgtacactactgccgtgccagctccatgcatagtcagcagctggccactctctagctatatctagatgcgagagaattttaaggatgtaaatcatgccttcacatgaataaatcgttcgtccgtgcgttgtgtattcatgtaaattttgacggatggtcaagtaaaaataacaatggcaaattaatttagggaagaaaaaaaaaaaaaaaaaaaacgagactagttctgacatctctccctcgactttgcaatacccttatcaagcacaagaaagttaagagaacatgactaaaagaaaaaataatgaggatatgatgacagtacatcatacatgtggatacaacactaaaacgagagtttcacacatgaaccacatcacaacactgatccctgcgtgtgaagcgaagcggtgaacgatcagccgccggcgccggcga

SEQ ID NO: 82947 - DNA, 1519 bp, Oryza sativa
  Clone ID: PAT_MRT4530_82326C.1
acacaaaacaggtagctccatatcttgttcatattgacatacacaatccttgatgatgacaaaaaacaaattacaggcagctcttgtccccctcaccataagctataaggggcagagcaccatccaacttatgctatttacttgttctgtctgtccctcccaactttgcaatacccttatcaagcacaagaaagtaaagagaaaaagaaaaaaaagagaggatatgatgacagtacatcatacatgtggatacaacactaaaacgagagttccacacagcaaccacatcacagcactgatccctgcgtgtgaagcgaagcggtgaacgatcagccgccggcgccggcgacgacgacgacggcgacggcggcgagcaaagcagagaggaggaggaggaggggaagagggtggcgcggtcgctcagaagaaggagcgcttggatggcgccctccccacggccctcatgaagttggcgagctccagcacgcgcgccaccttggtgcccctcttcgcctccgccgacgcccgcttctcctccgccttccgccgcgccttcgccacctcgttctgcgccttctccatcgccttggccctcttctcctccagcttcctctcgtacttcttgagccaggcgttggccttctcgacctggtcgccctcccagccattgatgacgacctcctcgcgcttgaagcggttgttgaccttggcgacctcggcgatctgccacgcggcgatcttggactccacctcctccttcttcacctgccccaccgacacctcgtcgccgtggccgccgcccgccgacgacacgtcgccgggggcggggagcgcgaggtgggcgcggcgaggggacgggatggggttgctgtccgggacgatggcgagcgggttcgtctcctcgagctcatcctccccgatcctccccagcgcgtcgtccaccccggcgcggctggagtcgccgccgttcgcggctgcggcggcggcggcgttggcgttggctgctgcggcgaccatggccgagaactccctgctcatagtagggaagagctcacttggggcggtgtcgctccccacggagcggatcgacgtgtgcctgctccccgccgcggactcccacgactccctcctccgccggtggtacgacgacgacggctggctcggcgtcggcgtcggcggcgggctcagcgcgtggatgtccctgaactccggctcctcgagctcctcctccaccaccacctcctcctccctctcctcacccccgctgcttctgacgacgatctcccggccggtgctgatgacaatctcccggtcgtcggcgccgcggctgctgctgctgctaccactagccgccgtttgttcactcaacatgtgtcgccgccgtgggtgaggtcgtcgtcgccgtcgccgccgccgccgccgctagtgctcagccactagcacacacgcgtaaccatcggcgtcttgctcttcttcctcctcttcgcttctccgagctgagctgcggacgcgtgggcgc

SEQ ID NO: 82948 - DNA, 1627 bp, Oryza sativa
  Clone ID: PAT_MRT4530_82327C.1
atggcgctcaaggtcgtctctttccccggggacttggccgcggtctcattcctcgactccaacagaggaggagctttcaaccagctcaaagtggacctcccgtttcaaacgagggacagaagagcagtttccctgagaaggacttgctgttcaatgcaacaggctccaccaccagcatggcctggtcgagccgttgttgaacctgggaggaggtcatgggatggccccaagcctatctcaattgttggctcaaccggttctattggcacacagtgttttatcttttcttttctttgcataactaaaaagacattggacatagttgcggagaatccagataaattccgggttgttgctcttgctgctggctccaatgtgactcttctagctgatcaggtgaaaacattcaaaccaaagcttgttgctgtaagaaatgagtcattagttgatgagctaaaggaagccttagctgattgtgattggaagccagaaattattcctggtgagcaaggtgtcatagaggttgctcgccacccagatgcagttacagttgttactgggatagtagggtgtgcaggactgaagcctacagttgctgcaattgaagctgggaaagatatagcattggcgaacaaagagacacttattgcaggtggtccttttgtgcttccccttgcacaaaagcacaaagtgaaaatacttcctgctgattctgagcactctgctatatttcagtgtatacaaggcttgcccgaaggagcacttcgccgcattattttgactgcatcaggtggtgctttcagggactggccagttgacaagttgaaagaagtaaaagttgctgatgctttaaagcacccgaactggaatatggggaagaagattactgtagattctgctacattattcaacaagggtttagaagttattgaagcacattatttatttggtgctgaatacgatgacattgaaattgtgatccacccacaatctatcatacactctatgattgaaacccaggattcatctgtgttggctcaactgggatggccagatatgcggataccaatcttatacaccatgtcttggccagacagaatctattgctcagaggtcacctggccccgactagatctttgcaagctgggttcactgacattcaaagctcctgacaatgtgaaatacccgtcgatggatctcgcctatgcagctggaagagctgggggcaccatgacaggagttctgagtgctgctaatgagaaggctgtggagttgttcatcgatgaaaaccatcagaaggtaaggtacctgttcttgcactgtcagaaggtaaggatcgggtacctggacatcttcaaggtggtggagctgacatgcgacgctcatcggaatgagctagtaacaaggccatcactggaggagatcatacattatgatctgtgggcgagggagtatgctgccagcctacagccatccactggcctcagccctgttcctcccgccgacgacattcacaggctcgattccatgtcctggaaagctcagaaaagcaatcaaaagcaagcactggacttaaaatggaaaaccaagaataaatcagggatgaaatcaagcaccatcagaaaag

SEQ ID NO: 82949 - DNA, 1957 bp, Oryza sativa
  Clone ID: PAT_MRT4530_82328C.1
atggcgccccagctgaccggcgcgcccggcacgccgggggcggcgggcggcgcggcgtccgtcaacccgcagttccaccacttccaccaccaccgcctcgccacgcgccaccaccacccctcgccgacctcgctcctctccaagctcgccttctggtccgtatgctccctctcgctcctcctcgccttcctcctcctctccccctccgccgcgccggccccgcgggcggcgcccgactccccgcgccgctccctccacacgtcctccccgtccgccgccgccacgtggggcggcgccgcatgggagaagaaggtgcgggcgtccgcgcgcgtcaggcgggccaacgggcgggggctcaccgtcctcgtcacgggcgccgcgggcttcgtcggctgccacgcggccgccgccctccgccggcgcggcgacggcgtgcttgggctggacaacttcaacgactactacgaccccgccctcaagcggggccgcgccgcgctcctcgcccgctcgggggtctacgtcgtcgacggcgacatcgccgatgcggagctcctcgccaagctgttcgacgtcgtgccgttcacccacgtcctccacctcgccgctcaggcgggcgttcggcacgcgctcgttgacccgatgtcctacgtgcgcgccaacgtcggcgggttcgtggcgctgctcgaggcggcgcgcatggcgaatccccagccggcgatcgtctgggcgtcgtcgtcttcagtgtacgggctcaactcccatgtgcctttctccgaacatgacaggacggaccgacccgcctctctgtatgcagcgaccaagaaggccggtgaggagatcgctcatgcctacaaccacatctatgggctctcgctcacggcgctccgtttcttcaccgtgtatgggccgtgggggcgcccagacatggcatacttcttcttcacccgggacattcttgctggtcggccaatcaccgtgtatgaaagtgcaggtggaggcacacaccagaccaccatttcccgagatttcacctatattgatgacattgtgaaggggtgtgttggggcattggatacagccgggcgtagcacaggcagtggaggcaagaagcgagggccggcaccattcaggacatacaatttggggaacacatctcctgtgccggtgacacagctggtggatttactggagaagttgctcaaggtgaaagcggtgaggaagattgtcaagatgccaaggaatggtgatgtgccatatacacatgctaacatcagtcttgctcagcgggagcttgggtaccgaccgtcaactgatcttcaaacaggggttaagaagtttgtgcggtggtatctcgagtactacatgcctgggtttgctggtaagcagaagcagcatggcagtagcaacagcaagtcttcgcgaggtcggagtggcaacacaagcagtgcaagatgattggatattcattttcttcatggccttcttctgacggtgtgtatcattgttctagatccagtgcttaactcatcaggtctgagaggctcgttttgctcagcacgtccttcaagtgaaacaaaacgatcattaattagcttgtattgaaaaaacccttccactctattggcttccccatagctgagcgttcaaatcctagttccattagctggttcttaggatgacaattgtaggaagaactgggttgggttctggggcaggctgtgagttgcaaagactataatagattcttttagtgacattttgtaccacgggagagaaggaagtacaccatgactgtttcgtttgttcaattgaaatagctctgatcaacctgctatctctctgtactttgcattgtcatgttacttttatagatgctcggtctgtatttactgcatattgtacgttgttctgatattaggtatgttttatttcaaaagctagtgtttcatttgtggct

SEQ ID NO: 82950 - DNA, 756 bp, Oryza sativa
  Clone ID: PAT_MRT4530_82329C.1
atggctctcggtgctcgtcaccctcctcgaagaaaaccaccaacaaacatcaaaagcaacagcaacaacatcaacacaaacacccgctgttcgatcactcatttacccactactcgatcaaataacttcacagaatcacaacaaaaacgaacgatacagaacgagaagaagaacagcgcggctagcaacagcaccaccaccaacacaaacacaccggccatggaagaagtgaaggaatctcacgcgtttcttggagcagaggaaagcagaggaggaggagagtgtgggagagagatcaaaatcaagtcctcacctctccgcaattccgctgctcttgcggaagcaaaaagcgtgggtgcgcagagccctgcatgcattgcaagatgctgttttcttctacctggccacatctcatccgttagatcggctctacgtggcttgcttgctcctgatccgacggtcgaggagcacccgtcgcgcagctcgtgcccctgggccccgctcgcgctgccttggccgtccgatgggtgccacgtgtgcggaccgatgcggagcacgcggcggcgtaggccggccggcgacggggaggggaagaggggattcctccgctccgccgccgccgccgacgccgcggcggcggctctcgcttcccgcgcggcttctcttcgccgtgggcgctgcatttggtccgcgccgccgtcgtcatcggatagctccgtaccttcgtcttccgctccggctgccgctcggctctag

SEQ ID NO: 82951 - DNA, 243 bp, Oryza sativa
  unsure (1)..(243): unsure at all n locations
  Clone ID: PAT_MRT4530_8232C.1
ccgggacccggccgccgccgctgccgccgccccgcgcgccanggagcnggacgccgccgacgacgactacatgggggacctgtcccacttcctcccgccgccgaccccttcctccccgtcgaggagcctcgggcggnaggaggcaaccgccggacgcanaggcgcaggggcaagggaagcgcgcnaagggggtggtnccatggcaggagctgcggcngcgggatcggganctgaagagcngga

SEQ ID NO: 82952 - DNA, 346 bp, Oryza sativa
  unsure (1)..(346): unsure at all n locations
  Clone ID: PAT_MRT4530_82330C.1
agaaactataacagagacatcattaaaccagacagctacttataggtggatttaaaccatcatgaggataaatatagtactaacgtggcaacataacttatattataatggacattacccattttggagatataacgcaagggagattataggaggataccaggtggtaatcatagagcgactgtnagcgtggtttggtgttaaaagtgatagaaagataaagacggctgcccaccagatcttgatctgacggtcgcccgtggaataccaaaaccggaaaaaaaatccagaggaaacgcatcctcagctctcacctcactctctcagcccaccgccgccgccgncg

SEQ ID NO: 82953 - DNA, 201 bp, Oryza sativa
  Clone ID: PAT_MRT4530_82331C.1
atggacagtggaggagccaaggaggcaggtgtggtggtgaggggatgcgacgcgacggcggcggcggtgcggcgatgggagaggacggcgaatttcatgaaggatcttcatggtcttttgccatttgagccatccgacggttcatattggctggtgataacatcggacggttcaagttttcttgatgacgtggatacataa

SEQ ID NO: 82954 - DNA, 279 bp, Oryza sativa
  Clone ID: PAT_MRT4530_82332C.1
atggcgatggcgccggcggtggtctcgggcgagaggctcgtcgtgttcctcttcgtcgcccgcgtcgcgctcgcggcgccggcccagctcgccgccccgctcgcagtccttgccgcggccgccctcgccgtcgagctcgccgtggatgcctccgcctccgcctccgcctccgcgtcctcatccccgctccgccggttcaggaccaggtgcgacgttatatcctcccccgttcttatccgtattttcttccgccgcatctccacggagctgggctgctag

SEQ ID NO: 82955 - DNA, 488 bp, Oryza sativa
  unsure (1)..(488): unsure at all n locations
  Clone ID: PAT_MRT4530_82333C.1
cggggaaagcggcacccgaaaaagacaaagcaaaaagcaccctccagagctttccacgaaanaagcgccaacccacacaggggcgagagcggaccacccgggcgnagccccccccccacccaaagcccaggcaccaggcagggcaagaggccaaacgcagccaacaaagaagagccgcttgcaaccacagaaaaggtcccaggccaggactggcactaaaccagcctgacctacctaactagcggctttagaaggccagacccgacttctctaaaagcctcaccacctgacccgaaaggaacagtagaagaggagcaaatgcaagccacaaagatggcaccagagggtcgagccccggccaggtttcaatagtgggaaaattaccaacccaacacctcttgggagaaattcaaggtaacagtagtaaagagactccaacccccaacattcaaaaatccactatgaaatccgtccagggccgaaacaga

SEQ ID NO: 82956 - DNA, 194 bp, Oryza sativa
  Clone ID: PAT_MRT4530_82334C.1
tacaaattgagactaaacggatatatcctgcaaacagaatagaagtccatggctatcccaatcaagcgtacgcaggtccattcgggcgatgtggctcctgcatccattcgtgctaggctgctacgcccgctcaccgccacgctattggtcggacctaccatcagaagaaccgagcgtagaggtgttcacagcct

SEQ ID NO: 82957 - DNA, 2454 bp, Oryza sativa
  Clone ID: PAT_MRT4530_82335C.1
gtcgacccacgcgtccgcccacgcgtccgccattcccttcttcctcgtcccaatccaagttccaaccatccagggcgggggttttcccgttaatccgcgcctctccgtgtcggattgaattgaagcggagagggggaggaggaggtggaggtggaggtggaggagggcggcgggtggcgatggcgatggcgatggcgaggctgacgccgaacggcgtggcggcggcgctggcgggggacacgaacctgaagccggtgctgcagatcgtcgagctgcggggcgtccaggtcaacggcgcgggcgtcacgcgcggggagaggttccgggcggtggtctccgacggcaccgccgcgtcctccgcgctcttcgccgcgcagctcagcgaccacgcccgatccggcgccctccgacgcggcagcattgtgcagctcagcgagtacgtcatcaacgaagtcggccccagaaggattattgtcattctgaacctggaagttcttgtttcggagtgtgagataattgggaatcctacagcgctttcagaaactggatctcctatcccaaatccgacaagagtagagcaatttaacggagcacctcaatatggtttgatggcagggaactcatcaaatacaaccacaaagcctagtgacaatgttccattgttccaaaattcgatggcaggaaactcctctaactttgccactaggcccagtgacaaagttccggtcttccaaccaacagtccagccatcttatcgccctgcacctaattacaaaaaccatggagcaatcatgaaaaatgaagcccctgctagaataatccccatatctgctttaaatccttatcaaggccgctgggctatcaaggctagagttactgccaagggagatatccgccgataccataatgctaaaggtgatgggaaagtattctcttttgacttgcttgattctgatgggggagagatacgggtgacatgcttcaatgctcttcttgatcgattctatgaagttgtggaagttggtaaggtctatgtggtatcaagaggaaacttgagacctgcacagaagaactataaccatcttaacaatgagtgggagattttattggagaatggatcaactgtggatctttgtcctgatgagaacagttccattcccacccagcggtttgacttcagaccgatcaatgaaattgaggatgcccagaacaatgctatccttgacatcataggtgttgttacatcggtcaatccttgcaccacaatacagaggaaaaatggcatggaaactcagaaaagaactatgaacctgaaggatatgtctggtcgaagtgttgaggtaaccatgtggggtgacttttgcaacagagaaggctcacagcttcaaggaatggttgaacgtgggatctttcctgtgctggctgtcaaagcaggaaaagtgagtgatttcagtggcaagtctgtcggcacaatttcttcaactcagctcttcatcaaccctgattctgctgaagctcatagtctcaggcaatggtttgatagtggaggaagagatgcttctactcagtccatatccagagatatcacgcctggagcatcaaggaatgagatccgaaagacagtagcacagatcaaggatgaaggtcttggaatgggggacaaacctgactggattacggtgaaagccaccgttatattcttcaagaatgagtccttcttctacacagcttgccctaacatgattggcgacaggcagtgcaataagaaggtgacaaagagtactaatggcaattggacctgtgacaaatgcgatagggagtttgaagagtgcgactacaggtatctcctgcagtttcagattcaagatcactcgggaacagcttgggtgacagcattccaggaggctgggcaggagttgcttggctgctcggcaacagagctcaacgcacttaaggagcgcgaggaccctcggtttgcagacaccatgctcaattgcttgtttcaggaatatctgctcaggctgaaggtcaaagaagaatcatacggcgatgagcgcaaagtgaagaacaccgcggtcaaagtggagaaggttgatccttcgggtgaaagtaaatttctgctggatttgatctccaagtcctcggcgctacattagcagactgtgctactctatcagctgctcgctcgtgcgtggtgaggtgagcgaggtgaggtgttgcagtgcccatagccctcgccctcctgctcgatttttgtgccggtactttaatattaacgccacttaatagtttatatccagattagtgctttaatagtttatatccagattagtgctgatatttccatttttgtgccggtactttaatattaacgccacttaatgtatcagcttttatacctttttctcgatcaaatgattgccttctagctgcaaaaaaaaaaaaaaaaaaaaa

SEQ ID NO: 82958 - DNA, 216 bp, Oryza sativa
  Clone ID: PAT_MRT4530_82336C.1
atgaggaagcaacgggaggaagaccgcgggagcgacgcgtgcccgtgggcgcccgccagcgctgcgaatgtgcgagccacgtgccgcgtcgaggggccccgggccggtgctcggctcctcagctcggcgggtgggtcagacgcggtagcgccgcgggatacggggtgcacatctggaatggaagaggattctagtggcttcgcggggctggcttag

SEQ ID NO: 82959 - DNA, 711 bp, Oryza sativa
  Clone ID: PAT_MRT4530_82337C.1
atggccgatcagggcctaccatcgaagaagaagaagaagaagggttcgagcgcagcggccgcgcgcggcttcatgtgcggctgcggcggcgccaagtcggtgtccgtcgtgtcccggctctccgccgccggcaatatctcgcccgccacgaccacgccaccgacgatgacgtcaagtgctaccgcgacgtcggcgaagacgacgagggtgaccgtgcccacgcccgcgccgaacaccgtgcacgacgcggatggcacgccgagcgtgggcacgctcctgctgcagctgcgcgagctggagcgcggcgtgcgcgcgctgggcgtccgggaagaccgcgggatcaggccggcgacgccgccgccgccgcggcacaggaggagcgcgagcgatgcatcgtcaggcggcaggcggcggcgcgggcggctggaggaggagagcgtgccggtggtgacggagtcggacgacccgctgggcgacttccggcggtcgatggcgcagatgatcgtggagaacgagatcacggccacccccgagctgcgggagctgctgcatcgcttcctctcgctcaactcgtcgcgccaccaccacctcatcctccgcgccttcgccgacgtctgtgaggagctcttcgccggcgccggcgaacacaaccaccaccgccctcgccgccggccaacgaaacctctcccgtacagcgccactaccaactag

SEQ ID NO: 82960 - DNA, 198 bp, Oryza sativa
  Clone ID: PAT_MRT4530_82338C.1
atggaaaaaaatttcgttcacgtgtcgttcgcgttcggcagtggcggccacggcgtcggcaaaggcggcggtggcaaaggtggtggcgttgcacggcactggtggcgtggcacagcggcgtcgtcggcgttggcatcggcagtggctttggcacggcggcggtggcatggtgcggcggcggcggcggcgtcggcgtag

SEQ ID NO: 82961 - DNA, 917 bp, Oryza sativa
  Clone ID: PAT_MRT4530_82339C.1
tcattcacacaccctcctcacgcccacatccatcccgtcacccgcccactcgccgtcgcacgagcctccccgtcgtcgatcccctcccttctcaccctcatcctcaggtattgttgccgattgtcctgtctccgctcgtcgccggcccctcgtagcgcaaatcgtcatcctgcatcgtcgattccccacgcctcgatctcccgttggtcttcccgccgctcgccattgaccatcgcccatggctcctccaagagtcaccgccgaatccaccccacgcacccgcgccacctcccacccgcaccctcgcccccgcccactccctcgctctccaaaccctaaccctaacctcccctcctctctccacgactccccgccgcacgccgacagttcgtcgccgcgcgccgcacccgcactcccctccccgctcaccggtttcctcatcacgccttcgtgccgccaccactccgatccccatctcgcgagcagagcaggggagggatctcctccgcggccgctgccgaccggcaccgtcgcctgaattgccgcctccgctccgatccccatcgcgcgagcagagcagggggaggggaggggcgccgtcgtcctgctgcattccggtgagcatacacatcctctctcgttcatctctctgtctctcacccatttttgtctggaattttcttgcgttagcactatcttctcttcaagatctggatgattctcttcgaccgcgattgctccggcgacctccaacacagtccgtcaaagggtttgtcctcattccgtcaccctcgatgacccaggccgcagtagcgacgctggtttcttagccaacaccagggtctacctcgccaattcagttcagcttggtagatcagtttagcgttgagaagcaagctgtgaaaacatccacttaa

SEQ ID NO: 82962 - DNA, 340 bp, Oryza sativa
  Clone ID: PAT_MRT4530_8233C.1
acggaataccgctgtagcacttcacctttgggtgaccccaaaaggatatcgaactcaggaaacatgtgtaatctacctaagtctaagacgatccaaggacaacaactgatgcgtggttccggctatagctctatgatgtatccgaatgtggaggattacttggatgggattcagggctgtcaccacctgccgcctacctcggacaaatccgtgggatacacaacaaacaaagataatccgggaggctccaggattggttcggccgatctagtggttcggccgaaccaaaaatccatcctcccggcctctcctttggccagtaggttgcttattgggcccc

SEQ ID NO: 82963 - DNA, 291 bp, Oryza sativa
  Clone ID: PAT_MRT4530_82340C.1
agaccggcgaaatcatggaattaaaaactccggaatggcccccccaaattcaaggagccctaccatacaggagtaccccccctaacagaaaaagcccaagagctaaatcaaagtcttttgaaggaaaaaaaaactagcgccttaaaaataaaaaaccctcctccctccaactcaactcccacagttgtagaacctaggcggggggagagacggcccccccgggggcctttatttttttttcggagaccttggaaaaaaatttggccttgaaaaaaaggggccctttggggg

SEQ ID NO: 82964 - DNA, 342 bp, Oryza sativa
  Clone ID: PAT_MRT4530_82341C.1
atggtggaccccaagtcaactgatgtcaacccaaagaacattatcccaataacaatggacaagttgacaccagaacaaaaggcagaatgtgaagacctgatgaacatgctgcagaaccaatttctgcactcatttgttcagactcgctcatgcacagtaatccaaaggtacaaagtggccctgccaaataataaggatccagaatcaagttctgggaaggataaagaagtcaagcaagaggagactcctgtggaacccaaaaacttgcaagacctaattgattatactgtgcacaatgctttaaccaaccaatcaggggatcaaacaaactggcacgcctag

SEQ ID NO: 82965 - DNA, 758 bp, Oryza sativa
  unsure (1)..(758): unsure at all n locations
  Clone ID: PAT_MRT4530_82342C.1
ttttttttttttttttttttggtgcaaaattgtatattacatgaagaaagcaattatgaatcacaaaagaaggaattttatttgtacacttatcagatttcattaaatgagatattggtatgtacttcatatttgcatgttctgcactgtgatcacaaattcacaatcaggtatcgatcaatctgctttttctcctcttcctgtttagtaaataagaccaaggaaactaaatctgcatttcctccatttctccccaatgcagttctagcaaattgtggtacaatcttgaattttagtcatgtcattgctacgagaagtaatgcaccgcttgaatcaaaacttgaaattcttcttcaggtaaatcaccacctcttgaatcaagcaaagaattatgcagcctgcagctccaggaaaaagggcataccagagttgcaagtggtgaaactttggaccatcaataaacaagagaggcaagcttgcagctggagggtgtgaggcgcctgtaatngtcatgaagtgctatggatgcagaaagagcagcacctctgtgcaacatccaggccaaatnaggaagggtaacacaccaaatggcggacaacaatctgggcaacaacatgtgtacttctggcaggaggggacctggagcggggaaaagcctcganactgtcgannagggcatggcaggtaccctgtagggcataactggactccaccttccagcaggcnttggagatggccgcggaggcnaaganatgtaa

SEQ ID NO: 82966 - DNA, 504 bp, Oryza sativa
  Clone ID: PAT_MRT4530_82343C.1
atggaaacgacaaggactactcggattgtatccatattggtttccctagttctacttggacaaggggacacctatgggtataaatataagaccccctaggaggagagggaacaatcaacacacccaccatagatgacacgacaatcaacacacccaccatagatgacacggaagatagatcaagacaccagatcgacattaaagccaacatacgccaagacaaaccgccggatatcgacatcagagatacgcttggatcgaccctatctggcacctacataggccagccgtagggatctagcgctgtctctgatcttgccgggcacaaactcgaggagaaagacagaaagactaccctgttgtcaactacgagtcagaccttcagaccgccatgtcgacaacagttatataggctaccccaaatattgtactgtctcgcatatatcctagtaccaacgatccccatactatgctaataacggaatcgtgacatcaaacatcgac

SEQ ID NO: 82967 - DNA, 4561 bp, Oryza sativa
  Clone ID: PAT_MRT4530_82344C.1
atggtgcccaacgggctcctgcccaatgcgtcggccggggtcacgaggcggctcgacggcgagcggtgggccgccgcggaggtgcggaccgcggagctgatcgcgcgcatccagcccaacgccgactccgagcggcggaggcgcgccgtctacgactacgtgcggcgcctcatcacgaactgcctctcgtgccaggttttcacatttggatcggtccctctgaagacttacttacctgatggtgacattgatgtcactgcttttagtgatagtgaagaattgaaggatacttgggctaacttggttcgggatgcattggagcatgaagagaaaagtgaaaatgctgaatttcgtgtaaaagaagttcagtatatacaggcggaggtaaaaattattaagtgtcttgtggacaacattgttgttgacatatcatttaatcaagttggtggattgtgtacactttgtttccttgaagaggttgatgccttgatcagtcagaatcatttattcaagaggagtattatattgataaaggcatggtgtttctatgagagtcgtattcttggagctcaccatggtcttatatctacctatgcattggagaccctggttctgtacatttttcatgtgttcaacaattgttttactggaccactggaggtattataccgtttcttagaattcttcagcaactttgactgggagaaattttgtttgagtttgtcgggtcctgttcctataagttcacttccagatatgactgcggagccaccacggatggatgctgctgaattgttgctgagcaagtccttccttgataaatgcagttatgcatatgcagttacacctcgcatccaggagagccagggtcaacaaccatttgtttcaaagcacttcaacgttattgatcctttacggacaaacaataaccttggaaggagtgtaagtaaaggcaatttctttaggatacgcagtgcgttttcctttggggcgaaaaggttggcaaagttactcgaatgtccaaaagaagatctaattgctgaagtaaatcagttcttcacaaatacatggataagacatggtagtggcaatcgtcctgatgcacctacactaggtctggttcatcagcatcatctgaaggttgtccctgctgaagcatcaaatagtcagagaagtgcgatggcactcaagaaaaacgctgaaaatcctaatattcgtgctaaccaggataatctcagtgaaaatgctaatagctatcctgaagctacttctcagccacttcagagaagtgttctacacccgagaaattcactgagaacagtcaacccttctgattctcatgctcatcaccaaaaagttcatgtgacacatgccaatacaaaggtctctgagcagcttgaaagaaacagttctgatggatcaatgcaaaatgaaaggaacaagacagtaccaaattctctctttgttaatgatagaaatgggcaaaacaggtctcggtttgcaagaacccgctctagtcctgaactaacggacccttctgttgaaggatattctcgtggaagacggactggagtggttgaaatggacaaatctttgaaggttgattacaatagcagaagaaacaacttggctccagaagtttctagcagccacatcactaagtcttcacaggatgagtcagtgtcttcgatgaacagttcatctcactatagtgggaaagcagcttctgactcaaacagtgtgtcaagcagctaccgcgaagataatggtttcataatgaacgaagaacttccttctgtatctgaggcatcagataaacagcaagaggagcaagtcctagttaatttaatgtcatcagctaaattgcatgacttcaacgggcaagttcaattgccaatagaaatgccgcctcatttttcggtggcaccctcccctttacttgcaccagcagcttttcccccaaaacattttgctggaattccaccaactagcttaattggggctccatggtccaatatgcatttgatccatggatatgtttcaccacccatggcccattatgtccaaaaccatactttcgcaccaaacatcgaagaaggtaacgagagtgagaaacctattacaccagatgcgagtcgtgatgatggcaacaattggcatgagtatggtgttggatttcctagatattttaatcatcaaggaagagatccacagatgcgccactttaatggaaaagagcattcctcttcacctaacagtgtatctggtgccccctttgaaagacagggagagattgctgttgaggataatggagcagtagaagagaattataccaacatgtttcaaaaccaaacaagtagacaagccagcataaatactcgaataggtagtggaaatgcaagaatcccttcttcacaatccggtttgtcaagaaacaaagctatgcctgagaattcatggggtgaatcagctggaaatacaacaagatcattgagggacaaatggggaaaaaggcctgcctttgcagcacctgacacaactacacatagcaaaaataatactggttggcagactggaaatgcttctgagcatatccccccagaggttgatgatggtgcccggaatggggttatagtaccaaacattagacatgaggcctctgacataataacagggtctggctcaacagcatcaagaactagtcaagtgccaaatgattttgaaccatcacagattggcatgcctaatccactgtttgcacctctttttattggatcccctcagcagagacaatctggtccagcggttccttttttgatgttgccatatgctcctgggaatgatggatctgttccacagtttgagaggaatgaaggggttgatcaacttcctgtcaatattgctgtccaaaattttagttcactcaacaatgttcaccatcctgatatcaatgctacctcaacagcttcatccagtactgcaggtgatccatctgaagagcaaaagcctgacattttgaacagcgattgaggaatgaattggtgtaatttacaatatggacggtcatgccaaaacccgcgccccatgaatcctgtgttcaccatcctgatatcaataccaatgtatttgcagggccatgttccatgggatgggcctggcagaccagcttcaacaaatgttaactggacccagatggtcccccccagccaacgaatctatcctatgatgcctctacaaccttcttctgaaagaattactggtggtccacagcaccacacggaggatgcgcccagataccgtggtggcacaggaacttacttgccaaatcctaaggttccatttaaggaccgacactcaggctcaagaaaccacagaggaaattataacactgacaagggtgaccataatgataaagaaggaaattggataaattcaaaacaacgaaatcctggccgcagctatggacgtagccactcagagaggtctggcatacgatcggatagacaagcagcagatgaaaaccagtatgataggcagcggcgatcttatagaaatgattcatacaggcatgagacaggcgcccaatcttctggatcaacaaactatatacgcagaccagggaacatgacacatggggatccatcaccatctgcttcaaatggtatcggtgccctttctgggtcttcagctccatatttcatgtactactcatgtgaaccaggcacaaatcacggttcttcatctgaaccacttgaatttggttcacttgggccagttcctacagctgatggtggtgacatgccacgacccactcgccaagcaatgcccaatgagttttatgggcaaaggcatgttgcatttaggggtggctcctctcattcatctcctgatcaaccatcatcacctcaaactcgcaggtccggtccgttctgatctcctaatctgatggctggtcgcattgaatccggtgcttatggttggtttggtgatgagctacccaaaaagcaattgtgctctggcagctgataccgaatacttttagcggcctcaccagaatttacttcagtccgacgatacatcagatttatcatagcactacctgatatcggcagcaccaaccttctgatttctgaacaagccatacaacttggaaccctgaatatcttcatgaagaattaacctaaaggataagctcgaggattaactgagagtgccacccttctctgtaatattaccgtcaaaagatgactattaatgctgaaggaaggagaaggattggcttttcaaccttgaaaagcatggaaaattattggtggacaaatgtaactgaatgaatgagatattctcttgtctacaggtagaagagagatcgtgtactctagtttacatacaacaaaacttttcacattagatgtactagattttaggcgaatcctcaacagcaaattgaacggttctgtttctagcatcctttgactcagtaaaaaaattaaagttggtactcacaaaaaaaaaaaaaaaaaaccaggccccgagcccggttctccctctgacccactcg

SEQ ID NO: 82968 - DNA, 2123 bp, Oryza sativa
  Clone ID: PAT_MRT4530_82345C.1
gctcgagccccgggctgcgggttgcggcacgacgctcgtcactgtcatcccatcctcctccctctcctcaccttcctattatcctttgcggatccagcttcgccttcccacgcctacgcgcctcgccatcgccgcacggcgcaaaaaggcaagcaaaggcgaacgcgccgcccgtgcgcctcccctcccatccacacgtttcgctctcctcctcttccgatccgtagcggcggcagcggcagcggcagcagcagcagccgccgacacgcggggggcggagcagagctcgcggaaccctacctcttgaggcttcttatctgcttcagccgagagggggggcgaggcggcgatggcggcggccgtgcgggacggagcggcggtggcggggtacatggcggaggatgaccctgacggggcggcttcggaagacggcgatatggacgtggaggtgggcggcgaggagtcgcaggcgcgcgacggcgacaggagggacggcggcgacggcgacgacgagtacgcgctgctcactaggataactgatacatcagcagctgaagcaagagcaggaaaggatatacaaggtataccatgggagaggttacaaataaccaggagcgattacagaaaagctaggttggtacagtacaaaaactacgaaaacttccctcaatcaggagagctcatggataagatatgcaagcaagtggataagatcagcaagtattatgaatttcactacaacactagattagtgaagccatcaatcctccactttcagcttaggaatttgttatgggcaacgtcgaagcatgatgtctacttcatgtcaaattccacagtaggccactggtcatcattgtctcacaatctatcagaggttcttgatttctccgggcatgttgctcctgcgcagaaacaccctggcagtttactggaagggtttagcggggttcaagttagcacactttcagtgaatgagggtttattggttgctggtggttttcagggagaactaatttgcaaggttgtgggagaccgtgatgttaagttctgcacaaggacaactttaagcgacaatgctatcacaaatgcgatagatatacacagatctgcaagtggaagcttgcgtgttaccgtgtccaacaatgattgtggtgttcgtgaatttgacatggaaacatttcagctcttgaaccacttcagttataactggccagtaaatcacacatctgtgagccctgataggaaacttctggcagtagttggagatgatcgggatgctcttcttgttgattcaagaaatggaaaggtaacctctaccctagttggccatctggactattcgtttgcttcggcatggcaccctgatggccgcaccttcgcaaccggtaaccaagacaagacctgccgcgtctgggacgtacgaaacctgtcaacctccctctcagtacttaggggcaacattggcgctatccgttgcatccgctactcctcagatggccagttcatgctcttctcggagcccgctgacttcgtgcacgtctacagcgccgctgcggactacaagaagaggcaggagatagatttcttcggcgagatctccggcatctcgcttagcccagacgacgagtcactgttcgtcggagtgtgcgaccgtgtgtacgccagcttgctgcactacagaatggtccactcctttggatacctcgactcgttcatgtagagagggaataaaagtggtgtttctgtatgtgataggccacccatctcggtggcgattctgatgtgcgtgttcagggaatgtatctgcctgttcaagtgcatgtttagtcaaaggctcaagcgtgcagcgtgatccttgccttgtgaatagttagctagtaaatcatagactgtatggaccaatactctctctgggcaataatgcagaagtaatctatatcttcggttgttggaaaaaaaaaaaaaaaaaaaaaaaaaaaaaagaaaaaaaaaaaatcgaactaaaacgtgataattgccctgttcttttgaccacttgagagttgagataataagtgtagtaaatcctaaatctattttattacttaattacggttaagttctatccaaaaaaaaaaaaa

SEQ ID NO: 82969 - DNA, 436 bp, Oryza sativa
  unsure (1)..(436): unsure at all n locations
  Clone ID: PAT_MRT4530_82346C.1
catctctctcgcgatctcgccgcgccctcgccggaggagcgaggaggagatggaggcgaccaagacgcgcggcaccggcaatgcggctgcggcggcggagaagaggagggggcacggatcgacggcgctgttcgtggcggtggactacgccttcctgctcgccttcgccgggttcctctcctacctcgtcgtctcccacctcctcccctccgtcgcctcctcctagatcttgctctgttttccctgtttttgttatgtttctttttttttttcgtttgctcgatcggatccgacgcgggtgacgtcacttcagatcgctcgtcgtcggatgcatgacatctccgatgtgtaattccgtgtaatgggatgagaaaccagagctgcagttcttngaaatttggcatggattcaagtccttgctgcnaaaaaaaaaaaa

SEQ ID NO: 82970 - DNA, 190 bp, Oryza sativa
  unsure (1)..(190): unsure at all n locations
  Clone ID: PAT_MRT4530_82347C.1
cggggacccagccgattcgcccagccacgccaccgagcgctcgtntcgtctcgtctctcgacccaatcccgtcccccggcgtgacgncccgccgcgcgatggccgacgggccanagcagcggggccgcctcggctccggccnggtggcgggggnggcggggagtcggtggtgatcgantacggccgncgc

SEQ ID NO: 82971 - DNA, 159 bp, Oryza sativa
  Clone ID: PAT_MRT4530_82348C.1
gttgtggcggcttgacggcaaggtcgggacgcgcgccgtggtgaagcacagactccccgtgtccgccttagagcttgaccagcttaacaagctttttgccaccaacggccttacccagaccgacatgatcgccctcttaggagggcacacgataggggt

SEQ ID NO: 82972 - DNA, 592 bp, Oryza sativa
  unsure (1)..(592): unsure at all n locations
  Clone ID: PAT_MRT4530_82349C.1
cccacgcgtccgcccacgcgtccgcccacgcgtccgcggacgcgtgggctacaacactagattagtgaagccatcaatcctggacttgcagcttaggaatttggtatgggcaacgtctaancatgatgtctacttcatgtcaaattccacagtaggccactggtcatcattgtctcacaatctatcagaggttcttgatttctccgggcatgttgctcctgcgcagaaacaccctggcagtttactggaagggtttagcggcgttcaagttccaaaatctccccctccgatttcgcgcggctgcggtggtggtgcgtgtgctgctgccactgacgttgcggcgggagaccgtgatgttaagttctgcacaaggacaactttaagcgacaatgctatcacaaatgcgatagatatacacagatctgcaagtggaagcttgcgtgttaccgtgtccaacaatgattgtggtgttcgtgaatttgacatggaaacatttcagctcttgaaccacttcagttataactggccaggaaatcacacatctgtgagccctgataggaaacttctggcagtagttggagatgatcgggat

SEQ ID NO: 82973 - DNA, 1245 bp, Oryza sativa
  Clone ID: PAT_MRT4530_8234C.1
atggctcgacgaggaaaggggccatccaccgtcgccatcatcgtccctgccttggccgccgagaggaggaggagaggtgcggccgtgggggtcaaggacaggaggagggcacaggggagagggattgggtggccattagcagccacgagcgaaaatcatattttcgttggcatatgtttcgttctggatgtggaagatgaatgtttggttgtagagatactccaagaaatgccattgacaagcgtccaagtcccagaaatgccatcgataagtcatatcactaacagtcgtcaatcagccggggtccctctccacgcgaggtcgccgccggccgctaggtctctctccatgtgccgctggtgggaggccaacgaagatgaagaatcgcccgtgggccctccccgcgcgaggtcgctgctggccgctatgtccctctccgcatgccgccggtgccaggctgatggagagggagaatcgctcgtgagccctctcctcgcaaggtcgatgccagccgccgggtccctctccacgcgccacccatggggaggccgccgattgcgcgtggcggaggggaagagggaggggagggtggcggcggaggcacgggggccaaagcaaagcctagtatgtccaccaccatctatcatcctctttcctcaccacccatgtacccagtccgggacactccagaggtcctccatcaccagcgcgtccgtccggcggcaggctcgggcgatggcgtcggctgccaggcgcgagcggcggcggcggtggccacggctctggctacgggatccagagctcgagcggcgacgggcaggcgcgggcggcggcggcggccaaggcgcgtgcgacggcatcggcggccaggctccggcgacggcgtccaggctagagcggcggcggccaggcgcgggcggcggcgtcgccggccatagcgcgggcggcggcggctgccaagcgccgtcatctgcgtcggcgttgatggccatggagcttgtagcggcgggagtggcgacggcaaggggcgcggccaaccgcgtcggcgtcggcgtcgacgtcaagggcaagcatgtgcagcggcggcgccggcattcctcatctcgcgaccacctcgtcgccgtctgccatgggtggtgcgggaccccgctcacccgcgggtcccctacgggggcgaggacgggtgatgtttcccacccgaccacctctacgggaccggggccggtgggagaagtcggggagtag

SEQ ID NO: 82974 - DNA, 334 bp, Oryza sativa
  unsure (1)..(334): unsure at all n locations
  Clone ID: PAT_MRT4530_82350C.1
gattggagagaagaaggcagaacagaatgtcaactcgctgnagggttcgagctggttgacaagatcaagcagaagctggaagctgagtgccctggaacagtttcctgtgcagacttgcttgccattgcagcgagggacgcagttgtgctggttggtgggccttactgggatgtcccagttggaagattggactccaagaaagcaagcctggacctagcaaacagggacattcccactgctcaacagggccttgtcaccctcattgccaagttctgggagaagggcctcgatgccactgacatggtagcccttgtcggatcccacacaatcggat

SEQ ID NO: 82975 - DNA, 338 bp, Oryza sativa
  Clone ID: PAT_MRT4530_82351C.1
caacgcgtacaaagactaagacttcggtaaggcactcgaccaagaagcgtccaagggacaagggcaggctcacgatggggatggtgtacgtgacagagtacaccagctatatgcactagcagagaaagctctatcagatgagaatgttctaaatgacatggttatgacgctgcgtgtgatctggtcaggaaccagtgcgattaagcacatgatgtcgcaagagaccaccgaagaaggtgacaacattagctgggattgtgcagagcaagtgcctctgcctgacaagaagtgccgcatgagccactgacggacagcaactctggatcatgacttcctgg

SEQ ID NO: 82976 - DNA, 185 bp, Oryza sativa
  Clone ID: PAT_MRT4530_82352C.1
ggaaaacgggggcagtatataactatctatatcaagtataaaggttgaccaaacagcaaggaggggggttcgtcataaatcaggagcaaacaatatgtgacagcgatcgacctgcataaaacaacattttttttttgagggggttctacgttaaaatgaaactgacaagctgcccggacccgtgg

SEQ ID NO: 82977 - DNA, 1471 bp, Oryza sativa
  Clone ID: PAT_MRT4530_82353C.1
taggatcatccaaagaaaggaacagctgcaacttttttggtcagaaaatggctacaggtgttctgtgctccagggaatttgctctctgcctggcttgtgtgctcctggccgtgccattgctagtggctcaggacccttcaagcctgagcttggagcactactcaaagacctgcccgaattatgagcatgtcgtccggactgagatggaatgtgctgtgcgtgcggattcccgcaatgcagctctgatgcttcgtcttcatttccatgactgtttcgttcagggttgcgatggatcagtgctgcttgacgacactgcgaccctgattggagagaagaaggcagaacagaatgtcaactcgctgaaggggttcgagctggttgacaagatcaagcagaagctggaagctgagtgccctggaacagtttcctgtgcagacttgcttgccattgcagcgagggacgcagttgtgctggttcatattagacattctattcaagaaaacatgaacaggcagacatacatttcaggaataactcaatacaccatcgagaaattcaagcacccgtttcacaataactatctattacctcataaaatcattgtctccattagcatattgttttgcctgcaatcatgccagcatgtagaacttgcaagcaatcaaagaacggttggtgggccttactgggatgtcccagttggaagattggactccaagaaggcaagcctggacctagcaaacagggacattcccactgctcaacagggccttgtcaccctcattgccaagttctgggagaagggcctcgatgccactgacatggtagcccttgtcggatcccacacaatcggattcgcccggtgcgccaacttccgggacaggatctacggcgactacgagatgacgaccaagtacagcccgatctcccagccctacctgagcaagctcaaggacatctgccccctggacggcggcgacgacaacatcagcgccatggacagccacaccgccgccgccttcgacaacgcctacttcgggaccctcgtcaacggcgagggcctcctcaactccgaccaggagatgtggtccagcgtcctcggctactccacggccgacaccgtcagcaagtactgggccgacgccgacgccttcttcaagcagttctccgactccatggtcaagatgggcaacatcaccaaccctgcaggtggtgaggtcaggaagaactgcagatttgtcaacacatgatcatatgcatgctcaatcaaaaggactgcacatttgttctttttaatttgatggctggcttgtcctagatagaaataagaaatgctttgatgatgaggcccttgtactggtacatataatacgcgttgttgtcattttgtcatcactctacaagtatgttacatggagatacacatgataaggtactcctggcttttgcacaaaaaaaaaaaaaaaaaaaa

SEQ ID NO: 82978 - DNA, 570 bp, Oryza sativa
  Clone ID: PAT_MRT4530_82354C.1
atggcgctccgatgtcggtcccacgtcgtcggtgccgaactgtttgcgcacggcgaagttgccccacgacggcttgaggacaagagagagagagagatgacgccggtggtgttgacctcaacggccatggtgatggctgaggcggtggcgagtgagaagctcggcggcgttggcttcaggaggaggcggcagacaccggcggctggggcggtcggctcctgcatcgaggaagaagctcccttggatgtcggctggaggcccgtggtctcaagggcagcggcagacctcaccggcagggtctcggagacgatgacagcaggaagtcgaaccccctgcgcggcggcgtcgggaccgaagtggttttcggcggcagcgcgattaaacgatgaggcgtgcagctccggagcttggtggtcaggcaggaagaggtgcggcgcagcaggtgggcggcgacgcgcttgggccgagaaagaagagcacggggaacgaggaggccgaaaaaagaggaagaggaagggggaaaaaggagagggaggaggggagaggaaggataaaggaggaagaggatga

SEQ ID NO: 82979 - DNA, 681 bp, Oryza sativa
  Clone ID: PAT_MRT4530_82355C.1
gcacgagggtgatcccggccgcggggactcggctcgtggggcgaaataatttccccacctaccctcgtcttctcctcgtcctcccctcctccatcgcgttctccccctcccggtcgcccttcccgtcgcctcctccccgtccggcgccggctccgctcctcctcgccgcgccgcaccgcttctcctcgcctcgccgcgcctcctctcatctcgcgtcttgtgcggcggcggctgttgctgctgctccggcggcggcgagttgcggcgggcgtcgggcggtggcgcgggccctggatttggccaccaccaccggcctcgccgccgcccgctgcggagatggagaagaggcgggttgcgcggactcgggagcggtgggggcggcgggagtggacgacgcgacgccgacggtggacgcctcctcttctctgatgctccggccatctctcctctctcttctcgtcgtacctgcaaccctcctcagccaaagaaccacaagagagctcaggtagcaagcagatagaacgggtaaaggtagcttcggaatcaagaagaagaagaagagggaaggagaaggaggagcaagagcaagccatggaggagccggcgacggtcgggagggcgcggccgaggaggtagtaggcggcgcagagtggcacgatggcagccatggcgggaagcgtg

SEQ ID NO: 82980 - DNA, 1203 bp, Oryza sativa
  Clone ID: PAT_MRT4530_82356C.1
ctgcaggcccccccctttttttttttttctctcttttcgggttccgcaccgcggcagaccagctgagtctttttttggcatacaaatctgaaagaacaaatcctttttagagctaaccattttgatacattggcatgataataatacaccgagacaaactcacaaacacataccccgcagaaaatcagctcaaccatgcagcccccacccaaacgtgctgtccaggcaccaaaatcttcctactgaaccaaacttataaataagataaaaaagaggtctacttcggagaaacctcagaacacggtaaacatggaaaatatagcacggtagcaaactaatcttcgtccattccaggctgagcatctctccttggccctcctgctggctttgccatgatgatctggtcaacccgcagtacagtacatgcagcatccgcagagtattttagagcgaataactttgtaacataaaggtcccatattttcatgattgagacatccttgcaaccaccttcttccaagtcaataccaactttcgtattcccaccagcatgttcagcataaagggaagatattatctccatagcactaagcccagcattttcagccagggttcttggaaccatttcaaaactttcagcaaattttgcaatggcatactggtccaaccctgtttccttcagagaaaattccttcaatctccttgccaattctatttctgttgcagcagctccaggaataatccgactatccctgcacattgacttgtaagtattcacaccatcatcaacagctctttcaagatcatccaatatactatcggtgctgcctcttaagacaaccgtagccactgagtttccaccttcttcattcttgacaacagttactcgggcaccaccgatctcttccaccgaaacagagtctgcatatcctaattcatccgcatttggtcggctgagtttcaaaaagtgcaatggaccctgtagtacggcaaaatcttctcagttcaaattttgaactgattctaagaaccattagcttgtaacgctcacagaaatgcagtgccatgtcgccaactgctgctccgcgaacaataacctttgcacccgagtcagcaacagctttgataagctcctccaccttagcttcctcagtcttagcatagttttctagctgctcagcagaatgtatcaaaacagttccc

SEQ ID NO: 82981 - DNA, 600 bp, Oryza sativa
  Clone ID: PAT_MRT4530_82357C.1
ggatccccgggctgcaggaattcggcacgaggatctctctctctctcttcctctctcgcttcgcttttctcccccaaatcggatcgaacaaaattcgtaaattaatctcataaaaacacacacgaagcgaacggattcgaagagagcttaacacgagacggcttcgatcgatcccgttttggggagctaatcgtgtggtttttgttggattgttttttttgggtgttaatctagggttagggtttcggatctggacgattagtccccaaatccatccatgaatgaccccatgatgcggccaccggcgcagcagccgccgctgcagtaccagatgtggccgccgccgccgccggcggtgatggagttgccggtggtgttcgtcggggtgaagccggtgaggccggcgtggaagcgggtggcgaggcagccggggtggaagcagcggaaggcggcggcgtcggcggcggcggtgggggcgaggtggggcggtgcggcggcgccccgcaacacgacgtcgtacctgatccgggccaagcgggcggggggcgtggcgtcgctggtgtcgccgtgccccgtcacgccggccgtgctgccgacgcc

SEQ ID NO: 82982 - DNA, 515 bp, Oryza sativa
  Clone ID: PAT_MRT4530_82358C.1
atgggcgatgggcgggcggcgggcgagcgcgacggcgggtccgcgtccaggatggcctcgtcctcctcgtcgtccacgtgctgctcgtcggcggcgaagtcgaactcgttcgtggggacagaggactacgtggtgccggagatcgtggctgggagcaggcacgactacgccgtcgactggtggggcctcggcgtggtgctgtacgagatgttgtacgggcgcacgccgttccggagacggagccggcgggagagcggcaagccgacgccgctgcgcgacctcatcggcctcctcctggagaaggacccgggcaggcggctctgcgcccacggcgtgaagcggcacgccttcttccgccgttcatcccgacgcctgacgacgacgatgctggcgccgcggccgaggcgctggacatggagaaggtgctgcacgaggatgagaggaggcggtcggcgcgacggcgagcttggccaacgcggcgcggcggcggaggctgcgggaaaggagaggaggcg

SEQ ID NO: 82983 - DNA, 396 bp, Oryza sativa
  Clone ID: PAT_MRT4530_82359C.1
atggtgaagagaggtggaaagagcccaagctggccagcgcggccttgttgggaatgttgccttcatcgccgagttggccttgtcgcggcctccatcgtcatcgtcgccggcgtcatcctgctgctcggcgtcgcgtggttcgtccacaggtacaggaatcaaaggaagtggagcatgaaggatgctgccggcgacaagttgaggtgggtggtcacgtcgttccacaagccggagttcaacgaggaggacatcctgagctgcctcgatgaggaagtagtaggcgtcggaagaacccccagctctgactcgaagaagcaggcgaccccgtgcgacgaggatagcatgacgagcttcgacgaggctagcatgaaggagagcgacggggatgggtgttga

SEQ ID NO: 82984 - DNA, 1017 bp, Oryza sativa
  Clone ID: PAT_MRT4530_8235C.1
atgtgccgctggtgggaggccaacgaagatgaagaatcgcccgtgggccctccccgcgcgaggtcgctgctggccgctatgtccctctccgcatgccgccggtgccaggctgatggagagggagaatcgctcgtgagccctctcctcgcaaggtcgatgccagccgccgggtccctctccacgcgccacccatggggaggccgccgattgcgcgtggcggaggggaagagggaggggagggtggcggaggaggcaaggggggagggggcggaggggaggcagaggggtagaggagggtgcagcgagggggagggcgctgcgacagagtaggagcgagctagggatggcaatttcccccgtggggccggggacccgcaagggatccgcccctacgggggcggggacgggtggaattttcaacccgcgaggagtcggggttggggccccggccataggcggggatgggggcgggggaggacaaccacccacgggtgggccaggctcgggcgatggcgtcggctgccaggcgcgagcggcggcggcggtggccaggctctggcgacggcatccaggctcgagcggcgacggccaggcgcgggcggcggcggcggccaaggcgcgtgcgacggcatcggcggccaggctccggcgacggcgtccaggctagagcggcggcggccaggcgcgggcggcggcgtcgccggccatagcgcgggcggcggcggctgccaagcgccgtcatctgcgtcggcgttgatggccatggagcttgtagcggcgggagtggcgacggcaaggggcgcggccaaccgcgtcggcgtcggcgtcgacgtcaagggcaagcatgtgcagcggcggcgccggcattcctcatctcgcgaccacctcgtcgccgtctgccatgggtggtgcgggaccccgctcacccgcgggtcccctacgggggcgaggacgggtgatgtttcccacccgaccacctctacgggaccggggccggtgggagaagtcggggagtag

SEQ ID NO: 82985 - DNA, 363 bp, Oryza sativa
  Clone ID: PAT_MRT4530_82360C.1
atggaggagcagaatgccaggcgcggccgcgggcagggaaatgatgaggagcagaggtccatggccaaggagcttcggatcaaggctaaggaccagctcaggtcgttgtggtggacattctcgatgaaggtcaagtacaacgacttcaccacatgcatgtgcggcggctgcaacaataagagggccgcagcagagtacacggtggccgagttcgctgtgcacggcgacggtgatggtccctccacctccggccacctccgccgcccgcggcctgccgactccccctcccccccaccgctcccgccgccgacgacgccctccccttctttgcgtcgccgccaccggcagtcgaacctctcgtga

SEQ ID NO: 82986 - DNA, 343 bp, Oryza sativa
  unsure (1)..(343): unsure at all n locations
  Clone ID: PAT_MRT4530_82361C.1
caaaacccaaatccccacggcctccacggcctccactccccctccccctccgccgccgccgncgncgncgcccatccccgcccgcatccgcatccacatccgcatccttcccncacctcgatccccgccctccacttagccctagaacccactctgcccgccgnccngggaaaccctagcagnctcgtccgggcggggcgnggggtgggggtgggggaggggagaagcatngggggccctccgncgaggaggagaaaaccagcttcggggaggtgagcgaagtgagaggggagncaagatgaggatcatgataaagggcgtgntgtggaagaacacggaggac

SEQ ID NO: 82987 - DNA, 196 bp, Oryza sativa
  Clone ID: PAT_MRT4530_82362C.1
aatggaatacccccaatgttatgatgacatctggatgggaggatcaattgatgggctggtttgagtccgggaggaccctgtgcacgctatgctgtcgcaagatgcgcaaatgccaatgccgcaagtgcaacacaaactggaaagtggaaatggatggtgagcatacgcagctgccctgcccaagaaatgagacatg

SEQ ID NO: 82988 - DNA, 1911 bp, Oryza sativa
  unsure (1)..(1911): unsure at all n locations
  Clone ID: PAT_MRT4530_82363C.1
ctcccggcgcccgctcctcgcttctctctccgcatctgcctccgcaactgcaaacccctggcggtctcggaaaccctagctctcgccccctcccctccctctccgcccgtcgccgcgcgggtcgcctcctcctctccgccgccaccgccgccgctgacatgggctccgatgcggacatggaggattacgggttcgagtactccgacgacgagccggaggagcaggatgttgacatcgagaaccagtactacaactccaaaggtatggttgagacagaccctgagggtgcacttgctggcttcgatcaagtagtacgtatggagcctgaaaaggctgaatggggtttcaaagctctgaaacaaacagtgaagctgtattataagcttgggaagtacaaagaaatgatggatgcctatagggagatgttgacatacatcaaatctgctgtgacacgtaactacagtgagaaatgtataaacaacattatggattttgtctccggatcagctagtcaaaacttctctcttctgcaagagttctaccagacaacactgaaagcacttgaagaggcaaagaatgagagattatggtttaagacaaacctgaagctttgcaaaatttggtttgacatgggggagtatggccggatgagcaagatactgaaggagctgcataaatcttgtcaaagagaagatggttctgatgatcagaagaaaggcacacaacttttggaagtctatgctattgagatccaaatgtacactgaaacaaagaacaacaaaaaattgaaggaactatatacaaaagctctttccatcaaatcagcgatacctcatccaagaatcatgggtataattcgtgaatgtggtggaaagatgcacatggctgagaggcaatgggcagatgctgcaactgatttctttgaagcattcaaaaactatgatgaagctggcaatccgcggagaattcaatgcctgaaatatcttgttcttgcaaatatgttgatggaatctgaagtgaatccctttgatgggcaagaggctaagccgtacaaaaatgatcctgagatcctcgccatgacaaacttgattgcagcatatcagaagaatgacatcatggaatttgaaaagattctaaagagcaacagaagaacaataatggacgatcctttcatccgtaattatattgaggacctattgaagaacatcagaactcaagttctgctcaagcttattaagccatatactagaatcaggattccattcatttcacaggagctaaatttcccagaaaaggatgtcgagcagctcttggtctcactcattctggataaccgaatccagggccacatagatcaggtgaacaagttactagaacgtggtgacaggtcgaagggaatgaggaaataccaagccatagacaagtggaatactcagctgaagaacatctaccaaacggtgtccaacagagttgggtgagagagatagcaggatgcctgggctgcactgcgcttggcacctgcttgcacgttttgttgtggtgggtaaatgcagcgagtgtttggtgcgtgcattacatttgagataggctcttggataggtaaagaaaaaaacagtctcgtgtattaaacatggtactcttttgcgcgccatgtgaagatgctgggattttgtcctgaactgaatctatctgcaaattccaacccctctgaaactatactagcgtcaatggctcgaaacttttggttttgttggcattgccgcactagcaaattttggtatggtagagagaatgtttggttccgtgtaaaatatgcaccaggtacaagacatactgctaatattgtgccgttgccgagttctgatagtgttgccaaccaatcactttcaaatcaaaaaaanananaaaaaa

SEQ ID NO: 82989 - DNA, 552 bp, Oryza sativa
  Clone ID: PAT_MRT4530_82364C.1
gagctgcataaatcttgtcaaagagaagatggttctgatgatcagaagaaaggcacacaacttttggaagtctatgctattgagatccaaatgtacactgaaacaaagaacaacaaaaaattgaaggaactatatacaaaagctctttccatcaaatcagcgatacctcatccaagaatcatgggtataattcgtgaatgtggtggaaagatgcacatggctgagaggcaatgggcagatgctgcaactgatttctttgaagcattcaaaaactatgatgaagctggcaatccgcggagaattcaatgcctgaagtaatcaaatcatctgcatttcttttccattttaatttcgtatattgataaatttagaacttcctcatccttttttattgtactgcatattagatatcttgttcttgcaaatatgttgatggaatctgaagtgaatccctttgatgggcaagaggctaagccgtacaaaaatgatcctgagatcctcgccatgacaaacttgattgcagcatatcagaagaatgacatcatggaattt

SEQ ID NO: 82990 - DNA, 208 bp, Oryza sativa
  Clone ID: PAT_MRT4530_82366C.1
tcgaagatccaaagatgctgcttattccacaagggaaattgggaccccatcaaaaatgaaaggattaagcttaaagcgtgacatttgagcacatgtggcatcaggtcggcctaaaaccatcgtgactttgatccaattcgagagaaacttaccaaggacttgccgaaccagaggaagctcttttagattcagccattgaagaaacctg

SEQ ID NO: 82991 - DNA, 798 bp, Oryza sativa
  Clone ID: PAT_MRT4530_82367C.1
atggtgtcgaggacgcccacgaagcagccgctgtccccgctgccgagggcggccagcggcagccccaccaagccgacgccctcgccctcgccctcgccggcctccgccaggcgccgccgcgtgctccgccgcgggagccccgggaggatcaagtcgctcgccgcaacgttcgacacctccctccgcggctgccgccgccgcctcctcaagctcttcgcccgcctcgccgtcctcggctcccccaccaagcgccgcgccgccgccgccggcttccgccgcctccgctccccgccgcggtcgccgtctcctccaacgcccaagccgaatcaggtagcggccgtctcgccgcagctcccgctcccgctcccgccggtgtcgccggggaggaggacgctgttcctggacctcgacgagacgctcatccactcccagaccgacccggcggcgcgggcgcggcacgacttcgccgtgcgccccgtcatcgcgggccaggcggtcaccttctacgtcgtcaagcgccccggggtcgacgcgttcctcgccgcggcggcggccgcgttcgagctcgtcgtcttcaccgcgggcctccccgaggacctccgccgcgccgtcatcgtcgacgacaaccccaacgcctactcgctccagcccgacaacgccgtgcccgtggcgccgttcatcgacgacgccgacgaccacgagctggagagggtgatggggatcctgtccatcgccgccgagttcgacgacgtccgcgacgccatcaagcgctacaaggaaatcgtcgaggcgagctga

SEQ ID NO: 82992 - DNA, 579 bp, Oryza sativa
  Clone ID: PAT_MRT4530_82368C.1
acgcacgaggccaaccgcgtagaccacgttggcacgcggccgccgcaccagtccccccctccgccgcagcgcaatgcaccaccagatttggcgcctcctccccagcgccctctcgccgatccacgccggagctccccggccgagccgcccgccggcgcggctaggccgcccttcaccgcaacgacggcgggcgctcgcgctcgcgctcgcgcacctcgccacccggcgcacatgccgcctcctcgctgtctccgcccagtccgccagcccccacgccggcttgaggtccgcacttactcgtcgaatttccttcatcgctattcatggaatctgaggaagagttggaattgtggtttgtggtggaatgtaatacctggtacccttactggatgggaggaacaatgccgcacagctaaactggtgttaatttgggggaagtgccaattttatgccttctagtgctaaagcttgtgaattcagtttttggattatgtgatgtgcattgtaatgccgaattatgtgttagtctttggctaaaacttttgtctatgatcccctgagtagtccaaaaaaaaaaaa

SEQ ID NO: 82993 - DNA, 602 bp, Oryza sativa
  unsure (1)..(602): unsure at all n locations
  Clone ID: PAT_MRT4530_82369C.1
ggcgtgcgtgacaggagggtggcggcactcgcggaggacgagcggctctgggaggccgcgtgcgtgcgggagtgggcgaacctcggcttctccgagcggcactccgggccgtggtgctctcccgcggtggattccgccggctccacgctgtctacatccgccccctgcagcggcgtggcgccggcgtgcccaggcaacaggggaggcggcagccgccggtgaggttgggccgggaccaggttcagctctcgctgtcactgttctccattgggttctttcagaatatgccttgtcctaagaaagacggccctaagaaagacaagggaaatgacagtgataagaatggagggggccaatgcgggtagtcgaatttgtggaataagcttcactccaacaagcatcatcctaagctaccatggcagttgccctattgttcacactggtgatgctagagagtgttggagagacgaacaggaaaatcggcatgcttgatttggggacatgagagaaattaagtggaattgcaagatctgaattggttcggttgtgttccgcacttgtaagatttatgtgatagtgtcacatggattganggacgttga

SEQ ID NO: 82994 - DNA, 184 bp, Oryza sativa
  Clone ID: PAT_MRT4530_8236C.1
ggaaaaccacgctttagccaaacatttttttttttttttggggcagttaggttccgttcgttcgacacgatgacacatgcgcgaggtgggggaacaagttgttgccctagctggtggttcatcgatcaggggcagggtttggtgcacattcaatgggggcggacatcttggccggacccttggg

SEQ ID NO: 82995 - DNA, 430 bp, Oryza sativa
  Clone ID: PAT_MRT4530_82370C.1
gcacgagggacacactgccacagacacaatccatagcttagctcctctccactggagggatcgatcgatcgatggactgggcgtactccggcaacagctacggctacggctactactcgtcggggacgtcatcccctccggcgggcggcgaggacgcgtacatgacggtgtcgtcggcgccgcctaagcggcgcggggggcggaccaagttcaaggagacgaggcacccggtgtacaagggcgtgcgcagccggaaccccgggcggtgggtctgcgaggtccgggagccccacggcaggcagcgcatctggctcggcaccttcgagaccgccgagatggcggcgcgcgcgcacgacgtcgccgcgctggcgctgcggggtcgggccgcctgcctcaacttcgcggactccccgcgcaggctccgcgtccc

SEQ ID NO: 82996 - DNA, 348 bp, Oryza sativa
  Clone ID: PAT_MRT4530_82371C.1
atggagcccctgtcattccctcataaatgggtgaagacttgtggtggacgtccttctcgtggagggagctccgaatcacgctccgatgggacgggtcatacctacctccactccgccggggacagaggcgacgtgggggcacggccgcccgtccagtcagacgtgaccggcgataggccggtcacagaccgttggggcgccgcgcgcattgatagcggttcagcctgggtcccctccccgcttgctgtccccgccacatggcagctggacgggggcctcggggcaaggcggcgcgagggcccgaggggcatgacgtggcaccccgaggcctctcggccgcgtctgtga

SEQ ID NO: 82997 - DNA, 209 bp, Oryza sativa
  Clone ID: PAT_MRT4530_82372C.1
agcccgagagctaactgtgcggcgtgctgtggaggtcgagggaatagtgaagctccgaccgctatacgcatcaaggcgtggggtgctaggagcagcacttcgaccttaggtttggtttttgtcgggctttacaaccaacggtccgacgtcgaggatagtaaaccgcgaacatccccatggaaggcgtaaagttccaaccggcggctttt

SEQ ID NO: 82998 - DNA, 7478 bp, Oryza sativa
  Clone ID: PAT_MRT4530_82373C.1
aaataatattccagagattgatcaattgtgaatacggcagagattgatcgtgagggataacaattgggcctcgtactgagctacagtgtacatataccaagcataactcataaattttgagtttagtaccccaaattttaaacccaacccacaaaaatgtggggccgtttaccaccccagatccacatcattttcggagttctttgtgatgtgatctctgcttacatttactctctgtgatctcagctgcaagaactgcatgtcattttagtacatatcatgtcacacccagttctttgaagggcagactacatcagggaatacaacctctcgaaacaaactgatcatatgctactacaggtcgcgtcaagtcacaggttattgatctctctactcaagacggcgtgaagttcatagcagacaggctacgtgaaggtgtcctccctatcaccttccgcgacctcgccctcgtcgatgttgctgaactcgaggaaatgtgtcggccgatggtcctcgtgatagaagtccctgggcgtgccaagcttcatgttgtacttcatcagcgggtcgtgcttcactcccatgaagttgaagttccaaggggtgttatccggcaccatgtagaatcctaggaatctgtcactgagaagcatctggaccttctcgtagtgagtcgggagatatccatgtgggttgcttccactgtccttgttgctacggccccactcgtaaccacttggcgtcaacttgtacgcggtcaatgaacaagatcctggggtaaagctgcatgtcaaaatgatgcacttctcaccatcccattgcttgttgttctccaagatcttggcgtgcgatgtcaaatcctgtggtgatagctggggagcttcattaggctgggtatgcatccagcccagtggctccaaatcattaaggaactcgtgctcaggaaggtttgcaggcagtgtcaccatctgatgagttccgtgctgtggaggaatagctatgcatctgatctctttaacttgggggttatcctgtggactcagcccatatagaaaacctgcaatctgtgtccttaaatctgctatgcatatgaacttctttaatatattcttcggcataatgtaagtgtagccagtctcctttatatcatctgaattaacataaatgtgattaacacgaagatacaagttcgtggcagagatggccctgacacgccaatcagtctttgatgcaaatgcttgttgctcatacggactggtcgtcgtgatgatgagctcatctccatgcacattggttgtccttgtagtaactgcagtcagctgagtcgtctctctagactgtttctcaatttcagctatctgttgcctctgctgtgatggtggagctatttcagcaccaagtatgatatcacgaatttcagattgtgtcaatgcagaagtattaacattgtttttcttcgcataatcagacagaataaggtccctgagtgcacattcaaccttcagccattgctcatcagtcaaggttggccaaatatgatgtggttccgtaacaatggtcttgtcaggcttgagcagcatctttgccttctcattattgacatgaagtgcacgcaatataagcacaatccgagagaaagcagtgaatgatgagatactcttcaaccaatcatcatatatgttgtacagaaccatctggggttctgtagccttgagaataagatcaccaaacttctcaatcttcaaacaagcttggaatggcagctgcaactcactgcccttgataacgatgttagggaagtcaagcagatggacctccaaaggatccaacatgcccttccttgtcacaatgatttgctttggctgctcttctacaggaagcgaccgaactaatgcagcaacctcttcagctgttttccacttggccagctgtccaagacgcttttgtccagcccatacacttgtgtggatgaccttcagaaataattgaccagttcttggattaaaaataaaaatagcaccattgattggtttagtggtcaagttaccctcgaatgttttgtgaatggtaactcgatagacatttgtgtcatccacaaaccatatgatctgattgctgaatatctctccatagttctgtgaagacaaatatggctcagtgggttccgaagaatacagttgtagacccttccttattctctccctcagcacgtacagagcaggatttgacttcattatcttgttcattgcttgctgaaggaggggctttgacccagggaaccaattgccaaaagcagagtgcaaattatatgctagatcaattccaatcatcaccccagttggagatggatagatagacatattgtcagtagtgtagtccatgaacttggcccttgtataacgctcaatgtcatgtgaatcatagtctccccagcgtagttgcacatcaatccaatacttgttactagctttctgatcaaagacatcctttgactcagagactaagcttggtttggacatctgccacctatgtgccgcaaaaaggaggatatctgcacaggagctgttcatcttgtagctctttctcggatgtattgtctctttctgcactgtctcaatctccagtgcatccagctcttgatccaaaacttggcaaagatccataacaacactttcatggatcttctgccacagatgcgcacggaagatctggattaaagaaatcttcagggttggaattttcccatgcatgaaaatcccggtaagatctagctgaacctggaaaccaacatacacatttgcacgattgatggttggtgaccaccacagggtaaatcttcggttgggtatctgattgagaccagaacgttgtgcattagtcagcttcttgtatttcatggactcctcaaaacctgacgctttctcccaaaacagaccctcccaagtagggaaatatgttcctttaaacaaggtgtgttccaaaataccctcaacaccaccaagagcttggatgacatcagtcctatagttgtttaggttccatagctttccatcatgtctctgatgtgtccaccagaatgggttttgtttgagcacttggtactgcttgaaatctgttctcactctccatcccttatcatatgccaaagtatgacggtctttttggaaaagagtgttgatacgaggaatacctctatcccatgaatcttcaagatcctcaagtgtcaaccgtctgttctgtgattgtgcttcctgcctcttcaaagcatactcagcccaaacccgctgtgaatcaataaactcactctcccagggctgaatgtagcgatataagttagggataagctggtcctcttcatggctcataccactccgaaaatgtgtcacaccaacatctgtctgtttactgtacctgaggtcactctgtggtatcagaatgtgacccatcgataacattcccagacctccaatttccttgggtgtatagaagataacaggcggaaacctgctaggcatttttgagttcaggccaatctttatgcgagtctggatcttgttttcacatttgacaagtaaatccaagagctcctgggtatggacagttgcttcccggaaatatgtcataagaccaatgagagcggtattccacttgttaacaatcttagtgaatgtagtcgaccctgaggacataaggatttgcctgacacggttctcaaacactttcatatgttcatcatcaactcttagaaaggcaatagctgtcctttcttttgtctgttcattctgcaaattccagactccatctttggtgttactaaacgcttcttgagtcatccgtatctttggtagtatacgaacctcaaacccgcacatgctaaaaagcagattagggttgtccttgctgtaaacagagacaaagctgttctcccactctaacgttgtgatgctccttgggaggcggttcttcatgtcccaaaaaacacttcttccaagatttacgtcatgcttcatgagcctcattcttgcgtctctaggccaacatttcttgttgttgtaaccgaccatgttctcattattaggatcaggatgctcagtcaaataacgctgaattaaatcgcgtgcttcctcgtgagtaaagcggaacattatatgcaccttgtcgacataccgagaatacagccgaataggatgccttgtctcaactttggtatcagcatatgtaaggaactcattaggcatcgtaggtggccccgcaatctcgcttgcacgtgttaaaccgagcagaaggagatccagcacaagcccatagtattgcacaacaaatgatgcaaactgtagaccccgaatgagaccataagaattagtatgactcatatccttgtaagataatacaacattgttctttgcagtgacataatcagcaatattgtggtccaagaccaaccgcagaagcctgttcaacagtgtcagatcaattttttcgaagaacttttcaaattttgtctgcagcatcacaacacactgcccgtcactagtgtcccatacatcctgtagattatttataccttggcaccatttgtaaacaagcagaggaggtggttctgaatcagcaggcttgacccagttcgggaataggtgtcgcttgtccccctcataccacaagtactggtcaaggtaagcatcggtgattttctcaagaggctcaatttcatataccggaataaggtagctgtacaggtccataaactcaatgccaacttctttaaaagcacgctgagtaagaagatgccgctttatccttgacagtgcctcatgaggattatcatatgcttgctcaatcaatccaagttcctcccgctgcagttgatttaaccttactgccacgctgtaagattcctttagcctttccagagctagtataagaagtttggtgtcatgcttgtaagaaagaggaggaaaaggaataggtgagaacttccttgattctagccaatgaactgttgttgtgtagatagcaactgcctcttcaggtgtcacatatggcccatctttcaggtagttgtgctgcctctcctgttctgccttcagccacaaacgggttaatcttccaagattcttgcggcacacagtcttgtcgactgtagcaccacgcctgatacgctcacgattgtagtgagcaacattggtccaccaatcagccttggactttacataacgaagtatcatgttctcaataggaaccggtaggcctgggaccttccatgggatatttgccttccagcaccgccatgcctcactaagatgctgtagtatagtccgtgccttgttttgcttgataccctcaggcatagcatcaaggacatcatgcataacagcagctcgaagttcaagatcaaagtgagactcaacacgttgcttggttacagttttagcaactccttttgaatgacgaccctcaaactgcctggccagtagattacctaaccatctttcaagcagtggtacaataccccgcagaaaaaacagccacaccctccacattggagcccagaatccacagccaggtccttttcctacaggaccagtattgaaccggtagtatatcaagtgcttcagatctttgcacatcctgatttgccgcatcagacgatacttgtagcggtacataccagtcagctggccaacatgagagaatatatattgcaagccatctgctaactggaaagcatcaacatttcccaagcggaactggatgtttgcatcaactactaacttagtaagtcgtaatatctcacggcataaatgaaatgcatttccaaaccgagattttttcctttcctttgttgtgagagtcttcacaggtttcaaattgaagttgtagtctaagtgaaggtagttaaggttctttctgtggatcaacaagttcaacatattgtaaccctgtttgcaaacttgcaaacctgcttctgcccagtcaagctccgttgtttgaaaaaactttgtcgcttggagtgaacggaacagatgcttcttcttctgcgccttgggaggcctatgatgtagctcattgagcacataacacttcagtagcttctgatagctgacacgcaccttcactggataagctggtgggcagtgctccttgtaccattcagatacaagagggatatcttcagcacgacgtgttctaccagacctcatattaaaaggctttggagcaaagagtaatgaaatgccagctgctgttgtatcagtgtaaagttctgttcctttcaagaggggctccacaccatccgggagacagaagtcctcatcttcatcctcttcaattgtcctcctctcccgacgatcaaccttgcttgtcgaagttataggatttatcaaaggatcatagtaaaatgcaggcaagtctggatcatctgtcttgatatacattatcattggagtatgatataccccaagcctcactttccttggcctgttattgtacaagtgtggaaaagcaattctatactctgtcctaagtggttggcggatgatgagtttgttgatgtcattaaactcattccagtcctcatcccccttctccatatcacggtacagtggctcaaacttcggacctcctgggatacacatgttgagtgctttggcggtaaagaaagactccatatcaaacaaatagaaataatttcgatcaatcaaatctgacaaaagttggccagcaagacgatagagtgttgccattatgggaagcgatagatgccatttcctgtagctggggccatttataagctttgtcttaacaagcggcttatgatcataaaaccattcatgcacagctgaatcttcctcctcatccaattccaactgtatagcctccagtggttcaacatccagcaaattatcagcatagtctaatggaggttcctcatcatcaaatggaggaaagcgcattctcttgaaatgtcgcctatctctcttctccctcctcatcatgatccacatcgtgccccactgtgcaaggtaaatgggctcaactacccatgggatctcatttacaaaggttattgcaccagtgatatggtacagaatctttacatgccggacctgttcccagggcattggcatattttccagtagcttgtaaacagcatgaggcacaaatttgagtgctccaagatatacacgcttatcgtgcctgtacttctttgaagacatgtcaccatggtccctgatgattttgcggacgtgctcggggggcatgtcctccttctgcgcctcgacgaacccgaacttgcgcttgtcgccgtaccgcttcgagttgagctggtgccacttcctcgccttctccaccagctgcgcctcgagctccgccggcgtcagcggcttgccgccgccggggggacccgcggccgccgccgccgccggcagcggcggaggcggagcgcccgtgcccgggggaggcggcgcggcccccat

SEQ ID NO: 82999 - DNA, 1305 bp, Oryza sativa
  unsure (1)..(1305): unsure at all n locations
  Clone ID: PAT_MRT4530_82374C.1
atggcggccgtctcgaggggcctcctcgcgcgcctccgccacctctccatcgcgggcccacgcctgcccccttgctgccgccccttctccgccgagcccctcgtctcccaccccgacgacgacgacgccgccgccgggggcggcggcggcggcggcgagggatcgggagggggacggatcatagaggctcgggcgggggtgatgggcccggactcgcggcggaccggcgtgatcggcgtcaagtgcggcatgtcggcgatgtgggacaagtggggcgccaaggtgcccatcaccgtcctctgggtcgacgacaacgtcgtctgccaggtcaagaccgccgagaaggaggggttcttcgcgcttcagcttggagcaggccaaaagaaggaaaaacatctaacaaaacctgaagtgggccacttcagagcacaaggagtccctctaaagagaaaactaagggagtttcctgttactgaagatgcacttattcctcttggaacaacaatcacagttcgccattttgtgcccggacaatttgtggatgttactggaatcacaaagggcaaaggttttgcgggtggtatgaaaagacatggttttagtgggatgcctgcatcacatggtgcatctctatcacatcggagcatcggttctactggtcaaagagatgctcctggaaggaagaggcaggtcttcaaaaacagaaagatgcctggacgtatgggtggtgtacagcgcaccgtgaaaaatgtatgggtttatcaaatagaccctgccaggaacttattgtatctgaaaggccaggttcctggtcctcaaggcagctttgtttttgttaaggactcaatatacaagaaacccgacatagctaagctgcctttcccaacatatttctcacaagaaggtgagtcggaggagctcctcgtcgctgatcttggtgacatcgacccattcatggtagcggattaagattagggcctactttggaagggtccttttgttttctgtgcacttcagcttgaccatccgacaaaattgttaaattttgcatggatatatgagtagttgctggattgcgagtcatcccattactggcccgcctctgatcaatgttgttccatgtacactacttggcaaatgtgccagggccctaactcgattagggttttgagctgattgtttgacaaaatggaacttttttgttcaataatttgtgtaatctaagcttcagatagatatataaaatgggaaagattcaccgcaaaaaaaaaaaaaaaaaaaanaaaaaaaaaaaaaaaaaaaaaa

SEQ ID NO: 83000 - DNA, 7261 bp, Oryza sativa
  Clone ID: PAT_MRT4530_82375C.1
atgggggccgcgccgccgccaccgggcacgggcgctccgcctccgccgccgccggcggccgtgggcccgcccggtggcgttggcggcggcaagccgctgacggcggcggagctcgaggcgcagctggtggagaaggcgaggaagtggcaccagctgaactccaagcggtacggcgacaagcgcaagttcggcttcgttgaggcgcagaaggaggacatgccacccgagcacgtccgcaaaatcatcagggaccatggtgacatgtcttcaaagaagtacaggcatgataagcgtgtatatcttggagcactcaaatttgtgcctcatgctgtttacaagctattggaaaatatgccaatgccctgggaacaggttcggcatgtaaagatcctttaccatatcactggtgcaataacctttgtaaatgagatcccatgggtagttgagcccatttaccttgcacagtggggcacgatgtggatcatgatgaggagggagaagagagataggcgacatttcaagagaatgcgctttcctccatttgatgatgaggaacctccattagactatgctgataatttgctggatgttgaaccactggaggctatacagttggagttggacgaggaggaagattcagctgtgcatgaatggttttatgatcataagccgcttgtgaagactaagcttataaatggccccagctaccggaaatggcatctatcgcttcccataatggcgacactctatcgtcttgctggccaacttttgtcggatttgattgatcgaaattatttctatttgtttgatatggagtctttctttaccgccaaagcactcaacatgtgtatcccaggaggtccgaagtttgagccattgtaccgtgatatggagaagggggatgaggactggaatgagtttaatgacatcaacaaactcatcatccgccaaccacttaggactgagtacagaattgcttttccacacttgtacaataacaggccaaggaaagtgaggcttggggtatatcatactccaatgataatgtatatcaaaacagaggatccagacttgcctgcattttactatgatcctttgataaatcctataacttcgactaacaaggttgatcgtcgggagaggagaacaactgaagaggatgaagatgaggacttccgtctcccggatggtgtggagcccctcttgaaaggaacagaactttacactgatacaacagcagctggcatttcattactctttgctccaaagccttttaatatgagatctggtagaacacgtcgtgctgaagatatccctcttgtatctgaatggtacaaggagcactgcccaccagcttatccagtgaaggtgcgtgtcagctatcagaagctactgaagtgttatgtgctcaatgaactacatcataggcctcccaaggcacagaagaagaagcacctgttccgttcactccaagctacaaagttttttcaaacaacagagcttgactgggcagaagcaggtttgcaagtttgcaaacagggttacaatatgttgaacttgttgatccacagaaagaaccttaactaccttcacttggactacaacttcaatttgaaacctgtgaagacactcacaacgaaggaaaggaaaaaatctcggtttggaaatgcatttcatttatgccgtgagatattacgacttactaagttagttgttgatgcaaacatccagttccgcttgggaaatgttgacgctttccagttagcagatggcttgcaatacatattctctcatgttggccagctgactggtatgtaccgctacaagtatcgtctgatgcggcaaatcaggatgtgcaaagatctgaagcacttgatatactacaggttcaacactggtcctgtaggaaaaggacctggctgtggattttgggctccaatgtggagggtgtggctgtttttcctgcggggtattgtgccactgcttgaaagatggttaggtaatttactggccaggcagtttgaaggtcgtcattcaaaaggagttgctaaaactgtaaccaaacaacgtgttgagtctcacttcgatcttgaacttcgagctgctgttatgcatgatgtccttgatgctatgcctgagggtatcaagcaaaacaaggcacggactatactgcagcatcttagtgaggcatggcggtgctggaaggcaaatatcccatggaaggtcccgggcctacctgttcctattgagaacatgatacttcgttatgtaaagtccaaggctgattggtggaccaatgttgctcactacaatcgtgagcgtatcaggcgtggtgctacggttgacaagactgtgtgccgtaagaatcttggaagattaactcgtttgtggctgaaggcagaacaggagaggcagcacaactatttgaaagatgggccatatgttacacctgaagaggcagttgctatttacacaacaacagttcattggcttgaatcaaggaagttctcgcctattccttttcctccactttcttacaagcatgacaccaaacttcttatactagctctggaaaggctaaaggagtcttacagcgtggctgtaaggttaaatcaactgcagcgggaggaacttggcttgattgagcaagcatatgataatcctcatgaggcgctttcaaggataaagaggcatcttcttactcagcgtgcttttaaagaagttggcattgagtttatggacctgtacagctacctgatcccagtatatgaaattgagcctcttgagaaaatcactgatgcctaccttgaccagtacttgtggtatgagggggacaagcgacacctattcccgaactgggtcaagcctgctgattcagaaccacctcctttgcttgtttacaaatggtgccaaggtataaataatctacaggatgtatgggacactagtgacgggcagtgtgttgtgatgctgcagacaaaatttgagaagttcttcgaaaaaattgatctgacactgttgaacaggcttctgcggttggtcttggaccataatattgctgattatgtcactgcaaagaacaatgttgtgttgtcttacaaggatatgagtcatactaattcttatggtctcattcggggtctacagtttgcatcatttgttgtgcaatactatggtcttgtgctggatctccttctgctcggtttaacacgtgcaagtgagatcgctgggccacctacaatgcctaatgagttcctcacatatgctgataccaaagttgagacaaggcatcctatccggttgtactctcggtatattgataagagacgcaagaatgaggctcatgaaggggatcctctagagtcgacctgcaggcatgcaagcttgagtattttttgggacatgaagaaccgccttccaaggagcatcacaacgttagagtgggagaacagctttgtctctgtttacagcaaggacaaccctaatctgctgtttagcatgtgtgggtttgaggttcgtatactaccaaaaatacggatgactcaagaagcgtttagtaacaccaaagatggagtctggaacttgcagaatgaacagacaaaagaaaggacagctattgcctttctaagagttgatgatgagcatatgaaagtgtttgagaaccgtgtcaggcaaatccttatgtcctcagggtcaactacattcactaagattgttaacaagtggaatactgctcttattggtcttatgacatatttccgtgaagcaactgttcatacccaggagctcttggatttacttgtcaaatgtgaaaacaagattcagactcgcataaagattggactgaactcaaaaatgcctagcaggtttccgcctgttatcttctatacacccaaggaaattggaggtctgggaatgttatcgatgggtcacattctgataccacagagtgatctcaggtacagcaaacagacagatgttggtgtgacacattttcggagtggtatgagccatgaagaggaccagcttatccctaacttatatcgctacattcagccctgggagagtgagtttattgattcacagcgggtttgggctgagtatgctttgaagaggcaggaagcacaatcacagaacagacggttaacacttgaggatcttgaagattcatgggatagaggtattcctcgtatcaacactcttttccaaaaagaccgtcatactttggcatatgataaaggatggagagtgagaacagactttaagcagtaccaagtgctcaaacaaaatccattctggtggacacatcagagacatgatggaaaactatggaacctaaacaactataggactgatgtcatccaagctcttggtggtgttgagggtattttggaacacaccttgtttaaaggaacgtatttccctacttgggagggtctgttttgggagaaagcgtcaggttttgaggagtccatgaaatacaagaagctgacgaatgcacaacgttctggtctcaatcagatacccaaccgaagatttaccctgtggtggtcaccaaccatcaatcgtgcaaatgtgtatgttggtttccaggttcagctagatcttacgggcattttcatgcatgggaaaattccgaccctgaagatttctttaatccagatcttccgtgcgcatctgtggcagaagatccatgaaagtgttgttatggatctttgccaagttttggatcaagagctggatgcactggagattgagacagtgcagaaagagacaatacatccgaggaagagttacaagatgaacagctcctgtgcagatatcctcctttttgctgcacataggtggcagatgtctaaaccgagcttagtctctgagtcaaaggatgtctttgatcagaaagctagcaacaagtattggattgatgtgcaacttcgatggggagactatgattcacatgacattgagcgttatacaagggccaagttcatggactacactactgacaatatgtcgatatatccatctccaacaggggtgatgattggaattgatctagcatataatttgcactctgcttttggcaattggttccctgggtcaaagccccttcttcagcaagcaatgaacaagataatgaagtcaaatcctgctctgtacgtgctgagggagagaataaggaagggtctacagctgtattcttcagaacccactgagccgtatttgtcttcacagaactatggagagatattcagcaatcagatcatatggtttgtggatgacacaaatgtctatcgagttaccattcacaaaacatttgagggtaacttgaccactaaaccaatcaatggtgctatttttattttcaatccaagaactggtcaactatttctgaaggtcatccacacaagtgtatgggctggacaaaagcgtcttggacaactggccaagtggaaaacagctgaagaggttgctgcattagttcggtcgcttcctgtagaagagcagccaaagcaaatcattgtgacaaggaagggtatgttggatcctttggaggtccatctgcttgacttccctaacattgtgatcaagggcagtgagctgcagctgccattccaagcttgtttgaagattgagaagttcggtgatcttattctcaaggccacagaaccccagatggttctttacaacatatatgatgattggttgaaaagtatctcatcattcactgctttctctcggattgtgcttatattgcgtgcacttcatgtcaataatgagaaggcaaagatgctgctcaagcctgacaaaactattgttacggaaccacatcatatttggccaaccttgactgatgagcaatggctgaaggttgaatgtgcactcagggacctcatcctgtctgattatgcaaagaaaaacaatgttaatacgtctgcgctgacacaatctgaaattcgtgacattatacttggtgctgaaatagctccaccatcacagcagaggcaacagattgctgaaattgagaaacagtctagagagacgactcagctgaccgcagttactacaaggacgaccaatgtgcatggagatgagctcatcatcacaacgaccagtccatacgagcaacaagcatttgcatcaaagactgattggcgtgttagggctatctctgccacaaacttgtatcttcgtgtcaatcacatttatgttaactcagatgatataaaggagactggctacacttacattatgccaaagaatatattaaagaagttcatatgcatagcagatttaaggacacagattgcagggtttctgtatgggctgagcccacaggataatccccaagttaaagagatcagatgcatagctattcctccgcagcacggaactcatcagatggtgacactgcctgcaaaccttcccgagcacgagttccttaatgatttggagccactgggatggatgcatacccaaccaaatgaagctcctcagctatcaccacaggatttgacatcacatgccaagatcttggagaacaacaagcaatgggacggtgagaagtgcatcattttgacatgcagctttaccccaggatcttgttcattgaccgcgtacaagctgacgccaagcggttacgagtggggccgtagcaacaaggacaccggaagcaacccacatggatatctcccgactcactacgagaaggtccagatgcttctcagcgacagattcctgggattctacatggtgccggataacaccccttggaacttcaacttcatgggagtcaagcacgacccgctgatgaagtacaacatgaagcttggcacgccccgggacttctatcacgaggaccatcggccgacgcatttcctcgagttcagcaacatcgacgagggcgaggtcgcagaaggtgatagggaggacaccttcacgtaagcaggcgccacgaacgcctatgctaccatagcctttctgctacgaacttcgcgctgtttcgagtagagatccgtaacctgtaacttgacgcaaccggtagtagcatatgatgcttgttttgaggagattgtataccctgatgtagtctgcccttgaaagaacagggtgtttgtagtttgtacaagtgcacgccatgataacagtgaagattttgcttactctcgatattgtattatgtagatctcggctaagatatattattgcatcctactaatcataaagcaatgctggtagtcggccgagtgtttcttggccc

SEQ ID NO: 83001 - DNA, 294 bp, Oryza sativa
  unsure (1)..(294): unsure at all n locations
  Clone ID: PAT_MRT4530_82376C.1
gtctcttggaggctagcattatccaatctgctgctttgactgcatggcgtgctttatacgacaactgcaggtgaacgcgattcgacttgtacccctgattttgtctggcatcttgttccaccagatcggctgcaatgcctcccgtcaaggagttgaggaagagccacagcaacaccccctaagccggttgccctgattgtgtcccgtccctgcaaagtgctggtttggatgcaactgcttgtcgataatgaggtagcaaactctcctgcatcaatacattggctctctatgtgn

SEQ ID NO: 83002 - DNA, 382 bp, Oryza sativa
  Clone ID: PAT_MRT4530_82377C.1
tagaggaggcggcaacggctcctgcagcaagaatccggtggtcctcaaccccctcccgcggatccgccgatggcagtggtgttttcggcgggctgattcggtggaggcgtcagcagctcccgctggcgggtctaacagaggcggctgcggtggcgtttctggcgggtgcatccggtggaggcggtggcggaggcatttccggcgagtggatccggcggtcctctaccccctcctcctctccctccgcgcccaagcttctcctacagcggcggcggtggcctcagcgctcccgtgggcagatccggtggaggtggcggcggtggtgtttccggcggccgaatctagcttctttgaagcaaagaccagaatttattctattatc

SEQ ID NO: 83003 - DNA, 312 bp, Oryza sativa
  Clone ID: PAT_MRT4530_82378C.1
gcaaaattaacaatcttccttgataacagatagaagtatatagaagaattagtttttttttctgaatacaagttaatttctcattcccctccgacaaacgcatttctagatctatccaacactgttaatgctaaccagaaacctgatctgaaatagtctacgcctaatctccagaaatttcaagttgggagtcatcgacaagtgttcctacaaccatttggccaggaaacaaaagaattgcacaataaagtgggttagtccctattttacgagttacatgttccccaggatcgacgctgcaaaaccaacata

SEQ ID NO: 83004 - DNA, 367 bp, Oryza sativa
  Clone ID: PAT_MRT4530_82379C.1
ttctagatcgcgagccggcgcccgccctttacttcttctctttagcggttatgaagggccaacaactaccacacgctatagctttacgatcatccaccatgcacaactacatgacggcgtggtcaccccagcacgggaacacgactttaatacaaatctggggtgctaacaccctggatgatttgaccaagcactccgggacagggctacactactattgcgcagccactacaaaaaccctcttctttaccattcagtgaatttcaggcttgtgcaccctaaaaaacgccaactgcggcgcacagcgggccaagattcagctcaacctcaacacaatcttcatatgattgaaggaacctgtcttcat

SEQ ID NO: 83005 - DNA, 102 bp, Oryza sativa
  Clone ID: PAT_MRT4530_8237C.1
gccgggctgcggacggcagagttcgaggagagtttgcccacgccgtgctcaccaacgaccgacgttcttgactcgccgtcaattccagccattgctgtccag

SEQ ID NO: 83006 - DNA, 2283 bp, Oryza sativa
  Clone ID: PAT_MRT4530_82380C.1
atggagatcaataacaatttcggcggcgcagtaggatcgctgccgtcgggctttggcaagaagccatggttggttcaagcgcagggaactgagacgttgtccttcgtcgacatattggacagaagcttgcacgtgagagttgttcctgatctgcaaggcaagctgtgcttgggatgtgtccacggcggcgactggctgctcatggtggacgagatcaccggcggctgcttccttttctgtctctcaaactcgtccacgatctcgctgccaccgttgcgggagccgttaggagacatgggagcatgcgtagtgttggggtcatcgccgttgaaccgtgactgcaccgtggtgattaccagtctacctgaaccggaagagagcttcctgctccattgccaccccggcgacgaggagtggaccaagctgatggtaccactcggctctgacaggttgttcggcaaactcgtcaactgcgcaggacagttatactctctctcttcctttaggaaattgctcaccatagatgtgatcgatgatgctctccatgctaagatattgaatattgagtgggagagttcatgcggtcacaattttgaaccgtacatcgtcgagtcgtgcggcaaactgttcgttgtcctagcatcgttatacgggtatccctacaactgcccgcttaatggggtttccgtgtatcgtctagatcgagccgagtcaatgcttaagaaggtggacgacattggcaccgatcgtgccttcctcatctcaggtcactatggcttctcgtgcaccgccatggaagggctggtgcaaggcaactgcgtctacatcgtgtggtcaggctacgactgcgagaggatttacaagttctgcttggatgatatgacgatcagcttacagccgatccttgctcaccccactgaagatttgcgaaggggattttggtcggttcctgcagggatcgaagctacggaattagtacaatcagccccatcaattcattgtgatacagaggttaatgtattgaacaatttcaacaaggatgaggatgcacaagctaccatcaaggcatcatggcaagaccttccaatagagatgctagagttaatagtttcaaatctatcattggtcgatcgactacgatttccatcagtttgcaagcagtggagctcggtttccaacccagttgcacaagcaaaggtttggccatggctcatgcactgtgttaggcaagatggtgcttgcaagatgtttgatcctctatgtggcgtcgagtattctatgaaggttggtccatttgatgccaacgagcgacaggccttccgcttctccaaagacgggtgggtgatcgtcacccagagtgacgacaacatcttcgtcataaacccattcacaaaagagattgtgaagctctctatggccagcggctggtacagattcactggcatctcattctcgtcggtgcctacttcaccagattgtgtattcctgggtgtgtgtagctctcccaaaggcgatgggatcaaagtgtggacatgtcggcccaatgaggaagagaccgaggataatgagatatactacgaggaagagactgaggatgaggagagagactccgaggagaatgagataaactacgaggaagaggctgatcaggatgaggagagagaggctgaggagaatgagataaactacaatgaagaggctgaggatgaggagagtgagaccgaggaggattattggagtgagtttgattttgagaacgacgaagtcatgttcccagtggcacgcaataatccagtctatttccgaggggagttctacttccttgggcagaggggcaacctttcagtcttcaacccaggcaacaacgagtggagaatactcgataaaccggagcccatccgcgctgatctaactccctacgatgagggcaaggaagcttgctacatggttgagctaagaggagaactgatagccgtgttccatcgtaacgccaatgagcccccacgagtgctcaaactcgatgagtccaagatggaatgggttgaaattgaggacattggtggaggagctttgtttttggattacagggcatctattgccttgccatcatctgaagctggacatggtaataggatttatttcccaaagtttagtgaagatggaaagaaagcaattttctatgatctggaggccaagaagtatagcccgatgttctccggagctaaggaaccaatgaactgtgtttggtttgtgcctaagttacagtctgatgaatactcctag

SEQ ID NO: 83007 - DNA, 2776 bp, Oryza sativa
  Clone ID: PAT_MRT4530_82381C.1
atggaggccgtccagccgccggtgttgagtgacagattgaacccgttgatccaccacagatcagcttttccagccagtgttgtgcagcctcaagatcatggtgacagcgttccgggcttgtgcagtggatcttttattgacaccaggggcaggcttagcagtggatcaatgacatctgaagattcaccggcactgacgccgagatggttgtccatcaagtccaactccagctctgacaactgctttgaaggatcgaaaagagcggtatcgtggtcagaccggcatgttttcaatccaaatgggcaggtcaactatgcagaattcatggatttgatggaacaggagcttgatacccaacttgataggctcaagggggatgtaactgggctggaaaactttgcgttgccggataatgggtatataattggtacacacctgggcatgtctcttgatgtgatgctgattgagattgatgagaggttcaatgccttgaagttactgctggccacagtgtttcggaaggctagggagatggacagctcgtcggtgtctgatctgcagtgggagcatgagttgcaattggaggtcatcaacattacaataggagaattcatcagtggcttgcaagaggagatggagaggaagctgtatgagcaaatttctatgacaaactccatgagtaaaaattggcaggatgccatagctcaatttgccagcatgcgcgatgatctgggtgctctttctaagctattgttgccctcactacaagaatcacatatttctcacagcaagcatgaaacttcaagcaacaggagcaataggtggaagtacaacatctttggaaagaaaaacaaggaggatcattcatctcgcgcggaggaaaataagagtttcaggaaacagaagtccatggttgtcttggaaaaatctgacttccgtcacctgaatggtatgagtaaagaggagatcataacttattttaagtccgaaatgagcaaattgaagaggatgcatgaattggatttgcaggagaagaccgaggagctcttcaaattcaaacgggagaagggattgcttactctcaagaatgatgtggaatttgagccgttaagaaagaaaattccacagattatttctagaatggaccaaatcatttcgaagaacataaagatgccttcactttgcatgactaatgatggactggatgaaagatgcatatcagcaaaaagaatcgattctttatattacgaaaatcagcatcttagaggtttgcttgcagataatatgaaggatgtcaaggaattatcatctcagctatctgaagccagtaaagaaatgtctattcagttgtcatcagaagacgatctcctgagacaaattgccaaaattaaagaagaatatgaggatctccaaatcgaagccggtgttagggatggagtgtatcaaactattacaagaaagttgcttgatgattctatgaacagcatgcatgatgctgcaacgaattttagtacagaactgtcttctcttgaagctatgatatctgaaaaggagaaggctttgtgtttgtcaaatgaagaaaaccgaatgttaaaagaaaaaatagcagagttagagcaatgtttgatccaagataaacaggaagatccagaagtcatcaagcaagagagtacagagatcattttgcgtgatatagaggtggcgcctcacatatcaccaagaagatcacatgagactcccaagcaagatatgcaatatgatgaacttgtcaaacttaactcaagtttagaaattgcttcagctgcattgaaggaagttgaaaataaaaatatcgattataatggtattttcaccaaaaatgagcaagaaaagcaactggagtgcattttaatatctattatgaagttgtcaaaggaatttgtggagatcgagcaaaaattatcagtagaaagaagtgcaagcaggtcagaggatttgagtgatcattgcaaccacatggtcagacaagccgttgtactaacaaaaataggcctttggtacaaacaaatgctagaaacaaggcgttctgagctccagaaggctgaagccaaggttgtcattttgggcgacaaggttaattcacatttaaaccttcttcagaagatatatgtaactcttgatcgctactcccctacattacagcaatatcctgggttgctagatgctttcttgaagacatgcaagcttgttgcagctttgagaagtaatcagaacaaagatgatacgacagcataaaaagggcaactaggcatgctcaagagtagactcatgaggacctactgccaggagggtacaactgacacactgatatcctggctcatccgctcatgtgcataaccaattagccatgtgaagctccagttgtagatcaagtggaggattctcagactgaattatcgatatcataggatgttgattgttgatgcgtatttcgaaccagctgaagtagcacctcaccttctgatatgcagctatatatatacacgttcagaaaatagctccatgtagtgtttgtaggtcatgcagttatacgtacaagccagaaactcagaacgacattctgtagagaataattatcagccagtggcctggtaatgtacagattacactgttcaggtctttgggtagacgggataggcgcatctttgtttagccagatacacgttttgtaatcatccactatgtaactgttttcatctttcaaaactcatattgcccaaaaaaaaaaaaaaaaaaa

SEQ ID NO: 83008 - DNA, 2536 bp, Oryza sativa
  Clone ID: PAT_MRT4530_82382C.1
gtcaacttgccaaatgcaaagataaagagcctgatttggataggctgttagaaatacccacgccccaattaatcacatgttacaaacatatcaaagagaatataatgacatcgaagtgctctttggtcataaaacacattatgcaagtgctcttgcagggaatcaggatgcttgtaaaaatatatttctgcaaagaggatattctaattcgaccatgataattttcttaatctcccttttctttgcgtcattcttagtacgaaatctcaattccttcaacatcatacaacctatattctcgtgcagtctctttcactgcagctgcaaacttgctgttttgagacctccacagcacccaacccaaccttgttcagtgccaacgtacactcgtgacttcccagcattttggacgttacaaacaagcatcctaagtagcaggagtatatatgtacagctgcagcaaccacataatgccatcttcttattattggtgattgatggatcagttttatctacacaggctgcattttgcagactacagtagtatacagttatccagtccctctacatgttgattggttgcaaattgctgactatcctcaaaatattgttattgatcggactgaaaggtggaatgtgcgctgtatttgtgattgcaggtcattgccccattggactgaacactgaattcatgattgtatggtaatataattcactcatcattcaactgttttaccactgcgtcgatcggtaatgctcccaatgggactgatgactccaaacgcttaagcatgtcatcttcgaaatgatcatcctctgcgacatcagaagattctgtaaactcatgttgttggggttcaagtgtacctgtctcaggctcatcttcggtgtattcagcatttaggacatctgggtttgattcatcattggccacaagcacagctggaaatgaatgttcgacaacctgagatgtaacactgaagtcctctacccttgtaagaagggaatcaggtgtaagagcatccacttcagcatcatccaacatcagtgccacagatgactcaatcgcatttgtccatagttcaaacattttaggtctcagtacttctcttactgccaaacggtcatcatcatcagtggcttcatctgaactactctcatcagatgacattggaacattattctttcgaatttttggaataagagtcagaggctttggatatctggacttccattccttgcctctgaacattaatatctgctcattgtcaaacgacaaaagaacacaaggaacaagatcccttagttttgctccaatctttttgtagtcacttggattcaacccctcgcagtcaatcttcaccagatcacttccctcaaaagcatctcgaacatccctgacaagatagatgtatataccattttttgctaatttgcaaattggcagcagatccttccctcttcttctcatttcatctgcttcctcttttgtaagaccttctggggcttcctgtataagttttggatagacaggagtagctggcttccaaagcattagtggataacgaggccgggttcgagggttgtagtttcttccacggtataagaaaactacaccacctactcggtgaataacctttccgcctgatttttcctcaaggtgatagcacagattcttcatatcaacagttggaactcctcggcatctcactttgcaaatttcctggcgcctccaatgacaatgtatcatttccaacatgttgtgggtcaatccatcccttccgatgttgagctggcggttgtgcgagatgtggggcttgacgaggtcgcgcacctcggcggcggtgagcggctcgccgagcacctcctccctgctcctgccgtcgccggggctgaccctggccaggtccagcttcctcctccccctcacctccatcatgatcccgtgcgcgctcaccgtcctgggcgcctcctccccgagcggggtgtgcagccgcacgccccgccgccgcgccttctcctccttggtcagcagcggcgccttccccgtccacggccggggcatcgtcggcggcgcgaacggcaggaacgcgggctcccggatggccaccggcggggcgcgggggcactcggagtagctgaaccggaagtcgaacggcgcgcccgggagccggaacgacagccccgacggccccaccaccacggcccgcccgtcggcggcgtcgctggcgtcggcggcgaggagcgcctcgccctcccccgccgccgccacgggtgggacgggcttgcggtaggcggtgcggaggtgcggcgcgcggaaggcggggttcccgccattgccggtggtcggattcggaggctggtcgtggcggcggcggcggttgctggggaggcgacgggcggaggggagaggcggcggcgcggggcggcggtgcttggggtcgtagcagttggggaggggaggcggcggggacgagaagaggttggcgcggcctgcgcgggagggggatggccgctgcggcggcggcggcgacat

SEQ ID NO: 83009 - DNA, 611 bp, Oryza sativa
  Clone ID: PAT_MRT4530_82383C.1
gagggcttggatgcaagcgagcgatgccgtccaagaagcagcgccagaagacgggcttcttggacacctcttccatctcgatcgacctccatcagcagggcggtgaagccgtcaacgacgtgcttgtacgagcggaccagccgcggcttgccatcggcggtggtgttgccggggaggaagggtatcaggacctgatacctcgcaggtattaccttctacgtgatctggacggtgctccaccccacgcgcgcgaatccagcggcggcgcggcggatctggtgcgggcaacggtgggaggcgtggtggcgggcgccgatcgggagtggctgagcgggcgggcgggcgtcctagcgctccgcgtctgtcttttcaattactgtattcttcattggcattgctcggtcaacggagtcgtgaatgaatttggaagtctcagcgaccacatatctcatgagacggaatcttccggttccggcgaccaacctgcatctgcaggcaggcagcagatgcctgcaacaactctgcagcagacgactgcttcgttgctcgtgcagaagaacgggatagagcttaatattaagagcaagtttaatagtataactaactactaa

SEQ ID NO: 83010 - DNA, 280 bp, Oryza sativa
  Clone ID: PAT_MRT4530_82384C.1
tttttgtttttttttttttttttgttttattttttttttttttttttttttttttaaggatggaaattagtttcaatactttcacccttaaattaaatttaactttattttttaaaaaaagccctttgctttggcctcatgtttgacaatctcactaatgaactttttacaaagaacaccagaacacgataaaccaaacgctctagaacctggaaaattcaggggctttttggtcagaaaaaacaactaatccaggggtccaaagcttgacttaatcacc

SEQ ID NO: 83011 - DNA, 1444 bp, Oryza sativa
  Clone ID: PAT_MRT4530_82385C.1
ggtccacactcatctcggccttctcggcggcgcggctagctagctgcaagcgcgctttcggcggaggcggcgcgcagagggcgcacggctacggtctcggccgtccgtcgcggagggacgacggaggctggcgcgcggcggagggagggacgacgacgcgccatacctgcctgcccctgccgcctccatcacgtacgcccctgtgccgtgccatgtcttgccctccgaaaccgagaggataaatgctgttgtgaggaggaacttaggaggttcgcctgaagtttatcataagaaactcaagattgctgtgccactgaaacatggctttagagcttttgtgaatgtaactgaccaaggtgtcactggctactgcattgatctcttcgaggctgccatgaagaagttaccaaatcatctgagttatgagtttgttgtcttcaatggttcttatgaccagctagtacagagtgtatcttcaggggtaaagccttactccctgtgctttgatgacattgtaacagaaccgaattcttacactatatctgctggttcttactatcagatcaacgatgctgcagtgggggatataaccataactgccgatcgagctagccaggtggagttcacgatgccgtacaccgagtctggggtttcaatgcttgtgcttgcgaagaatgaatctgaatcaacaaccaaatgggtattcttgaagccactgacaaaagaactttggtttgccactatgatactttttcctattcactgccttggtcaaattattaaaagtccgttgtcgaaaattgttgtgagctacggagctagcttggcatccattctaactgttaagaggttccagccctcagtgacagatcttgaccagctcctgtgtaatggtgattatgttggataccaagagggatccttcgtgcactcatttttgacaagacgaggtttcagtgaaggaaggctaagatcctactcaaagaagcaggaatatgcagaatctttgaggaaggggtccaagaatggaggtgtgtctgctatcgttgatgagatcccatttttaaccgctattgtctcagaccctcattacgagaacgaattccagatgcttaaacgtatatataagacgcctggatttggtttcgtgtttcctcctggttttccactggtgcataatctttcaactgccatgttggatgtaacgagtggggatgagggctcacctctcatgctgatgataagcatttcaatgtcagttcttgcccaatacacaaaaattagagtttctgatgtgcaaagtcctggtgtggatgatggaaacggtgctcatgaaggatctaatcaagcacaaaacagcatgggcaatggctttgtggctgatagacctctccgtgaaattagaattgacgacagttcccaggatatccatgggagtgtctga

SEQ ID NO: 83012 - DNA, 505 bp, Oryza sativa
  Clone ID: PAT_MRT4530_82386C.1
ctaaggatccgggaatgtggatttgggattcttagctcggtttataagccggaaggaagaaagggttctcttccactgtctgatgcccaagagagatctttggatcggattgacccactctcccgtcgcccctcgccctcagctcgacgcagcccgccccagtcccccatgtgcaccgcccccacccccaccaccagcccgcgccgctgcccaccactgccgagtgccacccccacgtaccacccccccctacccgagctggaagagaagatggtgacctgctgtttttttttcaccttggaagagctggaagagcctgctgcttttttttttgtttttcacccctgatcaattggaagatccacgaggttaagatcagttgccccgtgaattgaaatggttgccacgacttggtctgactaagcccttccgccaccatcctgaggctagctgttttatgatgctgaattctggatgaagttttcgttgataaaaaaaaaaaaaa

SEQ ID NO: 83013 - DNA, 1958 bp, Oryza sativa
  Clone ID: PAT_MRT4530_82387C.1
gtccacactcttcccgcccggctcggcggcgcggctggcgggctgctagcccgctttccgcggcggccgcgccctgtgggcgctccgctgccgtcccccccgtccggcgcggcggggcgtcggcggccggcgcgcggcgctgggtgggacgtcgacgcgccattcctgccgcccccggccgccgccctctcgcccccctcccgggccttctctcgcccccccgcctctcctcggcgcccaacccctcatccccgtggctcccagttccatccgtccatctcagggcaggtgatggaggagcaccgtcggttggctatggcggcggcgttcgtcatcctgctcacggtttggagttcgccggcgatggcaatggcggcggcggcggcgacggaggtgcacagcttgggccttaattgcaatgaaaccaagaggataaatgctggagtgaggaggaacttaggatgtttgcctgaagtttatcataagaaactcaagattgctgtgccactgaaacatggctttagagcttttgtgaatgtaactgaccaaggtgtcactggctactgcattgatctcttcgaggctgccgtgaataagttaccataccgtctgatttatgagtttgttgtcttcgaccgttcttatgacgagctagtacagagtgtatcttcagggatcaacgattttccgtgaaaggatataaccataattgccgatcgagctagccatgtggagttcacaatgccgtacaccgagtctggtgtttcaatgcttgtgcttgcgaagaatgaatctgaatcaaaaatcgaatgggtattcttgaagccactgacaaaagaactttggtttgccactgtgatcttctttctattcaccgcattagtaatttggataattgaacatcccagaaacatggagtaccaaggatcgaacacaaggcagttgagcactgctctctattttgctttctccactttgacattttctcatggtcaaattattaaaagtcctttgtcaaaaatcgatctttcaactgccatgttggatgtaacaagtggggatgaggggtcacgtatggaaacgaaatggtttggtgcagaggctgtctctccaagtaatgcaattcccaacacagattcggcacctctcgctttgcggattctctggtctttttatcatcactgggtgtatctcaactctcatgctgatgattaggttctccatgtcaattcttgaccaattacacccaaattagagattctgatgtgcaaagtcctgatgtgggtggtcgaaacgatgcacatgaagaatctaatcaagcacagaacagcatgggttgcattgtggtttatatgcacctccatgaagttagaattggcagttcccaggatatccatgccgctattgtctcagaccctcattaccagaaagaattccagatgcttaagcgcatatataagactcccggttttggttttgtgtttcctcctggttttccactggtgcataatctttcaactgccatgttggatgtaacaagtggggatgaggggtcacgtatggaaacgaaatggtttggtgcagaggctgtctctccaagttctccatgtcaattcttgccaattacacccaaattagagattctgatgtgcaaagtcctgatgtgggtggtcgaaacgatgcacatgaagaatctaatcaagcacagaacagcatgggttgcattgtggttgatatacacctccatgaagttagaattggcagttcccaggatatccatgggagtgtcgaacgtgctagctgatggcggagagcctcgaccaattcagaatggccctgtgcctgcaaattccatccagacagtattaaccaataatctgctgcagaaattagtctgggatgttcccactcagcaactagccatgcttcaccgcaggcggcaggccgtgttggattag

SEQ ID NO: 83014 - DNA, 276 bp, Oryza sativa
  Clone ID: PAT_MRT4530_82388C.1
cacgagggcgcaagcagagatccttacggtatcttgcaatgggcctccaaacagtcgttcatgatgcaagatccgctaattgagagcttgttgccagaggccaagatcagattggaactgtaccaatccagaggtgcaaaaggataccattaaatcacttatgtgttgttggaaggcatgaaagaagaatataaagctgttcttctttacaatgaccaagtactgtacatacatcgggtggcttctattaatactctggttaaacctttttttatc

SEQ ID NO: 83015 - DNA, 286 bp, Oryza sativa
  unsure (1)..(286): unsure at all n locations
  Clone ID: PAT_MRT4530_82389C.1
gtgggtcggttatgaagctacaggtttggtgctccacaaggaggttgatcagttcagagactggaccttgagtccatggtgtcctggagttcagcgagtattttcgttccaagtgccaggccccgaggacttcagaaaccaataatgtatttgccatgttcaatgtcaggttttcacaatgcgcacgctagtacggtgtgagcttgcaaacatttacccgttgtgcctgtttctgaaatcaaaatctagttatttgccccgtttggaaaaaaaaaaaaaaaaaaan

SEQ ID NO: 83016 - DNA, 375 bp, Oryza sativa
  Clone ID: PAT_MRT4530_8238C.1
gcacgaggcctcgtgccgaattcggcacgaggtgccggtctcaatacatgacggtgggatcatcggttttcaggttatgacgaagaccacaagctgaactcgtggaatacagttgctgcgctgcagtttgacctctcagatttgtactactgacgcaggcagacagagtctcagagacagtagcatatacagataacagattggtaatgaccaaaattccatccaccgctgggtttcagctcaaatacctcaccactagttcttgagcccctattctggatttggatccatcctgtaccaaacattcccgtgtcaattggtacaaaatcttgatagaatataatggtgtctatggccaaggctatttctcgtgtc

SEQ ID NO: 83017 - DNA, 2850 bp, Oryza sativa
  Clone ID: PAT_MRT4530_82390C.1
atggagctgacggcgggggcgatgagcctgctcctcaagaaggtctgcgagctgctcatggctgagctcaacctggacaagaagttgacgaagagcatcggagatctccggacggagctgaccatgatgcacggcgtcgtgcgctggatcggcgaggtgccaccggagcaactcgacgggcaggtgaggctgtgggcgcggcaggtccgcgagatctcctacgacatggaggacgccgtcgacgcctacctggtgcgcgtcgccgacggcgagccggaggcagccaagcagaaccggcggctcagcgagtccctgaagagagccgcccggttgttcaccaagggcagggctctccatcagatcgccggcgccgtggaagaagcccagggccgcggcaagtcgctgtccgacctgcgtcagaagtacggcggcctcaagctgcacggcgccggcgaggggtgcgccgccattgaccctcggctcacagctctgtacgtcgaggtggccaagctcgtcagcgtcgacaaggccagggacgagctgagcgagctgctgctgtcttcttcaggtggctcgatgcagcagcagcagcagctgaggacggtctcggtctttggatttggcgggctggggaagacgactcttgccagagcggtttatgagagcatcagggagcaatttgattgcgctgcttttgtttccgtgtccaggaatcccaacatcaccaagattttcaggaaattgctgtttgaacttgaccgggaacagtactcagacatcaatgatttagacagagatgatgtacagctaattgatgagctgagaagttttctccagagtagaaggtacctcattgtaattgatgacctctgggatgaaaatgtgtggaaattcatcaagtgtgttttatatgagaacaatctcagcagtcgaataatcacaacaacacgcaaaatcaatgtctctaaagcttgttgctcttcgggtgatgacaagatttatgaaatgaaacgtctttcggatgatgattccaagaagctcttatacacaaggatatttacccatgagaacaactgtcctcatgaattgaaacaagtatctacagacattttgaagaaatgtgacggggtaccattagcaatcatcactatagctagtctgttggccggtaataataataggcccataaaaactaaggatcaatggcacaatttgctcaattctattggccggggactcacagtaggtgaaggtgtggatgatatgcagaagatattatcatttagctactatgatttacctcctcatctgaagacatgtttactgtatctaagtatatttccagaagattatgaaattgagagagatcggttaatatggaggtggatagctgaagattttgtccaatgtgaaaataattgggacaacttatttgaggtcggagagagttacttcaatgagcttataaacagaagcatggttgagccagtcggcatcgactttgaaggcagagctcaagcttgtcgcgtgcatgatatgatgcttgattttatcctttccctatcaaaagaagaaaattttattactataatagatgacagtgagcacagaacatcttggcaacataagaatgataataagattcgcagacctggtgttaattcgatgccatccctgtcactgtttcaggttcttcgtgtactggatttagaaggctgtgatctcagtaaatttagcaatcttaatctgaggcatgtcggtaagctctctcacctgaggtaccttgggctaagacgaacatacatcgctgagctccctacagagatcggaaatctgaaggttttgcagacgctggacatcagaggagctcatggcatacgggagttgccgcccgcgatcaccgggctgaggcaattgatgtgccttcgcctcgattgggacaccaggctaccaagaaatggtgggctcgcaaccctgacgtcgctggaggagatgaccgggctcagagttcgccgtgattctgcagacggcgtcgtcagagagcttcgctgtctgaagaagctcagggtgctccggctccagtggggagagatggagcacggcgcgggcagagctgtggtgggggctctcggcgagctgcaggggatccagagcatcgagatttacgcttacggcggtggcggcggcggcgtcggtaacgtcggcgacggctgggtgcctccggcgtgcctccgccggttcgtgtcgaacgggcccacgagcgcgttctcggcgctgccggcgtgggtgcgctgctcgcctctgccgcgcctcgccttcctcgacgtgtgggtggatcgggtgaggcggggcgacatcggcgtcgtcggggagctgccggccctccagtctctccggctgcgggccaccggccggatagacgcgcgcccggcggtggagcggttcgcggtgcgcgccggcgcgttcccctgcgcggcggcgtgcgcgctcctgcacttcgtgacggcgccgtccatgttcccgcgaggcgccatgccgagggttcggcggctctcgttcagcctcagggcatgggacttcgccgccgccggcgatggcggcggtggtggtgggcttaggcttgggctgcgcgatctgggcatgcagaacctcccttcgctcgaggacgttcgcgtcgaggtttggtacaagaacacgggagatggcggtggttcggcggtgacgaggaaggtggaggaggcactgcgacgcgtggcggccgtccatcccaaccgtccggccatcaacatccgcaggaggaagatgacgactggatcggcccaatccgattcttccactttgtctatctaa

SEQ ID NO: 83018 - DNA, 477 bp, Oryza sativa
  Clone ID: PAT_MRT4530_82391C.1
atggcatcagcaatgtatgggttacaaccaggcattatggtgggccccagccacccaaaatttccccacctgttcggccattccccaccccaccgacgacgacgacgcttgcagacaacgacgccggcagctcgcgtgagcggatccgtgacgacggtggtgctcgctgctggcggcccgcagatcgaaccgccgtggaggcgctcatcggaggaggaggcgtcggagcagagcttgcagatgatgacgacgccaggtcgtgagcggatcctcgatggtggcggcggcggcggcactcacgtgagcggatccacggaggcgctcgcggacggcgtcggcagagctcgcgctcgcggatccgcggcggccctcgcgaacggcgtcggcggcactcacgggcggtttcggcgacagatctccggcggtggaggtggggcctgcgcgcgaactccagtggcagatctccggtggcggtag

SEQ ID NO: 83019 - DNA, 389 bp, Oryza sativa
  unsure (1)..(389): unsure at all n locations
  Clone ID: PAT_MRT4530_82392C.1
ctttctttttttttttttttntatgagatgagttttttttttatattatttattgtgcctttcggggcgcaaactggaaacattttttatttttgttgcattaaaatagggacatgggcagtttattacccataatagttttttgtctgctttgagcccggggataacatggaaataatgggggggccagtttaaaaacgttggcaacctccttttcactggcttgggtgcctacagatgcgaacctgctggtctttgatttacagaaatcttttcgaaaatggtttgaaaatacctgctgctcccggcgattttattgggggggctcttgattttactcaccagaactttcctttttggttggaaaataagggcttggttttaaacca

SEQ ID NO: 83020 - DNA, 454 bp, Oryza sativa
  Clone ID: PAT_MRT4530_82393C.1
tgggataactactgggtgatgcattagttgagctaatttgagcggggcacgtttggaatgacttggcacatgcttgcttgctaacttatgtaattcgtgggtatcctcatagttaagctatgtttcacttgaggtatgcctgcaggtaaggtaatttctgctagctttcttgtaaagatgggaaggtatgtagctagggctgagtttgggaactccaagcctcttttagtaaatagtagagagatatttatttaattcctgaaaaattgtgtgaagtgagagttactagtagtgcctgcaggtgatatatggcataagtaacccaacaggtgacaagtaacccccgttattcttgtaatgtattatgctcttccaatgcaatttgttgcttcatcttgggccccctgtgtactcatccttggtagaaaaacagagcttacaaacttgggagttc

SEQ ID NO: 83021 - DNA, 309 bp, Oryza sativa
  Clone ID: PAT_MRT4530_82394C.1
atggcggggagtcggcgcagtcagacgcggcggcggcagcaaagtcttcgggccccaccaagcccgtgccgccgtggcgggttcgtgccgcggcggctggaggacttcagcgacggcggggccttcccggagatccacgtcgcgcaggtgagaacgcggccggagctcccgctcggcctcctccgccgagtcctcccgtcgctcccctcacttgcgcgccgccgccgctcactcgcctatcctgccgtcgctactccgggcctcacttgcgcgccgctgccgcttgctctcaccgccggccgaagctag

SEQ ID NO: 83022 - DNA, 3942 bp, Oryza sativa
  Clone ID: PAT_MRT4530_82395C.1
atggcgacgccgacgcccatggcgggggaggggacgctcgcggcggtgatgccgcggtcgccgtcccctacggcttcggcggcggcggggtcggcggcggaggcgccgatgctgatattcctctacttccacaaggcgatccgcgcggagctcgaggggctgcacgcggccgccgtgcgcctcgccacggagcgcgccggcgacgtgggggcgctcgccgagcgctgccgcttcttcgtcaacatctacaagcaccactgcgacgccgaggacgcggttatctttccagcacttgatatccgagtcaagaatgtcgcaggaacctattctcttgagcacaaaggggaaaatgatctcttcagccagctgtttgctctgttacagctggacattcaaaatgatgatagtcttcgaagggaactcgcatcctgtacaggggccattcaaacatgtctctcccaacatatgtccaaagaagaagagcaggtctttccattgcttacgaagaaattttcatatgaagagcaagctgatctagtgtggcagttcttatgtaacattcctgtaaatatgatggcagagttcctcccctggctttcgtcttcggtttcatctgatgaacatgaagatatccgtagctgcttatgtaaaatagtacctgaagagaaactccttcagcaggttgtcttcgcgtggatcgaagggaaaacaacgagaaaagtaacagagaattccaccaagtctaattcagaagcaacctgtgattgcaaggatgcctcctccattgatcatgcagataaccatatttcttcacatgaagattctaaagctgggaacaaaaagtatgcagaatctattgatggtcaggttgaaaggcatcccatagatgagattctgtattggcacaatgctatccgtaaagagttaattgatatagcagaggagacaagaaggatgcagcaatctggaaatttctctgatatatcatctttcaatgcaaggctgcagtttattgcagatgtgtgcatcttccacagtattgccgaggatcaggttgtgtttcctgcagttgatagtgagctgtcctttgtgcatgagcatgctgaagaagagcgccggtttaacaattttagatgtttaattcagcaaatccaaatagcaggagcaaaatcaactgcactagacttttactctgaattgtgttcacatgctgatcagataatggagacaattgagaaacacttctgtgatgaagaaaccaaggtgcttcctcaagctaggatgcttttctctcctgagaagcaaaggcaacttctgtataaaagtttatgtgtgatgccactgaagttattagaacgtgttctcccatggttagtgtccaagctgagtgatgaggaggcatcttcttttcttgaaaatatgcgcttggcagcaccatcatcggaaacagcactggttacccttttctctggttgggcatgcaaagctcgttcagaggacaaatccaattctggggagtacttatgcttaacatctggagaaatgagatgcctattggatgaagttgatggactggaaaaatgtcggccattctgtccatgtgcttcacgtagcaatacagatgcttctctgcatccgcagactgaaaatggttctaggccaggaaagcgaggaaatgatgcagaatctgttcctggtactaatggaagtgacttgtctcagactgatgacactgaagcacgtccatgtagcaaaaaaccttgctgtattcctgggttgagagtagaaactggcaatcttgctattagttcatcgctggcttctgcaaagtcatttcgctctctatcatacaattcttctgctccttcattatattcaagccttttttcttgggagacagatgcatctttatcttgttcagatggcatatcaaggccaatcgatactatattcaaatttcataaagcaattcgcaaggacttagagtacctagatgttgaatctggaaagcttattgatggtgatgagtcttgtcttcgccagttcattggaagattccgtttattgtggggtctttacagggcacacagtaatgctgaggatgaaattgtttttcctgctttagaatcaagagagacattgcacaatgtcagtcactcgtacactcttgaccacaagcaagaagaacaattatttggagatatatctgatgccctcgctgagctttcgcagctacatgagaggttgacccacccccacattgaagtcagtgaagcagagaaaaacgattttaattcctctgatgagattgattggactagaaagtacaacgagcttgccacaaagcttcaaggaatgtgcaagtctatccgggctgcattgactaatcatgtccatagagaagaacttgagttgtggccattgtttgatgagcatttttctgtggaggaacaggataagcttgtaggtcgtataattggttcaactggtgctgaggttctccaatcgatgctaccctgggttacttcagcacttactcaggaagagcagaacatgatgctggatacatggaaacaggccactaagaatacaatgtttggcgagtggctaaacgagtggtggaagggagctccgacatcatctgattcttcagaagaggcatcctctgctccagaagatagtcatttacaggacaagattgaccagaatgatcagatgttcaagcctggatggaaggacatatttcgaatgaaccagagtgaacttgaggctgaggtgcgaaaggtttcacgagatcctacacttgacccaaggcggaaggcctatcttatccaaaatctcatgaccagtcgctggatagctgctcagcagaagctaccagagccaaaatcagaagagtgtagtgaaggtgccggtatccctggatgtgctccttcatatcgagaccaggagaagcaaatatttggttgtgagcactacaaaaggaactgcaagcttgttgctgcatgctgcaacaagctgttcacttgcagattctgccatgataaaattagtgatcatacgatggaaagaatacttatgttgcctgatcatactagagaaagcgacacaggagatgatgtgcatggtcttggtgttgatttcttccattgcatgaagtgcaattgctgcctggggatgaaattaacagagcacaaatgccgagaaaagaggctagagacgaattgcccaatctgctgcgacttcctatttacatcgagtgcagcagttaaaggtctaccttgtggccatttcatgcattcagcttgctttcaggcgtacacctgtagtcactacacctgcccaatctgctctaaatccttgggagatatgacagtatactttggcatgcttgatggcttgctggccgcagaagagcttcctgaggaataccgggaccggtgccaggatatactttgtaacgattgtgaaagaaaaggaaggtctcggttccattggctgtatcacaaatgcggcttctgcggttcatataacactagagttatcaagattgatagagctgattgttcaacatcagattaaccaggcgagattttccctctcatattcgaaattccttttgaatatatatattgttgtaaatatacatcaacttaaagaaatccatgcgtcatgcgtgctcttgtgtgttgcaactacgccaaactagtggggaattattctttcttcgtttttggcatatgtaaatatagacttacaatacatcgtgtagttgtgtagcatagctaccatatttttcatcccttagctagttcatttttgtcaagcctagctgcaatctactaggtctagtgtaagctgtcaaaatggacgctacatgcacttcctttttgccccctaagccttcgacgcataagattcagtattaacatagattgtccg

SEQ ID NO: 83023 - DNA, 1005 bp, Oryza sativa
  Clone ID: PAT_MRT4530_82396C.1
atgccggacggcgagcggcatgaggaggccccggatgtgaacttctggggcgagcagccggcgacggaggctgagtactacgcggcgcacggcgcggatggcgagtcgtcctacttcaccccgccgggcgggcgccgcctcttcacgcgggcgtggcggccccgtggcgacggcgcgccgcgggcgctcgtgttcatggtgcacggctacggcaacgacatcagctggacgttccagtccacggccgtcttcctcgcccgctccggcttcgcctgcttcgccgccgacctccccggccatggccgctcccacggcctccgcgcgttcgtccccgacctcgattccgccatcgccgacctgctcgccttcttccgctccgtccggcggcgggaggagcacgccgggctgccgtgcttcctgttcggggagtccatgggcggggccatctgcctcctcatccacctccgcacgccgccggaggagtgggccggcgccgtgctggtggcgcccatgtgcaagatctccgaccggatccgcccgccatggccgctgccgcagatcctcaccttcgtcgcccgcttcgcgcccacgctcgccatcgtccccaccgccgacctcatcgagaagtccgtcaaggtgccggccaagcgcctcatcgccgcgcgcaaccccatgcgctatagcggccggccgaggctcggcaccgtcgtcgagctgctgcgcgccaccgacgagctcggcgcccgcctcggcgaagtcaccgtcccgttcctcgtcgtgcacggcagcgccgacgaggtgaccgacccggacatcagccgcgcgctgtacgacgccgccgccagcaaggacaagaccatcaagatatacgacgggatgatgcactccatgctcttcggggagcctgacgagaacatcgagcgcgtccgcgctgacattctcgcgtggctcaacgagagatgcacgccgagggaggagggcagcttcctgacaatacaagattag

SEQ ID NO: 83024 - DNA, 405 bp, Oryza sativa
  Clone ID: PAT_MRT4530_82397C.1
aatatacgcactctcacactcatatagggggaaagagctcgggtgtacgccctcggcacgagtgtaaccgcgttccgcggaatattcccgcggttcgcaacccacacgccgtgttcccgcggttgggctttgagagctcatataaccactatctcttggctcttcataataataatatttttttttttggggaaataacccagaagaggagaatctctttttggcgttgggacactgcccaaccatgtaagtgtaacccctattgataggcctcccttggaatggatgaattttaaaggaattttgaaggaattggaatagattttatgaaaatcaatcgttcccaaggagccccctatgctgaaatggaactgaggaactgattaaaaaaaaaaaaaaaaaaaa

SEQ ID NO: 83025 - DNA, 462 bp, Oryza sativa
  Clone ID: PAT_MRT4530_82398C.1
atggcggagaggcgagccatggccggaagcgtcgggaggaggacgggggacggcggatggaggcgcgcgtcgggaggaggacggggaggaggagcaagagagacgaggcggggactgggaacggcgcggcgcggcgtggttgacaccgtggcgggcgtggcgctcgttgatggcgacggcgcgtacgcggagggcggcaatctcaccggcgaggcagcggtgcgggaagagcgtggcgagcaggtggtggacgaagtggtccacggcgccgtcgtcggcctcggactgcacgcggtggagggcgttcatggtggccaggtcgtcgcgcagctcggcgacctcgctgccgacaccgctgagctgctggtattcctcggtcaacaactgaccaacgttgcttacgaggttctaagccgcgttctccatgcttcgatctctctagcttggttggctggaagctag

SEQ ID NO: 83026 - DNA, 403 bp, Oryza sativa
  Clone ID: PAT_MRT4530_82399C.1
gcggatttttgtggcggcggcggcacacgagcgcactcgcgcgcgacggcttccagttcgaagcgccggcgaggcggccggcggtcggcaaggggacgcgacgcgcggcggcggcgcgccgacactgcagcagccagcagcagctagggcacgcggctcaccggccgctggctgctggggcctgggggcgccgggcgttatcatgcacttccgcagggcgcggcgcgcggacggactggcggggggacgcggaggagcccccccccagcagcagccagacaactgaggcgaggcaacaaggcaagtagcgccggtcagcaacaaagcaggcggaaagccggacggcaccaaccaccaaggcagcacggcaggcagcagcaagcgcccgaggcgcaaaggaaac

SEQ ID NO: 83027 - DNA, 273 bp, Oryza sativa
  Clone ID: PAT_MRT4530_8239C.1
atggctcggcggcaagaattacagcttcaacgacatcctaagttggaggcgaactcgaacacaagtagagacgaagggaagaaagaagagaggggcatggcgcaacgcatggaagacaggggcctggctggatcatccacatgccaacaagccaggacacaattattgaatgagccctaccgcgttcaatggctggtacaatgccaggcgctgtcctgtatggaggttgaggaggaggtgcggaagcaggtggagggcgggatgaggggctag

SEQ ID NO: 83028 - DNA, 273 bp, Oryza sativa
  Clone ID: PAT_MRT4530_823C.1
atggcgggatgcggcggattcggcggcggcggcggcgctagggcacgggcggcggcgggagcggcggaagctcatgcccgcttcgtccatttgctcacgtcgtccacccgtgttcaaataaaattaaacaaagacaggctgagcggataccaagttcaacacaaaagtgtcgagctccgagcggcagtgcacggctttggtgagggacggaagctcgatggcatctccccaccgatgagacaggttcatgaggaaccagaggaggcctggtga

SEQ ID NO: 83029 - DNA, 554 bp, Oryza sativa
  Clone ID: PAT_MRT4530_82400C.1
tatgacgttgtatgctggcgtccgtcggctgggaggctcctgagcggcggccctccttttttttttttttgttacacaacgataataatatattaatttattacattacataaaaacatctatcagagacacacaacgataatataataacttattacagtgcagaaaaaacatatatcagagacaacgataatataactagatagatataaaagcagtcgggaaaccaggcggcagtaacccatcatggtgcagtgacctatttatgccccgaaacgaaattttttcttcaccctccatgtgggcaactccttacatgatatcttccctttgttccagtatgcaggagagcaacaggttatgatatggcacatgatgctataaggacctggaatatctttttcttctgcaattactccatctgttgcttgtgataatgtgccattactgaggtggtattgactaagatagattttggtgtctggcatgacaatggtgtcaggaacaatggtagggaacgccttagagctgacacagagtgacctcctaccaat

SEQ ID NO: 83030 - DNA, 2919 bp, Oryza sativa
  Clone ID: PAT_MRT4530_82401C.1
aaggaacccggaagaagaaatttactattactccggtttttagttcgacatctagttcatttccatccatcatctttacacatactgacatacaggggggttatccaggaacttatgctgctcagctaatcagctatcaccaactttgctcacagttatgcacacaggggatggagtacattacacatcaaggtttcttcttttttttttcctttttcttttatacaaagtccttcctggagactggaacgtgtcttctacagggatgttttatgaggcttcaggattcgtcatcgctgttggagcccaccgaagaggatgatgacagtgaacttggagcctgatactgcacctgagcctgagactgttgctgcgcctggttcctgaagctttgaggatgaagcgggggacgatgtcgaggcgggtgcgaggagctcttctggttgtgactcatgttgatgactgctgttatgatgtccattattgtggggagaaacccagatgtaatagtcagaagacctgagagcgtgccatggcgaaaataggctgtgatgtcatattgcaaccatgcagcataggatactacgaaggcgacgaagagccccagcagatataaagggttccttagaaggaatataaattcgttgtaacctaaaattgcgagaagcaaaacagtccatgcaggtggcagccagttattgctacgtctgtgtgcttcctgcatagaaattgcttgtgcaacagcatactctgtctctgcattgaattgcctccagatgaattacactgcactggtgtgatcacaatattcttcttgccacccctcccatgtgcttgaggtgagaggatcagatgtgaattcaatactccttttctgtgaaagcggtcctccatctaaaagaccaggtgttggagtcaggtctatccgatgtggcttatctgccagtcggccacgtgctccgccgcatccccgagaaatggccgctaagcgtgcgtctcatctgatttggcttatggcttcattcacttgcgatgtccgacgcatggagtccttatcacagatcatcaggctggaaaatcccgaacagatgttgcatgagcttctatatggtgctccagtttgcccctaacttctgtagtgtcccacactgcatgcttaaccaaagaatggtttagacattcatcgtcaataaaacttgatctagcatttaatttcaccattgatgactgcgcacaataacgagctgatgctgcaaatcccccgccgctccttaatgattggtctagatcgcttttgaatttgttgagaaccacatgatgcaggtgttctaacattttcttgaaagcaggacatgtgtgagctttaccattttccaaaataacattggtcacattagccttgtatatttcactaattcccctcaagtggctaccgcacaagacaggagcaggaaagttggaccaaagctgaggagacacaagttcctccctgctgttatgtttcaaatcaaataatccaatatcacgacgattattcttgtgtccaaataacgaaagatcgttgtcatcagtaaaatatgtataattttccttgagatgtggatattgttctgtgctgagacaaagtgattggttatgcccaagaaatagcacgtgaccatccaggttttcgatctccacacgctttttttccacagtgtcaacaacaaatattttaatttccgcagtattctccacagatattgcagggtcagcatcatgcaagtcagcctcgtaatccccctcaatgtactcatatgacctccaaacttgcagaagatcaccccatggagcttgcacaatgtacatcttatcacaagcatatcctggcaccatttcaattatcgtcttcattgtgaccacagggccactgagatcgaatgcatggatttctcccactttattcactgcatacaatatgccatccttgtagatgcagtcagcatagtgagtgtgtggtggaagccaggtccacttatcatccccaacccttgcaaacgaaagttgcgaatgcggattgtgaattagtaccacgaggtaattttctgtggatgtatcagaaaacacaaaagccttatcaagaaggtattctcgcagctcgtcaagggagaaaattgatggctcagaatgataaaccctcgatgcactgtaccatgagtactcatacatgtggatagcaccggactcattgaagatgggattcacatgctcgattgtgataacagaagggagagctatttgttcccctgtaatcggattgaccaggtgcatctcggatacgtcatcaacagtaaccagacagcccagtgaggacccgatcagaaacctactacgcacgggtggctctggtagagtaatcttgtactccctcttctcgacaagactgtagagagacacgacgctatcgccagcagattcagaggtgtagagcaggcacggtgtctgggacaatttatagatacctaggctgcgcattccattgtaggcggagcgccaggagttacaaaccgaccctgcgcgcacgaggtcagggatctccaggagggcaaatatctccattaagatgtcctgatgcagctctggtaaatttgccatgacactctctgtcattgatggctgatcaccatcatctttttccacttccttcagtaaactgggagaaagggctaggaacttggacacaactctgaagagtaggcagcacaaatttttgggacattttgctagatcccctaagtttataatcctggctatgctacaggccgccatacatgggcttcgagctcggttgttgcgcatttctgaacagagcatccactgtgccttaattattgacgagaggcggtgtgcttcgcaaaacagatttgcttaagctgaagt

SEQ ID NO: 83031 - DNA, 1223 bp, Oryza sativa
  Clone ID: PAT_MRT4530_82402C.1
catagagtatcctataagaaactttgatgttgaactcatagagtatcctatgaatataaataggttgtttccctatttttagctgcataagcaactgatagagaggattttgacattaaactcataaatccttccctaagaaatgtgccatcacttgccatataattttgcttgtctgatgcaccctgcatacattctatgatcatatatagacataaaaggctaatgaattaccttcagtcacttactcattgtactttgagatacaggccgatcaatgcaacaaacatttgctcaatcaagttaattaacatgtaaagcaaggcagaatgggtatgtatatccaagtggtgtatatgtatttgcaggaaaaggtagtaacgtacatatgtgatcctttcgtttgtgcttccaagaatcagtgaatgtgggcgacgaagcggcgcaagggagagatgtggaagaatcagtgaatcgatgttaccgatcgatgggacctctactgcactgtagagggggcgcgggctggctgtcgtcgagccgttcctgcagtcgagccgccgccgccgccttcgagctgctgctcccgcagtcgagccgctgccgcagccttcgatctgctgctgccgccttcaagccgccaccgccgccaccgcctcccaaggccagatccggcgaccttaaggccggatctggcgaggaggggcacggagcggccgtcgtcaagccgccgccggtgccgtcgagctgcagatggggagggagagcggcggagctggggaggaacagagcggtgaaggcggagcttcgggagccggcagccagcgagggggggcagcgcggaggaaggcccgccacgcattgtcgtcgccgccctccactcgggcctccgcggcgcccagcgccgtcgcctccgtttgacccacctctggcgccgccgccgtttgggctgcctcgtcacccggcgtcgtcgcctccgctcaaaccgccttcggcgccactgtcgctcgagccgggcggcccccaccgtttgcaccaccccgtcgcccgacgctgtcgcctccgctcgacctgcctctagcgccgccgcctccgcggcggcgcaaaatagtcctgaccccctccggattagttcgctccaacagccgtgcctcggtgagttcgccgtccggccatcatcccctcagttggcgacggctccgtggagcaaccgaagaggagca

SEQ ID NO: 83032 - DNA, 564 bp, Oryza sativa
  Clone ID: PAT_MRT4530_82403C.1
atggcgagacggcgggagcagcggcggaagcaaggaggcgcggcggcggccgcgaggagggagcgggcgaccacagcaaggagccgctgtggcgacggcctgcggcgagacagcgggaacggcggcggatccggcggggggaaggcccgatccccccgccctagggggtctcggcggcgagcggcgggcacggcgacggcctacgccggcggatccggcggcgccgtcctcgggaaggccggatccgccgtcctaggggctctcggcagtgagcagcgggcacggcgagtcggcggcgccgtcctcgggagggccggatccgccgccctacggaggagcacgacgctcggcgacgatgacggcaggcggcgagggcagcaggcacggcgctgccccgcgacggccggcggccgcagcggcgtggatctggcgccggtgcatgtctcgcggcgaaatacaattgaaagaggatttggggtaacgaaaaagctgtggaaaattcttaatggaatcctgtattaccgcaacccaaacattcagaccaacataacacatgcagtttga

SEQ ID NO: 83033 - DNA, 892 bp, Oryza sativa
  unsure (1)..(892): unsure at all n locations
  Clone ID: PAT_MRT4530_82404C.1
gcagccttcgccgtttggcccccgaggtaaccgacggacaccaccaccaccgcgccgcctcgcctcgtgaagctccactagtttctagggtttagcctagccccgaccccgaggagggcccgagatcgcaatggagggcggcggcgagggcgcggagtcagcagctgtcgcctccgcggcggcggcggaggtggaggtgaagaacccgaggtgcttcatggacgtcagcatcggcggcgagattgaggggaggatcgttatagagctctacgcgtcggtggtgccgcggacggcggagaacttccgcgcgctctgcaccggggagaagggcgtcggcgccgtcaccgggaagcacctacactacaagggatcttgcttccatcgcgttatcaaaggctttatggtacaaggtggagatataactgctggtgatggaacaggaggggagtcaatttatgggttgaagtttgaggatgagaattttgttttgaagcatgagaggaaaggaatgctatcaatggctaattctggtcccaacacaaatggatctcagtttttcatcactacaactcggacacctcatttagatgggaaacatgtagtttttggtagagtaattaagggaatgggggtggttcgctctgttgagcatgctcctgttggagaggctgaccgcccgacttctgatgttgaaattgtcgattgtggggaacttccggaaggtgctgatgatggagttgtgaacttcttcaatgatggtgatacgtatcctgattggcccaatgatcttgatgagaagcctatggaggtttcatggtggatggatgctgttgagtctgctaaggcttttgggaataataatntcaagaaacaggattacaaggcagctctg

SEQ ID NO: 83034 - DNA, 1624 bp, Oryza sativa
  unsure (1)..(1624): unsure at all n locations
  Clone ID: PAT_MRT4530_82405C.1
gcggacgngngncgcgaccttcgccgtttggcccccgaggtaaccgacggacaccaccaccaccgcgccgcctcgcctcgtgaagctccactagtttctagggtttagcctagccccgaccccgaggaggcccgagatcgcaatggagggcggcggcgagggcgcggagtcagcagctgtcgcctccgcggcggcggcggaggtggaggtgaagaacccgaggtgcttcatggacgtcagcatcggcggcgagattgaggggaggatcgttatagagctctacgcgtcggtggtgccgcggacggcggagaacttccgcgcgctctgcaccggggagaagggcgtcggcgccgtcaccgggaagcacctacactacaaggattttgatgcggatttcataaacatgcattctgaaacatttggtagactagtccagaaattggatatggggtaccaatttctgtggcactttactctcaaaatattccatgtgcagggatcttgcttccatcgcgttatcaaaggctttatggtacaaggtggagatataactgctggtgatggaacaggaggggagtcaatttatgggttgaagtttgaggatgagaattttgttttgaagcatgagaggaaaggaatgctatcaatggctaattctggtcccaacacaaatggatctcagtttttcatcactacaactcggacacctcatttagatgggaaacatgtagtttttggtagagtaattaagggaatgggggtggttcgctctgttgagcatgctcctgttggagaggctgaccgcccgacttctgatgttgaaattgtcgattgtggggaacttccggaaggtgctgatgatggagttgtgaacttcttcaatgatggtgatacgtatcctgattggcccaatgatcttgatgagaagcctatggaggtttcatggtggatggatgctgttgagtctgctaaggcttttgggaataataatttcaaggcatgcaaattgaagttgggagatttgaagggtgctctgttggatgctgattttgcactgcgtgaaagtgagggcaatgctaaggcattttttcgacaaggacaggcacacattgcactcaatgacattgatgcggcagtggagagcttcaagcatgcattggagttggagccaagtgatggaggaattaaacgagagctagctgctgcaaagaagaagattgccgacagaaggaatcaggagcggaaggcatttgcaaggatgttccaaccttctggaaaatcagacaaagacaatgaagtaattctcaaatgccaatccttatcctttcttccccccttaatttcttatccaggctttcagcacttatcatgcaaagggtataacaagggagtctgcgcagctaacgcaaaagacgctgactccctatctagatacaaggaaaaaaaatagtgggggagaggatagcctttgtttttcttttgcattactacaaaagtaattgtgcgtatcaacgctgttaaagccgagacattgaactgaacagcacggtttccacttttcagactttgctgcaaggcatgccaatggacatttcctttaaaaaaaaaaaaaaaaaaaaaaaaa

SEQ ID NO: 83035 - DNA, 680 bp, Oryza sativa
  Clone ID: PAT_MRT4530_82406C.1
gagaaagaagatatagatgaagagaagagctcagcactgcgaaagaccaaatcgattatactcacaaatagctctgcatgcaaattgaagttgggagatttgaagggtgctctgttggatgctgattttgcactgcgtgaaagtgagggcaatgctaaggcattttttcgacaaggacaggcacacattgcactcaatgacattgatgcggcagtggagagcttcaagcatgcattggagttggagccaagtgatggaggaattaaacgagagctagctgctgcaaagaagaagattgccgacagaaggaatcaggagcggaaggcatttgcaaggatgttccaaccttctggaaaatcagacaaagacaatgaagagagcaagtgatccctagtttcctttccccggcagaacttttggtagcttgatctgggatacatactggaaccgtgaagagggtataacaagggagtctgcgcagctaacgcaaaagacgctgactccctatctagatacaaggaaaaaaaatagtgggggagaggatagcctttgtttttcttttgcattactacaaaagtaattgtgcgtatcaacgctgttaaagccgagacattgaactgaacagcacggtttccacttttcagactttgctgcaaggcatgccaatggacatttccttt

SEQ ID NO: 83036 - DNA, 157 bp, Oryza sativa
  unsure (1)..(157): unsure at all n locations
  Clone ID: PAT_MRT4530_82407C.1
gtcgtggaaaaaataattttggcgctgcgggtnctccgggtccncttggtcgcttgctcgctcgtggggtcgtccgggnggtttgaaatgggcggccccgtggttggtttcgcccgcggcgtggctgcctcgcctgtttgtnttttnttngccggng

SEQ ID NO: 83037 - DNA, 1524 bp, Oryza sativa
  Clone ID: PAT_MRT4530_82408C.1
ttgcgttctcttctgcgaccaagggagcaagagagagagacagggcaaggaagaaggaggagaccaaccctagctaagcccctccctcctctacgctctactgcacaggagaggaggagatggagtcgccgccgaccgccgccgccgccgccgccgcagccgagcgaccgtccgaggcagccgcgctgcgtgcgctcgtggaccgcgtgcgcgccggggaggtggaggccgcgcgcgaggtgcgccgcctcacccgctcctcctccaggcaccgccgcaagctcgccgccgccgtcgagcccctcgtcgccatgctccgctcccccgcccccgacgccggcgaggccgcgctcctcgccctcctcaacctcgccgtcagggacgagaggaacaagaccaagatagtggatgctggagcactggagccactgctgggttatttgcaatcaagtgatctgaacttacaggagtacgcaactgctgcccttcttacactctcagcctcatctacaactaaaccaattataagtgcttctggagcaatcccactgctggtaaaggtcctaaaagaaggaaattcacaagccaagaatgactcagtgatggccctttacaacctctccacggttacagataacctccagacgatcctttctgttcaacctatcccctctttgatagagttactgaagggtggaaagagatcatccaaaacagctgacaagtgttgtgccctcttggagtcattgctttccttcgatcaaggacgagcagctttgatttctgaggaaggtggagtgctcaccattgtggaggtacttgaggaagggtcccttcaaggtagggagcatgcggtgggagctctactaactatgtgcgagagtgatcgcaataaatatagagatatcattctaaacgagggggcaattcctggtcttcttgaactcacagtccatggtacacccaagtccagagtgaaggctcatgttcttcttgacttgctgcgcaactcgccatattcaagatcaaagctgccggcagacacactcgagaacattgtaagcaacattgcttcacagatagatggcgaggaccgcggtgggaaagctaagaagatgcttgctgagatggtgaaggttagcatggagcaaagcttgaggcatttgcagcgtcgagcttcttttgcatgatcaggtgattggcacattttgcaatggaagtagacatagtggaaataatgagtttgctggtgatgccggtccaggccttgacaggaccgagtgactggtttgagcgctcatatacttaagctgttgaagtagtagttccttttccatttcaatcttgtgtgttctgaacaagaacatttttttcttctgtttctcatgtgcccttcctgcactttgtgcatgaaagaccccaaaaaaagcaaaagaaagaaagcaaaaaagaaagacatatcctttgaggaatggactgtacatgatataaagtaaagatccccttcttcatgtcaacacaaaa

SEQ ID NO: 83038 - DNA, 404 bp, Oryza sativa
  Clone ID: PAT_MRT4530_82409C.1
tttgacttgagctcttgaaaactgcaattgagaaggctggttacactggcatggttgtcatcggaatggatgttgctgcttcggagttctacagtgacaaggaccaaacctatgacctcaactctaaggaggagaatcatgatggttcacagaagatatctggcgatagcttaaagaatgtatacaaatgttttgggagcgaataccccattgttgcgattgaagatccttttgaccaggatgactgggttcactatgctaagatgactgaagaaattggagagcatgtgcagattgttggtgatgaccttctcgtgaccaaccccactagggttgctatggctatcacggagaaatcatgcagtgcccttctgctcaaggataaccaaatcggatctgtgact

SEQ ID NO: 83039 - DNA, 924 bp, Oryza sativa
  Clone ID: PAT_MRT4530_8240C.1
atggctgcaggcagtcacgatgccaggcagcagcaccctacgtgccaaccgtcccatggcgtccctgatcgacggctccgacaccacgttgcggatgcactggcctccgcaagccatgacgccacctctcgacccaagctggacaagattccaatcctcctcactcatatccaggctggacggagtgacgacgccacgctgattccgccttcgtgctgctacaaagctgcgtccgcgcccgaagacagcgccacgaagccaccctgggccatgccgcaccgggtccccatcaacgactccacatcgcatgcttcttcacacaacgacggtagcgtcgacggcgacaggcagcggcagcggcggctgcgggacgacgaaggacgacaacgggcagcgcgcgtggcgcgcacgcgcgaccggaggctggcggcggcgggctgcggtagcggcggagagcggctgttgcgggacgaggacgggcggcacggcggcagggccagcaggtggcggcggcccatcttcttccccatcctccgacgacggccacaaccggttgtggtagtgtctgcatcggcagcatacgggggcagcgagcgcgggctatggcgcgttggcggcggcaggcggtggcggcggctgcaggcggtgttgcagtggccacgacgggcggcacgtggtggcgtcggcattggctcacgggcggcgacgtcggcaggcgactcacgtgcgggggcgtcggcaggaggcagcctgggcggcggcttgtgcggcggtgcttgtgcggcggcttgggaggcggcggagatgcgtgggcctcccggcggcggtggctcgcgggctgactggctgtggcggcaacgtcaaggcgacgcctacaaggtgttcgatgaaatggcaacaaaggatgtagaaatgtggagctga

SEQ ID NO: 83040 - DNA, 2238 bp, Oryza sativa
  Clone ID: PAT_MRT4530_82410C.1
atggagccgagcccgtacggaggcgtcggggggaagatccggcgccgcccggcgtcccgcgccgccgcgaccccctacgaacgcccaccggccgcggccgccgcgcgccgcctcgccgccgcggcggccgcggcggcggcggaggcggaggacgcgtacccgccgcagggtggtggtggtggtggtgggtgggtgtcgaggctggtggacccggcgtcccgcctcatcgccggtggcgcggcgcggctgttctcgacggtgttccgcaagcgcctcgaccctgcgccggctccggccccgccgaagtccacgcctcccggaagcaataatgagccaaaccaaggcttacctgagtcaacacaaactggttcaaaaccaatcctcgagaaagggaagaaccccactggtgcatcggacaataaggcattgtctgaagtagagcacttgttaatgaggaaaacattcacaaggaaagtatttttcatattaatcttcttgaagtgggttgagtttgaccgccttacagacttactgcgtgcaagaactgtggagtctgatttgtctgcaccggcagataaccttgataataagaatgaagcaaggaatacaatggatggtataggaggctccacatcacatgggatggctgcagatcattctattgctgctgatgatccggtttgtggtgctagttcacccgcagagctcgcaaagcaatatatgaattcccgttattcgaaagaaaaccgaccaaacagtttgcggagccaagtactcctgaagaacaaggcagaagcaagcaacattgcctatgatagaaggagacctggaggaccatttgtgcaagaactgagtcaatttagcaatgaaaactctgagcttcctgtgaatggctatgtaactccaggattacatgggcggtcagcaatatatagaatgtcctgttccccattctttaagggaccaagctcttccaatgatataaatatgtcaccattttcatcatctcagacacgggctaatagtttggtttctggctgcaggcaggtcttgaaacgaagaggtgccgaattggagaatgagcttggatctattggtcccatacgcaggattcgccaaaagtcaaatatgatgtctacttttagagatgctcgctcgagcccgcgaggaaactttcttcccagccgtacaattggttcagatttgaccgatggcggttcacccattcgggattcacctagttcgaaaagactattgctggggacgggtcaatctgtggaacctgcagaagcacgtaggaatgatgaagatggtaaaatttcaagtgataatgttcttgctgcgtcacctcaatcaaacaagatggctgaaaagatatttgagcagcttaatataatagtcccatcaccaaaagagaagctgtctcttccacaatttgctgctgggaatgcaagttgctccatgtcaaaacaacctgttaggcaaggcaatgagccaaacgggacgagtgaccctagtagttcccagaaatttcaacctatggatagtgttaagcattcccttgatccagaactgaatggttcaccatcgagtaaagacaagctgagaaaagatggatcatcaaaacttctgtcacattcatttaaggatttaggcaacaaagacattaggtctgataatgttgctctatcttcagttgccgctactacatcaagcaaaccgggctttaaaatggctgtttttgaggatctaccagagtttgatgatgaccaggaggctcctatcccatcgaaaaattcaatgggcaagactgaggtgaagacaactgataaaaaaattgatctgaagaaggagcagaaagttgaaccaattttattcaaacaaaaagttgagtcaaattcagtgcagaaggctgtcagttctccagttagtgaaaagcctatagcatccgcattgaaagatgcccgtccattaggcttattttcacctaatgaccctgaaaacagggctactcatgatgttccttcagacaacaacaatggtttcaaatttccacatgtaccttctggcacccttctggagagttctgtgtcacaattgccacttgcttcaaataaagacgataagctgatcagtgcatcatcttctatatttggtctcaagcagtccagtacaccagattcagaacaaacaaacactgctgatgtaaaaacagaagcaagacttggggagaggtga

SEQ ID NO: 83041 - DNA, 280 bp, Oryza sativa
  Clone ID: PAT_MRT4530_82411C.1
aagattaaaaccatccacaagccacgcgcatgtgggacctgcatgtttaaggcgagctcaattgaattaatatccttttattggaagttggaacagaggcttttatcaattaaaatcttgtgccagctttggacgcgatcccgtttgaacactcaggtgttttttttattttctcttctctttattcttatctattattctttccatttttttatttctttttatcttattctcttaattcttttcaattattatttatattttatttttagtttcttct

SEQ ID NO: 83042 - DNA, 195 bp, Oryza sativa
  unsure (1)..(195): unsure at all n locations
  Clone ID: PAT_MRT4530_82412C.1
cannangcagcaaanaagaaagaacgaggggcccgcagcaacgaagaacattnacgactgtgctctccttgctattgctggatgcagcgcctctgcgcagtttgatgttttaggtcaaagttataggcaatatnagctgcaggcgcctgtgctgctacagnaacatgngcttagnccatataatgaggggggaag

SEQ ID NO: 83043 - DNA, 464 bp, Oryza sativa
  Clone ID: PAT_MRT4530_82413C.1
aaagaaaatccaaacaccttcaagatttgcggtgggagaacaaaaaaagggcccttcacacacacttaacatttttgacgaaaccttaactaccggttttccaaattttctatttgccaaacaacccgaccatcctgcgaaattctacctcaccccatatctcgggctatataataatctgttctccccaacaagcccaccgggcgttaagctcacttctttaagccttcctggctgcaatctgccacttaccctaccccttgactgtacctcccttctatgacaggataagctgaatgaggcccgatccggacttgttagggctgatgcattcataaacacggtcggtaccgcgcctctccttcacctcctggttaactggaacgcgggacacatcaagagtgtccccatccagacctttgacctcagcattgatgtctccattcttaagaccatacagaatg

SEQ ID NO: 83044 - DNA, 834 bp, Oryza sativa
  Clone ID: PAT_MRT4530_82414C.1
tcagcctttcgccaccgccggcttctgctgcatgtcaccactcgccgagacgccgacgcggttccaccttcttccaccgtcggcttgtggtgctcgcctgaactcgccggcaaggacgaaccaacggctatcgccgccttcagccgctgcgtcgccgtcgttctcgcttttggagaggggtgacgcgaccctcctttggtcgctcgcccggctcgcccgagccttgggcggctgcatctgggggaatattctcctccgggccgtcctatcccacttttgcccagcaacataatcacaccagtacaatatttggggtagcctatctaactgttgttgatttggcggtctgaagtgtgactcgtagtcgacaacaaggtagtctttctcctcgaatcgatgaagtgacggacagtggagtgatccatcaaaaccattggccattgctgtccttgcgccggtcactccccactggccggcgcatccattattccccttgtccgtctcccgcgggtcgatcgggtcggggccctgaacataaccggggccggggcggggatgaaagctgacccgcaggtgacccttaccgccggtaaccgtgaggttatcgcggttaccgggcttaccgcgggggtacggtaatataaataccgttgtaacctccgccggggcgcggtaaccctggccccggcggtttgggaaaccctgatgggtgttaatactagaataaaaataaaacttgcgatctaagagcattcccatcaattccggcatcccatcttccatccagaaaatagtgtatggggggagaaaatccggctccaacagatacgccat

SEQ ID NO: 83045 - DNA, 3532 bp, Oryza sativa
  Clone ID: PAT_MRT4530_82415C.1
atgaggcgcgggaagggcgggaggaacgggctgctgccgagctcgctgaggatcatctcgtcgtgcctcaagacggtgtcgtccaacgccggctccgtcgcgtccacggtgcgctcggccggcgcctccgtcgccgcctccatcgccccccaggccgaggacgagaaggaccaggtattgtgggctggatttgataaattagagcttcatccatcatctttcaagcatgttttgcttgttggttattcaaatgggttccaagtgcttgatgttgaggatgctgcaaatgtttgcgaattggtctcaaaacgtgatggtccagttacatttttacaaatgcaacccacaccagtttactctgatggtactgaaggattcagaacatcacatcccatgcttctggttgttgccggtgatgagacaaatgggtcgggtatggttcaaggtggtcgcttaagtgcactgatcagagataatagcagtgaaactccaaatggaaattgcatttctactccaacagttgttcgcttctactctttgaagtctcactcatatgtacatgttctgagatttcggtctgccgtatatatagttcgctgcagcccccggattgtagctgtagctcttgcagcacaagtatactgctttgatgctgtgacccttgagaataagttcagtgtcttgacatatcctttgcaaggggcacctgggataaatattgggtatggcccaatggctgttggcccaaggtggttagcttatgcttccaatagccctttattatcaagcacaggccgtctaagtccacagaaccttacaccatctccaggagttagcccatctacctcccctagtagtggaagtttagttgctcggtatgcaatggaatcaagtaagcagatagctgctggtattattaatcttggtgatatgggatacaagacactgtcaaagtactgccaagaatttctgccagatggttctggctcccccttgtcatcaagtcctggcagaagatctggcaaacttccctctagcgtgcatccgctggaagctgacaatgctggaatggttgtcatcaaggattttatctcgaaagaaatcatatctcagtttagggctcacacaagtcccatatctgctctttgttttgaccctagtggaactctgttggtcacagcctccgttcatggccataacataaatgttttcaggatcatgccaaccgtaatagctaacagctcaggctctatacgctatgattggacagcatctcatgtccacctttacaaactgtatcgtggcatgacagcagctgtcatccaggatatctcttttagccattttagccagtggatatctattgtttcatcccgaggtacttgccatatttttacattgtctccttttggcggtgatgcgagtctgctgccacagaattctcacagtgatgggctaccccttgccccatgtcaatcaaggccatggtggtcaaagccatcattccttatggatcatcagcttcatccagctccttcaactgtaactaattctgtagtcagtaggataaaaaacagttcttctggttggctaaatactgttagtaatgtggctgcttctgcaagtgggaaactatctgtaccatctggcgctgttactgctgttttccacaattccaactatgaaggttcattgccagttccatcaaaggctaatgccatggagcatctattggtgtattcaccatctggccatgttattcaacatgaactactgccttcaggttctgaatcctctgatagcagtccaatagttgggcctggttccttgcagatccaagatgatgagttgcatgttactgctgaaccgactcagtggtgggatgtatgccgtaggacaaactggccagaaagggacgaaaacattgcaaacatagtcttccataatcaacgaaatagtatgatggcaatggatgcttctgactgtgatagtgagcattcagattccgttccatcagatggtatttctgggaaagagatgatgagatctcgagaaagatcaagttggtacctctcaaatgcagagattttcttctatgtgatagatcaaccacctgcaaaatcaggggaatctcttagctctagtgggggagagattgagattgagaagctgcctctgcatgaggttgaacttcggaggagggaattgctccctgtattcaagcagttccactattctgaacagaacttcagtgacaggaatcttgcaataggacggtttcagaatgcattgacatacatcgacaaggataatggtgctcatggatccaaggcggggttccctatatctggattttacagtgatatgaggaaaatgcagaacatgaatggtttagaggggcagttattgttgggacctatcactaatgatttacaaccaatggaaaaatgcaattctgttcaatctcctaaagtggcaaattttactgcccttcacaatgtagataatgagagcatgaaccatgtttcaacagcaactggagcaaccacatcagtcacaacagtggacactttaccttcaaccatcagaccattgagcagctactccctcttggatggatctcttgatgatggattaccatcacctgcaagtaatgtatcattcaggcctcagataaccaacaattcttcagtaagcaatggtacaatgactgacatctcaaatgggtgtctcacgagcatcaattctggacagaatgaagcatctgattctcacaactcagtggagtttacccagtatttccaagagggctattgtaaaatatcagaactcgatgactgccgtgagttaactgaagctgttactgatgctgacagcagcagcagccactgcgagagagagaagcccgaggaagatggggataacgatgacatgcttggggctgtttttgccttcagcgaagaaggttgaacctaataatatactctgcttttacatagagaatggaaaacagtgcccgtgatattacctagaaaatggtggatttccattaggctttcgtggaataaattggtgctgagatgataatctactatttggtacatattagaaaggtgaagcttgtgctcgatatccatttgtgagaagttttactcaggaattgagatcaagatccttccgggccattaactaatccacggatccacgttaaggggagcttggtgttgtcgagaagttgctgctgcctgccgcaacactgccccttttccgttgctttgtacatactgtaaaagaccatttgttttgtgaaatacatctctggaacattggacggtccaacttccttggcagccatatttgttgactgcttcctgccaaggcctgttaatgttccttgtttatttgtacagtcttttctgtttcattaaggaaaaagaaaatctagcaaggattaatgtgacataactgtataaacattcagtaaagaatttccgtttacgaagaaatgttaaaaaattcacctgcagcccgg

SEQ ID NO: 83046 - DNA, 1200 bp, Oryza sativa
  Clone ID: PAT_MRT4530_82416C.1
atggcggagagcggatggcagtggctcctgccggagctgctcgaggagatcgccggccggctggtgacggaggccgaccatgtccacgtgcaccaggtgtgcgcgcactggcgcgcctccaccgctctcccgtccgccacccgccggccgtggctcgtcgccgccatccgcccgtggcggcggatgtcgccggtgggcgcctactccgtgtggcacctcgacggcgtcgggcacgtggacctgcgtggcgcctcgccgcccgccggcgtcccgcgctgctgcggcatgccccgtggctggctcgcgctgacggacgacgacgagctgccgacgcgcgcggctggtgctctgggatcccacctccggcgcggaggtcgagctcccgccgctgcgctccgtcctccaggtcttcctctccggggacgcgtcgtggagcctcatgacgccaccgaggccgaactactccacctccaggatagagagcgtcgccttccacgacgggaagctgatcttcgtcgactggcagcagctcctcgtcgtctacgacctcaactccatcgccgccgggacgacgccaccggcgccgccggcgttcaggtgcaatggctcccgtccttcgccgaggtttacaagccgccggccgccgagtggacggcgccggcggagcggtggcagctggagtttggggagaaggtgacggacctcggcggctactcggtcttcttggggcggggagaagggttcgccgttcatgcacaagacttccctttgatcagaggaaactgtgtctactatgcaaggaacgatattttgtacagtctgatgtcctgcagagaattccatgtcctccgcaatatcatgagggggaaggaattagcagctgctggccctattcttggttgtgtctcaagaggcccttcctcccttcctcaaggagtagttagcagtgatgaagactattttttaaataattctattgcttcaacagtatttacagaaaaaaggaaaactgagcttcaccaacttctctcctctcagataaactcatatgtgggtacacttgattttgtgtcgtgtgatactaatcaggccaaattctggatgatcgaaacatattcaacattcttattcgaaaaaagaaacatactcagcattaaatcgagaaagaataagttggcatcttgtggttgtagaaattag

SEQ ID NO: 83047 - DNA, 549 bp, Oryza sativa
  Clone ID: PAT_MRT4530_82417C.1
cattcgatcctcactggacatgagactggacatgatgacatggagctatgaggacctctgcctttggaagaacgcatagccaatgtgaacactgcctcgctgatgagaaaatttctgctgtgtgatggagtagcctctcacagtagtcatttgcaggatgatcaggacatgaaagatgtgtaatctgcctggaggaatacaagcatgaggacacacttgggaggctgaaatccgccacgggtttcacccaaattgcatcaagaagtgctcaggtgaagaacacctgcccagtttcaaagctgctgcccagatgaagcactgatgaggggaccattgatcttcccctccatttatataatgatccagttcaagtcagcccaaattatcctgtcccattgctcccaatctgtggctctttgaaataattatctcgtcgatatggaaattattttgtgagctattaactattataaactcaaccaaacctatgccaatgtaatccccaagttatttaatttcgctcaaaaccaccaaaaaaaaaaaaaaaaa

SEQ ID NO: 83048 - DNA, 1653 bp, Oryza sativa
  Clone ID: PAT_MRT4530_82418C.1
ggcttaattagctctagctagctgcagcaatggccatgggggctcgcctctgcagcagcagcattattgttgtggtggtcgtcctgattgtggcgacggcggcggaggcgatgcggtgtccggggacgacgagcgtgtaccggcggccgaagaagaaggcggcggacatggtggacatgccactggacgccgacgtgttcgcggagccggcggggaggaacgcgccgcagcaggtgcacataacgctgggcgaccagacggggacggccatgacggtgtcgtgggtgaccatggaggaggccggcaacagcaccgtcttgtacggcctcgccatggacaagctcgacatggccgccgacgccaccgtcaccacctacacgtactacaattacacctccggcttcatccaccactgcaccccactagggacgcagtatggcgtaaagtactattacgccatgggtttcgggttcacggtgcgcagcttctggttcacgacgccgcctcggccgggtcccgacgtggccttccggctggggctcatcggcgacatcgggcagaccttcgactccaacgccaccctcacccactacgaggcctccggcggcgacgccgtcctcttcatgggcgacctctcctacgccgacaagtacccgctccacgacaacaaccggtgggacacgtggggccgcttctcggagcgcagcgtggcgtaccagccatggatctgggtggctggcaaccacgagatcgactacgccccggagctgggggagacgaagccgttcaagcccttcacccaccgctacccgacgccgcacctcgccagcgcgtcgccggagccgtactggtactcggtgaagctggcgtcggtgcacatcatcgtgctctcctcctactccgcgttcgccaagtacacgccgcagtggaagtggctggaggcggagctggggcgggttaaccggagcgagacgccgtggctgatcatggcgtcgcactcgccgtggtacaacagcaacaacttccactacatggagggggagtcgatgcgtgcccagttggagaagatggcggtggacgccagggtggacctcgtcttcgccggccatgtccacgcctacgagcgcagcttccgcgtctccaacatcaggtacaacatcaccgacgggctgtgcacgccggtgcgcgaccgccgggcgcccgtctacgtgaccatcggcgacggcggcaacatcgaggggctcgccgacgagatgacgtggccgcagccgccctactcggcgttccgggaggacagcttcggccacgcggtgctggacatcaagaaccggacgcacgcctactacgcctggtaccgcaacgacgacggcgccaaggtcgccgccgacgccgtctggttcaccaaccgcttccacatgcccaaccacgacgactccacccccacccccaccaagcgccattattatggatgattcattcattcgcatccatccatcgcttcctcttcatcgtcgtccatgcctgcctacctagtgtgattttgtacacgtacgtacgtgtgattttataataactatatattttatcgtgccaatcaataccattaggtgtgtaagtagtaacagtttactgtaatctcttcctgctgctgct

SEQ ID NO: 83049 - DNA, 218 bp, Oryza sativa
  Clone ID: PAT_MRT4530_82419C.1
ggagcttacatatggggctctgcgacgtggacggcaaccacctgttcctggtcgatgtcgcggcggccggagccgctgacctcgccgatgtcgtgcctagggtcgcccgccaccgccaggcgacgactccggccgggtttggttcgaccggacccaagtcggggatagatggtgaggcgcaggggcactccgtgcttcatgacctacatgctcattag

SEQ ID NO: 83050 - DNA, 1110 bp, Oryza sativa
  Clone ID: PAT_MRT4530_8241C.1
cggaattccgcgtcccgcccgatcgatttgcatcatcgtcgtcgtcttcttcgatcgatcggctgatccagtaattcctcgatcggtggacgtacgccacgctactatcatcatatcaatccccgatcgacaggttaacatcgatcgatcatccaagccagccatcgatccatcagaataagcagctagcttggagaccgatcgatcgatcgatcatatgtcgattcgattcgatccgatggagagcagaagcagcagcagcagcagaagcgtggtgatgatgtgctgcgtgctgatgttgatgattgcggcggcggcgcatgcgggcgagcaggaggcggaggagtgcgctagcccgatgagcatcgaggaggcgtgccggggggcatcggagacgcaccacgcggtggcctacgaccactgcgtggcgtcgctgacggcggacccgcgcagcagcagcagcgaggcccgcagcctgcacgggctcgccatgctcgccacccgtatggccatcgaccacgccaccagcaccgtctgcaagatggacgacctcgcggagctggagcccgaggattcttcgtcgccgtcggacgcgcgcgcacggttcgagcactgccttgagcagtacggcggcgccgccgacctcctccgcgacgccctggacaacctcaaggtccgcatctacgggacggccatggagcagctgtccgccgcgctgggcgccgccgagagctgcgaggacgcgtggaagggcgacgagggcaacatccccatcgccgcccacgacagggagtacggcaggatggcccacatcgccatcggcttcacccacgccgccgcctaatcttcctccatttcttccttacttccatctatcgcctgcctgcctctgcctaattttatttctactactccttattaatttgcattctcatcgatcgatcatccgctggaatttcttcttcttttacttaaattattattattattattattaattgctgattgaattgaatatgtactgtaggatttaattgttcatcagatgaaagacgaatgaataataacacgattaatttactgtgtaaaaaaaaaacaaaaaaaaaaacc

SEQ ID NO: 83051 - DNA, 3271 bp, Oryza sativa
  unsure (1)..(3271): unsure at all n locations
  Clone ID: PAT_MRT4530_82420C.1
tttttttttttttaagatcaaaatcaaacggactcgacagattcctctttttagttaaacaaccaaatttgtttgtttcaggaccagtacacgcgagtcaaacccctcgtacatgcgagtcaaaaatgactatcgatttcagaaaggaaacatgggccgctctactttttcttttattttttaaatactgaatgattttctttgaaatggagcgttgccaaatttctggaagctgaaccatcctgttcgagcagccagtactgtacaagtcatacaacaaagcgttcattgagtctgttagactgaatatccatccgcaccacctcggctaaacttcaataagaggaaatgcgatgtaataaagctacaggtacgaaaaaattagcctctcaagtctgaaccaatcacggtaactactgatctcggggatattctaccaggttgctcgcttgtaagtgcacttgcaaccacacctatagagcccaatggctgctgcccttagttcttctgtgggggtgactttggcctgaggccctcaatctcaggtgtcgtcacaactagatggggagcctccggaggaggatttcgtccaccgcctccctgccatactttcccatccttgtctgcaaagttcttgatataagcctctttgttgaagttggaatacgataaacctttcccgagagtaagccaaccaggacgaatgttatgatcctctccaaagagttcaaggcgcctctttccaagagcgaaatgctcaattattctgtacatgtcttcaggctttttagttgagccatcggttggttcttcagctattattatatctgtgtcaatattagcgtggataacatgtccatcagtgctacgtcgcactgttcctttaatacccatcaagcaatgctcctttgagtgttgcagtattgtatgagagtcatgccgcagactgggtgttgcacttttcttgttggtttttacccagcaaacatcctcacatcttcgaaatccccacttctttaagcactgacggccctgttcaagacctacaccatcaccgacccaaaggaagacaaaagatggagtgtctgctatagcctcaatctttaaattcataatctcctcagcgttccagtactctatgtgatctgtgattcctggtgcccggtgaacatactcctcccatggaggatccacaagaataacatcaaacttcgtaccaaaaaattctggagaaagaacatgttgcctcagatcacacttataatacattggtggtgaagcagaattggcaacaatttcatctttcctctggatgagttctctcaattttggatagtcctctgctacacttgtaagatccagttctctaatgaaattttgaggtcgcatgccagtgtccacaaagttctgtgagtaatcattctgctcaccccttgaaggagcttttctggttggtccactgtttctatgtggcgtccaaccaccaccagcaggcggtttatcatgtgccatttcacgactttgcgtgcccaattgatggaaactcaatccagacacatttgtcggagcacctattccagagccgatttggtttaggtgaatattatgaccaggcccagctcccatacttggagcgaatctatgttcagcagcaactggagggatgggaagattgggtggaacagaaagcatattcacatcaacacctcgtgccccaggccacacaagaggcccagggaatggcggcacaaaaacaccaggtagaagaggggcctggagagtggggaatatttggcccaatatgttgcattggtcctggtggcagaccaagaggaccaaaaggagggggcataattggtaatgtgcctccaactctttgagaatccctgctatttggtctacctcttcctcttgaggatctatcacctttaggaccatgttgaggaaattgagaaatcgtgctggtactaccactttgatctgcttcaggattggcggatttatcaccattcgttccaggtgttgcatcccgatgagctcccacatcatatcttcttccagaaacagagccctctcgtccaaaatcaagattgttatttggtcggatctctattgaatcagaactgtcataccgacctccataggttgaagaacctctaatactttcagatctacccctagaatctcgccggtaaccagctcgcccatggaaactcccaccatctagtctttcatgtgcattcttccattcagaatcatttgcctccttagaatcttgccactgacgattcctcacatagtccttagatccttcaggctcccgtgttctgtcgctccagtttctgtcccttccgctgtctaatttgtcatctctcaggacatccacccttgagttatctcccgtaccattccttctttcactatccaagtctagctggcgttgaccatagtcactctgtccaactccatcatgcaaaatgtcttttatctctacagctttatcctgccgatcatctcttaacacatgcacttcagtttcatgacttctatccactgatctgctatcgtcaccaacatcctcccccatggtcagaacccttcctcttattgctatcacacctttcctccttgcaatcagtctcagagccatatgctcttgatgagtcccaatcattcttggcatctcttcccctgttcctgtcggagtccttatccttggaatcaggacttctccgtggaattttcggtgatcgtgagtccattctcaaatgatagtcagccaacatttcctttactatgtttggaaggaattcatgtaaattttgggcatgaaggtgatgcgcatgcacagtttcaagtttggtgccgccttcttcctcctccggcttcggggaggagctcgtgctttcttcagatcctcacgctgnccctcctcactaaccttctctcgtataaactcaatctgctcatcctcccacccagctaattcagcagcctcttcataactgcagcccagtgtccaccatggtgacttcagagccactcgagctgaatctttggcttcggttgtacgcccaactctttttaatatctctgcgttgaacacaaagggccttccaaatccaggaaattgatctctagtgtagaattctccagtaattagagctgacacataatctcctttttcgaaatggcgtgatgtttttctctctataacatctggaaagaggccaaccttcttcaacaaataggcatcaagatctgccatctg

SEQ ID NO: 83052 - DNA, 1050 bp, Oryza sativa
  Clone ID: PAT_MRT4530_82421C.1
aagatcaaaatcaaacggactcgactgtttcctctttttagttaaacaaccaaatttgtttgtttcaggaccagtacacgcgagtcaaaccctagtacatgcgagtcaaaaatgactatcgatttcagtaggaatacatgcatataacaactattcccggtaagcaatgaacttcgcaatatcatcaagtccagcttctctgtaacatccagcaattcgatcaacaacatcgtcccaattaccatccaccgatgccaaatccattagaaatgctgcctcgtcaagaaccacctgttctggagcttttcctttcttcagatcctcacgcttgccctcctcactaaccttctctcgtataaactcaatctgctcatcctcccacccagctaattcagcagcctcatgttcatctgtagcataactacatagtgatagcctttttaatatctctgcgttgaacacaaagggccttccaaatccaggaaattgatctctagtgtagaattctccagtaattagagctgacaccttcttcaacaaataggcatcaagatctgccatctgtgactctttgaaatcaccttttgtgtaaagttttttaccagtgtcccccacagcagaccataaatcatcagcgtaaccattgatatcagcctcaacgagcactctgtgaatatattggttcacattcttagccaaaagccataggccgtgattacgaacttccaccacaggcatttccatcctaaaggtatacatacctgctggactttctgctaagggaacaacaagtggaatcaggcctcttttcgcccctggagaaactagcttttcacctcgtgcctggagcacattcagcaacgagctaagatgctccggtggatcggttgcggcgacctccttaataaacgacgcgtgatcgtaagtggcggcggcgaccgacggggaggcggccgaagaggaggaggaggcgcagcgggcggcgaccccgaccgcgcgcggcgccagaagcacggacgcgaaggcggccctgctcaccgcgggcctcat

SEQ ID NO: 83053 - DNA, 234 bp, Oryza sativa
  Clone ID: PAT_MRT4530_82422C.1
ctaactacgctctgttctgtcaggccggaagttccggtcaccccagtccggaactgaccggaacttccgggggtcgggggtataaatacccagggggagcccaagcctggtatctctctcctcacttcttctcctccccgattcccaaaccctagccgccgctacagtgctcctctcggcgattttctcttccaaccgtggaaattcgattcctctccgtggaatcaaccacat

SEQ ID NO: 83054 - DNA, 717 bp, Oryza sativa
  Clone ID: PAT_MRT4530_82423C.1
atggcgacgacggcggcgtgggcggtggtgatgctgctgctgctgccgtggccctgcgcgcgcatccggcagggcaacctctacggccacgtcaccggccgcatgctgatgtggattctggggaatccgatcaagctggaagggatggagaacctgaacacgaggggaatcttcatctgcaaccacgcttcgccgctcgacatcttcctcgtcatgtggctggctccgaccggcactgtcggaatcgccgaaaaggagatcatctggtacccactgttcgggcagctctacgtgctggccaatcacctccgcatccaccgctctaaccctgccgctgcaatcgagtcaatgaaagaggttgctcgtgcagttaccaagaacaacctatcactgatcctgttcccagaggacacacggtccaaaaccggaaggctactccccttcaagaaggggttcgtgcacacggccctgcagacgaggctgccgatcgtgccgatggtggtgaccggcacgcacctggcgtggaggaagaacagcctgcgggtcaggccggcgccgctcaccgtgaaggtgctgccgccgatcgagacggacgggtgggtggaggagaggatcgacgagtatgtggagatggtgcactcgctgtacgccgacagcctcccggactcgcagaagccgctcgagcctgtgaacaccgggaagaagaagatgagctaa

SEQ ID NO: 83055 - DNA, 361 bp, Oryza sativa
  Clone ID: PAT_MRT4530_82424C.1
atattgcatttataatgttgttttttcttttattcatatattaaaaaacattttccttttcctgtttattaaaaaaaaaaggcaaaaattttctatttagttataattaataaaattaaaatgactatttcttgggcataggccggaataaactcgcgggggcggggggctcacttgacacaacagaaaagggggatgccgcccccaacagggaaatggcaaaactccacccgcgggtcgggggcaagggccttgaaaagcccaacccctcaagcgcggtaggagcggatgtccccgcgcaagggggcgcctacggggaacccgacggagccgttccaaaacgccttgccaaaacccgaca

SEQ ID NO: 83056 - DNA, 177 bp, Oryza sativa
  Clone ID: PAT_MRT4530_82425C.1
atggaaccatttggccaacctctggtcgccaacttggcgaaggtccaagtcgagaagctattggtccgcttgcgaagcctgctgaagcgttctattcttttttttggaggctgcgtagacaagcggttggaggatgtcatcgaggtccatgttattgcacctgattgggccacatag

SEQ ID NO: 83057 - DNA, 541 bp, Oryza sativa
  Clone ID: PAT_MRT4530_82426C.1
aatgacttccttttactatctgtaaacccgaagagcgaacaaggacagtttgagtctgttcccttaatcaatgaaatgggtccagctaacaattgcagctgagagatagattacaagcactttatttatatacatccaaacatagctctatggctggctgatgcacctcaatccatgctagaagggatgggggaactggccaaaaatgtcgctcgtgatctgcataatatctattggaacatccatcaaaaaatctatgtccgaataaccaatcttgctgtctacgaccaagtacgcaatatcaagctaatccatatgaacacacagaatcgatttggcggcgttagctactcgtacatcaggagcgccttctgagctacaacaggtcaagttcagactgccgccgatgaggtattgtactgggccccttcttccagaactacttacactgaagtcaaggcaggatcctgccctgaatgccagtccaaaaggccgttcaccatgaatgttgagcgtaccatgtctaggaactaccagaaac

SEQ ID NO: 83058 - DNA, 989 bp, Oryza sativa
  Clone ID: PAT_MRT4530_82427C.1
atggcggtttacatcgctcgggaggctaccaagctatggaggaaggtgtgtgcggagatagcggtggagctgcagcttcttttcgagaagtggcgcttgctccttgccggattggtgtttcagtacattcatggactggctgctcgaggagtacattacttgcatcgacctgggccactgctccaggacttgggattcatggctcttccggaacttggacaggacaaaggatatgttagtgagagcgtgttcacattcatcttcatttccttcctgttgtggagttttcacccttttatttatcatagcaaacgtttctacactgttctactctggcgcagggtgctggcctttttagttgcttcacaatttttgcggattattactttctattccactcagctcccaggtccaaattatcactgtcgggagggctcaaaaatggccactcttccaccgccccataatgtacttgaagtgctcctgatcaactttcctcgtggagtgctttttgggttgtggcgatctgattttttcatctcacatgatctttacacttgttttcgtgcgtacatatcataaatatggatccaaaaggttgattaagattcttgcttggctgatggctataattcagagtcttcttataattgcttctcgaaaacactacagcgtggatgttgtgtgttgcttggtatactgtcaatttggttgtattctttattgacaataagctaccaggggaatctgctaggagacaaagaatgcttggtttcctctgtatgatgactggcttctcaggtgcctctgcccctgcattttgtctgtccgccatggcaatatgttcacggatgaatgagacagagccaggtgccatagcaccagcattgctatggactgcaaaggaatcagagtctcaactctcaagtctcccagcgacttttctcaggctgccattacagttttgcacccttgtatcgaatctctag

SEQ ID NO: 83059 - DNA, 435 bp, Oryza sativa
  Clone ID: PAT_MRT4530_82428C.1
tgttattctgatggagatggacccaactgcggagcagcacctgcatggcgggtacggacgttatcaaggacagcgttgatcaagccatgtatgaaccttccactgcccaggagattcagacgaactcatacgcctgaacagcagcttgattatatgaaactgaatgactcgcaaccattgctactaagcatatggactacagcgatatctgatccataatatagctatctaatcatataaagaattgaaaactactatggtacgtggatactaggaaccatagaagaagtgcaagatgaactaagcatcaaggcgaatgcgcgtggctaggcaatattgtttgctcagatctttcatgtggcagtataaggcataaaatagagtgctcacaacatttcaatggcagaatgtcaccttttcctatttcaagcccca

SEQ ID NO: 83060 - DNA, 507 bp, Oryza sativa
  Clone ID: PAT_MRT4530_82429C.1
actcgccgaaagccagctaagatccctgatcattgtttgctgagcgtacaacacaaaagaacagtaaaaagggggaaactgtttgcaagttgaaaagggtaaagagaattgtttacctgttgtatgcaaaaggaaaaatggcctggcggatgaaactacaacacctcaaagacatcacagaccagttctctccagggcgggaacttggtaaaggtgggtttggagtggtctacaagataaccattgcgactgtcgaactccaatctatatgttgctgtagtcgaattggaatatagctgttgtttatctacaaaacttatgggaattcttgcaaatgggaaacccatagcggtcaagaggcttcaggtcatgccaggaatacaggacagacaatttaataatgaggttcatcatcaggtgggacttaagcaccagaatacagtacagttaattggctactgtgatgaaagacctgatgggacttaagcaccagaacatagtacaatt

SEQ ID NO: 83061 - DNA, 520 bp, Oryza sativa
  Clone ID: PAT_MRT4530_8242C.1
ttgccgccacagccagtcagcccgcgagccaccgccgccgggaggcccacgcatctccgccgcctcccaagccgccgcacaagcaccgccgcacaagccgccgcccaggctgcctcctgccgacgcccccgcacgtgagtcgcctgccgacgtcgccgcccgtgagccaatgccgacgccaccacgtgccgcccgtcgtggccactgcaacaccgcctgcagccgccgccaccgcctgccgccgccaacgcgccatagcccgcgctcgctgcccccgtatgctgccgatgcagacactaccacaaccggttgtggccgtcgtcggaggatggggaagaagatgggccgccgccacctgctggccctgccgccgtgccgcccgtcctcgtcccgcaacagccgctctccgccgctaccgcagcccgccgccgccagcctccggtcgcgcgagtagctctgccaattccactccaaaaaaaggtgaatctggaccgtttggcacaactcccgctgcaggtaa

SEQ ID NO: 83062 - DNA, 936 bp, Oryza sativa
  Clone ID: PAT_MRT4530_82430C.1
atggagggtgagaataatgcatcgccgcatcctccaagtttggagtcgaggagtaagcttcgtggacgacgaggaacaagcactcggtcttcatcgaatcccactgtgtccttggaagtggtgccattggagaaagtttcagaagatgaagacgatgataacagcttcgaccatagggatgatatgtctgaaagcctacctacagttgatggtggaagtggaagccagaagggtgatgatgagtttgatgatggtggatcaaaggctaagaaggcaaagacaggagggaaaaaagctggtgttacagtgtctcccaagtgcaagatagcaagaggcaaaagagctgagtgctggaaacattttaaggttatcaatgtcccatccaagaaggagagaggtgtcatggtgacaaaggcaaagtgtggtgctacaacaactctgaaccggcacctggctggttgcacacaatatcagaacaagttgacaaaggctaaagctcaaggtacactaaactttggtccagaagatgacaactctcttattgttaatcctactgagtataatcatgagcacactagagaactgattgccaagatgataattgctcatgagtattcatttcggatggtagaacataaatggtttaatatcttgatgaaatggatgaatgaatggaaaatagaagacaaggtcacaacaataactcttgataatgctacaaacaatgatactgctgttacaaatttgaaggcaaagcttcttgctagaaagaattcagtatttgatcctagttacattcatattcgttgtgctgctcacatagtcaatttggttgttaatgatggccttcaaccaatagataatttgataagttgcttgaggaacacagtgaaatactttaagaggtctccatctcgcatgtataagtttgtggaa

SEQ ID NO: 83063 - DNA, 2253 bp, Oryza sativa
  Clone ID: PAT_MRT4530_82431C.1
atggagggtgagaataatgcatcgccgcatcctccaagtttggagtcgaggagtaagcttcgtggacgacgaggaacaagcactcggtcttcatcgaatcccactgtgtccttggaagtggtgccattggagaaagtttcagaagatgaagacgatgataacagcttcaaccatagggatgatatgtctgaaagcctacctacagttgatggtggaagtggaagccagaagggtgatgatgagtttgatgatggtggatcaaaggctaagaaggcaaagacaggagggaaaaaagctggtgtcacagtgtctcccaagtgcaagatagcaagaggcaaaagagctgagtgctggaaacattttaaggttatcaatgtcccatccaagaaggagagaggtgtcatggtggcaaaggcaaagtgtggtgctacaacaactctgaaccggcacctggctggttgcacacaatatcagaacaagttgacaaaggctaaagctcaaggtacactaaactttggtccagaagatgacaactctcttattgttaatcctactgagtataatcatgagcacactagagaactgattgccaagatgataattgctcatgagtattcatttcggatggtagaacataaatggtttaatatcttgatgaaatggatgaatggtaactacgagtttattggtaggaagtctataaaaaatgaatgcatgagggtttatgaatctgaaaaaaatcaactcaagaagagtttgaaagaggcagaatcaataagtttaaccactgatttatggacgtctaatcaaaaccttcagtacatgtgtttggtggcacattatatagatgagaattgggttatgcaatgccgtgtcttgaactttatcgaggtggatcctccccacactggaattgtcatagctcaggctgtttttgaatgtatggtagaatggaaaatagaagacaaggtcacaacaataactcttgataatgctacaaacaatgatactgctgttacaaatttgaaggcaaagcttcttgctagaaagaattcagtatttgatcctagttactttcatattcgttgtgctgctcacatagtcaatttggttgttaatgatggccttcaaccaatagataatttgataagttgcttgaggaacacagtgaaatactttaagaggtctccatctcgcatgtataagtttgtggaagtatgcaacaattattctgtcaaagtgggcaggggtttagctctggatgttaaaacaaggtggaattcaacttataaaatgctagatacgtgcattgactataaggatgcctttggctattacaaagaagtagacaccagctatgtttggaaaccttcagattcagattgggtctcgtttggaaaaattaggccaatattgggaacaatggcagaggctagtactgcattttctgggtcactctatccaactgccaattgtttctatccttacatagtgaaagttaagagagctttgatagaggcgcagaaatctgaagatacatatttgaggagcatgggtgctgctatgttggacaaatttgataagtattgggaggagaagaacaatgttatggttattgctacaattcttgaccctaggttcaagatgaggtacattaaatggtgttttgcacagatttttgacccaattaggtgtgaaattgagattaatgacatcaaccaagagttggaaagactctataacaagtatgagatattacatcggcaaaagatgggtgaaaatggcacgaacaggcaatcaacctcagcctcagttgatacaaccagctcaatggcttctattgcaagtgatttccagtcatttttgcaatctactgttacagaaagttcaaaatctgagctgctgatttatctagatgaagcaaatgaggccatagataacaagcatttcaacttactcagatattggaatgtgaactgtcatagatttccagttgtgtctagcttggcaaagaggttcttgactgttccagtgagcagtgtatcatcagagtgtacattcagtactgcaggtcgagttcttgatgactacagaagctctttaaagccagccacagttcaggcattagtatgtgcatctagctggataaggggcccttatgatgacaacaatcatcctcttcttgtgattggagatggtgaagatgatgttgagtctattgaattcccaaaatgcgtggtggcaagcaattag

SEQ ID NO: 83064 - DNA, 366 bp, Oryza sativa
  Clone ID: PAT_MRT4530_82432C.1
atggcctcggcgagggacctcgccgtagcgtccatctccgccgccgtgggcgccgcagccgccgcggccgcgctgcgcttcctgtcatcctacggggccagctctgccaagcagcggagcccgcccacgccgtgcgccgagcacctcgcggtcaacggatgcgccgccgagcgcccgccggtgcagtcccccttcgatcccgccaagagggaagggtatatctcctgggacgactacttcatggcgatcgcgttcctttcggccaagcggtccaaggatcctaatcggcagggcaggagcagcgttgaactaaccggcggcgagagatggcggcgggagcaggggcatataggtcccgaaccctag

SEQ ID NO: 83065 - DNA, 1521 bp, Oryza sativa
  Clone ID: PAT_MRT4530_82433C.1
ttatctttgaatgcacagcgagcaaatcccgctcgccggatgccgccgccgccgcctcactctcctcccctcccgccgcacctcctccgccacctcgacggccgcgcgctctccacccccctcctcgacccgctcatccgcgcggcctccgcctccgcctccgcgccgcaccacgccttctccctcttcctcctcctgctccgctccgcgctgcgcccttcccacctcaccttccccttcctcgcccgcgccgccgcgcgcctcgccaccccgcgcctcgcgcgcgcggtccacgcgcagccgctccgcagggggctcctcccccacgatctccacgtctccaactccctcgtccacatgtacgccgcctgcgcgctcccgggactcgcccgccgcctgttcgacgaaatcccccgcccgaaccacgtctcctggaacgccctcctcgacggctacgccaagtgccgcgacctccccgccgcgcgccgggtgttcgcgcggatgccccagcgggacgtggtgtcgtggagcgccatgatcgacgggtgcgtcaagtgcggggagcaccgggaggctcttgcggtgttcgagatgatggaggccaccgcggcgcgccatgatggggtcagggcgaacgatgtcaccatggtcagcgtgctgggggcttgcgcgcacctgggggaccttgtgcgggggaggaagatgcatcggtacctggaggagcacgggttcccgctgaacatccggcttgcgacctcccttgttgacatgtacgcgaaatgtggggcaatcgttgaggcgcttgaggttttccaggctgtgccggtggagaatactgatgttctgatatggaacgccgtgattggcggtctggcggtgcatgggatgagcagggagtcactgcagatgttccagaagatggagcatgctggggttgtgccggatgagatcacataccttagtctgttaagcgcttgtgtgcatggtggtttggtggacgaggcttggagcttctttcgctcgcttgaagctcaggggctgagaccacatgtcgagcactatgcttgcctggtagatgtgcttggtcgagcaggccgcttagaggaagcatatggtgttgttaagagtatgccaatgaagccgagtgtttctgtgcttggtgctctcttgaatgcctgtcatctccatggatgggtggagctgggggaggcagtcggcaggcagcttgtccatttgcagccagaccacgatggccggtacattggtctgtcgaatatctacgctgttgctaggcggtggcaagaggcaaaaaaagcgagaaaggtgatggaggagagaggcgtgaaaaaggttcctggatttagtgagattgatgttggcagagggatctgcagattcattgcccaagataagactcacccgggctcagcagagatttatgccttgctgaaacttattgcaatggatatgaaaatgaaggatgatgtcactgttccagattatacctgtatgtactgctaa

SEQ ID NO: 83066 - DNA, 141 bp, Oryza sativa
  Clone ID: PAT_MRT4530_82434C.1
atgaagatggcaaagacggcgtgcgtgatcatggcgagggatgccgagaatggcatcgaggatggaaataaagctctcttggacgtcgctgagattgttcaaatgtgcggtaggaatgccatctttattgcttacaactga

SEQ ID NO: 83067 - DNA, 825 bp, Oryza sativa
  Clone ID: PAT_MRT4530_82435C.1
atgacggatggtgcagatatggccctggcgagcctcgggagtggcgtttctaccgccgccggcctcgtctttcctcgtcaagtctgcggcgatgctcatgcaagggagcagaagcccaagaggccgaacaaaaccagcagcaaagacagcaacgcatcaaaccatttggcccaagtgggggagaggcggccggcggtggagtggcaggcctgttcagctagcgtgagcatggacgtggccttgtcaggcacggtgagtagttgccacccggggacggtgagtagcgggcggtggcgcgggtggtgggctgccgcggtgaagttgatccaccgacgaggaggcacaacaccgagagcggcgatgtttggtcctcgtcggagcaccgttgctgatgttgttgctcctctactcgtggtgctcggtgacggcgtcaagggtcgtgcctgtggtacgcggccgtgcccggcggtcgctgtcgtgccgacccgcggcaacgcgactggtagtggtcggcaacctttgggtgctgctgggagggactcgtgccccgtctcccgctgcctgtcgccagcaacctttgggtgctgctgcccgtcgcccgctgttcatcggccgtcgactcctctctccccctttcctcgtcgtcgtccctgcatgccgatcgggctgagggagtactccaggggaagcccttccaagttgcggcgacgacaatgtccgcgcggcgccggcggcactccaccaccggcacaccaagctatggtgggggcgggctcgaatgtggcggcggtgcgcgtggtcaaaacagctgtcgccggaagctag

SEQ ID NO: 83068 - DNA, 1032 bp, Oryza sativa
  Clone ID: PAT_MRT4530_82436C.1
gctgcttaggcagcttgggatggtttcggggctccgctttctgctgctgctgcttcttgctctgacgacgacgaccacaaaccgtggccttgccgattcgatgtcacgggcgccgcccggatgtcgctgccggtcgccgaggtagctggcatcgccgccgcctgcgtcgccctgctcgccgccgtggccgcgctgtggtgcgccgcgcggcgcatggcccgccgccggggccgcaactccgacgagaccggctcctccgatccttccaccctggtggagtggggcaagggaggcaggagctcgtcggcgccggagcaccagggagcgaggcaattctcgttggacgagctggctcaggcgaccaagagcttcagtgaggccaacctggttggcctgggcagcttcgggctggtgtacaagggcctcctccttgacggctccgtcgtcgcgatcaagaagcgcattggggcgccgaggcaggaattcgctgaagaggttaggaagctttcagagattaatcaccggaacattgttactctcattggttattgccaagaagggggtctacaaatgctagtgtatgagtacttgcccaatggcagtgtctctcgccatctctatgataccgggaaaagctccatgacaaggcttgagttcaaacaaaggctctcaatagccattggagcagctaaaggtctcaatcatctgcatactcttgtgcctcctttgattcacaaggatttcaagacaagcaatgtgttggttgatgaaaatttcattgcaaaggtggctgatgctggacttgttaggttacttagaggatacgaagacgtcagcccatctcatgggttcagtagtagtgtgtaccaagatcctgaggtacaatcggtgctacagttttctgaaagcagcgatgtgtacagctttggagttttccttttggagttgatcactggaagggaagctgcttgcctgatatctccagattccagagaatctctggcccagtgggtaatttccattgacatttag

SEQ ID NO: 83069 - DNA, 400 bp, Oryza sativa
  unsure (1)..(400): unsure at all n locations
  Clone ID: PAT_MRT4530_82437C.1
tgtatatnaatagtggcaacccccttntggcanccagctacgtttcaattgataaacaaccaagtcatgcagcagcagtgttgccancagctcaggctggtagcacaacantctcactaccaggccattagtattgttcaagcgattgtgcaacagctacaactgcaggcaatttagtggtgtctaactttgattcagnctttgnctcaagnccaaactttgttgncctttcancttgccattccatatgtggtatntacccttanctactatagnggttcccaggtgncattnccacttgttggtggtgtctggttactgaatttngaaccaatantaattagttcgtatgnttaanaactaaggtncatacattcattcatggtgtgaactgattgga

SEQ ID NO: 83070 - DNA, 591 bp, Oryza sativa
  Clone ID: PAT_MRT4530_82438C.1
atggcaaccgccgccgcctcctcctcagctcctcctcctcctccccaacccgcggaacccgccgccgatccaccggccaaggaagagccccagaacaccacggcggatgcggcggcgcccgtcagcgacgcgggggcggcggtggcggcggaggagggggagacggtgatcctggacgccgccgccggggagggggatgcggagggggaggaggaaggggagtgcgggttctgcctcttcatgaagggcggcgggtgcagggaggagtttgtcgggtgggagaagtgcgtggaggacgcggagaaggccggcgacgacgtcgtcgagcgctgctacgaggtcaccgccgcgctccacaagtgcatggaggcccacgccgagtactaccaccccatcctcagcgccgagcgcgccatggccgccgacctcgaggccgccaaggcagaccaggccgccgaggcctcctccgacgccgccgcctcctcctcgcagcagcagcagccgccgccaacggaggaagaagctgccggcgagaagaagcaggcggaggaggaagcggtggtcccggagaagcaagatgtcgcggcctga

SEQ ID NO: 83071 - DNA, 759 bp, Oryza sativa
  Clone ID: PAT_MRT4530_82439C.1
atgccggggagccgccgccgccgcaccgggagagggccgccgcaggaggggagacgcccacgttgcagccgccgccgctgccctcccccggcctcccttcggccggatctgggagggaggagggaggccggggagccgctgccgccgcaccggggcgccgccgcgtccgcacgcgccaccgccgccgccctcccgcggcctaccttcggccggatctgggagggaggagggaggccggggagccgctgccgccgcaccggggcgccgccgcgtccgcacgcgccaccgccgccgccctcccgcggcctacctccggccggatctgggaggggaggccggggagccgccgccaccgcaccgggtcgccgccgcgtccgcatgcgccaccgccgccgccctcccgcggcctccctccggccggatctgggaggggaggccggggaaccacgtagccgcagccgtagccgccctcccccggcttccctccggccggatctgggaggggaggccagggagccgccgccgtcgccacaccgggtcgccgccgcgtccgcggccgcctccgccgccggtggagggagggaggggaggggatggggtgctgaaaagccggattttcgcagacggacaacgaatttcaccccgatttatatttttgttggcggtcatttgactcccaggctcatgtccgcctgcgaaaaaaagactcctacgttagaaaaaaaatacttttttagtagtgctgtctttgacacgtga

SEQ ID NO: 83072 - DNA, 626 bp, Oryza sativa
  Clone ID: PAT_MRT4530_8243C.1
atcaaacctcaatcgctcctcctcgtcctcccgctccgctgtgcctcccgtgcgagccctcggggacgccggcgctatgttgcgtgaaagaaagaggagcacccacctatgcctcatgtcaggaggatctggcagccttgtcgccacgacacagcttggattcttgatgaggataccctgaactaccgtgagaacctggatgtctctccgcaagcgtactctgggcttataggagacctaaccaagatgaacactctccaggcactctgccatgctttagcacatggatctatccaaccggagaagcgcctatctttgtgtgtgcgagatcaaacctttgtgatgatggcttaatggaacgctttcggggttacctaaaaggagcctcagaataacatcactcagactcctagccccatataaaatatggcaggggaccctatgacagctagtaaagatttgagagattgaacaaaggaatctcatagtgtgaacactctgaccattctacatgccctcacaggctcttatattgggcgtggacttcatctgtctaccctgcattctgcaccacgatcataacctacagggtgagacactctggatggactagagtcatagttgag

SEQ ID NO: 83073 - DNA, 404 bp, Oryza sativa
  Clone ID: PAT_MRT4530_82440C.1
gcacgaactataatgagatgttttgacattaaaaagaatgttcagcgggtgatgtcaagcaactctgaatgaaacatacaaactgcgacctgatattctgcgagacttaagccctatcacatatttacaaatgaaaaataatttataaataaaacttttatatagatgttcttaacgatctaaaagcaaagactaaaaaataaattttaataaaaataccttaaatcagctttaaatttaaaattgaaagtataaagtataagtgaaaagatagtccgataaagttttacctgtgaaacctgcagctttgagataaagcgtttcaccaccaactatgccccaaggcacccaatccgggccaactttctgtgtgtcgatcagcttttccaaccacaccaagcacc

SEQ ID NO: 83074 - DNA, 490 bp, Oryza sativa
  Clone ID: PAT_MRT4530_82441C.1
aaataatggttttataagctctatgagagtacaacatttattccgtgatttgtcatgcatggctagaatttatttttgatattattacacttagttatattataaattattactccttattatgaaatagtgatgttttactttatttccatagacaatttgtatagcctatgttgaagaggaaataaacattgtgaaaagaagcatcacaaaatacaaaattgagagatgcaagacaagttcaatctgtgaaaagatttgaactatctttcgaatcgcacacagcgattattgacaatattgtttccctagagaaacgactatatgtcaatatccctaaaaattggaaaaaaaacatttgcacataaagcataatcattagaaagaatgtgaaatcaatttcgtcactaagaaatctagcgctaaaagaagactattttggtagttatttatgttgaatcttaagaatcatgaaaattgcaatggatat

SEQ ID NO: 83075 - DNA, 2050 bp, Oryza sativa
  Clone ID: PAT_MRT4530_82442C.1
atggttcgcgagagagtaaatgcgcaagacacgggcgacgtagacaagttcgggccgctgagaagcgtaataccctactcctgtgttctggtggatctgtgcaacgtggaagcacggttgtttgctgatgacgcgaccggcgtcagaccaatcacagaccggtcattcttgtcctccacgcgtcagtttagcatgctacacgtctgcccttcttcatacaacgacttccttgcaatggttgcgatgaagcctggaatgtatctggccggggctgacggggtcggggcgccccagccctcggggggtcgaaacgagagcggcccgacccctcggggagatagagggaggggcggcctcatcaccctcgggcccgacccccccccccgagggggtcaggccacgcggttggaggagagcctcatcagcggccatggcggctgccaacctcagccgatccgcgacattcctgtccggccttccttcccccctctctctctctctccctcgcatgccggcgcgctcgccgaggcggcggcgctgctgaccatgggcggcgtcacgtccaccatcgccgcgcgcttcgccttcttcccgcccacgccgccgtcctacaccgtcgtcgccgacgccgccacgggccgcctcgccatccccgagatctcccgcccgcccgcgcgccgccggcggagggacggcggcggggacgcctcggcgtcgggcgccgcacccgccgaggacgaggacggcacggaggtggtgcgcctccgcacgcggcgcgggaacgagatcgtcggggtgcacgtgcgccacgagcgggcctccgccacgctgctctactcccacggcaacgccgcggacctcggccagatgtacggcctcttcgtcgagctcagccgccgcctccgcatcaatctctttgggtatgattattctggatatgggcggtctacagggaagcccactgagtgtaatacatatgcagacattgaagcagcatataactgcctcaaggaaaaatatggtgtcgcagatgaggatataatcttgtatggtcagtctgttgggagtggtccaaccattgatcttgcttctcgtttgccaaatttgcgaggtgtggttttgcacagtcccattttatctggactaagagtactatatcctgtcaaaaggacgtattggtttgacatttataagaatattgacaaaattggcctggtaaattgcccagtgctcgtaattcatggtacatcagatgatgtcgttgactgttcccatggaaagcagctgtgggaactttgcaaagtaaaatattcaccgttgtggctaactggtggtggccactgcaatcttgagctttatcctgattatatcaagcacttgaagaagtttgtgtcaagtcttggcaaaaaatcatcaaaacctgatcttaaagagataacgatgaaggagggtgcttctagtaaagattcagaacctgcaagctctgagaaaccccaagaagctccaaagtgctcccagatctcacgaaagagcttagatagtcgagttgggaaatcaaaaactgtggatgttcctgaaaagccacgaatgagctcagatgatgtcgacaagttcaggaggagaagatgtttggtctggtgatatatgatgtgatcctctgcgcggttcatgtagcagtagctgaatacaatagcatgaaaatcgagcaactgtattacatcgtatagcgaggaacataccagcagttcaagcagttcttatgccttacgggaccggaatatgagctgttaaataagggagaaggatcagtatgctgctggagtaaattatcatatatccatcaatgaactgaatctcaacaatggtaacatcatgggtaaattaacacgtacgccatcatcctgttttgcaacgccagtaggatttccatcatgtaaaagtgtaccattattgtctgtaatcatgagggacaaaaaactgaaaatttgctgccgctttgtgcacagtctaaagccttgacacaaggagcaagatattccagttggtgttc

SEQ ID NO: 83076 - DNA, 351 bp, Oryza sativa
  Clone ID: PAT_MRT4530_82443C.1
aaaacttatccatctacaacatacattaccaccatgatttaaacatgaccctggaatcaaacaaattatcaaaatttaacataaacttacaatgcctaccaaatcatcctataaataattcaatataatttgcacatatgcggacaattctcatccacacaaaattccaacctctaaattagcaacacacttatctcaggtcatacttcggggctcaaaagaactcctgatctcctaatctccaaatcatctcgtaaaactgacaaaaagaaagcgagccggaggaagataacctttccttatcaaatggctcacgaaatccactataaaacggatctatatcaaccagat

SEQ ID NO: 83077 - DNA, 665 bp, Oryza sativa
  Clone ID: PAT_MRT4530_82444C.1
agtggatcccccgggctgcaggcaccaatacactcacaacaaaagctcatctcatcagaagaaacacaccatgatcaatcctaagaggctagttcacctggcaaagaagtggcaacatatggcagctcttgggaggcggaggctgacgataacgggagcaactaaagaaggcaacctacgctgctcatcagccatcgcagataagggccactgcatcatctatacagctgatggagagcgatttggggttccattgacatatctgagtacaactgtgtttggcgaactcctaaggttgtctgaggatgaatttggattcacaggtgaggaaaagatcacacttccttgtgaggcagcagtgatggagtatgtgatgtgcttgcttaggagaaagccctcggaagaggtggaacaggctgttgtgagctctgtcgtaatgccatgtaattacaagagtagcactagcatggtttcagtcaatcttagccagtcactagctatattttagctactgagaagcactgtcttcatgatgtgtgctcctttttggtaaatcttaatgaaatctagtgtgtaaatagatgtatataccccagtaaacaagtaaagaaatgtagttttgcagttggttcaatattccagtattgattttacttaagcaaaaa

SEQ ID NO: 83078 - DNA, 214 bp, Oryza sativa
  Clone ID: PAT_MRT4530_82445C.1
aggaccacttgggaattctgaacattatgaggagtgcatgcactttgcacctgtgaaacatgcagggggccccattggacaatagcagtacatgtatttaactgggtgggtaaagggagataccacagagataaacactaacaccactggtttacaaaagcaggtttaaatgtgttcgtgggggagtacatggattattatatgacacacggta

SEQ ID NO: 83079 - DNA, 126 bp, Oryza sativa
  Clone ID: PAT_MRT4530_82446C.1
gtggatggtgtacgtggcggtgttaatgccactaaagccgcggagtcggcaacgggcgttggactagtgttcgcaacgaggccgaagcagagctacgagttagaggaggcgatcgggggtagctga

SEQ ID NO: 83080 - DNA, 2403 bp, Oryza sativa
  Clone ID: PAT_MRT4530_82447C.1
atgcgccagccacagctccgcgccgccacctcgcgcccgctctcatggcgctccaactgcacggctgctgcggcgtccgcctcccagccgagcgagccgctctccgcccacttcaccaacggccggcccctctcgcgcgccccggccgtggtgagggacctctcctcggtgctccgcgcgatcctcgccgcctccccgtcctcccacagccgcgcgtacccgctcctcaagtccgccgccttcgacgcccgcctcgcgccggacgcgctcgtcgacgccgtcctctccgccgtgggcggcccggggtcacggcaggccaccgcgctcctcagccgcctcctcgcctccctgtgccgcgccggccgcgctggcgcggccgccgccgcctacgccagcatggaggcgcgcggggtcaccccggacgccaagtcccgcaccgacctcctcgccgtcacggcgcggagcgcgtcggccgcggacgccctcgcgctgctcgccgagatgcgggggaaggggcgccccttggacgcgtggatgttcgacgtggtgatgcgcgcttgcttcaaggaagggatgtacgacgacgcggtcaggctgttcgacgaaatgcctgcctctgagatcgagcccgaccagcgcgtgtgctctgtcgctatcgcgtccctatgcaagctgcgtgacgccaaccgtgctctgctggtgctgaggaagatgcaggatgcggggttcgtgccgtgggacttcacgttcaactccgtggtggatgtgctcgtgaagggagggaggatggaggaggcgctgcacataaaggatgagttgcttgctacggggaagaaaatgagtgtggttctcgcaacaacgttgatgcacggctattgcttgcaacgggaggttaggaaagcgctggatatattcgaggagacactaagggacggtctggtaccaaccgatgtaacatatacggtgctgatcagaggttgtactgaagaggggatgccagagaaggcctatgagctgtgccgccagatgagagatcatggattgttgccgagcacaaatgagttcaatatggttatcaagggccttttgaatgataaattgtggaaggatgctgtaagcttgttcaaggagatggctgattctgggataccagatgccttcacatacaatatactaattcactggctctgtcagcgtcgcaaaattcgcgaagcgcttaacttgtgggaaaagatgaatgaaacaggagtgaaaccatatatcgtgacataccacagcttgttgttgtgttattgtgtgaatgggtgcatggatgaagcagtcaagctgtacactgagatgcctggaaaagggttcacacctaatgttgtcacttacacaacgctgatgaaagggcacataaataaggctgcttttgacaaggcttatgccctccttgctgaaatgaaacagaatggagtctcttgcaatgattatacatacaacactctcataaatggcctttgtgtggttggccgagtttgtgaagttggtgaaatgctgaagagatttgaaactgaaggttttgttccaactgcaatgacatacaatagtatcatcaatggatttataaaagctggcatgatgggctcagcatttgctgtgtatcagcagatgtgtgcaaaaggcatacctcccaacatagtaacatataccagtttcattgatggatactgtaagactagttgctgtgacctggcactgaagatgctaaatgatgtcaggtgcaaaggccttcgacctgatatcgctgcatataattccttaatatttgggttttgccaagaggggaatatgtctcatgcactgcaagttcttgtccttatgctgaaagatggtcttttaccaaatatttcagtctacaacagtttcattacagggtacaagaatttgaaaatgatggaagaagctttgagattgtacgagaaaatgattaaagaaggaattgatcttgatacagcaacctacactaccttaattgatgggttctcaaaagatggcaatgtaacctttgcattgaaactatactcagagatggtggctaagggtaatattcctgatcatattactttcacagcattaacacatggtctttgccgcaacggagatatcgatgatgctagaaaattattggatgaaatgaataggttagatatacgccctaatgttttgatgtacaacatgttgataaacggatacctccgtaatggaaagctgcaagaagcgttccggttgcatgatgaaatgcttgaaaggaaaattatgccagatgatacaacatatgacatactagttggcatgaaatctttgggaagtgacagtcccattgacgcggagaatcctaatttaagttccacaggataa

SEQ ID NO: 83081 - DNA, 3260 bp, Oryza sativa
  Clone ID: PAT_MRT4530_82448C.1
gcacgaggcgcctattgcttcctcctcttcctcttcctcttccctcgtctccccggcgccacctgctcgtgccgaattcggcacgagccaagcctatcagcctagctagtgacctgagtactctgctgtctgctgcctgaatctgaatcgatcgatcactcgctcgctgcctgaagagagcaagaatcgatggttgcacggccaagattgctacaccttcgctgataaatagccgaggacaatctcatcggcatccatggcgggcagcagcagctcgaaggagatagtcgacgcggtggagaagtggatggcgttccccacctccggcggcggcggcgccaccgccggcttggagatcgtcgccgaggatgcgcctagcggaagcagcggcgcccaccagcagcaggcgtggcgtccggtggcgccggcgacggcggggcgcgacagcggcggcacggggagcggcaagtcgtcggtggacggcggcgtcgggcgcgcgtcgcacgactccctgccgcgggtgtcgcaggagctcaaggacgcgctgtcgagcctgcagcagacgttcgtggtgtccgacgcgacgcgcccggactgccccatcatctacgccagcgaggggttcttcaccatgaccggctactcccccagggaggtggtcggccgcaactgccgcttcctccagggccccgacaccgacgccgccgaggtggccaagatccgcgacgccgtcaagcacggccgcagcttctgcggccgcctgctcaactaccgcaaggacggcgccccgttctggaacctcctcaccgtcacccccatccgcgacgacaacggcaaggtcatcaagttcatcgggatgcaggtggaggtgagcaagtacacggaggggctcagcgacaagcggatgcggccgaacgagttgccggtgtcgctcatccgctacgacgagaggcagaaggacaaggcgatgtcgtcgatgacggaggtggtgcagacggtgaagcagccgcgcggggcgcgcgcgccggccgacgcggcgctgctgacgccgcccaagatgagcgacgcggacaagatggccgccatgtcgccggtcgtggcacccggcactccctcgggcggaggaggaggagccgggtccttcaagtcgccgctctgggacctgaagaaggaggagtcccgcctgagccggctcgccagcggccgcaagtccggccgctcctccctcatggggttcaagatcgggaagaggagctcggtggggagcagggaggcgccggcggtggtggaggagccggcgccggcgccaccgccggcgccggaggtggtggagaggacggacagctgggagcgggcggagcgggagaaggacatccggcaggggatcgacctggccaccacgctggagcgcatcgagaagaacttcgtcatcaccgaccccaggatcccggacaaccccatcatcttcgcgtcggatagcttcctggagctgacggagtacacgcgggaagagatcctgggaaggaattgcagattccttcaagggccggagaccgaccagggcacggtggacaagatcagggaggccatcagggagcagaaggagatcacggtccagctaatcaactacaccaagagcgggaagaagttctggaacttgttccaccttcaacccatgcgcgaccagaagggggagcttcaatacttcattggtgtgcaacttgatggaagtgatcatgttgaacccctcaggaaccgcctttcggagaatactgagatacagagtgccaaattggtcaaagctacagcagagaatgtggatgatgcagtcagggagcttcctgatgccaacttgagaccagaggatttgtgggcaattcactcaatgcgtgtttctccaaaacctcacaaacggaataacccttcttggatagctatagaaaaggctacaaatttaggggagaagattggcttgaaacacttcaagcctgtaaaacctctcggctgtggtgacactggcagtgtgcacttggttgagctacaaggaagtggtgaattatttgcaatgaaggccatggacaagtcagtgatgttgaaccgcaacaaggtacatcgagcttgtattgaaagagaaatatacgcactattggatcatccatttctcccaacattgtatacttcatttcagacgccaacacatgtttgtctcataacagacttttgtccgggaggagaactctttgcagtgcttgataggcaacccatgaaaattttcagggaagaatgtgcaaggttttatgctgcagaggttgtaattggtctcgagtaccttcattgcctaggtattatataccgtgatctgaagccagaaaacattttgctccaagcagatgggcacattgtactgactgattttgatctttcatttttgacgacttcaaaaccccacgtgataaaaaattccacatcattaaaacgaagaaggtcacaagaatttctccccccaacatttgtctcagaaccttccactccatcaaattcatttgttggtactgaagagtatatcgctccagaggttataacgggtgcagggcatacaagtgcaatcgattggtgggctctcggaattctattgtatgagatgctgtatgggcgtacacctttccgaggaaagaacaggaaaaagacattttataacatactgcacaaagaccttacatttcccagtagcattccggttagtcttgcagcaaagcaattaatccatggattacttcagagagatccttcaaatcgtataggttcaaatgctggtgcaaatgacatcaagcaacattccttttttcaagacatcaattggccactcatacgttgcatgagcccccctgaactagatgttcctctgaaactaattggcaaggaaactcaaccaaaagcgaagcctgatgaagatgttcccctaaatcttgatacattttaagggtagatcaaactggagcagttctttttcctgtatagtaataagaggcttcatgtgatgttagcattgttgagtgttttcagtctgagctgcctcaaaatcgtgtacatgattattcttttggttaggtaaagatcttagtacttcacataaataggatatattcttgtaaagcttatactcttttcttggagatgattcaataaagtagtagtgtttataataaaaaaaaaaaaaaaaaaaacgagacaagagctctcccccgcgcgcaaaactcgag

SEQ ID NO: 83082 - DNA, 821 bp, Oryza sativa
  Clone ID: PAT_MRT4530_82449C.1
cgctctttaactagtggatccccatggataaggctggaggcaatcagggaggcaaggtgttgaagaaagggaaaaagaagcatgcaaaagatgagctggatcgccaaaagcaagcggagaagaaaaggcgccggttagagaaagcacttgcaaactcggctgctattatttcagaactggagaagaaacggcagcagaaaagggaagagcaacagaggctagatgatgaaggtgctgcaatagctgaagcagtggctcttcatgttctcatagacgaagactccgaggaaccctgccatttgatgttgaacaaccttagaatatgcaaccactgggaggattttgtgggctttggatttgctccagattcacaaggagtagatgcttatccttctggcaaaccaacaagtgtctctcatgcttatgttccccaattgagatggaccaattggggcatgtcccagacattttcatcatgggagcaattgacggattgtgaagcaccactctatcaagaagcacttgctcagtcagatatccaccctggccctatagccattgtctcaccattgcagaagaggagggaggatccatttaccatccaaggagaagcagtagcggcagcatcttcagccactgagtctgaaagtggtcagtggaaccaacaataggctgaacagaaatacagagaggattataaacataccaaatgcataatctgtatgtagtcacataagatgcatctttttatcagagtgatacttagtttttttttcttttctttagaaaccaaagtttggtataggaaaaaaaaaaaaaaa

SEQ ID NO: 83083 - DNA, 525 bp, Oryza sativa
  Clone ID: PAT_MRT4530_8244C.1
actatgtgtgattatcccaacccactttttctagaggtcattgaatttaccacgctattcccaatacacagtattattatccccctctccgctgggcgttccccgggctgcagccgggttcaagcgtcaggaggaggctgagagtcgacacggctggtggagataaccgccggagccccaccagttggttttcttcatcatccccggaagaaggccccaccttgcagatccccgagtttttgcagaggaaagggcgttcacgggttttccacgaggctgaaacttcggcttgaagaaaaaaaaaaacttagaactctcactagtttagcgcacccagctttctttctcgtgctttcctcttcttctttttttaatttggttaggagttcgatatgtttcacagtttatttttgctgctcagatttagatgataatgttatgagccagatatttgattcctgaaccgtactgtgcttcctgaatggataaactggaattcttttccctctttttcacaactcaaaa

SEQ ID NO: 83084 - DNA, 2832 bp, Oryza sativa
  Clone ID: PAT_MRT4530_82450C.1
ttaaaatgtatcaagatttaggggaacatcttcatcaggcttcgcttttggttgagtttccttgccaattagtttcagaggaacatctagttcaggggggctcatgcaacgtatgagtggccaattgatgtcttgaaaaaaggaatgttgcttgatgtcatttgcaccagcatttgaacctatacgatttgaaggatctctctgaagtaatccatggattaattgctttgctgcaagactaaccggaatgctactgggaaatgtaaggtctttgtgcagtatgttataaaatgtctttttcctgttctttcctcggaaaggtgtacgcccatacagcatctcatacaatagaattccgagagcccaccaatcgattgcacttgtatgccctgcacccgttataacctctggagcgatatactcttcagtaccaacaaatgaatttgatggagtggaaggttctgagacaaatgttggggggagaaattcttgtgaccttcttcgttttaatgatgtggaattttttatcacgtggggttttgaagtcgtcaaaaatgaaagatcaaaatcagtcagtacaatgtgcccatctgcttggagcaaaatgttttctggcttcagatcacggtatataatacctaggcaatgaaggtactcgagaccaattacaacctctgcagcataaaaccttgcacattcttccctgaaaattttcatgggttgcctatcaagcactgcaaagagttctcctcccggacaaaagtctgttatgagacaaacatgtgttggcgtctgaaatgaagtatacaatgttgggagaaatggatgatccaatagtgcgtatatttctctttcaatacaagctcgatgtaccttgttgcggttcaacatcactgacttgtccatggccttcattgcaaataattcaccacttccttgtagctcaaccaagtgcacactgccagtgtcaccacagccgagaggttttacaggcttgaagtgtttcaagccaatcttctcccctaaatttgtagccttttctatagctatccaagaagggttattccgtttgtgaggttttggagaaacacgcattgagtgaattgcccacaaatcctctggtctcaagttggcatcaggaagctccctgactgcatcatccacattctctgctgtagctttgaccaatttggcactctgtatctcagtattctccgaaaggcggttcctgaggggttcaacatgatcacttccatcaagttgcacaccaatgaagtattgaagctcccccttctggtcgcgcatgggttgaaggtggaacaagttccagaacttcttcccgctcttggtgtagttgattagctggaccgtgatctccttctgctccctgatggcctccctgatcttgtccaccgtgccctggtcggtctccggcccttgaaggaatctgcaattccttcccaggatctcttcccgcgtgtactccgtcagctccaggaagctatccgacgcgaagatgatggggttgtccgggatcctggggtcggtgatgacgaagttcttctcgatgcgctccagcgtggtggccaggtcgatcccctgccggatgtccttctcccgctccgcccgctcccagctgtccgtcctctccaccacctccggcgccggcggtggcgccggcgccggctcctccaccaccgccggcgcctccctgctccccaccgagctcctcttcccgatcttgaaccccatgagggaggagcggccggacttgcggccgctggcgagccggctcaggcgggactcctccttcttcaggtcccagagcggcgacttgaaggacccggctcctcctcctccgcccgagggagtgccgggtgccacgaccggcgacatggcggccatcttgtccgcgtcgctcatcttgggcggcgtcagcagcgccgcgtcggccggcgcgcgcgccccgcgcggctgcttcaccgtctgcaccacctccgtcatcgacgacatcgccttgtccttctgcctctctgcgctccacacacgccaatggcggcattggtaagacaagagaattagagaaacatcgaggaaacagaggattccgcggcggcggcggcggtgctcaccgtcgtagcggatgagcgacaccggcaactcgttcggccgcatccgcttgtcgctgagcccctccgtgtacttgctcacctccacctgcatcccgatgaacttgatgaccttgccgttgtcgtcgcggatgggggtgacggtgaggaggttccagaacggggcgccgtccttgcggtagttgagcaggcggccgcagaagctgcggccgtgcttgaccggcgtcgcggactcttgtgccccctcggcggcgtcggtgtcggggccctgacggacagcggccgttgcggccgacccaccctccctgggggagtcgccggtcctggtgacagcccccctcgctggcgtagctactggggccgtccgggcgcgtcgcgtcggacaccaccgacccgtctgctgcaggctcgacagcgcgtccttgagctcctgcgacacccgcggcagggagtcgtgcgacgcgcgcccgacgccgccgtccaccgacgacttgccgctccccgtgccgccgctgtcgcgccccgccgtcgccggcgccaccggccgccacgcctgctgctggtgggcgccgctgcttccgataggcgcatcctcggcgacgaactccaagccggcggtggcgccgccgccgccggaggtggggaacgccatccacttctccaccgcgtcgactatctccttcgagctgctgctgcccgccat

SEQ ID NO: 83085 - DNA, 568 bp, Oryza sativa
  unsure (1)..(568): unsure at all n locations
  Clone ID: PAT_MRT4530_82451C.1
gctgcaggaattcggcacgaggcttcttctatcttccataaacacaatgttatttagtatacaaccgtagcgatcaatctacaccattaaatctaaacctaccatgatcgacagcataaatttttctattttccccgataaatgtgtttatttctaggacttgagagcccccttttgccttctcttagtactaatataatacatgtagttggttgaattgcggtctgctatagctttcaaacaggttcaataatattcatagatgttttccattgattataaaattcctgccactttcttatccatcttagattcaatctgtttnggcaggaattggcaaaaactgttgctaaattagctgaagaaggcaaggtactcttaagcttcacctttcactgttttttactgaaacattctttttacatttttattgtgatttaatgtttttatgcctcaattttccagcctattatttttcttgtgcacccatactagtatgattagtacagcactttagcggtctgattgactctgctaacctgcatttggcatggtgctggtactgctt

SEQ ID NO: 83086 - DNA, 334 bp, Oryza sativa
  Clone ID: PAT_MRT4530_82452C.1
atcaaatgtgaattatggagttattattgtaacatacactgcggaccaaagtttacacacccatcctatagatacatccaactcaacataattgagtcaagggttgtttgccaaataaaccgtaaaataaatcccgtaaatcctgtccatcttcatgattgttcttgcaattgtatcaaacgtagtagctgtgtatagcgatgcatattcaatgttccacaggaaaagttccccttccatagcctgatattccaaaatcctattggcgagtcagtggattctttatctgaaagatggcttgtacattagctagcaaataaaatcattgtttagg

SEQ ID NO: 83087 - DNA, 375 bp, Oryza sativa
  unsure (1)..(375): unsure at all n locations
  Clone ID: PAT_MRT4530_82453C.1
aagggccgcggctatcatgatgggcncggtacgggaatatggggcggcaaatgttcggcggcgcaaaagaaggcgcgcccccctggggtggcgtcgttgcgccccacgcgggggaagaaaggcaagcgccccctgggcgtcccctggggggcgtcggttgcgcccaccggcggcatcggtagcaccaaaaggccggcggtgtccgccaaaaagggtgacggtttaaccggcgaaaacggcggcagcagcgaattcgtgggggcggttagggttaaaccctacccccccgacggcttcccctgcttttttgctgagggccggatgggcgggcccaccgccccccttgcctgccagcctagtgccacacggtggtag

SEQ ID NO: 83088 - DNA, 561 bp, Oryza sativa
  Clone ID: PAT_MRT4530_82454C.1
atgacgaatggatgcaggcaaggggatgaggaagatgccccggccccgagtgggttggtgaccggggtccttccttggaacaggcgtcgaaatcgagcgagcaggcgcgtcatatatggcaatgacgacccccgactagtgactgttccgcgccttctacgtcatgctaacatgaccggagatccagcgtcgcagggggaactagccgcagcgtcgcaggctcgctgccgctctgcctcgcactggcatgcagcggcgcaaacccatcacccatcaacaacacaccacaccatcgacaacgacgacgacgacgacgacgcgtccggtcaaaagccgcggcatgtgacccgcggaacagtctccgatatcagcagcagctattgccccgcctcccctcctccacttgtgatgagcgagtatagggaaggaatacttgtattgcctcgcggatcacgaggcgctcgcggcaccggattgttgctgctgccgctgcccctgccgcgccaccggaaagacgtacgtatccgctggcgtcgcgtcgaggcgcgtgcaactccgtag

SEQ ID NO: 83089 - DNA, 432 bp, Oryza sativa
  Clone ID: PAT_MRT4530_82455C.1
atggagatcgagcgcaccaccgacggcaggacagagaagatcgtcaacccgcctttcaagagtggttcgcctccgaccaacaggtatgtactcacccaggtggctattgcatcaacggcggcgcaagcatggcagcaaatttgcgccatgttcactacccaaaccgaagcacagtcgctcaacatccggcttatactcatcaatgcacaaaaaggtaacatgagtgtttctcaatactatggcaagatgaaagctctcagggatgaaattgctacctccaggaaacccttagatgaagaagacctacttgcttacattctggatgggctaaatgaggattttgaacctgttgtatctgctattgtggcacgcaatgagacggtcacaatgtcagaagtttgttctcaacttcttaattttgagaccaggtga

SEQ ID NO: 83090 - DNA, 489 bp, Oryza sativa
  Clone ID: PAT_MRT4530_82456C.1
aataaaacaaagacaatattgctattttaaatcaatcaacataagctcacatcagggtctatggagttaccatcataaaatgtacaaataaatagtaaatctactgtatttgtgctatcatatcttcacttaccttatcatccattataaacatcaaccatattaaactcagaggtgaaacaccaccaaaaatcacacatttatcaatactaacctaattaaaaccaatcaaactctttcatcgtatcctttgttatgttccaaagccacaaaaacacaatgaccatgcacgccaaaacccatgaccaaaaggccatattgccaaactctgattactctatccactaaaacatgcttccctccttcaataatactgaagcatctgctgtaataactgccacaccaatcatcaccttgaatactgtctatacctaaatactcacaggctaagcaccgaacaatatgatcataccaacgacgtacgacaac

SEQ ID NO: 83091 - DNA, 409 bp, Oryza sativa
  unsure (1)..(409): unsure at all n locations
  Clone ID: PAT_MRT4530_82457C.1
taatgcaggcttggaaaatggaagccatagccaagtgggtagcaaacaaccacctcttgttccactggaaaggcaagncctgcagtgcagcagcagcatatctttgctactgaatactcatcctctcctaccctatccttcctagtgtccattatcttcactcacagaaatgcatattctttctacttctttttggccatgtatcccaactacttttcaatcatacatggaatcagaaatgtatggtaaatactaatatagactcatgaaatttgtgatgagtgaaatggtagaactgcagaaatgaggagaggcaggtcttgttgactgtgacaagagcgattgatatataaaccatgaaagataagctatatctgccaattttgttgtaaaaaaaaaaaaaaaaaaa

SEQ ID NO: 83092 - DNA, 729 bp, Oryza sativa
  Clone ID: PAT_MRT4530_82458C.1
ctataccgcgccaccaggagagaaagtctctggaaccattgcctttgatgacttacagtaggaaaaaggcaccaatatgctatggttttactagagcttaatttgccgatgcactaaagccgcataaattcactgatatgcacttcacgagatggcacataagggttactcattggttgatggctatgaaatgcttttgggttagtactagcaaccagaagaaatttgaggaagtcactactatcttcgtgggatgtattcttagcattcattgcaattgtttggttggggtgtatatgtacatgaccgaaacaaaggagttgcgggatgtaatgaatatcaaattcggtgctattgatgctagtaatgatctgtatgtcttagcgcaatttcatgatatcaggatggttgacaaccattctgttatcgagtaggctcgtgacatatagaccatatatggttgctaaggaatttgaataccttaagtgtgtattatcggacaaatttaggtccagccgaggattccacgcgcgaagacagcgctccttctccacccgcggccgcggagaccgcgcgcctctcttcctcgctcactaccccccgcccgccggagccaccgccggagccgacttcggccccttctccgctgccggaaccgaactcgacctcggcctccgacggcgccggggtggtttgcccttccgccagacccactgcctcacccatatc

SEQ ID NO: 83093 - DNA, 347 bp, Oryza sativa
  unsure (1)..(347): unsure at all n locations
  Clone ID: PAT_MRT4530_82459C.1
caccatttgaacccattaccnccatgccttttgnaatgncagagcggtttttaggtgtgaaaccacttntttnagtcagttnagtgttttgtacatatcttcagggaacattcttacaaaataaaacaccagcaacttcaaatttgcggttacaggnacaggngtcttatctgcaccgaacagaaaatctagcnacttttcctctcgaaatctatttgtggtatagggncacaggngtctttatctggacctgnacaggataatctacgtgaccttncctcttgggaatctttnccgggaggccacacccancaccgggttgttcctggttttgnccaaaccaattg

SEQ ID NO: 83094 - DNA, 251 bp, Oryza sativa
  Clone ID: PAT_MRT4530_8245C.1
tctataagagctactgacacggcatgcgcacgcgcgcaagctcgggtcccctatattttgcgccctcttttttttttttttttggtaaactaattaaatcattattgcaaaaacattatcttcttcttcatcttcttagcgcacacaacaccaactctatcatcatctggtcgcactaaacaccatctttccctacccaaatacaacgaactttctggccaacaaattccattccaacgcacaatctaacc

SEQ ID NO: 83095 - DNA, 281 bp, Oryza sativa
  Clone ID: PAT_MRT4530_82460C.1
ccagcacattcctttttctatacttgttctcatgaatgcaacaaacctagaacaagaaaaacaacagcaaaggaaaccaaaaagctgaaaaaaaaactaagtaagcaaaaaaaacaaagctgcaacaacgtaagaaatactttttttttaatcactgtacaccacaatgcgcttcccttttgttgggggatgctacaattgaatgatgcaccaacattgtataagctactttaagaggtttctcttcaatgctgaaagaaatcctgcctttgatttctggc

SEQ ID NO: 83096 - DNA, 822 bp, Oryza sativa
  Clone ID: PAT_MRT4530_82461C.1
atggttgggctgggctatcacgggcccgacccaagtcgtgacgtgccgtgcttgggtcgggtcaaaatgtcgtgccgtgggccgggccttcgggcctcgggcgttatggccatctataaagcgtgggacccatgtgagccccacatgtcaggtgtccacgtcaccctctctctttcctatcttctctcccttcctcatctctctctctcacttctctgcaagctcgcgggggcaaggcgggagggcggcgccgcaacggccgccggcggaggcggcgtgcgagcgcggcggcttctccgctttcttcacctcctcgtcccgctcgggcgacgtgggctgagcatctgcggcagcaatgcggtcgcggcgccggcgttgcctgcggacgacgacatcgactccgccgccccgcgcgaggaggaggaggaggagacgggcaccgcgcgcgccgccggcgcgtcgtcatcgggcgggtcggggagcaggagcgggagctacccgccgttcaagcgggggagggacgagcttgttgacagccttagcaagtttgccgacgaaacccggccgtcgaagcggccggcggcgaagcaccggactcgcgccaccgaggtccataacctgtcggaagaagaagggatcggatcaagggctgacgcgttcgtcggcgcgcgcgacgacacgagcgcgcccacgtcggccgagcgggacgaggaggcggagaaagtggagaagccgccgcgctcgcgcgccgcctccgccggcggccgtcgcggcgcagccctctcacctcgccccgggcagcttgccgttgcagagaagtga

SEQ ID NO: 83097 - DNA, 455 bp, Oryza sativa
  Clone ID: PAT_MRT4530_82462C.1
gtggaaggcaaccaccaccacggccacggcgagccactgcctgccaagaacgaaagctttagacggtcacctcatcggcgtcgccgcccgattttcccatggcgtcccagccactacgcctcgtgaggccgagcccgctcgccggccggcacgcggcggcgtgcaagtgctccgccgccatcccgctcgtcttcgggcggcagcggctgccgctcctcgtcgccttccctcgcggctccggctccggctccggttccggcgcctcctgctccgccgtgcaggagtcgtcgtccgccgccgccgccacgactgtcagtgagaagaaggatgcggccgatgccaagaaggaagccaccgcggaggcgaagcccgcagcgaagccggccgcgaagccgaagaagcctccggtgaagccgctgccggagatgatgcaggaggagatcatccccccgctg

SEQ ID NO: 83098 - DNA, 197 bp, Oryza sativa
  Clone ID: PAT_MRT4530_82463C.1
ccatggctgagctccaccgcccgtgccccccgagccatcgccccgatccaccgcccgcctcccgtgaccaagtttcccgctccatcgcatgtggcaaccctaccaccccgagcccttggatccactgcctagccccagatccatcgactgatgtttgcatggcggggctagggcttcgatactctgatcttgtcaat

SEQ ID NO: 83099 - DNA, 300 bp, Oryza sativa
  Clone ID: PAT_MRT4530_82464C.1
atggggaaacgccgtttaccgccattgcggagcaagaagaatagccagcaaaaacgcaggatgccaccattgtacaccgccgctgcacggcctcctcaagaaggctggagcatcagagagcgtgtcaatttcaggatcgcaattggaagatttggtcaggactggcctagagttgcacagtttatcagcacaaaatctactggtcaaatctgtgtctatgccgaggaatatttcctgaagcgtcacacacatagcccagtgaagaataaaaggattctgattatcagctcaggttgttga

SEQ ID NO: 83100 - DNA, 418 bp, Oryza sativa
  Clone ID: PAT_MRT4530_82465C.1
caattactagcaagaacgcgaaccatgtttacgcgaaagggaggcctgggatgatgtgacctacacctatggagacatggattataatcataatgcccacaggcggactgttgctgattgtattaatgctacaaatggaactagtggtgcatttgatgttagcaccaatggaatactagattgtgcactggaaagatctgagtactggcgagtgtgtcatgaaaaaggaatactccctggagtgttaggttgacggccttcgcgtgctgagacatttattgaaaatgatgacactcattatactcagggtgattggagattgcactacggtatggtgttgcaagggtatgtctacctattaactcacccatgcactcctgcaatattctatgatcatatattgttgcattaacagcca

SEQ ID NO: 83101 - DNA, 1677 bp, Oryza sativa
  Clone ID: PAT_MRT4530_82466C.1
atggcgccagcgccgccgccctccacccactccaccgcacccttcgcaactccggaggtgcgttctgtcgccgccagacgcccgcggcctgcggcggcgagcatctccgcgcgcctacgcgacgtggcgaggaggaggaaggataggcctcgtcgctgccgggcacaggtggctccccgcggcggcgaccgcatcagcgccctctccgacgatgtgctcctcctcatcctgcggcggctcgccacccgcgccgcgctcgccaccgctatgctctccaagcgctgggcccggctcctgcgctggcttgacaccctcgatttcatggtcggtgaaatactcccgccgcgctaccgtaggtgcatccaactccaccaagcggctggttttgctgcgtatcccgttgatgtcaaggttctcgttgcaagtatcaagcgacacgagcgccttgccatgcgaaacatagcggcctccatcaatagcttgttagacgcggatggcagtgatgaatgtgctggccaagctcgacggagggcccgtgtgctgcgggtggagttctttgcgactcactacaccgatcttatgaaccgattgatcaccaaggcattggatgcttgggaagtcgaggatcttgaagtttttgctaagcctgcatattggtctgagtggtctctgccgccgattgtccacagatttcctcaccatggtctctgcattgagccccacaagtcccggctgagaagcttgaagctaggtggttgtatcattccgccattgcaggggttccacgctctcaccaaaatgaccttgcaagacttgcgaaactccgtggccaaagcatcctatgaagatgtgtttaagtcatgcccccagttgcaagtgctacacctcaagtcatgcaggtgggcggaccggggcattctggttatcgatttcccaaagtcagggattaagcagcttattgtggagttttgcagcgccattgcactacactctcttgggatgcttgagagcatagctataagggagacttgggtcaggtataagcattgctccttctcgcatcttatgcacatgaaccttaacttacgccatggttaccgtaatcgtctgcgtgacttatgtattggttgggacttgaacatccagcagtttcttggattcaccaagaacataaccaacctggttctacgattcactggatatgggagatggttcgtgccatcttgcccctcgttgttgctggctaatctcagaaggctcctgattgctgatgtgccttcatcatgggatgtctcttggcctcgcctcctacttgaagcagcaccatgcctggagagccttcacatccatattatcccttgggatgacgattcttttgatgaaatcatttggcaaccatccactttgcagcatgaagaactaaaagagttggttgtaattggtttcgagggaacagaaagacagatttactttgttaactttgtgatggaagtatcaacaacattgcagcttgttgctctatttagatatgggcatgttcaagaaatggggcgttgggactggaaaattgtgaggcagcaacaccattggaatgatgaggagaaagcccaaattctgaaccagtttgctgatagagattcttgctcaataactccagttcaagtagttgtagagtga

SEQ ID NO: 83102 - DNA, 192 bp, Oryza sativa
  Clone ID: PAT_MRT4530_82467C.1
atgggccttgttgctatggtcaatgttttcaatgctacggtcaatgttgtagatgcagctcttcatcattcaatctcttctattaatcctgagattctttcaggtcataggaacatcgcgtatggctctgttcatatgcatggattgggaaccatccctccagcacggaaaacgaaacagttcattagtgct

SEQ ID NO: 83103 - DNA, 348 bp, Oryza sativa
  Clone ID: PAT_MRT4530_82468C.1
atggggcagcgggatggtgtgggccaatcacctgcagcttgcgtggcaatcctgcgcaccctgtcaggactcctgcaactacgcctccagttcgacgatctgggcccacccgccagttgcttcagcctagtccaccagcatcttccactctgccgcctagcgtttgcccctctcccgctcatcctcgactgcgaacatatacacaccatcaaaaaggctagcataaagacaaatcgtcccaacatgaagtcgggggctacccggctcaaaaacaagacaactgcacatgacgatgtggcgcaccgccacccagcactatgccacgccatcaaggatctacccggctag

SEQ ID NO: 83104 - DNA, 146 bp, Oryza sativa
  Clone ID: PAT_MRT4530_82469C.1
gaatcgatacgcaatactgaatcaatgcgcaaatgaagcacttgacaagcaattaagcgtagtttatccaccataattaagatcgagaccatgagatagctggaacactgctgctaccatgagatagtttatacccccctgtagta

SEQ ID NO: 83105 - DNA, 675 bp, Oryza sativa
  Clone ID: PAT_MRT4530_8246C.1
atggcctccctccggccggatctgggaggggaggccggggagccgccgccgccgcaccgggagagggccgccgctggaggggagccgcccatgttgccgccgccgccgccgtcctcccccggccctccctccggccggatctgggaggggaggctggggaaccacgtcgccgccgccggaccacataaggtgacctgcgaaaataaatgttcgcaggcgccgcttaggtggtccgccgtggtgccgccccacctcgatccgatggcggtgggcctccccggcgtggatccggcgcgtagcgctactcagcagcgcggccccgccgccgtcgccccaccgtgcgcccgccttcgcctctccctcccccactcgccatgcctcccccctcccccactcgcccctgctccgcccatcgaccggcctagcaccgccgcctccctccccaactcgccgccccctcatccccccaccgcccatcccctactcgtttctgctccgcccgtccatcggcccgcgccgcccctacaccatcccgtcagcctcaacacctccaccgccacccctacagccggcccttactccgccattccgcagctgctgcccgtccctactgaagtccaagagaagtcctccttcagtgttgaagtcgtttctgctattgtttgcctccacata

SEQ ID NO: 83106 - DNA, 593 bp, Oryza sativa
  Clone ID: PAT_MRT4530_82470C.1
gccgaccccgaccaggcggcgttcgcggaggaggagaagcgccgcgaggaggaggacgacgccggcgacggcgacggcgacgggtgggtgccgccgcacgtgtacctggcgcggcggcaggcgaggtcgtcggtggtggagggcgtcggacgaacactcaaggggcgcgacgcctcccgcgtccgcgacgccgtctggagccgaaccggcttcgacggctgagccagattaaaccggggagacaagccaattaggatttaatttcttctcttcttcgatttttccccctctcctaattttcttcctcttaaatttttgtgaaaaaattttgtaatatggtttaaattttgctctctcgttttatcttctcatcaagttaatgagaaaagaggaaaagcgtgtggtatgtagcatagtgcattggttgaataatcttcttctttctctctttcttgttgattgggtggtggttgggcagcttcaaccaaagatggttggaatctgattattattcttttgttaattactctactataatatgtatggcctaaaaataattgaggaccaaaaaaaaaaaaaaaaaaaaaaaaaaa

SEQ ID NO: 83107 - DNA, 575 bp, Oryza sativa
  Clone ID: PAT_MRT4530_82471C.1
gcacgaggggcatctccccaccaagaagcgtcgtcctcaagctcaaacctcgcaattttctatctgttctccctaccaggcgctatttattcagattgagctaatcagccaccaaactcgcagaattgtggctgttttcttcctctccagcttccaatctgatcgttgtcagtgtggttattggagcagttgccatcgatcatggtcgccaagatcaagcgacagatcggcggcctctcactcctcgctaagcttggtttgcttctgctcgcgctgctgctgcttcttgctgctatcttgctgttggtgttcttgctcccgcgtcaccatcggaggccgttgccgccggggtcgccgccggtgaacgcctccgaccccgacaacatcgtggcgtttgatttctcgccgttccttatactgtacaagagtgggcgcgtccaccggatggatgggacggaccgcgtccccgccggcgtcgacgaggccaccggggtgacgtccaaggacgtcgtcatcgaccggagcaccggcgtcggcgcccggatgtacctaccgccggcgaaaggtgcggggaa

SEQ ID NO: 83108 - DNA, 518 bp, Oryza sativa
  Clone ID: PAT_MRT4530_82472C.1
tgcttttggggcttctcagttctccatgatccatctacctctgaacctggagttcatttcattgttacgtgttggaattggtgcaagaaatgttaggatctggctcgcttttcctctatggtttaattatgcgaaaaaatgtagcccatttagctcgcacatggagggtgatgacacgattgagtaccctgtaccgagattttgggaccaaactcgtgggtttagatggcttgggtgactctgggtcaagccttatatctcggataaaagctgctgctaggaaataataccaagccaagatgttggaatgattcactgtcagctgtaatagtcgtgagcgctgagcattgacttgcatgctcagcatagttactgacccctggagtaattcgttcatttcattgattaccttaagcatattaactctgatccaggtgtaagttgtgccatgttatgctgataaaaccatggagagtatttgaagatcatattacctggaaataatggaagattattgc

SEQ ID NO: 83109 - DNA, 3182 bp, Oryza sativa
  Clone ID: PAT_MRT4530_82473C.1
atgcagcgcattgatgcgactagtgttgaggcggcggtagaatcactaatcccttacttggaggataccagcagtgctgcacataagtccatctactttgacggatgggatggactgggtgcgtctgcggtgctcagagcgatagcagaaaatccagcgccatctctgaggaagaaatttgacaggattatccatgttgactgctcgagatggaagaaacgaaggcaactgcaaagagcgatcgctgatcaactcaagcttcctcagcatgtaatggatttgtttgataggcaggatgaggaggatgatttcagcggggttgaagaaagctccagagcagaggtaacagatatcggaaaggagatctatcaaaccatcaaggacctcagttgtttgttgatttttcataatgggagtgacgacacagttgatacaagcaaacttggcttccccctatacgattggtctgataataaagtgctttggaccttcagaggaaggctacggctcaatccaaaaattgcagataatgtggacagttcacacctcaatatttatagtcattattattatcatttttattcatttgaaagtttgaatgatttattaccaagagaagctgaagaaatcactcaatactcaggtgagctccaccttgatggcaccaaagctgcagaatgttgcttgtatctattgtctctgaattataggggtggccacatcatggactacaactgggcaacccatgcctgcaactattgggtttgcgatggaataataacagtacaagaagaaaaaggaggaggtagcctacaggaggaccaagcatgggagcttgcagctgctctgcatcaggagatacgtctagaggactactcatccaacagagtgcctggttttggtcattatttggatactcccccaaatcgatgggttttggtcacccaggagtctgacatgaaggacaaaccaactctagaaacaacgtccttgttcattgcattccaaagtgtggtattgttaccggatgacatgttccatcaagcaaacaaagtccaagtactgagattgtgcaactgtgccttcaacttttcgtcacctcctttccattgctgccacaacttaagatttcttggcctggataaatgccaagatcatcggacacaagaagctggagaggataagagcaacactagttcagcactggagttttttcagaggctatgggtattagacatatgctacatagattgggagctgcctttccctacagagagtacaagagagcagcaaatggcaatgaacattagggaggtacatataaacaagggaaggatttggcgcagaaattttgcatggcggcgattgaagaaccttcgaaagcttcgagtaattgagcctacacacccttggggtaacaaaggggaaatagatgagtttgctgacatgctgaagctggagatccttgacctgtctaagaatactatgatacaagttttgccaagcctatgtggtgccagtagcctcaaaacactgatcctagatgattgtgttgtgctggaacaagttggcccccagggacttcctccttcgcttgaatcattcagctttgcttcaagagaaggaaacaaagctaaaatctcatctatctccttggctggttgctcgagcttggtgaacttcacattacgtgggccattgcaaaaccttaggggattggacctctctggcacaatgataaaaatgcttgaccttcgagatgtacaagactcatgtattggacaaataattctgctacggtgtgagaagctatgcaccatattatggccagagaaaggattcccaaacctaagcatgctacacattgattcattggtttgccatgtagaaacagagcagcagcaagcatatgcaaccgtgatggatttaagatttgttcaatccttggtgttaagaagcaataacaagttctgttggaactgcaataagacccatataaatatatgcatctcttctaccccaaaagatgcaacaccaaaaaagaagacaatgagctattacagcgctcaaaaagtagttggctcacctctacacatgccaatagtcaccaccattcaacctgttgtttgctacaaggatgtcaacttggccatgatatctgctattgagctggaaggcagcagtgcaccacggcatgagccactagacatccatgtggagatcggagagggaataagctatgctaatgttgtcagtgaacaagcattgagtgcagtatcatttatgatgaacaaggccaagtctttgcacgtacatgacaatttttcaatcaccagtgttaaccctaaacacgtgattttgacagaggataaggaaattacatggtattgtctaaagaggtgccacattgagagatgtcacaagttgaacactgtcttctctaccgattatatcaaataccgctttcaaacactggaggcattttcagcagctgagctcatgatggcaaattgtatttggagcagaggaaggacattccctggttggaacagtaatatgtttgcaaaactgaggagtatacacttcgcgtacggtccgaggctcacgtttgtgcttccactatcatggcctactccatactcacacttgcccagcttggagactctccacatcgtctactgcagtgaactcagacagatcttccccgtggaggcagttgctctaagggaacaaccaagaggtgtgctgagattcccaaagctgaagcacatccacctgcatgatgtccccaagctgcatcagatatgcgaaatcagcaggatggttgctcctgtgctcgagacaatcagggtgaggggatgctgggctctcaagcgcatccccgccatcaacggcagcctccgtggtcaggacagttgcccaatcgtggactgcgagaaggactggtgggagaagctggaatgggaggggatgaatgttggccatgacccctccctctttgagcctcgccactcgatgtactacaagaaggctctacccagatgctctcttctccggtgagtgctgacatgcagacgctgtatcaactgctgctcacttgttaagatttactgatggatcaaccaagtgagctgcatcagatatgcgaaatcagcaggatggttgctcctgtgctcgagttt

SEQ ID NO: 83110 - DNA, 517 bp, Oryza sativa
  Clone ID: PAT_MRT4530_82474C.1
ggagggcacctcgcatcctcccattgggatctttcaatattctaaaaataaaattttcccagggggtcatatgatgcaaaaaacagcccaggttttttttgagtaggaaagggaaacaaacaggctcaatttttttgaagggccaaaggaggggcacaggaagaaacgggaaatcaagggcagggccctttagttgaacaccatatacttgggggttgcgctgaatttttggaaacccttgatcacctttttcaccgggtccaaaaaatccttttttggcaccgttttcttgggagcgcggatggcgtacatgccagcctccgggcacacactccgtatggcggccccaggggagttggggcaaaggcgagggaccggttcaaaccggatgtcccgctcgcagttcatggggggaggggggatcttgaaaatctggggccggccctccaggtctggcaggccaaactaaattttcttggtccagaacccctggacgtaataatggcggggcccaagg

SEQ ID NO: 83111 - DNA, 102 bp, Oryza sativa
  Clone ID: PAT_MRT4530_82475C.1
atggttcctatcgccattagtgggccggcccaaggagatctcctgagggcccatgaatacaagacacactgtttatctttcgacaagagtgatggtttctga

SEQ ID NO: 83112 - DNA, 653 bp, Oryza sativa
  Clone ID: PAT_MRT4530_82476C.1
catcacgatttctacatgttttataaattatttaagatatcattatcccaaatacaataataggagaaacttaccttgggtgaacctcatttggtcttcttattatggtaacagagtaccacatttgctcttttcctttgtcctgagtcctaattcttttgtcaagcaatcactctcagctcctttggaagacaatttctatttacctttatctcaagaagccttgcaagagttccaggtacttcaggctcagttgcaacattttaatttggagcaagaaaaggacatttggacttttatttagggaaccttgaaatatagttctcagaaattctatgccttaattttttgcactttgcaacctccccaacaatatatatggctttggaatagtaaagttacttcaaaagtgaaagtttttggttggctgctcctgatgaataggctaaatactaaatttatgcttcatcataaacattgtacacctccaaattgtgatctgtgttgtgtgctctgtccttcccaacttgtagaagatttgcagcatatgttcttccaatgccccttttcgatcagctactggaactccatgggcatttcatggaattctacattgtctttaaaaaaatatattatactccaagctacagctt

SEQ ID NO: 83113 - DNA, 264 bp, Oryza sativa
  Clone ID: PAT_MRT4530_82477C.1
atgcctagatcgagcatggacaatggtgtcttggccgtcgctcaagtccaagccactgatactagtgccaacctcgttcttgtcgtcagccgccgctgtagctccctccccacctccctctcctctgccaccactcatggagaagaggatggcagtggcaatggcgccaccaatggagaaaagaacaaaggtggcaaggcaacacggatggccgagacagacggcgacgacgatgacgacgactatgactgcgcgcctgccgcc

SEQ ID NO: 83114 - DNA, 582 bp, Oryza sativa
  Clone ID: PAT_MRT4530_82478C.1
aaaacaaggacactttattttgtctaacattacatcatgaagctcataaatatattataacaggcctgaaactaatccctgcatctgacgtgaacctgtaaacacagaagtgtctttgcatgagcgcacatatgagggagtgatatacaggcccagctcgactgaaaccactcgaactactgaagagcacgatcggcacgctgagcattacctggggcaatgccggagaatattgatctgtgatgcttaggaatgaaccatacgacgaagtacgttgtgttcacattacgctcatcacgacaattgtttccgaaaaagctaggatctggttcagccacacagatacagcgcacatgcgttacataattgctgttgaacgggctcattgagcctatcacacttgagccgcgcattgagtgaactgcggatcctcacgccggtgcttcccagtcagggacaatgccaaaacctttgcgatctgataactcgtcatctacatgctgtctctgtggagggagcgggcttgcatctccaaattgctaacgctgttaagcatcatgatcaatgatatcctggaggcta

SEQ ID NO: 83115 - DNA, 626 bp, Oryza sativa
  Clone ID: PAT_MRT4530_82479C.1
ccatattgactctttttcttgatttgttgattgcggcttttgaaactttttacaagagcttagggcacaacacaacattgcaactccataccatccctatacaagtgcagaaacatccaataaacagatcaagaatgttttgaagaaaaccgtccatgagattgggaaagcttggaagcataagctacctgatgctctttgggcatataggatcgtatataagacgcccattggcatgtcatcataccatgtcatctatgggaagacttgccactagcccgttgagctggagcatagggtgcattgggcgatttggacttgtaacatggatttaggacaagctggatgccaccggcagatttagctatcggaaccagaggaatggagagataaagcttatcacaatgccaagatgtacaaggaacaaaccaaaagatggcatgataggagaatgaaaatcaaggagtttgaaccaggaaacaaggtcttgatgttcaactcaagggtaaagctcttcgatcgtggaaaactttggagcaaatgactaggaccatataccgtcgtcgacacttcgccacacggagcggtcatgctgcgcgatgatgaaaacaacgttttttaggtaa

SEQ ID NO: 83116 - DNA, 149 bp, Oryza sativa
  Clone ID: PAT_MRT4530_8247C.1
gatttatatcattgttcgcaagacgcaaacaagtgcgccacaaattgtgtgccatgactaggcacatacttctcatcatggtacgaactaagacagcagcaggtgctgatgcgcgacgggttctagggcttcctacagatgttagctga

SEQ ID NO: 83117 - DNA, 571 bp, Oryza sativa
  Clone ID: PAT_MRT4530_82480C.1
cgaggatatattttcagtccatgcagctcatcatgctatattgtttcaaaccggaattgcggtcgttcctcacaattgctgatgacataaaagtatcctggttgttcaagaatgacaaagaccatgttccaaaaggcacataaatgaaagcttaaggcttcttttaccttcttttcaatagttgtagagttgcttatgtgttgcaaggtgtcattgtttcttcctctgaacctaagccaattacctctaaagtggtgatgtaggtcttccaatagtcgcgtgctttaggtgcacaccagtaatctagcatgaaattttcagtgcatgaaatgtgtttgaggtactcacgtagaaacttgaaaattaagtaatgtaaaaccattggcgtactagttatgggtcatcttttcacattttaaggttctgggttcagacatcagaaagcattactaaactgggaagcagtgggaagggtgtaaaggacgagggtcactggggtttacatggtgaatcggaaatcagctccatcatccaacttctgtagtttctatgcatctgaaatgctcttcat

SEQ ID NO: 83118 - DNA, 507 bp, Oryza sativa
  Clone ID: PAT_MRT4530_82481C.1
atggcggttccccaccttgccggcctgtccttctccacaaccattcatgtgcggcaggctcggccaagaatgcgtggaaatgagcatgccaggtgggtccttgcccgagatcctatgggaccgtcgtaccacgccaccattgaggttgccaaggccaagctcatcatgctgccatcgaggatgagaggctatcactactatgagaaagcctccgcgcatcccgtcgccggatccgccctcccaccggcctctgcgcccccctccggccacgctgctaacgcccctcccctccggaggggagccggatcctgcgggggaaggtggctgacctccggatccgtgcggggacagctgccgccgccggatccgtgctggggttggccgccgctcgctggatcccgcgtgtcgtcgccgtgccgccgctgccgctgcgctgcctatgcctgtcgtggccgtcgggactcaatcaggaggagaggagaggagaggacggggaaaaagagatag

SEQ ID NO: 83119 - DNA, 3168 bp, Oryza sativa
  Clone ID: PAT_MRT4530_82482C.1
atggcacggggttccgctctgctcgacggaagcgtacttccgccttctcgcatcgtgagcgagaggcatgccgggctgccgcgccgctttatgccggaatctgccaccggccgggagatagtgatgctgggcgagggacgcccggcaccagactacccggggcggtccgtcttcttcctccccttcgcaatggcagggctggttccgccattttcttctttctttatggatgttctggatttctacgatctccagatggcgcacctcacccccaatgcagtgatgacattggccatcttcgcgcacctgtgcgagatgttcattggggtgcgcccatctcttcggctgttccggtggttcttcaccgtgcagtcggtgtcgccgccgtcggtggttggtggctgctacttccagccgcgggggccggtgttgaaccgctacatcccctgcgccctccgcaagaagtgggacgactggaagagcgactggttctacacccccctcgccaacgaagcgcgcctccgacttccaagtcagcccccggcgcaggtctccagctggcgggcgccggtagatctgggggatgactatgacgccgtcctcgaccgcctggcgggcctgcgatcccaggggctcacaggggccatggtgtacggcgactacctccgtcgccggattgcgccgctccaacggcgcgcccggggcgcctgggagtacaccgggtccgaagactacatgcggacccaccagggagtcagatgggattgggctcccgaggacttcaagatcgtggtccaaagggtgctgaatctcagctccgtggaggcgtctctcattcctcaaggaatcctccccctctgcagcgatcccgaccgcgcctccattctgaccattatgatgggggtcggggcctcagaggaggaaactcctaagggccacgacggcgcgggcgagagccgccggggggaacaatctaccccaggagggggtcgtgcttctgggccccgcgtcgggggctcggggagcagccgccctgccgacgcccaggggaagaggaagctgggaggaacacctcccccatctcctccccgagggggcggggcggtgcgtgccagcagtcggcacccggagggggccgcgccgacatcgcagcccgagggggagcgcaagaagaagcggctccgcaagatgggggagacggaaccatcccggggaaacctgatttcccctccaaggtggtcatttaaccgaccccctcgcagcgatgtcccgtcacgttcctcccgccatcccaagtccggccagtccgaggccgaagatccggcggccgcagaggaacggaggcgagaatctgaccggcgagaggccgcagatcgccttcgggaagccgaagaggccgcccgggaggccgctcgggctcgccatgcagaggataccgctcgggaggaggtcgcccgggctcgccaagccgaagaagctgctaaggaggaggccgcccgggctcgtcaggctgaggcgatggcgtcttccgaggcagctcacgacaaagctgctggcgcgtcgcttgggcctactccctcgggcgacgctcaggcgacagcctccggggcggctcgcgacgaggctgcgggcggatcgcctgggcccacttccccaggcgacgtccaggaccaatcgggtccgggggacatccccgagcccagtgcgtcctccggcgggccgagccgcgtcgcattctctccaaggcggctattctcctcgtcttctgtcgccccgctgagcgccgagccccttctgcaggccttggccgccgcaaacaccgcggtgctagatgggttcagcgcccaagtggaggccctgcgagcggaacgagcggagctcgaggccgcatgggcgcgtgtcgaggaggggcggcgctcggtggatgtcatggtggaggtgggccgcaaggctcaccgccgtcacgtctcggagcttgaagcccgcaaagcggcgctggcagagatcgcccgagaggtggaggaggagcgggaggccgccctcattgccaccaccgcgatgatcgaggcgcaggacaccctccgccttcaacacgggagctgggaggcggagctaaagaaaaagctcgacgccgcccaaggggtccttgacaccgccgctgcccgagagcggcgggcaacggagatcgaagcggcgtcccggcggcgcgaggaggcccttgaggcccgtgctatggcattggaggaacacgccggcgccgtggagaggggcttggcggaccgcgaggccgccgccgctatccgggagacaacgctggcggtgcacgaggccgcctgcgccgaagaggagtccgcgctccgcctccgcgaggacgcactcgctgagcgggagcgagctctcgaagaggccgaggccgcggcgcaacggttggcggatagccttttcctccgtgaggcagcgctggcggagcaggcacgccgcaatttggaatccgtccgcgccgagagagccgcactggagcagcgggctgccgacctcgaggtgcgggaaaaggagctggacgcgagggcgcgtatcagcggggcggctgcgggcgaaagcgacttagccgcccgcctcgcagctgccgaactcaccgtcgccgacatgcagtgcgcgctagactcatccgccggggaagccgaggccctccgcttggcgggcgaaatagggcccggcatgctttgggatgcggtctcccgcctggatcgcgccggtcggcaagcgggcctctggaaaggccagtcaatgacacaccccaccaacctggaaggcctcgctccgcacctcacgaagatggcctgggctctccaacaactccccgaggagctcgagaagaccatcaagtcatcctcgagggacctcgcccaaggagcggttgaactcgtactagcgagttaccaggccagggaccccaacttctctccatggatggcgctggaagagttccctcccgggaccgaggacgacgcgcgcgcgcgggtccgggatgccgccgaccacatcgtccacagtttcgaggggtcggcccctcggctcgcgttcgcccccaactccgacgaggagggcgacgccagcggtgcagacgaccgtgacgacgaggccggcgacccgggcgcatcggactga

SEQ ID NO: 83120 - DNA, 4023 bp, Oryza sativa
  Clone ID: PAT_MRT4530_82483C.1
atgggcggtctcttcaagactgccacatcacctgagcggcgcacgaatctgggcgagccgttaacgcgcgcacgatacgatctatctcgactgccgcaaccgcatatccatcttacgcgccgcaagcgggcgaatgggattagtggaagcgtgggcgcgagaaacgagggggcgaacttctcttcgtccggcgccatggcacggggctccgcactgcttgatggtagcgtgctgccgccttctcgcattgtgagcgagaagcaggctgggttgccgcgccgcttcatgccggaatctgccaccggccgtgagatagtaatgctgggtgagggacgcccggcgccagactacccggggcggtccgtcttctttctccccttcgcaatggcagggctggttccgccattttcttctttcttcatggatgtcctggagttctacgatctccagatggcgcaccttacccccaacgcagtgatgacattgggcatctttgcacacctgtgcgagatgttcattggggtgcgcccatctctccggctgttccggtggttctttaccgtgcagtcggtatcgccaccgtcggtggtcggcggctgctatttcctgccgcgggggccggtgttgaaccgctacatcccctgcgtcctccgtaaaaagtgggatgactggaagagcgactggttctacacccccctcgccgatgaagcgcatctccgacttccgagccagcccccggcgcaggcctccagctggcgggcgccggtagatctgggggatggctatgacgccgtcctcgaccgcctcgcgggcctgcgatcccaggggctcaccggggccatggtgtacggcgactacctccgtcgtcggattgcgccgctccagcggcgcgctcgggccgcctgggagtacaccgggtccgaagactacatgcggacccaccagggagtcagatgggattgggcccccgaggacttcaagatactggtccaacgggtgctaaatctcaactccgtggaggcgtccctcatcccccacggtatcctccccctcttcagcgacccagatcgcgcctccatcttgaccattatgacggcggtcggggcctcagaggagcaggctcctaagggccatgacggcgcaggtgggagccgccggggggatcaatctacccccggagggggtcgtgcttctgggccccgcgtcgggggctcggggagcaaccgccctaccgacgcccgggggaagaggaaactaggaggaacacctcccccatctcctccccgagggggcggggcggtgcgtgccagcagcaggcgcccggagggggccgcgccaacatcgcagcccgagggggagcgcaagaagaagcggctgcgcaagatgggggagacagaaccatcccggggaaacctaatttcccctccaaggtggtcatttaaccgaccccctcgcagtgatatcccatcgcgttcctcccaccatcccaagtccggccagtccgaggccgaagatccggcggccgcagaggcacggaggcgggaatctgaccggcgagaggccgcagaccgcctacgggaagctgaagaggccgcccgggaagccgcccgggctcgccaggctgaggataccgctcgggaggaggccgcccgggcccgccaaggcgaggaagccgctcgggaggaggccgcccgggttcgccaggccgaagaagccgctcgggaggaggccgcccgagttcgccgggctgaggcgatggcggcttccgaggcagttcacgacgaggccacggacgcctcgcttgggcccaccccttcgggcgacgcccaggaccaaacaggtccgggggtggcccgcgatgaggccggcgcgtccattggcgggccgagccgcgcggcgtcttcttcaaggcagctcttccccacgccttccgccgccccgctgagcgcagagccccttctgcaggccttagccgccgcaaataccgcggtgttggatgggttcaatgcccaggtggaggccctgcaggcggagcgtgcggagctcgacgccgcatgggcgcgtgtcgaggaggggcgacgctcggtggaggccatggtagaagcgggccgcaaggcacaccgccggcacgtctcagatcttgaggcccgcaagacggcactggcggagatcgctcgagaggtggaggaggagcggggggctgccctcatcgccaccactgaggcaagccgcgagggcgcgcccgaaggcggcctcgccggcacggccgacgggaggggaacgcgcccgcgccccgatggtcaccgccggcgaccaccggcgcggcggagcggcacccgagagagaggagggaagggggaagcgaacggaacggtcttcggctcaccccggtcgacggcgacgacgggaacggcggccgaagcggaagaaggcggcggcgcggttcgggacggcgaggacgacggagctccggcggtcggcgggcgaagcgaaggcgcggacgaggtcgacgggaacacggcgaagccgatggaggtgacgccgagtggggaggaagtccggagcgacggcggcggcgaaccggaactcgtcggcgacggcggagagagaggaaagcggcgcgagcacgaatccgacggatgtattttagagtcgatttgggacgtgacaaccacgactgagccacaaactaagtcttacccactagacatgtggaagtacggtagtgctttgcaacagaggcccgaagaccgagtcgttttgggacgcgacagatttgattacggatctggaacctttgcgagcatccgcactttcaggatgaaattaagccctgaaaagtgcaccttcggactaccgtcagggaagttgcttggctttatggtgtcccataggggcatacaagccaacccggagaaaatcaacgtcatcctcaacatgaaaccgccaagctcctggaaagatgttcaaaagttgactggttgcatggcagcgctcagccggaaattatctcactacttccaaggccactcagatacggtggatacatcgtttccactcggggatatacttcacaatcgcgaagcaaatgggcggatcgcaaagtgggccttagagttgatgtctttggatctatccttcaagctgcgaacttcgatcaagtcccaagctttagtagacttcgtcgccaagtggaccgagtgccaagaagacacgcctgcggaaaagacagagtattggactatgcattttgacgggtcaaagaggctttcaggcattggagcgggggttgttctaatttccccgactagagagaggttgagctacgtgttgtggatacatttttctgcgtctcacaacgtggcggaatatgaggcgcttcttcacgggctaaggattacgatctccttgggaattcggcgtctgatagttcatggaaactctcagttggttgttaatcatgtcatgaaagagtggtcctgccttgatgataacatgaccgcctatctgcaggaggtacgcaagttagaagataaattcgatggccttgagctaccccacgttcttcaacataataatgaggcagccgaccggctggctaattttggttcaaaacgagaagcagctccttccgacgtgttcgttgaacatctttatgagccaaccgtaccaaggaaagaaataatcgaggccacggacactcaagaaactcatctaccggctcaggagttgcaaaccatcccgttatcttggccattcgtggtttgcgggctcgacatggccggcccgtttaaaaaggttgtcggtggttatactcatctctttgtggctgttgacaagttttccaagtggatcgaagccaaaccggtcatcacaatcacggcagacatggctagagatttcttcatcaacattgtgcaccggtttggggtacccaatcggatcatcaccgataatggcactcaattcattggtggagtatttaaagatttttgtgaggacttcggcatcaaaatctgttaa

SEQ ID NO: 83121 - DNA, 211 bp, Oryza sativa
  unsure (1)..(211): unsure at all n locations
  Clone ID: PAT_MRT4530_82484C.1
actnctcctgnctccactcaggcgcagagcatggcanacaatcacaangtcngnggcgtcctcnnnnncncgangntggcgttngtccgtggctctccactgnagatgcgcgcgagattggggcntgctacgcggagggatgcgaggaatctnntcggtccntcgtaagtcatgnagcttctcgaacgtgnacagcatcacgattcgtaag

SEQ ID NO: 83122 - DNA, 3081 bp, Oryza sativa
  Clone ID: PAT_MRT4530_82485C.1
tcacttcgacgcgcccgggccgcaggcctcgtcgtcgctgtcgtccgcaccaccgtcaccgccctcctcgtcggagtcgagggcgaacgcgagccgaggggccataccctcgaagctgtggacaatgtggtcggcggcgtcccggacctgcgcgcgcgcgccgtcctcggtcccaggagggaactcgtccagcgctacccacggggagaagtcggggtccctggtctggtagcttgccagtacgagctccactgccccccgggcgaggtctctcgaggatgacttgatcgtctcctcgagctcctcggggagccgctggagggtcccggccatctctgagaggcgctgggcaaggcccccctggttggcggcgtacttcgcggtccgcccgccccagaggcccgcctgccgcccggcgcggtctagacgggagacggcgtcccgaagcatgccgggccctacctcgcctgccaagcggagggcctcgacctccccggtggacgagtccagcgcgccctgcagctcggcgatggtgtgctcggcagctgcgaggcgggcgactaggtcgccgtcgcccgcggccgccccgccgctgcgcgccctcgcgtccagctcctttgcccgcgcctcgagctcagcggcccgctgatccagtgcggccctctcggcgcgggcgccttccagattgcggcgcgcctgctcctcccgcgctgtctcgcggagggacaggctgtccgccagcctttgcgccgcggcctcggcctcctcgagagctcgctcccgctcggtgagcgcatcctcgcggaggcggagtgcgaactcctcttcggcacaggcggcctcgtgcgccgccagtattgcctcccggatggcgacggcggcctcgcggtccgccaggtccctctccttcgcgcgggcgcgctcttccagcgccgtggcgcgagcctcaagggcctcttcgcgccgccgggacgccgcctcgttctccgccgcccgccgttcccgggcagcggcggcgtcaaggaccccccgtgcggcgtcgagcttcttccctagctccgctgcctggctcccgtattggaggcggaggtcgtcccgcgcctcggaagacttcaagatggtgatccaaccggtgctgaatctcagctccgtggaggcatccctcatcccccaaggtgtcctccccctcccccgggcggcgtcgagcttcttccctagctccgccgcccggctcccgtattggaggcggaggtcgtcccgcgcctcgttcagcacggcggtggcgatgagggcagtctcccgctcctcctccacctccctggcgatctccgccagctccctccgacgggcctcgagctctgaggtgtgccggcggtgtgccttgcggcccgcctccaccatggcctccaccgagcgtcgcccctcttcgacgcgcgcccacgccgcgtcgagctccgcccgctctgcctgcaggacctccatctgggcacttaacccgtccaacaccgtggtgttcgcggcggccaaggcctgcagaaggggctccgcgctcagtggggcagcggaaggcatgggggagagctgcctcggtgagggtgccgcacggctcggcccaccgatcgacgtgccggactcggggacgtcccccgaagctggctcgtcctgagcgtcgcccgaggggtcgggcccgagcggtgcgcccgcggcctcgtcgtgggtggcctcggaagtcatcgtcgcctcgggcggagtcgggtcgggggcttggcaggccgcctggcgtgcgcgcgccgcctccgcctcccggacggactcctcggcccggcggagtctggcctcctcccgagcggcttcctcagcctggcgagcccggatggcctcctgggcagcttcctcggcttcccgaaggcggtccgcggcttctcgccggtcagcttcccgcctccgggcctccgcggtcgccgtctccccggcctcagactggccggacttggaatggcgagggggggcgcgacgggatctcgcctcctgcttcctcttcccccgggcgtcagcagggcggctgctcccgtcgcggggcccagaagcatgaccccctcccggggtagattgttcccccctgcggctcacgcccgcgccatcgtggcctcgaggggcccgctcccctgacgccccgaccgcttgcatgacggtcaggatgttggcgcgctctggatcgctgcagagcgggaggacaccttgggggatgagggatgcctccacggagctgagattcagcacccgttggatcaccatcttgaagtcttcagggacccagtcccacttgaccccctggtgggtcctcatgtagtcctcggacccggtgtactcccaggcgccccgggcgcgccgctggagcggcgcgatccggcgacgaaggtagtcgccgtacaccatggcccccgtgagcccctgggatcgcagacccgccaggcggtcaagaacggcgtcgtagccgtctcccagatctaccggcgcccgccagctggaggcctgcgccgggggctggctcggaagtcggagacgcgcttcgtcggcgagaggggtgtagaaccagtcgctcttccagtcgtcccacttcttgcgaaggacgcagggaatgtagcggttcagcaccggcccctgcggctggaagtagcagccaccgactaccgacggtggcgacaccggctgtacggtgaagaaccaccggaacagccggagagatgggcgcaccccgatgaacatctcgcacaggtgcgcgaagatggccaacgtcattaccgcgttgggggtgaggtgcgccatctggagatcataaagctccagaacatccatgaagaaagaagagaatggcgggaccagccctgccattgcgaaagagaggaagaagacggaccgccccgggtagtgtggcgccgggcgtccctcacccagcgcgaccacctcccggccggtggcagattccggcatgaatcggcgcggcagcccggcctgcctctcgctcacgatgcgagaaggcggcagcacgctaccgtcgagcggtgcggagccccgtgccat

SEQ ID NO: 83123 - DNA, 3951 bp, Oryza sativa
  Clone ID: PAT_MRT4530_82486C.1
atgaagcctggtatatatctgaccgggaccaacgtgccatctccaggagctaacacgccggctctggctagggacgagtgcttggaggctctcatcctgatgggatggggcgaggccgtcatggcacggggctccgctccgcttgacggtagcgtgctgccgccttcccgcatcgtgagcgagagacaggccgggctgccgcgccgcttcatgccggaatctgccaccggccgggagatagtctcgctgggcgagagatgcccggcgccacgctactcggggtggtccgtcttcttcctcccttttgctatggcagggctggttccgccattttcttctttcttcatggatgttatggagttttacgatctccagatggcgcacctcatccccaacgcggtaatgacattggccatcttcgcgcacctatgcgagatgttcatcggggtgcgcccatcccttcggctgttccggtggttcttcaccgtacagccggtgtcgccgccgtcggtggttggtggttgctacttccagccgcgggggccggtgctgaaccgctacattccctgcgtcctccgcaagaagtgggatgactggaagagcgactggttctacacccccctcgccgacgaagcgcgcctccgacttccgagccagcctccagcgcaggcctccagctggcgggcgccggcgggcccgcccgccaccctcgctgacgggtggggcccacctgtcatcccccacctcgcgccgcgcccgccgctcgcccgtgccctagcgccgccgccgtcgcgaatctcgccgcctcccgccgtccccgcgcgcattaaagaggggggaattattccccacgattccctctctctttccccccgtttttccctctctctctccctcagattcgcccggattcgttcccgcaaacctcgccggcgcaatcaatggcggccggatcctccgcgccggtttccatctcctccggccgccttccctcactcccaaccctatttaagccactcccgtgccctcctcctccgtttccgccgttcgccactcgctctccccgtcggaatcgcgctcgcgccgtcgcatcttctctccgccgtcgccgccgagcttcggttcgccgccgtcgtcgctccggacctcctcccgactcggcgtcacctccttcggcttcgccgcgtccccgtcgacctcgtccgcgcctccgtttcgcccgccgactgtcggagcgccgtcgtcctcgtcgtcccgagccgcgccgccgccttcctccgtttcggccgccgttcccgtcgtcgccgtcgaccgggccgcccgctcccgcgggtgcggctgacgcatgggacccacggcgccggccgccgccagccgcgtgctcccgcacctcggccatataaggaccggtcttcgggcctctgttgcaaagcactaccgtacttccacatgtctagtggggcaaatgaaggctacacgagctgcggcccggtagtcgagatgtcatggcagagggttggtgccctgctgctaggggctcagtcttgcctgcctgtcccgggggttccggccgtaggcaggattggctatgacgccgtcctcgaccgcttggcgggcctgcgatcccaggggctcacaggggccatggtgttcggcgactaccttcgtcgccggattgcgccgctccagcggcgcgcccggggcgcctgggagtacaccgggtccgaggactgtatgaggacccaccagggggtcagatgggactgggctcctgaggacttcaagatagtggtccaacgggtgctgaatctcagctccgtggaggcatccctcattcctcaaggagtcctccccctctgcagcgatccagaccgcgcctccatcctgaccatcatgcaggtagtcggggcgttggaggagcgggctcctcgaggccacgatggcgcgggtgggagccgcaggggggaacaatctaccccgggagggggtcgtgcttctgggccccgcgacgggggcccggggagcggccgccctgccgacgcccgggggaagaggaagcaggaaggaacccctcccccatctcctccccgagggggcggggcggcgcgtgccagcagcaggcgcccggagggggccacgccgacgtcgcagcccgagggggagcggaagaagaaacggctccgcaagatgggggggacagaaccatcccggggaaacctcatttcccctccaaggtggtcgtttaaccgaccccctcgcagcgagatcccgttgcgtccttcttgccaattcaagtccggccaatctgaggccgagaatgcggcgaccacggaggctcggaggcgggaatctgaccggcgagaagccgcggatcgcctacgggaagccgaggaggccgcccaggtggccgtccgagctcgccaagctgaagaagccgctcgggaggaggccagacttcgccaggccgaggcggcgacgacttccgaggcagctcgcgacgaggccgcgggcgcatcgcttgggcccactccctcgggcgacgctcaggacaagccaggtccgggggacatccctgagtccggcacgtccatcggcgggccgagccgcgcggcatcctcaccgaggcggctcttccccacgccttccgttgctccactgagcgcagagccccttctgcaggccttggccgtcgcaaacaccacggtgttggacgggttaagtgcccaggtggaggccctgcaagcagagcgggcggagctcgacgccgcatgggcgcgtgtcgaagaggggcgacgctcggtggaggccatggtggaggtgggccgcaaggcacaccgccggcacgtctcaaagctcgaagcccgtcggaaggtgctgggggagatcgccaaggaggtggaggaggagcggggggctgccctcatcgccaccaccgtgatgaacgaggcgcaggacaccctccgccttcaatacgggagctgggaggcggagctagggaagaagctcgacgccgcccggggggtccttgacgctgccgctacccgagaacggcgggcggcggagaccgaggtggcatcccggcggcgcgaagaagcccttgaggcccgtgccatggcgctggaagagcgtgcttgcgccgtggagagggacctggcggatcgcgaggccgccgttgccatccgggaggcaacgctgactgcgcacgaggccgcctgcgccaaagaggagtccgcgctctgcctccgcgaggacgcgctcaccgagcgggagcgagctctcgaggaggccgaggccgtggcgcaacggctggcggacagcctgtcccttcgcgaggctgcgcaagaggaacaagcgcgtcgcaatctggaaagtgcccgcgccgagagggccgcactgaaccagcgggccgctgaactcgaggcgcaggcaagggagctggatgcaagggcgcgtagcggcggggcggccacgggcgatagcgacttagccgcccgcctcgcagctgccgaacacaccatcgcggatctgcagggcgcgctggattcgtccaccggggaggtcgaggccctttgcctggcaggcgagatagggcccagcatgcttcgcgacgccgtgtcccgtttagaccgcgccgggcggcaggcgggtctctggggcgggcggactgtgaagtacgccgccaaccaggggggcctcgcccagcgcctctcggagatggccgggactctccagcggctccccgaggagctcgaggggacgattaaggcatcctcgagggacctcgcccgaggagcggtggagctcgtccgggacgccgccgaccatatcgtccacagcttcgaggattcggcccctcggctcgtgttcgccctcaactccgacgaggaggacgatgacggcggagtgggcgacagtggcgacgaggctggcgacccgggtgcatcggagtga

SEQ ID NO: 83124 - DNA, 590 bp, Oryza sativa
  Clone ID: PAT_MRT4530_82487C.1
atatagaattgaaaagctgtattaggacagcactgttacttgtgtttaagctggaaacggtttgcatctcggtgcaaaattatacaggattatctaaaaacacatcatcaccttcagggatctctattgctatttcacaatgctaaggcacactggaaaagagttcatgcaatagcaaatggttcctcctcagcatctgctcctggcttcttggacgcgggcgaggcgggcggctgctcctccccgtagatgacgcggaggcgggacgcggagatgggcggggagggcgcggcggcgagggcgaagagctcctcgcgccacgcccacatggcggaggacatggcggtgttggcggcgcggagcgacgccttcctggcctccagctcgtcgatctcgtgctgctgctcccacgaacgccaccccagcaccacgaatgagcccagcagcagcgcgctcgtcaccttctcgtggttcaccttccccagcttcgctccgatcccgcgcaacgccgccgccatccccgccgccgccgccgcacgattggtatgagacgacgaagaagaagcccagcccactctgggtcagctcgc

SEQ ID NO: 83125 - DNA, 4476 bp, Oryza sativa
  Clone ID: PAT_MRT4530_82488C.1
atgtcgtgccaggctgtggtggatgtgttggcggtaagattcgatgctttaggtcctcccggggggtcccttttataccgcatgtcaactggtctccaagtagaactcggagacatcggacccgtagcccccgacttctacttaaatgaactcgcgaaaccgatcgcgacttctgatgtcgaggttgtcatcgttctcggtgtgaggaccgagagacaaggagtgatcgacaacgccagtccgcctgttgtgaaaaaactctccagcctccaagtgtccctcgtcttctccgctcccacaaaaaccctagctagctcatctcggtcctttctccggcgatccccggcagcaatggatctcgacaagtctacctctaccagcgcatcgctgaagaagctgcaggaggatggcgcccttcccagtcgcggaaccatggagagagaagcaggaggtactgaaccccagcctgtcctgggtcgcatggttgcgatcgaggactttattctctgtggttttcttcctccgccttctgaatttcttctcttggtcttgaatttctacggcctttccttgctccatttgaaacccaattccgtcgccttcctgagtatcttttcgcatctttgtgaggcctacattggggtagagccgtttcttgacctcttccgcttttactatgagttgcgctggatgaaacctaaaaagatagaagattcggatccggtctttattgttcctgaggagcaaccagacaagatttcatcttggaccgccaaatccaccttgaccccatccctccaatctttcatcgatatcattgatgacctccgagtacggggattgtcggggtatgaagtcgctgccgacttcattgataggcggatccagccgctccaggctcgggcccacccagcctttgattattctgggccggaggacgcgacccgggtttctcctcggggcttggacagcgcaaccgtggagtgccgcgtcagccaactgatgatcagtggcccaacaacggcgagcaacgtccccgtccccctttgcgagaaaggggcagccgagcgcgaagctgccaactatgtggcgacgtcgctgaaggagaaagtcgccaaggaggcgtctgacgctgctgccgctgctgccacaacgagtgatggcaatgttccgaaaaaggggaggaaattctcctctgtgatcagacatcgtcggaagacgcccaccccctcggcctcggatgcgtctcccccgcctccgcgacggcagcggcttgtgacgctcggcgagaaggcggcgcgggcgaaggcggtgcaagacgggtctagggggacctccagcgcgtctcctgctgtggcctcgacggatgtcgtggtcgtgcccaggagccacgaggcgacacctagcggcctagccagcgatctcgtggctggtcgtggtccgccggctgccgtcctcacctgggaggagctccaggtcgagatggggcgcctcctcgaggctggtgctcgcagcattagccgcgagatcacagaggcgagggcggctgacggagcgtggggctcctcaccgggagaccgcgcaggcccccctttgccggttcggccgggggcgctaagtgagccggaaatgacttctgacaagcagagcacacgcttcctgccctgctcgcccgcttttccggtggacgcccatttcaaccttcatttaatggccagcgacttccttgccatgcctgcgttgaagtctggaatgaatctgaccgggactgacataccaactacaggagtgagcacgccggctccgactagggacgagagccaggaaactctcatcattccgacgggacggggcgaggcggggtcggggcgctccaactcttcgtctcctgtgccctaccctcgccgcactcgctcgctctcaagctcctcctccgccggcgtcatggcacggggctccgcaccgctcgacggtagcgtgctgccgccttcccgcatcgtgagcgagaggcaggccgggctgccgcgccgattcatgccggaatctgccaccggccgggaggtggtcgcgctgggcgagggacgcccggcgccacactacccagggcggtccgtcttcttcctctctttcgcaatggcggggctggtcccgccattctctacttttttcatggatattctggagttttatgatctccagatggcgcacctcacccccaacgcgataatgacgttggccatcttcgcgcacctgtgcgagatgtttatcggggtgcgcccatctctccggctgttccggtggttcttcactgtacagccggtgtcgccgccgacggtagtcggtggttgctacttccagccgcgggggccggtgctgaaccgctacattccctgcgtcctccgcaaaaagtgggacgactggaagagcgactggttctacacccccctcgccgacgaagcgcgcctccgacttccgagccagcccccggcgcaggcctccagctggcgggcggcggtagatctgggagacggctacgacgccgttcttgaccgcctggcgggtctgcgatcccaggggctcacgggggccatggtcttcggcgactaccttcgtcgccggatcgcgccgctccagcggcgcgcccggggcgcctgggagtacaccgggtccgaggactacatgaggacccaccaggggtgcaaatgggactgggtccctgaagacttcaagatggtggtccaacgggtgctgaatctcagctccgtagaggcatccctcatcccccaaggggtcctccccctctgctgcgatccagaccgcgccaacatcctgaccatcatgcaggcggtcggggcgtcgggggagcgggccccccgaggccacgatggcgcgggcgggagccgcaggggggaacaatctaccccgggagggggtcgcgcttcagggccccgcgacgggggcccggggggcagccgccctgccgacgcccgggggaagaggaagcaggagggtacccctcccccatctcctccccgagggggcggggcggtgcgtgccagcagcaggcgcccggagggtgccgtgccgacgccgcagcccgaggaggagcgaaagaagaaacggctccgcaagatgggggggaccgagccatgccgggggaacctcatctcgcccccgaggtggtcatttaaccgacctccccgcaggttcgtctccgcgcccaccgcggccgtattcattctcccatctcccaaggcgagttttcactcacccgtttctttttgtcttctggtttttcttctgcctcagcgagatcctgttgcgcccccccccccccgccattccaagtccggccggtctgaggccaaggagacggcgaccgcggaggcccggaggcgggaagctgatcggcgagaagccgcggaccgcctccgggaagccgaggaagctgcccaggaggccgtccgggttcgccaggctgaggaaaccgctcgggaggaggccagactccgccgggccgaggagtccgtccgggaggcggaggcagcgcacgcacgccaggcggcctgccaagcccccgacccgactccgcccgcggcgacgacgacttccgaggccacccacgatgaggccgcgggcgcaccgctcgggcccgacccctcgggcgacgctcgggacgagccagcttcgggggatgcccccgagtccggcacgtcgatcggcgggccgagccgcgtggcacccacaccgaggcggctctcccctctgccttccgctgccccactgagcgcggagcccctcctgcaagccttggccgccgcgaacaccacggtgctggacgggttaagtgcccagatggaggtcctgcaggcagagcgggcggagctcgacgcggcgtgggcgcgcgtcgaagaggggcggcgctcggtggaggccatggtggaggcgggccgcaaggcacaccgccggcacgcctcagagctcgaggcccgtcgtagggaccttgcggagatcgccagggaggtggaggaggagcgggagactgccctcatcgccaccgccgtgttcaacgaggcgcgggatgacctccgcctccaatacgggagccgggcggcggagctagaaaagaagctcgacgccgcccggggagtccttgacgccgcagctgcccgggaacagcgggcggcggagaacgaggcggcgtcccggcggcgcgaagaggcccttgagggtcgcgccacggcgctggaggagcgcgcccgcgccctggacgcgaaggagagggagctggcggacctcgaggccgccgtcgccacccgggaggcaacactggcggcgcacgaggccgcctgcgccgaagaggagtccacactccggagttcaccacgccccggggcacggctcggttctgggccccttttggcgattttagccggcccgggccaccgagggcaggatcgagcacgagcgtgctaa

SEQ ID NO: 83126 - DNA, 3120 bp, Oryza sativa
  Clone ID: PAT_MRT4530_82489C.1
atggcacggggctccgcaccgctcgacggtagcgtgctgccgccttctcgcatcgtgagcgagaggcaagccgggctgccgcgccgattcatgccggaatctgccaccggccaggaggtggttgcgctgggtgagggacgcccggcgccacactacccggggcggtccgtattcttcctttccttcgcaatggcagggctggtcccgccattctcttctttcttcatggatgttctggagctttatgatctccagatggcgcacctcacccccaacgcggtaatgacgttggccatcttcgcgcacctgtgcgagatgttcatcggggtgcgcccatctctccggctgttccggtggttcttcaccgtacagccggtgtcgccaccgtcggtagtcggtggctgctacttccagccgcgggggccggtgctgaaccgctacattccctgcgtccttcgcaagaagtgggacgactggaagagcgactggttctacacccctctcgccgacgaagcgcgcctccgacttccgagccagcccccggcgcaggcctccagctggcgggcgccggtagatctgggagacggctacgacgccgttcttgaccgcctggctggtctgcgatcccaggggctcacgggggccatggtgtacggcgattaccttcgtcgccggatcgcgccgctccagcggcgcgcccggggcgcctgggagtacaccgggtccgaggactacatgaggacccaccagggggtcaaatgggactgggtccctgaagacttcaaggtggtgatccaacgggtgctgaatctcagctccgtggaggcatccctcatcccccaaggtgtcctccccctctgcagcgatccagagcgcgccaacatcctgaccatcatgcaggcggtcggggcgtcaggggagcgggctcctcgaggccacgatggcgcgggcgggagccgcaggggggaacaatctaccccgggagggagtcgtgcttctgggccccgtgacgggggcccggggggcagccgccctgccgacgcccgggggaagaggaaacaggaggataccccctccccatctcctccccgagggggcggggtggtgcgtgccagcagcaggcgcccggagggtgctgtgccgacgtcgtagcccgagggggagcgaaaaaagaagcggctccgcaagataggggggaccgaaccatgccggggaaagctcatctcccccccaaggtggtcgtttagccgacctcctcgcagcgagatcccgtcgcgcccttcccgccattccaagtccggccggtctgaggccgaggagacggcgaccgcggaggcccggaggcgggaagcggaccggcgagaagccgcaaaccgcctccgggaagccgaggaagctgcccaggaggccgtccgggctcgccaggctgaggaaaccgctcgggaggaggccaaactccgccgggccgaggagtccgtccgggaggcggaggcggcgcgcgcacgccaggcggcctgccaagcccccgacccgactccgcccgaggcgacgacgacttccgaggtcacccacgacgaggccgcgggcgcaccgcccgggctcgacccctcgggcgacgctcaggacgagccagcttcgggggacgtccccgagtccggcacgtcgatcggcggaccgagccgtacggcacccacaccgagacggctctcccctctgccttccgctgccccactaagcgcggagcccctcctgcaggccttggccgccgcgaacaccacggtgttggacgggttaagtgcccagatggaggtcctgcaggcagagcgggcggagctcgacgcggcgtgggcgcgcgtcgaagaggggcgacgctcggtggaggctatggtggaggcgggccgcaaggcacaccgccggcacacctcagagctcgaggcccgtcggagggagctggcggagatcgccagggaggtggaggaggagcgggagactgccctcatcgccaccgccgtgctgaacgaggcgcgggacgacctccgcctccaatacgggagccgggcggcagagctagggaagaagctcgacgccgcccggggggtccttgacgccgccgctgcccgggaacggcgggcggcggagaacgaggcggcgtcccggcggcgcgaagaggcccttgaggctcgcgccacggcgctggaagagcgcgcccgcgcgaaggagagggacctggcggaccgcgaggccgccgtcgccatccgggaggcaacactggcggcgcacgaggccgcctgtgccgaagaggagtccgcactccgcctccgcgaggatgcgctcaccgagctggagcgagccctcgaggaggccgaggccgcggcgcaaaggctggcggacagcctgtccctccgcgaggcagcgcgggaggagcaggcgcgccgcaatctggaaggcgcccgcgccgagagggccgcactggatcagcgggccgctgagctcgaggcgcgggcaaaggagctggacgcgagggcgcgcagcggcggggcggccgcgggcgacggcgacctagtcgcccgtctcgcagctgccgagcacaccatcgccgagctgcagggcgcactggactcgtccgccggggaggtcgaggccctccgcttggcaggcgaggtagggcccggcatgcttcgggacgccgtctcccgtctagaccgcgccgggcggcaggcgggcctctggggcgggcggaccgcgaagtacgccgccaactaggggggcctcgcccagcgcctctcagagatggccgggaccctccagcggctccccgaggagctcgaggagacgatcaagtcatcctcgagagacctcgcccggggggcagtggagctcgtactggcaagctaccaggccagggaccccgacttctccccgtgggcagcgctggacgagttccctcccgggaccgaggacggcgcgcgcgcgtaggtccgggacgccgccgaccacatcgtccacagcttcgagggtacagcccctcggctcgcgttcgccctcgactccgacgaggagggcggtgacggtggtgcggacgacagcgacgacgaggcctgcggcccgggcacgtcgaag

SEQ ID NO: 83127 - DNA, 123 bp, Oryza sativa
  Clone ID: PAT_MRT4530_8248C.1
atggagggatcggcgatttctctagaatactcgattattttgccacaccttttcttcgggagagggcagggccgtgaggctgtggaagggcgaaggcgaggcttgattcttgaccctgaaatc

SEQ ID NO: 83128 - DNA, 357 bp, Oryza sativa
  Clone ID: PAT_MRT4530_82490C.1
atgtcgcgacggtgcctccggcgccacctcaggcccccctgctcctatggccgccggtcgccagctctaccaaccagttctggcgacgcccgccacagcccccgcggccccactgccaactctcttgcgcccccgccgcttgccacctcatcctccccttcctccaccttcgccagctctagatctgtcctcgccatcgccgctgctccacaccgccgcctatcttcccccttccccacctccacctctagctgccgccgtcatgcaagggtggctagaccagaaggggatgccaagtccggcaccgtcgccacccccgcgcccaatcgcctccgcgcccagccgttccgcacctag

SEQ ID NO: 83129 - DNA, 5914 bp, Oryza sativa
  Clone ID: PAT_MRT4530_82491C.1
agcataaaatcgacgaaggtgttcaatattccaagaattgttgatgagagtactgtcttcgcgcttgagtcgataagaacctggccgagtgacttcagcaattatgaacggttcttcccataagagagataatttatgccgatcccgtgttgtttgaattttcctcagaaccaggtcgccgactaaaaaggctcgcgatcgaacattccgattatgataacggcgcaatccttgcaaatatcgagtcgactgaattaaaactgcttctcgggcttcttctagtcggttgatgtcgtctactcggccctcttcatagccctcctcgttgaagttccgaaatcgtagtgattcaaattccacttcactcggcaacattgcttctgcgccataaaccaaaaagaacggcgactggtcggtagcccactaggagtagtgcgtaaagaccaaagtacggacggcagctgatctacccacttgctagcatagggacgtagtcggtcaaaaactcgtgctttgatcccttgcagtatcatgccgttagcgcgctcgacttgtccgttactcatagggtgtgccacggaggcgtaacaaattttaatgccgaagtcttcacaaaagtctttaaatgctccgccagtgaattgagtgccattgtcagtgatgatcctattaggtaccccaaaccgatgcacaatgttgatgaagaaatctctagctttatctgctgtgatcgtgatgaccggtttagcctcaatccacttggagaatttgtcgatagccacaaagagatgcgtgtaaccgccgactgcccttttaaacgggccgaccatgtcaatcccccagaccgcaaatggccaggacaacgggatggtttgcaactcttgggctggcaaatgaatttgtctggcaaaaaattgacaaccttcgcatgtccgcacaatcttgtcagcgtcggacaccgctgtaggccagaaaaaaccttgccggtaagctttgccgacaatggtccgtgcagcggcatggttaccacaaataccaaaatgtatatccttcaacaactatatcccttcttccaaagacacacagcgctgcagtattcctgacagacttttcttgtacagctcagtctcatgaataatataaagtctgctgcgcctggaaatccgctcagcttcatttttgtcttgaggtagttcttgtttgctcaaaaattttataaacggttctctccagtcggcttcgatcatgcttatgccttgaatatccatggcttcgactgtctcttttctgggcacggtcggttcgtaaaggtgttcgacaaacacatctgaaggagctgcttcccgttttgaaccaaaattagccagtctgtcggctgcctcattgttatgtcgaaggacatgggtgagctcgagtccatcgaatttattttccaacttgcgtacctcttgtcgataagcggtcatattatcatcaagacatgaccactctttcatgacttgattgacaaccatctgagagtctccacagacgattagtcggcgaatacctagagatattgcaatcctttgtccatgaagtagcgccttgtattccgccacgttatgggacgcagaaaaatgtatccacaatacgtagctcaatctttctccagtcggggagattaaaacaaccccagctccagtgcctgtaagcctcttcgacccatcaaaatacatagtccaatattccatcttttcctctggcatgtcttcttggcactcggtccactcggcaaggaaatcagctaaagcttgtgacttgatcgaagttcgtggcttgaacgatatgtccaaagacatcaattctaaggcccatttcgcgatccgtccgtttgcttcgcggttatgaagtatatccccgagtggaaacgatgtgactaccgtgactgggtgactttgaaagtagtgagataatttcctaacggtaattaagacaccatatagtaacttttgaacctgaggatatcttgtcttggagtcggctaaaacctcgctaacgaaataaattggacgttagactttttgaacatggccttcctcttcacgctcgacaaccaggaccgcactcacaacctgggaggtcgccaacacatataacagtagcggctcttgcggatgtggcgaggccaaaactggtggagtggtgagaagtttcttgaagtcttcaaaggctttctgtgcttcgggtccccactggaaattgtcagtcttctttagcagcttaaagaaaggcatcccccgcttgccgagtcgtgagacgaaccggctgagcgccgccatgcaaccagtcaacttttggacgtctttttgggagcttggcggtttcatgttgagaatggcgttgattttctccgggttggcctgtatgcctctttgagataccataaatccgagcaatttccctgacggtactccgaagatgcacttttccgggtttagtttcatcttgaaagcacgaatgcttgtaaaagtttcttctaaatccacaatcaggtcatccttctgcttggtcttgacgactacatcatcaacataagcttcaacattgcgaccgatctgagttgaaaaacatctttgaatcatgcgttgataggtcgctcctgcattcttcaatccaaagggcatggtgatgtagcagtaggccccaaagggcgtaataaacgaggtcttcaagcagtcggattcttttagtcggatctggtcaatgtgaggtaacccaaaagggtctttgggacaagatttgttgaggtcggtataatcgacacacatgcgccattaccccgtctttttccgaaccaggactgggttagccagccagtcgagatgaaggacttccttaatgaagcctgctactaacagcttggttaattcctccttgatcgcatccttcctgtcctgtgcaaaacggcggagtcattgcttgatgggtttggcgtcttcgttaacaagtaaagagtgctcaatcacctctctggggataccaggcatatcggatggtttccacgcaaaaatatctttattattctgaagaaaggtgatgagcacgctttccgtggtcgcagccagtcggatctcttcgcgggcgagagtagtctcgtgagtttgggccatctcgcaactttctttgtcacatgtgacggcttgcttgatgtcgctccgttgtgatatgacccctcgaggaccaggcatcttcatcattatgtaggtgtagtatgggacggccatgaatttggctagagccggtcgtccaagtatagcatgatatgctgtctcgaaatcagcaacttcgaaacaaacattttctgtgcgaaaattctcccgagtgccgaaggtaactggaagagtgatctggcgagtggtatagctgacaatcctgggataacaccgtggaagggtgcattactcggctttaattccgtgcgaggaatctgcatatcgtccagggtcttagcgaaaaggatgttgagtgcgctgccaccgtcgatgagagtccgtcggagcttgacattgcgaaccactgggtctagtaccagggggtaccgccccgggtggaccactcggtcgggatgatccgagcggttgaacttaattgttatctctgaccaccgaagatattggggcgtgctaggctgaaccgcattgatctcccgctctgttagcttttgttttctcttagattcataagccaggggtccgccgaagatgtgattaagttctttgcgatgatcttgaaaaccggtcggggcatcgtcttcatcatctttcttctttgatgtgccttgatctccgtctgagggtttacgtgcgttcttaacgtattgctccgcgaactgtttgtagacgaagcaatctttggccacgtggttggagttgggatgatgcgggcattgggagttcattatcttgtcgaaggtgttgacacgagaacgttgtcgggaagatggagaggtggtcgccacaagttcttcgagcttacgcttgcgatccttgtggtttttacttccactccctcctgcggtcggcgtatccttctttggcttccaagtggtgcccgactgcttggatgtcgtgatagcatcttcggctttggcatactcattggctttttcaaacatctgtttgaccgtcttgggaggtttgcgtccgaacttgtcgactaggtcctcgtggcgaatgcctttagtaaaggcggcaatgatgacgtcgtcggtgatgtcggagatcttgttgcgttgctcagagaagcgtcgaatgtaatctcgaagagattctccagacttctgaacgatgttgtagagatcgaagtgtgtgccgggccgttcaaaagtaccttggaagttggcgatgaagtggtcgcgtagctctgcccatgatccgatcgtgtcgcggggtagcccgtgaagccatgaccaggcagaatccgctagggccacaggtagatagttcgtcatggctttgctgtcccctcctgctgcgcggattgcgagaccatagacggtgagccaagactcagggttagtggtgccgtcatattttttgattccagtcggcttaaagccggctggccaatccactcgacgtagatcgcttgtgaaggcagcaactccgtccacgttgtcgtcgtagcgatccggtgaatgatggcctcttgctgtgcggcgctggttgatggtgtcgcgaagatcgatgggacgtcttcgatgtggggagtgtggtcgttcaattcggcgctccctatatcgctcgggaggcgagcgaacggaccgttcatcatgtcccctgctcctgcgactagattcggcgccggcaatgctgaggcttggctggtgatagtcttgagatcgaagatgagggactcggctaccagtcggggtgcgggtgcttgcagagttggctgggaccgaggcagcgatcatggtcttcgtctggttcaagatgttgactacatgatcagcttggttgagtgcgtcttccttgaggagggtgtcgaggagagtgattgctgcaaccgcgttctgttggggggtgcgaaagaccgctatcccatcgacgtcttgttgcccaatgagctctctcgcttgccacccagattccaaggcgcgttgtcgtcgatcttcagcctcctttgcaatccgttcgcgatcttgttgctcacgctgtagtcgttctcgctcttgtcgctgtcgctcttcctccaatcggcgacgttcagcttcttgccgtgcgcgatcttggtccgcttctcgggcttggcgctgttcctccgtttcgttgtcagccatgaatacgccgaagaagaggggcgtgtagttatccttatagctgtcgtcgaagttgtcgaggtcgccgtggtcgtagtggtagccgaaatcgtcgtagtcgaggatctcggttggtcgagaactgacgccgggggagctgaggtagccatccaactcttccgtcgagactgtcccgagaggttggagtataacgccaacctccctggatctagatcggatcggggccgaagccggagctcgcctagatcttcgagtgggagatgtcttgactgtgaagacagcggccaaatcatcaggaagtttcatcaggattgagggataggacccgtcgtcttgatctggtcgcggaagagtagattggatctcatccgagtggtttgaagccgactcgggagagatgatcttggagtaggcctcggccgagttcggaataccgaacggcacagggacctggtctctccccgactggtttgaatccgagtcaaggagagagatcttgccgaagtcgttggtgatgaagttgaggctgccgaaccggaacgcctgcccgggaggaaaggcgaagtcgtcgatgccagaaacgaaacccat

SEQ ID NO: 83130 - DNA, 3153 bp, Oryza sativa
  Clone ID: PAT_MRT4530_82492C.1
atggcacggggctctgctctgctcgacggcagtgtactgccgccttcccgcatcgtgaatgagaggcacgccggactgccgcgccgcttcatgccggagtccgccaccggtcgggagattgtgatgctgggcgaggggcgcccggcaccagactacccggggcggtccatcttcttcctccccttcgcgatggctgggctggtcccgccattttctcattttttcatggatgttctggagttctacgatctccagatggcgcacctcacccccaatgcggtgatgacattggccatcttcgcgcacctgtgcgagatgttcattggggtgcgcccctctcttcagctgttccggtggttcttcaccgtgcagtcggtgtcaccgccgtcggtggttggcggctgctacttccagccgcgggggccggtgctgaaccgctatatcccctgcgtcctccgcaagaagtgggacgactggaagagcgactggttctacacccccctcgccgacgaagcgcgcctccgccttccaagccagcccccggcgcaggtctccagctggcgggcgccggtagatctgggggaggagtacgacgccgtcctcgaccgcctggcgggcctgcgatcccaggggctcaccggggccatggtgtacggcgattacctccgtcgccggattgcgccgctccaacggcgcgcccggagcgcctgggagtacactgggcctgaagactacatgcggacccaccagggagccagatgggattgggctcctgaggacttcaagatcgtagtccaaagggtgctgaatcttagctccgcggaggcgtctcgccttcctcaggagatcctccccctctgcatcgatcccgaccgcgtctccattctaaccattatgctgggggtcggggcctcagaggagagagcccctaagggccacgacggcgcgggcgagagccgccgggggaaaaaatctgccccaggagggggtcgtgcttctgggccccgcgtcgggggctcggggagcagccgccctgccgacgccccggggaagaggaagctgggaggaacacctcccccatctcctccccgagggggcggggcggtgcgtaccagcggtcggcgcccggagggggctgcgccgacgtcacagcccgagggggagcgcaagaagaagcggctccgcaagatgggggagacggaaccagcccggggaaacctaatttcccccccaaggtggtcattcaaccgaccccctcgcagcgatgtcccgtcgcattcctcccgccgccccaagtccggccagtccgaggccgaagatccagcggccgcagaggagcggaggcgggagtctgaccggcgtgaagccgcagcccgccttcgggaagctgaagaggccgcccgggaggccgcccgggttcgccaagcggaggaggctgctcgggaggaggccgcccgggctcgccaagccgaagaagctgcccaggaggaggccgcccgggctcgccaggctgaggcggcagctgctgctggcgcgtcactcgggcccactccctcgggcggccctcaggcgacatcctccgaggcggctcgcgacgaggccgcgggcgcgtcgcctgggcctacctcaccgggcgacgcccaggaccaaacgggcccgggggacatccccgagctcagcgtatcctccggggggccaagccgcgtcgctttttctccaaggcggcttttctcctcctcttccgtcgccccagtgagcgccgagcccattatgcaggccttggccgccgcaaacaccgcggtgctagacggatttagcgcccaggtggaggccttgcgagcggaacgagcggagctcgaggccgcatgggcgcgcgtcgaggaggggcggcgctcggtggacgccatggtggaggtgggccgtaaggctcaccgccgccacatctcggagctcgaagcccgcaaggcggcgctggcggagatcgcccgagaggtggaggaggagcgagaggccgccctcgtcgccaccaccgcgatggtcgaggcgcaagacaccctccgtcttcagcacgcaagctgggaggcggagctgaagagcaagctcgacgccgcccaaggggttctcgactccgctgccgcccgagagcggcgggcaacggaagccgaagcggcgtcccggcggcgcgaggaggcccttgaggcccgtgccatggcgctggaagaacatgccggcgccgtggagaggggcttgatggaccgcgaggccgccactgctctccgggaggcgacgctggcggcgcacgaggccgcctgcgccgaggaggagtccgcgctccgccttcgcgaggatgcactcgccgagcgggagcgggctctcgaggaggccgaggccacgacgcgacggctggcggacagcctctccctccgcgaggcggcgcaagaggagcaggcgcgccgcaaccttgaaagcgtccgcgccgagagagccgcgctggagcagcgggctgccaacctcgaggcacgggagaaagagctggccgcgggggcgcgcatcggtggggcggctgcgggcgaaagcgacttagccgctcgcctcgcggctgccgaacacaccgtcgctgacatgcagcgcgcgctggactcctccaccggggaggccgaggcccttcgcttggcgggcgagattgggcccggcatgctttgggacgcggtctcccgcatgaagcgcgccggtcggcaagcaggcctctggggaggccagacgacggtgccccccaccaatctggaaggcctcgctccgcacctcaacaggatggcttgggttctcgagcgactccccgaggagctcgagaagaccattaaggcatcctcgagggacctcgcccggggggcggtcgaactcgtgctggcgagttaccaggcccgggatcccaacttctccccatggatggcgctggaggagttccctcccgggaccgaggacgaggcgcgcgcgcgggtcggggatgctgctgaccacatcgtcaacggcttcgagggctcggcccctcggctcgcgttcgcccccagctccgacgaggaaggcgacaccagcagcgaggacggcggtggcgacgaggccggcgaccctttgccagtccggccgggggcttag

SEQ ID NO: 83131 - DNA, 639 bp, Oryza sativa
  Clone ID: PAT_MRT4530_82493C.1
cgtaacgcttatgaggaatataaggtcttccaggatgatgtctctcggatttctctcaacaccatgacagacaaatggacttttctctggggaaatgatctatactcttcacagaagttttataagctctccttttggtgtattcaacctccagtgactatgccttggatttggtcctgtaaagtttatatgaagatcaaggtttttgcatggttgctattcttggacagagttaacaccagggctttgctagaaaaaaagcgctgcaagcctcccaatgtaccaatctattgtgctttgtgcaccacagggattagagaaacaagggatcatctgttattccaatgtccatttgcctgcttgggttggaactccattggtttttcctgggatactacgcaggaatttcattagatgatacagactcggaggaatagtgggctgcaacatatgtgttttatgaagatctttcttgtggcttgttggctgctttggaagcagagaaatgatttgatttttcaaaatatccagccttccctcaaccgatggaaatctagtcttagagaggagctaagtctacatttacctagacttagattagtttctagaccttttctgaaatcatggcttgacaacctg

SEQ ID NO: 83132 - DNA, 3144 bp, Oryza sativa
  Clone ID: PAT_MRT4530_82494C.1
atggcacggggctctgctctgctcgacggcagtgtactgccgccttcccgcatcgtgaacgagaggcacgccggactgccgcgccgcttcatgccggagtccgccaccggtcgggagatagtgatgctgggcgaggggcgcccggcaccagactacccggggcggtccatcttcttcctccccttcgcaatggctgggctggtcccgccattttctcatttcttcatggatgtcctggagttctacgatctccagatggcgcatctcacccccaatgcggtgatgacattggccatcttcgcacacctgtgcgagatgttcattggggtgcgcccctctcttcagttgttccggtggttcttcaccgtgcagtcggtgtcgccgccgtcggtagttggcggctgctacttccagccgcgggggccggtgctgaaccgctacatcccctgcgtcctccgcaagaagtgggacgactggaagagcgactggttctacacccccctcgccaacgaagcgcgcctccgtcttccaagccagcccccggcgcaggtctccagctggcgggcgccggtagatctgggggaggagtacgacgccgtcctcgaccgcctggcgggcctgcgatcccaagggctcaccggggccatggtgtacggcgattacctccatcgccggattgcgccgctccaacggcgcgcccggagcgcctgggagtatactgggcctgaagactatatgcggacccaccagggagccagatgggattgggctcctgaggacttcaagatcgtagtccaaagggtgctgaatcttagctccgcggaggcgtctcgccttcctcaggagatcctccccctctgcagcgatcccgaccgcgtctccattctaaccattatgatgggggtcggggcctcagaggagagagcccctaagggccacgacggcgcgggcgtgcgccgccggggggaacaacctgccccaggagggggtcgtgcttctgggccccgcgtcgggggctcggggagcagccgccctgccgacgcccaggggaagaggaagctgggaggtacacctcccccatctcctccccgagggggcggggcggcgcgtgccagcagtcggcgcccggagggggccgcgccgacgtcgcagcccgagggggtgcgcaagaagaagcggctccgtaagacgggggagacggaaccatgccggggaaacctgatttcccctccaaagtggtcattcaaccgaccccctcgcagcgatgtcccgtcgcattcctcccgccaccccaaatccggccagtccgaggccgaagatccggcggccgcagaggagcggaggcgagagtctgaccggcgtgaagccgcagcccgccttcgggaagctgaagatgccgcccgggaggccgcccgggttcgccaagcggaggaagctgctcgggaggaggccgcccgggctcgccaagccgaagaagctgcccgggaggaggccgcccgggctcgccaggctgaggcgacagctgctgctggcgcgtcacttgggcccactccctcgggcggtcctcaggtgacatcctccgaggcggctcgcgacgaggccgcgggcgcatcgcctgggcctacctcaccgggcgacgcccaggatcaaacgggcccgggggacatccccgagcccagcgcatcctccggggggccaagccgcgtcgccttttctccaaggcgacttttctcctcgtcttccgttgccccggtgagcgccgagcccattatgcaggccttggccgccgcaaacaccgcggtgctagatggatttagcgcccaggtggaggccttgcgagcggaacgagcggagctcgaggccgcatgggcgcgcgtcgaggaggggcggcgctcggtggacgccatggtggaggtgggccgtaaggcccaccgccgccacatctcggagctcgaagcccgcaaggcggcgctggcggagatcgcccgagaggtggaggaggagcgagaggccgccctcgtcgccaccaccgcgatgatcgaggcgcaggactccctccgccttcaacacgggagctgggaggcggagctgaagaacaagctcgacgccgcccagggggtcctcgacgccgccgccgcccgagagcagcgagcaacagaggctgaagcggcgttgcggcggcgcgaagaggcccttgaggcccgtgccatggcgctggaagaacacgccggcgccgtggagaggggcttgacaggccgcgaggccgccgctggtctccgagaggcgacgctggtggcgcatgaggccgcctgcgccgaggaggagtccgcgctccgccttcgcgaggatgcactcgctgagcgggagcgagctctcgaggaggccgaggccacgacgcaacggctggcgaacagcctctccctccgcgaggcggcgcaagaggagcaggcgcgccgcaaccttgaatgtgtccgtgccgagagagccgcgctggagcagcgggctgccaacctcgaggcacgggagaaagagctggccgcgagggcgcctatcggcggggcggccgcaggcgaaagcgacctggccgcccgcctcgcggctgccgaacacaccgtcgcggaaatgcagcgagcgctggactcctccaccggggaggccgaggcccttcgcttggcgggcgagattgggcccgacatgctttgggatgcggtctcccgcatgaagcgcgccggtcggcaagcgggcctctggggaggccagtcgtcggtgccccccaccaatctggaaggcctcgctccgcacctcaacaggatggcttgggttctcgagcaactccccgaggagcttgagaagaccatcaagtcatcctcaagggacctcgcgcggggagcggtcgaactcgtgctggcgagttaccaggcccgggaccccaacttctctccatggatggcgctggaggagttccctcccgggaccgaggacgacgcgcgcgcgcgcgtccgggatgccgccgaccacatcgtcaacggcttcgagggctcagcccctcggctcgcgttcgcccccagctccgacgaggagggcgatgccagcggtgaggacgacgatggcgacgaggccggcgacccgggcgcgtcagaatga

SEQ ID NO: 83133 - DNA, 3048 bp, Oryza sativa
  Clone ID: PAT_MRT4530_82495C.1
atggcacggggctccgctccgcttgacggtagcgtgctgccgccttcccgcatcgtgagcgagagacaggccgggctgccgcgccgcttcatgccggaatctgccaccggccgggagatagtctcgctgggcgagggatgcccggcgccacgctacccggggcggtctgtcttcttcctcccttttgctatggcagggctggttccgccattttcttctttcttcatggatgttctggaattttacgatctccagatggcgcacctcacccccaacgcggtaatgacattggccatcttcgcgcacctgtgcgagatgttcatcggggtgcgcccatcccttcggctgttccggtggttcttcaccgtacagccggtgtcgccgccgtcggtggttggtggttgctacttccagccgcgggggccggtgctgaaccgctacattccctgcgtcctccgcaagaagtgggatgactggaagagcgactggttctacacccccctcgccgacgaagcgcgcctccgacttccgagccagcctccagcgcaggcctccaactggcgggcgccggtagatctgggagatggctacgacgccgtcctcgaccgcctggcgggcctgcgatcccaggggctcacaggggccatggtgttcggcgactatcttcgtcgccggatcgcgccactccagcggcgcgcccggggcgcctgggagtacaccgggtccgaggactgtatgaggacccaccagggggtcagatgggactgggctcctgaggacttcaagatagtggtccaacgggtgctgaatctcagctccatggaggcatccctcattcctcaaggagtcctccccctctgcagcgatccagaccgcgcctccatcctgaccatcatgcaggcggtcggggcgtcggaggagcgggctcctcgaggccacgatggcgcgggcgggagccgcaggggggaacaatctaccccgggagggggtcgtgcttatgggccccgcgacgggggcccggggagcggccgccctgccgacgcccgggggaagaggaagcaggaaggaacccctcccccatctcctccccgagggggcggggcggcgcgtgccagcagcaggcgcccggagggggccacgccgacgtcgcagcccgagggggagcggaagaagaaacggctccgcaagatgggggggacagaaccatcccggggaaaccttatttcccctccaaggtggtcgtttaaccgaccccctcgcagcgagatcccgtcgcgtccctcccgccattccaagtccggccagtctgaggccgaggacccggcgaccacagaggctcggaggcgggaatctgaccggcgagaagccgcggatcgcctacgggaagccgaggaggccgcccaggtggccgtccgagctcgccaagctgaagaagccgctcgggaggaggccagacttcgccaggccgaggcggcgacgacttccgaggcagctcgcgacgaggccgcgggcgcatcgcttgggcccactccctcgggcgacgctcaggacaagccaggtccgggggacatccctgagtccggcacgtccatcggcgggccgagccgcgcggcatcctcaccgaggcggctcttccccacgccttccgttgctccactgagcgcagaaccccttctgcaggccttggccgtcgcaaacaccacggtgttggacgggttaagtgcccaggtggaggccctgcaagcagagcgggcggagcttgacgccgcatgggcgcgtgtcgaagaggggcgacgctcggtggaggccatggtggaggtgggccgcaaggcacaccgccggcacgtctcagagctcgaagcccgtcggaaggtgctgggggagatcgccaaggaggtggaggaggagcggggggctgccctcatcgccaccaccgtgatgaacgaggcgcaggacaccctccgccttcaatacgggagctgggaggcggagctagggaaaaagctcgacgccgcccggggggtccttgacgctgccgctgcccgagaacggcgggcggcggagaccgaggtggcatcccggcggcgcgaagaagcccttgaggcccgtgccatggcgctggaagagcgtgcctgcgccgtggagagggacctggcggatcgcgaggccgccgttgctattcgggaggtcacactggcggtgcacgaagccgcctgtgccgaagaagagtccgcgctccgcctccgcgaggacgcgctcaccgagcgggagcgagctctcgaggaggccgaggccgcggcgcaacggctggcggacagcctgtccctccgcgaggctgcgcaagaggaacaagcgcgtcgcaatctggaaagtgcccgcgccgagagggccgcactgaaccagcgggccgctgaactcgaggcgcaggcaagggagctggatgcaagggcgcgtagcggcggggcggccacgggcgacagcgacttagccgcccgcctcgcagctgccgaacacaccatcgcggatctgcagggcgcgctggattcgtccaccggggaggtcgaggcccttcgcctggcaggcgagatagggcccagcatgcttcgcgacgccgtgtcccgtttagaccgcgccgggcggcaggcgggtctctggggcgggcggactgtgaagtacgccgccaaccaggggggcctcgcccagcgcctctcggagatggccaggactctccagcggctccccgaggagctcgaggggacgattaagtcatcctcgagggacctcgcccgaggagcggtggagctcgtactggcgagttaccaggccagggaccccgacttctccccatggacggcgctggacgagttccctcccgggaccgaggacggcgcgcgcgcgcaggtccgggatgccgccgaccatatcgtccacagcttcgagggttcggcccctcggctcgcgttcgccctcagctccgacgaggagggcgatgacggcggtgtgggcgacagtggcgacgaggctggcgacccgggtgcatcggagtga

SEQ ID NO: 83134 - DNA, 254 bp, Oryza sativa
  Clone ID: PAT_MRT4530_82496C.1
gtccctgttaaccaggaaacacaaaggatctatttgcattttggaattccactgcagcacacttgtgataagactgaattcaactcaaatacctatcaaatataaaacaaataatgacatacattttaacgaagaaaattaacatagctgccaaatcaacatggtaaaatcctaggaaacattgacataagaagacaatttatttagtgattcaatttataagaagttaattgtctttaaaatgtaaataatag

SEQ ID NO: 83135 - DNA, 587 bp, Oryza sativa
  Clone ID: PAT_MRT4530_82497C.1
atggtggaggagccgtcggccaccctgcgcgccatcggcggccccgcgaagatccgcgatggcgacatcctcgcgcccggggtgggggacggggaggggtcgtcggcaccgccatccagctgtgacatggcatggatcgccatcgacgtcgccaccgttggagagaggggaagggggaagaaacgttggggagatgaggaccatgccgacatggcccgacacgatacgcattggcctggcaggcccatgccgccgcctgtcagggcgaatgggctcatgcggagcgtgtgctcctgccgcagcctcggcgttgggcaccgtagcccaatctcacttgcacgaggttcgaaagtgacacgcgggctgccggcggatgggggaggtgggagtccggcggcggtgacgacccggcggcgacgaagaggcgatgacaaggcggcggtggagacgggcgacgaggcggcggcgatgacgatgcgggagcaggagggcctccccccacgccgctgccaacggcgcgggaccggcacacgacgtcctcaatccgtctcgccgccatggaccgccgcctgtggcggcgggatctg

SEQ ID NO: 83136 - DNA, 637 bp, Oryza sativa
  Clone ID: PAT_MRT4530_82498C.1
tttatctaaaatgtgtgtcaccccattgaaatcgattttgcgtaattattgaggcagatttttatacttatttaacacaataaacaatattttgagaaataaacttcacaatagtttagaccaggtgaatatgacagcagaagttttttttaaaaaataatctaagaagcatagagcgaataatccgtaccaaaaatcttagacaaaagctgacaataatttctcttggaattaatgacgaaatgcaggttgttttggaaaaagattgaggttaccatcgacttcgaagtatggatgaaaacagagcggatacggatggataatgttcataccatattcgttttcatattttttaccggatacgaaaacgaatacggatagctcgaatacggaaacaaatacggattatctcgaatatgaataagaatcgaatatgatcggacacgaatacggaaacaaatttttcggataaccgaattattatccgtatccgacggaacccccgataccatattcgtattcgtatccaggagaaaatatccgtattcgtatccgtatccaaactatccgatccgaaaggtatccgtatccatttttgtccggagcggacggaaactatccgctccgttttcatccc

SEQ ID NO: 83137 - DNA, 1685 bp, Oryza sativa
  Clone ID: PAT_MRT4530_82499C.1
atggaagttgccgccggcgcccgcggcggcggggccggcggaggagggggaggccccgcgccgttcctgctcaagacgtacgagatggtggacgacccgtcgacggacgcggtggtgtcgtggagcgacgcctccgacgcgagcttcgtcgtctggaaccacccggagttcgccgcccgcctgctgcccgcctacttcaagcacagcaacttctccagtttcatccgccagctcaacacctacatatctttattggaaaatgattcttcaacaatgttttgtctaactactaagaagttggtattgcaaggattccgtaaaatagatccagagcgatgggaatttgccaatgagtacttcatcaagggacaaaagcacctgctgaagaatatccacaggcgtaagcctatccacagccacagccatccaccaggtgctctgcccgataatgagcgtgcaatatttgaggatgagatcgaacggctttcacgagagaaatccaacctccaggctgacctctggaaatccaagcagcagcagtcgggaacgatgaaccagattgaagatcttgagcgacgagtgcttggcatggagcagcgacagaccaagatgattgccttcttgcagcaagctagtaagaaccctcagtttgtcaacaagcttgttaagatggcagaagcatcttcgattttcacggatgctttcaataagaagagaaggttacctggtttggattacagtatcgagaacacagaaaccacaagcttttatgatgaccatagcagcacttctaagcaagaaacaggcaatcttttaaatcagcacttctctgataagcttaggttgggactttgtcctgccatgacagagagcaatatcatcacgctaagcacgcaaagctcaaacgaagataacagaagccctcatggtaaacatccagagtgtgacatgatggggagggaatgtctcccgttggtgccgcagatgatggaactctccgataccggcacatctatctgcccctccaagagctcttgctttgcaccacctataagtgatgaaggcctcttaacatgccatctgagtctaactcttgcatcatgctcgatggatgttgacaaaagccaaggcctcaatgcaaatgggaccactatagacaacccaactgaggcagcaacagctaccatggaaaaggatgacaccattgacagaagcttcgatgacaaccaaaagaaatcagctgattctcgtacagcagatgccacaacaccacgagcggatgcacgagtagccagtgaggctcctgcagccccggctgcagtggtgaatgacaagttctgggagcagttcctaacagagcgacctggctgctctgaaactgaagaagcaagctctggcctaagaacagatacttccagggagcaaatggagaacaggcaggcatatgatcactcacggaatgacagagaagacgtggaacaactgaaactctgaatttactatagaattatacaatttacaagaagggatacaggcgtacagtgtaagatgtttagaatcaggaacctgctgttaaacatgacagatcaatgggtgtacaacatcacacaggtgtacatattttttttccctgaatgtttcggagggttaagattaatagttcgattaaccacaccagttgttgt

SEQ ID NO: 83138 - DNA, 810 bp, Oryza sativa
  Clone ID: PAT_MRT4530_8249C.1
atggcgaaccccgtcgtcccgtgcccttccgccgccgcctacggccccggcggctgcgatggcgtaggctgctcctccagccacaacgtctgggctcaccgtgtccgccacaacggcggcgtctaccgcctctgctcctcctgcgttctcctcggccaccgcgacgccttctgctccgtttgccttgacgtcttcccgggggacgcgcccttccaagatgatttctataaccccatcgtctcatgctcctgctgcggcgtcgagcccgtcgccgccgcccacctcgcctgcctcacggacccttcctacttcgtgtgcccagcgtgcgccgccgccgccgagggcaggaccttcacttacgccccctcgagcggtgccccgcacgcgctggcggagcgcgtgctcctcgtcgcggcgcggctcgcgcacgagtccgtcgcccgtgccgcggcggcggcgcgcgagcaggcggagcgcctgatccgggaggcggccgccgccaggaagcgcgcgcgcgacatggtagacgtggcctgccgcgtcctggaggcggaagccagggacgccaaagagcaggccgcggcgcccccctcacccgtgctgaccaagaagacgaccccgaagaacagcgcagcaaacaggagcagcgacaagcctctcaagatcaattcaatacagaagccggcgctggcgttcgccgcagcggcagccgcggccgccgccgcggccagctcaacgccattgtcgacgccgtcgcccgcgggggaaaggaagccaatgaaacagggaagagtactaattgccgtgtaa

SEQ ID NO: 83139 - DNA, 1947 bp, Oryza sativa
  Clone ID: PAT_MRT4530_824C.1
atgccgccggtgtcgtcgtcgacgtcgaggccggcgtcgctgccgtcgtcgccgcacaggccggcgctccggccgggcagcctgcagcggctgctccggccgccggacccctccgacgacgacggcgccgcccccacggcgccccgctcctcccgcggcggcggccgcgtcctgctccaggtcaccaacatcacccccgcgctctccggcgccaaccctttctccggccaccacggcttctacctccgcctctccgactccgcgcgctcctgctacgtctccctccacgccgaccacgacgacctcatcctcaccaacggcctccacatcggccaggtcatcgaggtcgagcacctggtgccgtccgtcccggcgcccgtgctccgccatttccgcgtcctccccggccgctacccctgcatccagcaggaacccgccgacgacgccgccgccggcggcgccgcggcggagatcaaggaggtcgtgtccgagcgcccgcgccgctcgtcgccgacgccccccatcccgggcgagaggagggcgcggcaggcgggcggcggcggctccccctcttcgatcagctaccgccacaggtcacggtcgatatcgaacttgtcggaggcgggcgcggcggcgaggaggagcggcgccgccgtcctggggaagctgaggaaggtcagcgtcacgtccatcgacggcaccagcaccgacgacgacgacgaggagtccgacgtgtcgtcgctgtcctcggcgaggaggaactgggatttcaccggaggcgtcaaggacaggaggcccgtcgctccacggagacgcgggaacagcgtttctccaagtaaatccggcccaaactctactatcacgcagaatgatgatccgatggagtcggtgaggaggaaagccgagaaggcattcaacgtgctctccaagagggcgtctgctaagatgaccagagaaagctctaattgcacggtggcgacgccgcagagcgctgcggcgtcgagcagcatcaagtggtgtgagagcaatgtgatgtggagcacactttcatcaagcttgctgaagcatggaaaggaagcagtgaagcagagagatatggcactgcaggctgtgcttgatggattgctagaggcatctaccactgagaaattgataaaatgcctgagtacttactctgaactacaatctgacaaggaagaaaacccaaaggagctcatcgacaggttcttgaaattctctcaggaactggatcatgctatcttcatcgcccaatcacagaccaaaattaggcatgtaaaagcatgtggttccaattcaacatcctcagcttcaaccaaagctgctttgaaggctgcattggataggaagcagtctgccatcttatggatcagagaagccattgaagcagacctctcacctttttctagccatacaagacccactgaatcaccaaagctatcactggcagagtcaaagcctatgaccccattgttctgttgttccaagccaaagtgcaactgcagcaaaaggtcctcaaggaaagcatctgatggttcctctcaaggaagtaacatgagtgctgccatggacctggctgtagcactgagatcagagtgcaactgttggttcctcaagtacatcgacaagttcttggacgatatcgaaagcgagaccatgtatgcaccatgtgattcccaagttgcaggccttctgcagcagcttaaaagggtggatgactggctcaaccgtgtcgcgctacatgagaggatgctttcggttgaccgaacaaacaaggatatcatgttttctgaagaagaggagagcgatgcgtgcgagagggtacggagaaagatttatggagcccttttaaggcatgttcaatatgctgcaatggcgctagaaggtctaaatggtgtaattgatgaagagaaggacgagagaaaataa

SEQ ID NO: 83140 - DNA, 404 bp, Oryza sativa
  Clone ID: PAT_MRT4530_82500C.1
agggtgggtgggtgggaagggggttgggggtgaggtgtgaggtagggatgaaaacggagcggatatggacggataatgtttataccatattcgttttcatatttttttaccggatacgaaaacgaatacggatagctcgaatacgaaaacaaatacggattatctcgaatacgaataagaatcgaatatgatcggacacgaatacggaaataaatttttcggatatccgaattattatccgtatccgacggaaaccctggtaccatattcgtatttgtatccgggagaaaatatccgtattcgtatctgtatccgaactatccgagaattatccgatccgaaagttatccgtatccgtttttgtccggagcggacggaaactatccgctccgttttcatcccta

SEQ ID NO: 83141 - DNA, 354 bp, Oryza sativa
  Clone ID: PAT_MRT4530_82501C.1
aacaccacaaactagggatgaaaacggagcggataatttccgtccgctctggataaaaatgaatacggatacctttcggatcggataattctcggatagttcggatacggatacgaatacggatattttctctcggatacgaatacgaatatggtatcagggtttccgtcggatacggataataattcggatatccgaaaaaattgtttccgtattcgtgtccggtcatattcgattcttatttgtattcgagatagtccgtatttgtttccgtattcgagctatccgtatttgtttccgtatccgaaaaaaaatatgaaaacgaatatgcatgactccatcgggttaattagc

SEQ ID NO: 83142 - DNA, 379 bp, Oryza sativa
  Clone ID: PAT_MRT4530_82502C.1
ggagcggatacggacggataatgctcataccatattcgttttcatattttttaccggatacgaaaacgaatacggatagctcgaatacggaaacaaatacggattatctcgaatacgaataagaatcgaatatcatcggacacgaatacggaaacaattttttcggatatccgaattattatccgtatctgacggaaaccctgataccatattcgtattcgtatctgggagaaaatattcgtattcgtatccgaaatatccgagaattatccgatccgaaaggtatccgtatccgtttttgtccggagctaacggaaactatccgctccgttttcatccctaactcgagtgaatagtaatatgatttcaagtaggaata

SEQ ID NO: 83143 - DNA, 399 bp, Oryza sativa
  Clone ID: PAT_MRT4530_82503C.1
gatcttgggtcaccccttccacggagcggataatttccatccgctacggataaaaacgaatacggatacctttcggatcggataattctcggatagttcggatacggatattttctcttggatacgaatatgaatatagcatcagggtttccgtcggatacggataataattcagatatccgaaaaatttgtttccgtattcgtgtccgatcatattcgatttttattcgtattcgagatagtccgtatttgtttccgtattcgagttatccgtattcgtttccgtatccggcaaaaaatatgaaaacgaatatgcacgtacggtacacaacgcaacggagcgggacacagatgagagagcgactcgcgcgcacgcggacgacgcggagcacacgggac

SEQ ID NO: 83144 - DNA, 667 bp, Oryza sativa
  unsure (1)..(667): unsure at all n locations
  Clone ID: PAT_MRT4530_82504C.1
gaaacatgaatcacaaaatcacaaatacaacaacaatgaagcaaaatcatcacaaatcaccggggccaacaaaaggaaaaaattgcaaaagaaaaaaaaatctcttaaaacattcatcacaaagaggaaatcggggatggaggagcgcagtcctcaccgccacccgcgaccgtgctcgtcgccgtcgcgtccatcgccgcagcgcccgctccaactgccgcctactcctgcgcccaacaccggaagaggggatggaggaggaggccgtcgccgccgcaatgaggagaggagacnnggggtggagccttgtgggccgacaggagcggctcccccctccgatccacccaccatctccatctccacctcccgcacagagctgctccaactgctcgtcaaggtcgaggccgccgcacctgctacgctgcttgccgacgccactgtccgctgattgcaaaggacatgacgccgccgccgctccggctgcctgttgctcgttggaggacgaggacactgcacctgctgctcgcgnacgccgtcgctttgctggtgctgctccccaaggccgaggacgccatcgctcgcttgctcaatcgtcgcctttggccgcctgcatgcgcagctatttgcatcgccgcgacaggtcctcctcttctttccccgctgcctg

SEQ ID NO: 83145 - DNA, 402 bp, Oryza sativa
  Clone ID: PAT_MRT4530_82505C.1
tttcccttttaatttgtcttgcaaacattttcaatagcatctctggaatatgtttgactcgtacagtagggatgaaaacggagcagatagtttccgtccgctccggacaaaaacggatacggatatctttcggatcggataattctcggatagttcggatacggatacgaatacggatatttcctcccggatacgaatacggatatggtatcggggtttccgtcggatatggataataattcggatatccgaaaaaattgtttccgtatcgtgtctgattatattcgattcttattcgtattcgagataatccgtatttgtttccgtattcgaggtatccgtattcgttttcgtatctggtaaaaaatatgaaaacgaatatgatacgagcattatccgtcc

SEQ ID NO: 83146 - DNA, 686 bp, Oryza sativa
  Clone ID: PAT_MRT4530_82506C.1
ctctttttttttttttttttttttttttttttttttttttttttttttttttttttttttttttttttttttttttttttttttttttttttgggccgaaaacatggaccccaaggggccgggaaaaaacggaaattcacagcaaagggggaagcaaagttacggccaaaaaaacccaaaaggggggaaacccagggaaaacgggacaaaaatgggggaaaaacggaaaaaaaggtttttggagcgaaaatgggggaggggacccgaggctctgaacaggggggacgttaaactaagggtccagccttccaaaaaccaattggggcaaaaaaaccacccttgaaaggaacaacaaatcttgaaaaaccacccggggggggggaaaaaaaaccagcggccaatattggggtggacaaaacaaaaaccaaaaagggcgggattgggaagaaaaaaaaacaaaaatccacgggccccaaaaaaaggggcaaaattgggacaaaggggggccaaaaaaaaaaaccctcgattttttaaaaaaaaccccccaaaaagccaagggaaccacatttttttatcccaaaaaggggaaatgggttccaccagggtaggcaaacaaggggggcaaaaaatttggcaacccatcctagggtaaaaaaaaggcaaggaatggcccccttcttttttaa

SEQ ID NO: 83147 - DNA, 369 bp, Oryza sativa
  Clone ID: PAT_MRT4530_82507C.1
ccaagttagctataatatagactaataatagggatgaaaacggagcggatagtttccgtccgctccggcgaaaaacgaatacggatacctttcagatcggataattctcggatagttctgatacggatattttttgccggatacgtatacgaatatggtatcgggatttccgtcagatacggataataattcggatatccaaaaaaattgtttccgtattcgtgtccggtcatattcgattcttattcgtattcgagataatccgtatttgtttccgtattcgagctatccgtattcgtttctgtatccagtaaaaaatatgaaaacgaatacggtatgagcattatccgtccgtatccgctccgtttt

SEQ ID NO: 83148 - DNA, 2949 bp, Oryza sativa
  Clone ID: PAT_MRT4530_82508C.1
atgagctggcggttgccatggaggtcactggttatgatactaagtgtattgcagcccatgatttacatgtcatgcggctgccttgtggaggaaagggccgccctgatggatattagggcttctctgatacaagcaaactctacgttggtgccccgttcatggggacagactgaggactgctgctcgtgggagcgtgtaagatgtgacagtagcaaacggagagtatatcagctcaacctttccagcatgtcgattgcagatgactttttctcctgggaattaaacatcacagttttttctgcatttcgcgaccttcagttcctagatttatcacagaataaactgatttcaccgagttttgatggattactaggactcaccaagcttcggtttctctactttggtgctttcgaaaatcttacaaacttgcaagaactgaatctgagctcgaataagtttgaaggtagcatcccaaagtcattgttttcacttcctcaccttaaagtattagatctctgtggaaatgacttcatcaagggagggtttcctgttcctccggaaccagttttgctagaagttgttaatctctgcaacaccgccatgaatgggactctcccggcttcagctttcgagaatcttagaaacttgagagcactgaatttgagtaaaatggattggagtttcaataaattccatggaggcctcccagcgtcattattttcacttcctcaccttaaggtcttagatctcagtgggaatttttttgagggtggcattcccattaattcatcttcattcccagtctcacttgaagtgttaaatctcaataacaacaacatgaatggaactcttccaactgaacaagcaatagaaaatcttgggaacctacgagaattgcatttgagcctcaatcgattcgctgggaatattccaaggtcattattctcacttccacatattgaactattggacctatcaggaaatctcttagaagggcctattcctataagttcatcttcaaaccttcctgcgtttatcaagagcctacgattttctcataataatttgagcggcaaattttctttctcttggctgaagaacctcacgaaacttgaggcggtagtcctgtcagataatgctaatttagctgttgatgtaaatattcctggatgggtacctcagttccaactgaaagaactagcgctctctggctgtgaccttgacaagagcattattacagaaccacattttctacgcacacaacatcatctggaggtacttgatttgtccaataataacttgccagggagcatgcacgattggttgttcaccgagggagcaagacattataagctagatcttggaaataactcgttaactggatcattggagtcaacatggtatactcaaaattttctcaaatatatcaacgtatcaatgaaccgtgttgcaggtcaacttccagacaatatcaattcgatatttccaaacttgcttgttcttgatttttcaaataacgaaatttacgggcatataccgatagaattgtgtcagatacgtcagctgcggtatttagacctatcgaataacagcatttctggagaagtaccagcttgcttattcactgaccatgctgtgttggaatccttgaaggtttcaaaaaacaagcttggtggactaatatttggtggaatggataatatgtccgattctttgtcgtatttgtacctagatagcaacaaatacgaggggagcatacctcaaaatctatcagctaagaacttattcgtcatggatttacatgataacaagctgtccgggaaacttgatatttctttttgggatttgcctatgttagtgggcctgaatcttgctgacaatactttaaccggtgaaatacaaccctatttatgcaactggacaagcattagccttttggatctatcaaataacaacttaacagggtctttaccaaattgtagtatggcactgcaggttaatttccttaacctctctaacaactctttgtcaggagatatcccatatgcccttttcaatacatccgagcttatagttatggatatcagacataatcgattcacaggcaacttgaattgggtacagaataatttgggaattgacatactttccttgggtggaaatgattttgaaggggaaatctctccagacatatgtaaccttcaatacttgaggataattgacttctcacacaacaaattatcgggctcggtaccagcatgtattggtaacatcctctttggagatgtgcatgatcatgatatcctgcagatcttttatgtcgaaccgtttatcgagctgtacgattctcacctgatgagtacttactactattacctatcaggcttcgccttctctactaaagggagtctgtatatatacggtgtcaatttgtttgatttgatgaccggcatcgacctatctgcaaacatgtttgatggagagattccttggcagctaggaaatctcagccatatcaagtccctcaatctgtcctacaatttcttcactggccaaatcccagcaacattttctggtatgaaggagattgaaagcctggatctgtctcacaatgatctgagtggaccgataccttggcagttaactcagttatcgtcgctgggagcgttctccgtggcatacaacaacttatcaggatgcataccgaactatggtcagctggcctcgttcagcatggaaagttatgtaggcaacaacaacctctataatacatcacagggaagctggtgctctcctagtggtcatgtgccaaaggaagatgtggaggagagatacgacgatccagtcctctacattgtcagtgctgcctcgttcgtgttggcgttctgtgccaccgttgcattctcattttgccattcatacggccgatctgcaatactcaaaatgtag

SEQ ID NO: 83149 - DNA, 395 bp, Oryza sativa
  Clone ID: PAT_MRT4530_82509C.1
ggttgaaaacggagcagatagtttctgtccgctccggaggaaaacgaaaacggatacctctcggatcggatatttctcggatagttcggatacggatacgaatacggatattttcttccggatgcgaatacaaatatggtatcggggtttccgtcggatacggataataattcggatgtccgaaaaaattgttttcgtattcgtgtccgatcatattcgatacttatttgtattcgagataatccgtatttgtttccgtattcgagctatccgtattcatttccatatccagcaaaaaatatgaaaacgaatatggtatgagcattatccgtccgtatccgctccgttttcatccctaaccacactgggctgcaatgtcaaaaaaggaaaaacca

SEQ ID NO: 83150 - DNA, 453 bp, Oryza sativa
  Clone ID: PAT_MRT4530_8250C.1
ccgcacagatgcgtaaggagaaaataccgcatcaggcgccattcgccattcaggctgcgcaactgttgggaagggcgatcggtgcgggcctcttcgctattacgccagctggcgcctgcttttggattgccaataagggtttcatcggggtttcagccgatgagttatctggacgttgcatcggcttacaaggattacatacatattggatttattggttatattattgttatatcatattatcatcagccgattgcctttatattggtatttacatcaagtgtcagaatatacattggacatatggccgatagctcaaaaccctcttgctatcggttggatcaaactgattggcacgcccgcatctcaccaagatttggacctgcacaggagctaagcagatctcctaggctagtgtgtgtttttcgcgtcagcagggaccttctccatttc

SEQ ID NO: 83151 - DNA, 594 bp, Oryza sativa
  Clone ID: PAT_MRT4530_82510C.1
atgccgaaaccctacaaaatccgaacaaccaagctgggctggagaggaggagagctccggcgggagaggggcttaccagatgtgcgcttccgtgagcctgaagtgccgccccagcttcgttatcgccggcggcaggtcctccgcgtcccccggcatcgagcgccggagattagaggggcgggaagaggcggcggctgccgactggcgaggccggcgagccggaggagagcggaggggggagttggcggctttgtcgggtggggaaaagcgtcggaactcggaaaggaaggaagagcggtgggtagtggcagtggaaagtggcgacgatggacaacagcggtagtcggtcgagccgatgtagcaaggagtgttcccgggcctctagttgcctccccgagctcaagtgtgcttgcgggcgaccggccgttccgggcacatcgacgaccacgaggaatccgggatgtcgatggctacaatgaggagcaaaggttgggagatgttacttatggatctaggaggacctcctcaaccgatgagaaggctcggaacaacaagttctatggtgttctagatcaagaggagataatgatataa

SEQ ID NO: 83152 - DNA, 1392 bp, Oryza sativa
  Clone ID: PAT_MRT4530_82511C.1
atggcggtgaccggcggcgggaggccggcggtgaggcagcaggcggcgagggggaagcagatgcagaggacgttcaacaacgtcaagatcacgctcatctgcggcttcatcacgctcctcgtcctccgtggcaccgtcggcatcaacctcctcacctacggcgtcggcggcggcggcggctccgacgccgtggcggccgccgaggaggccagggtcgtcgaggacatcgagcgcatcctccgcgagatccgctccgacaccgacgacgacgacgacgacgaagaagaagagccactcggcgtcgacgcgtcgacgacaacgacgaccaactcgacgacgacgacggccacggcggcgaggaggaggagctcgaaccacacctacacgctggggcccaaggtgacgcggtggaacgccaagcggcggcaatggctgtcccggaacccggggttcccgtcccgcgacgcgcgcggcaagcccaggatcctcctcgtcaccgggtcgcagccggcgccgtgcgacgacgcggcgggcgaccactacctgctcaaggcgaccaagaacaagatcgactactgccgcatccacggcatcgagatcgtccacagcatggcgcacctcgaccgcgagctcgccggctactgggccaagctgccgctcctccgccgcctcatgctctcccacccggaggtggagtgggtgtggtggatggacagcgacgcgctcttcaccgacatggcgttcgagctcccgctcgcccgctacgacaccagcaacctcgtcatacatggctacccggagctcctcttcgccaagcgctcctggatcgccctcaacaccggcagcttcctcctccgtaactgccaatggtcactcgagctgctcgacgcgtgggcgcccatgggaccaaaaggccgcgtccgcgacgaggccgggaaggttctgacggcaagcttgacggggcggccggcgttcgaggcggacgaccagtcggcgctgatccacatactgctgacgcaaaaggagaggtggatggagaaggtgtacgtggaggacaagtacttcctccatggattctgggcggggctcgtggacaagtacgaggagatgatggagaggcaccacccgggcctcggcgacgagcggtggccgttcgtcacccacttcgtcgggtgcaagccgtgcggcggctacggtgactacccgcgggagcgctgcctgggcggcatggagcgcgcgttcaacttcgccgacaaccaggtgctccggctgtacggattccggcaccggtcgctggcgagcgcccgggtccggcgggtggcgaaccggacggataacccgctggtcaacaaggaggccgcgctcaagatggacgccaagatcgagagctga

SEQ ID NO: 83153 - DNA, 460 bp, Oryza sativa
  Clone ID: PAT_MRT4530_82512C.1
aatgggagtgtcaacctttcccaggacggataatactcatgccatattcgttttagtatttttttttaccggatataaaaacgaatacggatagctcgaatacagaaacaaatacggattatctcgaatacgaataagaatcgaatatgatcggacacgaatacggaaacaaatttttcggatatccgaattattatccgtatccgacgaaaaccctgatatcatattcgtattcgtatccgggagaaaatatccgtattcgtatccgtatccaaaatatccgagaattatccgatccgaaaggtatccgtatccgtttttgtccggagcggacagaaactatccgctccgttttcatccctaccatcatatgtctttcaagcttgaacatgcaaatatcgatgtgcaaaaggagtggttgggaaaatattgatccagaaggcccaaaatagtgcatgtc

SEQ ID NO: 83154 - DNA, 438 bp, Oryza sativa
  Clone ID: PAT_MRT4530_82513C.1
atggctggggttaccttttgtcgagctgagggagcgccggcgcctccggtgtcgtcgccgtcgctgccgcgccggagaaggggggttggatttggaggaaaaggaaaaggcggcgatgggagggagtcggaacgaatcgaggctgtcgccgtgctcccctcctcccgcgtcgtcgtgtttcctagctgcagctgtcgccgccgggagccagccgatgttgcgccgccggccaccgtcgcggcgccgccgccctcctctctcccgcctcgcctgccggcctcccgccgctttgccttgcttagaaagagagaagaggagaaagagggtgatggcgtggattacgctgacatgtgggccgctggcagctgccgtttgcactggggatgcgggaacccggccggagtacggggcccggaggggcccaggggcgtggactaa

SEQ ID NO: 83155 - DNA, 346 bp, Oryza sativa
  unsure (1)..(346): unsure at all n locations
  Clone ID: PAT_MRT4530_82514C.1
aatgtttttttaattaattnctgtctcctaattagtgattagcttgggtggtttaattaattattagttaacccggtggatcaacctggagcttttaatccccatcancagcaagtgtggcanataattgcttagttagctaggtgagngtaattttttgttttttcnctgttttttttttgtttgtttgtttcttggacttattaagtgaggccctgggatgcaatcatgcncctttgttgtacanatgcctgtactactggattcccaanancaaccagtntgagtaanagggttccccaaaaaaaaaaaaaaaaaaaaaaaaaaaaaaaaaaaaaaaaaaaaa

SEQ ID NO: 83156 - DNA, 597 bp, Oryza sativa
  Clone ID: PAT_MRT4530_82515C.1
atgcaggcggtgagggaggaggaggagcaggtggtggaggaggtggtgagggcgggggcggtggcagaggaggaggaggggccggaggagaaggaggtggcgatggtcggggaggagatggcggaggcagagcacgacgaggaggaggcggaggccggggcgtcggcgaagaagaaccggatccaggtctccaccaacaagaagccactctacttctacgtcaacctcgccaagaaaattatttatctgacatctctaaacccatatggatactggatgcagaggtacatgcagaactatgacgaagttgagctctctgcactgggaatggcaattggcacggtggtgactgttgctgagatcctcaagaacaatggcctggccactgaaaagaagatcctgacatcaaccattggcaccaaggatgaatcgaaggggcggcttgtccgtaaagccaagattgagattcttctttgtaaatcagaaaacttcaacagtataatgtccagcaagaaatcagaccgcccgaaatccgccgaggaagagatcaagcttttggacagagacagacaggtcactgtcataatggaaggctga

SEQ ID NO: 83157 - DNA, 145 bp, Oryza sativa
  Clone ID: PAT_MRT4530_82516C.1
gagagacatagcgctgtctttgatctcgccggatgcagattcgaggagaaagactaccttgttgtcgactacgagtcacacttcagaccgccaaatcaacaacagttagataggctaccccaaatattgtactggtgtgattatg

SEQ ID NO: 83158 - DNA, 1152 bp, Oryza sativa
  Clone ID: PAT_MRT4530_82517C.1
gtttccgtctccccgccggccgcctccacccgcaccgcgcggtgcccccctcatcaccaagaacggaagatgacagaagctgctgagtggaatgatgagaacactaaaattatctgtgaactttatgctgaacaagttcgggctggaaatcgaccaagtactcatctcaacagcattggatacagccaagttgcattgaagtttcagcagagaactcatttgctttacaccaagagacaacttaaaaacaaatgggataaacttaggaatgagtacaccatctggaagaaattgcttataagagggtcaggtttaggttgggacagtacaaaaggaacaattgcagctgacgaaaactggtggaacaagacaaatacagagttgccaggtgcaaaaaaattccgcaaagctggaatgaaaaatctggatcatttgagagtgatgtttgatgatattgccagtaacggtgtggatcatacaccggtgccagcaacaagttcgccatctactctggaaagtcctgtaaatgttgctaatcttgacggactagacaatgacatggaagataatgatgacactcagctggaagaggagtctcccttgaatcggaacaagaaaagacctcgccatgctaataatgctaacaagaacaagagtagtaggactgaaattgctttgctcatgcaagctcaattgaagggtatggcagatttggccgagaaagcacaggccacttttgagaatttcacctcccttgttggctctctaggatccagcattcagtatgttatgacattggttcaagaatgtggagcacggagtggaagcgacgagcatttcattgcaactgagttgtttgtcagtagagaacaaagagaaatgttcttgactctgagtaccgctgaggagcgtctagaatggcttagaagaaagtataaagctaagtatggtgcttaagaaatatgggcgcggggcttcctgacatcgtttcacttggctcttgttgccttaggtattcaagactatttttcttttcttttgtatcggatgctagcatgtattagatcctgacaagtgtgatcgtcaacctgtgggtgtaaaggctgatctatgaatgtacaatcatcgtttagcattaaaaaaaaaaaaaaa

SEQ ID NO: 83159 - DNA, 963 bp, Oryza sativa
  Clone ID: PAT_MRT4530_82518C.1
tggtactgctggaactacggctgtgcgacctgcaggcacccggtcatctagtttccatggtgtgaccaggcatagatggagtggaaaatatgaagctcatctgtgggacagttcgtgcagaatggaagggcggagaagaaagggaaggcaagactatgcaggaagttatgataccgaggaaaagctgccaggtcatatgatgttgcagctcttaaatactggggccaaaatacaaagctgaatttctcggtttcagaatacgaaagggaactggaggacataagggacatgtctcgagaggaatgcgtaacatacctaagaagaagaagtagctgcttctcaagaggggcttctatttatagaggagttactagaaggcagaaagatgggaggtggcaggcacgcataggactggttgctggaacaagagacatttacctgggaactttcaaaactgaggaagaagcagcggaggcttacgacattgctgctattgagatccgtggcaaaaatgcggtgaccaactttgatcgaagcaactacatggagaagggtatgcactgtatagaaggggcaggcttgaagctgcttgcgtctaagccagaatgaaaacttgacttggtggagccgcatcgcatattagggttgtttcagtcatatttggagcttagtggtacatacagatacaactggttgcagcttgttaatatctctgcgttataatctacaaattacagctcaattttcgattgactagcaaattcgtctcagcaagaaagattttgagcatgtattataggttgagtagggtagatctgtacaacacctgagcaactcaatatttatgttctgctcaatataacctatcattccagattgtatgttccccgttgtcattgaaaatgactgcacgtttgtggggattcttctgttcagagttcacattctcgatgaatttcgaac

SEQ ID NO: 83160 - DNA, 1017 bp, Oryza sativa
  Clone ID: PAT_MRT4530_82519C.1
atggaggaggcaggcgatgcatctgcagcagtactggatcccaagcttgctcctctgcttctgttcggccacggcgacgccacgtccctgtacagcgtgccggcgagagcactgctgccaaggagggtgggcgacggcggcgtcgacgacatgatgagaggccaccggtggtggaccacggcgcagggctggctgctcatggcgcgccgcggctcgccgtgcactttcctgtgggaccctttcaccggccgccgtgtcgggctgccccccgaccacgacggcaccgtcctcgccgccgaaggcagcagccatcgccggaggtgcctcctctcgtgctgcggtcccatggacccggccagctgcgtcgtgctcgtcatcgaccacgccgacacggtgctctggtattgccgccccggcgacaaccactgggtgaagaggcatcagcaccagtacctccagcctgggccgcctcaccacgagcaccgcggcatcgtcatcctggcgttacgccagctcacggcgatggacggcgagttctacaccgatctcatcgaccatgtcgccgtcctcgagttctcactggagccggcgttcaccgtgaccgccgtagacgacgacgacaggaggccggcggtgtacatgaaacgtaccagcatctttgtggaatcgaacggggagctgcactccattctcttctctcacccgattggatgtgatcggattgtcgctggtgttggcgtttacaggctgagcatggcgacgacgcaggagcaaagatcagcgtgggtgaaggtggattcgctaggtggcagagtgttcttcgttcagataggctgttttggagcgtcacttgatgcacggacaacaggcttgagagggaactgtatctactactcggggttcaatgggaaagcgctgtgtgtctacgacatggaacgaggaactacggctgtaatcaaccccggagaacatcttccatatcaccagtcgcctaaaatattgatgccaaccagatga

SEQ ID NO: 83161 - DNA, 555 bp, Oryza sativa
  unsure (1)..(555): unsure at all n locations
  Clone ID: PAT_MRT4530_8251C.1
gcgaaacaagagagagaaggcacgacgaaagaagaagaacaaggacccaccaacgcgccgcgcaaggccaagcgaaaagggaaaaggggcggccacgcccccgggggcgggagggaccagaaaaaacaaccccaaacaggccgcaagaaaacacccccggcgaccccgcccgagaaacaaacccgggaagcgcgcaaacgaaaaacgccccccgcgaggcggaaagcggggaaaacaggggaaacggaggcgcgaccggaggacagaacccacggaaaggcacgggaaaggggagacaaaacaacccaaaccgagacgcagcgagccccgagcgaggggccaccaccagaaaaaagcgcggcaaggaaaggaacgacaccccaagagggcaacggaggagacgacgacgcccccggagaagagcagcgcaaaaggcaacacaacaaggagggacagggaagcaaaagcaccaaacacaggggaggcgaaggaaaaaacaccaaacaccccccaccntggggggggagaagaaggggaaaggggggaagaagatga

SEQ ID NO: 83162 - DNA, 3138 bp, Oryza sativa
  Clone ID: PAT_MRT4530_82520C.1
atggcacggggctccgcactgcttgatggtagcgtgctgccgccttctcgcattgtgagcgagaagcaggccgggttgccgcgccgcttcatgccggaatctgccaccggtcgtgagatagtaatgctgggtgagggacgcccggcgccagactacccggggcggtccgtcttctttctccccttcgcaatggcagggctggttccgccattttcttctttcttcatggatgtcctggagttctacgatctccagatggcgcaccttacccccaacgcagtgatgacattgggcatcttcgcacacctgtgcgagatgttcattggggtgcgcccatctctccggctgttccggtggttctttaccgtgcagtcggtatcgccaccgtcggtggtcggcggctgctatttcctgccgcgggggccggtgttgaaccgctacatcccctgcgtcctccgcaagaagtgggatgactggaagagcgactggttctacacccccctcgccgacgaagcgcgcctccgccttccgagccagcccccggcgcaggcctccagctggcgggcgccggtagatctgggggatggctatgacgccgtcctcgaccgcctcgcgggcctgcgatcccaggggctcaccggggccatggtgtacggcgactacctccgtcgtcggattgcgccgctccagcggcgcgctcgggccgcctgggagtacaccgggtccgaagactacatgcggacccaccagggagtcagatgggattgggcccccgaggacttcaagatactggtccaacgggtgctaaatctcaactccgtggaggcgtccctcatcccccacggtattctccccctctgcagcgacccagatcgtgcctccatcttgaccattatgacggcggtcggggcctcagaggagcaggctcctaagggccatgacggcgcaggtgggagccgccggggggatcaatctacccccggagggggtcgtgcttctgggccccgcgtcgggggctcggggagcaaccgccctaccgacgcccgggggaagaggaaactgggaggaacacctcccccatctcctccccgagggggcggggcggtgcgtgccagcagcaggcgcccggagggggccgcgccaacatcgcagcccgagggggagcgcaagaagaagcggctgcgcaagatgggggagacagaaccatcccggggaaacctaatttcccctccaaggtggtcatttaaccgaccccctcgcagtgatatcccatcgcgttcctcccaccatcccaagtccggccagtccgaggccgaagatccggcggccgcagaggcacggaggcgggaatctgaccggcgagaggccgcagaccgcctacgggaagctgaagaagccgcccgggaagccgcccgggctcgccaggctgaggataccgctcgggaggaggccgcccgggcccgccaagccgaggaagccgctcgggaggaggccgcccgggttcgccaggccgaagaagccgctcgggaggaggccgcccgggttcgccgggctgaggcgatggcggcttccgaggcggttcacgacggggccgcggacgcctcgcttgggcccaccccttcgggcgacgcccaagaccaaacaggtccgggggtggcccgcgatgatgccggcgcgtccattggcgggccgagccgcgcggcgtcttcttcaaggcagctcttcccctcgtcttctgtcgccccgctgagcgccgagccccttctgcaggccttggccgccgcaaacaccgcggtgctagatgggttcagcgcccaagtggaggccctgcaggcggagcgtgcggagctcgacgccgcatgggcgcgtgtcgaggaggggcggcgctcggtggaggccatggtagaagcgggccgcaaggctcaccgccggcacgtctcagatcttgaggcccgcaagacggcactggcggagatcgctcgagaggtggaggaggagcggggggctgccctcatcgccaccactgtgatgatcgaggcgcaggactccctccgccttcagcacgggaactgggaggcggagctgaagaaaaagctcgacgccgcccagggggttcttgatgccgccgctgcccgagagcagcgagcgacggagaccgaagcggcgctccggcggcgtgaagaggccctcgaggcgcgcgccatggcgctggaggagcgcgcctgcgtcgcggagaaagtcctggcggaccgcgaggccgccgtcacctcccgggaggcaacgctggcggcgcacgagtctgcctgcgccgaagaggagtccgcactccgcctccgcgaagacgcgcttgccgagcgggagcgagctctcgaagaggccgaggccgaagcgcaacggttggcggactccctgtccctccgtgaggcagcgctgacggagcaggcccgccgcaatttggaatccgtccgcgccgagagagccgcactggagcagcgggctgccgatctcgaggcgcgggaaaaagagctggacgcgagggcgtgcatcggcggggcggctgcgggcgaaagcgacttagccgcccgcctcgcagatgccgaacacaccgtcgcggacatgcagcgcgcgctagactcatccgccggggaagccgaggccctccgcttggcgggcgagatagggcccggcatgctttgggatgcggtctcccgcctggatcgcgccggtcagcaagcgggcctctggaaaggccagacaaggacgcactccaccaacctggaaggcctcgctccgcacctcacgaagatggcctgggctcttcaacaactccccgaggagctcgagaagaccatcaagtcatcctcgagggacctcgcccaaggagcggttgaactcgtactagcgagttaccaggccagggaccccaacttctctccatggatggcgctggaagagttccctcccgggaccgaggacgacgcgcgcgcgcgggtccgggatgccgccgaccacatcgtccacagtttcgaggggtcggcccctcggctcacgttcgcccccaactccgacgaggagggcgatgccagcggtgcagatgacgtggaagacgaggccggcgacccgggcgcatcggattga

SEQ ID NO: 83163 - DNA, 864 bp, Oryza sativa
  Clone ID: PAT_MRT4530_82521C.1
atggggatggccaatgaggagtcgccaaattatcaggtgaaaaaaggcggccggattcctccacctcgatcgagtttgatttatccgttcatgtcgatgggaccagcagccggagaaggatgtggcctgtgcggcgccgacggtggcggctgttgctcccgccatcgccacgatgatgatggattccccttcgtcttcccgccgagtgcgtgccaggggatcggcgccccggcgccaccggtgcacgagttccagttcttcggcaacgacggcggcggcgacgacggcgagagcgtggcctggctgttcgatgactacccgccgccgtcgcccgttgctgccgccgccgggatgcatcatcggcagccgccgtacgacggcgtcgtggcgccgccgtcgctgttcaggaggaacaccggcgccggcgggctcacgttcgacgtctccctcggcgaacggcccgacctggacgccgggctcggcctcggcggcggcggcggccggcacgccgaggccgcggccagcgccaccatcatgtcatattgtgggagcacgttcactgacgcagcgagctcgatgcccaaggagatggtggccgccatggccgatgatggggagagcttgaacccaaacacggtggttggcgcaatggtggagagggaggccaagctgatgaggtacaaggagaagaggaagaagaggtgctacgagaagcaaatccggtacgcgtccagaaaagcctatgccgagatgaggccccgagtgagaggtcgcttcgccaaagaacctgatcaggaagctgtcgcaccgccatccacctatgtcgatcctagtaggcttgagcttggacaatggttcagatag

SEQ ID NO: 83164 - DNA, 7525 bp, Oryza sativa
  Clone ID: PAT_MRT4530_82522C.1
atggcacggggctctgctctgctcgacggcagtgtactaccgccttcccgcatcgtgagcgagaggcacgccggactgccgcgccgcttcatgccggagtccgccaccggtcgggagatagtgatgctgggcgaggggcgcccggcaccagactacccggggcggtccatcttcttcctccccttcgcaatggctgggctggtcccgccattttcttctttcttcatggatgtcctggagttctacgatctccagatggcgcacctcacccccaatgcggtgatgacattggccatcttcgcgcacctgtgcgagatgttcattggggtgcgcccctctcttcagctgttccggtggttcttcaccgtgcagtcggtgtcaccgccgtcggtggttggcggctgctacttccagccgcgggggccggtgttgaaccgctacatcccctgcgtcctccgcaagaagtgggacgactggaagagcgactggttctacacccccctcgccaacgaagcgcgcctccgacttccaagccagcccccggcgcaggtctccagctggcgggcgccggtagatctgggggaggactacgacgccgtcctcgaccgcctggcgggcctgcgatcccaggggctcaccggggccatggtgtacggcgattacctccgtcgccggattgcgccgctccaacggcgcgcccggagcgcctgggagtacactgggcctgaagactacatgcggacccaccagggagccagatgggattgggctcccgaggacttcaagatcgtggtccaaagggtgctgaatcttagctccgtggaggcgtctcgcattcctcaggagatcctccccctctgcagcgatcccgaccgcgcctccattctaaccattatgatgggggtcggggcctcagaggagagagcccctaagggccacgacggcgcgggcgagcgccgccggggggaacaatctgccccaggagggggtcgtgcttctgggccccgcgtcgggggctcggggagcagccgccctgccgacgcccaggggaagaggaagctgggaggaacacctcccccatctcctccccgagggggcggggcggcgcgtgccagcagtcggcgcccggagggggccgcgccgacgtcgcagcccgagggggagcgcaagaagaaacggctccgcaagacgggggagacggaaccatgccggggaaacctgatttcccctccaaggtggtcattcaaccgaccccctcgcagcgatgtcccgtcgcattcctcccgccaccccaagtccggccagtccgaggccgaagatcctgcggccgcagaggagcggaggcgagaatctgaccggcgtgaagccgcagaccgccttcgggaagctgaagaggccgcccgggaggccgcccggattcgccaagcggaggaagctgctcgggaggaggccgcccgggctgaggaagccgctaaggaggaggccgcccgggctcgccaggctgaggcaacagctgctgctggcgcgtcaactgggcccactccttcgggcaaccctcaggcgacagcctccggggaggctcgcgacgaggccgcgggcacatcgcctgggcccacctccccgggcgacgcccaggatcaaacgggtccgggggacatccccgagcccagcacgtcctccggggggccgagccgcatcgccttctctccaaggcggctcttctcctcatcttccgtcgccccgctgagcgccgagcccattctgcaggccttggccgccgcaaacaccgcggtgctagatgggttcagcgcccaagtggaggccctgcgcgcggaacgagcggagctcgaggccgcatgggcacgcgttgaggaggggcggcgctcggtggacgccatggtggaggtgggccgtaaagctcaccgccgtcacgtctcggagcttgaagcccggaaggcggcgctgacggagatcgctcgtgaggtggaggaggagcgagcggccgccctcatcgctaccaccacgatgattgaggcgcaagacgccctccgccttcaaaacgccagccgggaggcggagctgaaagaaaagctcgacgccgcccagggagtccttgactccgccgctgcccgagagcggcgggtaacagagactgaggcggcgtcccggcggcgcgaggagtcccttgaggcccgtgctatggcgctggaagaacacgccggcgccgtggagaaaggcttgacggaccgcgaggccgccgctgctctccgggaggcgacgctggcggcgcacgaggccgcctgcgccgaggaggagtgcgcgctccgcctccgcgaggacgcactcgctgagcgggagcgagctctcgaggaggctgaggccacgaccaaacggctggcggacagcctgtcccttcgcgaggcggcgcaggaggagcaggcgcgccgcaatcttgaatgcgtccgcgccgagagagccgcactggagcagcgggctgctgacctcgaggcgcgggaaaaggagctggacgcgagggcgcatatcggtggggcggccgcgggcgaaagcgacttagccgcccgcctcgcagctgccgaacacaccgtcgccgatatgcagcgagcgctggactcctccaccggggaggccgaggcccttcgcttggcgggcgagattgggcccggcatgctttgggatgcggtctcccgcctgaagcgcgccggtcggcaagcgggcctctggaaaggccagacgacggtgccccccaccaatctggaaggcctcgctccgcacctcaacaggatggcctgggttctcgaacaactccccgaggagcttgagaagaccatcaagtcatcctcgagggacctcgcgcggggagcggtcgaactcgtgctggcgagttaccaggcccgggaccccaacttctctccatggatggcgctggaggagttccctcccgggaccgaggacgatgcgcgcgcgcgggtccgggatgccgccaaccacatcgtccaaagcttcgaggggtcggcccctcggctcgcgttcgcccccagctccgacgaggagggcgacgccagcgcttgatttaagggctcgtgctcaagtcccgatcctcaaatggctcgggtcggggctagtgcctggggagatccacatgtcgagactggccaggccgggaacatggtgaccgagggttatgggtgacccgattgtgggtttttgccgattcccccccggagttcaccacgccccggggcacggctcggttctgggccccgcttggcgattttagctgacccccccccctcaggggtagaagcgacgaaggtgttcaatgttccacgggtttcgcagctcagtgccgcccccgtggccagccttacggaacccggccgggggaccccgatcactcgatacggaccctcccacattggtgagagcttgctctatccagcacgcgtttggacgcggcgtaggacgaggtcgtcgacgcagagtgatcgggcccggacgtggcgctgatggtagcgccgcaggctctgctggtactgcgcggctcgaagggccgcacgccgccttcgttcttccaagtagtcgaggtcatctctgcgaagctgatcttgatcaccttgcagtacatggtggcccgaggggacctcagggtgagctcggatgggagaaccgcctccgctccgtagacgaggaagaaaggcgtttccccggttgctcggcttggggtgattcggttcgcccagagcaccgctggcaactcctcgatccacgagtcgccgtgcttcttgagtatgttgaaggtcttggttttaaggcccttgaggatttccgcgttggcacgctccacttggccattgcttctggggtgggcgggggaggcgaagcagagcttgatgcccatgtcttcgcagtagtcaccgaaaagctcactagtgaattgggtgccgttatccgtaataatacggttaggcaccccaaaccgggctgtgatgcccttgatgaatttaagtgcggagtgcttatcgatcttgacgaccggataagcctcaggccacttagtgaacttgtcgacagcgacatacagatactcgaacccgcccggggcccacctaaacggtcccaggatatcgagcccccagacagcaaatggccatgaaagaggtatggtctgcagggcctgggccggctgatggatttgcttggcgtggaattgacacgccctgcaccgccggaccaggtcgactgcatcattgagagccgtcggccaatagaaaccctggtgaaaggccttgccaaccaaggtgcgcgaggcggagtgggctccgcattcgccttcatggatatcggcaagaagctcgacgccttgttcccgagggatgcacttcaggaggactccgttagccgcgcgccgatagagggtcccttccaccagcacgtagcgcttggagatgcgctggacgcgttcactcccttcgcggtcctcgggtagagtcttatctgtgaggtacgcctggatctcagcgatccaagcaatcaatctaagggagctgggagcgctcccctcgggtcccgaggcctggactccgacgggcctcgggggccgttcagacgcgtccgtctcccctagggggtcgggtcgcgccgacggctgggcaagcctttcttcaaaggcgcccggtggggtctgggctcgcgaggaagcgagccttgagagttcgtcggcgaccgtgttatcccgtctgggcacgtgccaaagctctatcccgtcaaaatggcgctccatacgccgcacctggcgcacgtaagcatccatctgcgggtcagagcactggtactccttggagacctggttaacgaccaactgagagtcgcctaacaccaggaggcggcggatccccagtccagccgccactctgagtcccgcaaggagtccctcgtattctgccatattgttggttgcccgaaagtcgaggcggaccaagtatttgaggacatctccgctcggcgaggttaacgtgacccccgcaccggcgccctgaagagacagggagccgtcgaactgcatcacccaataggcggtgtgaggcagctgtgaggggcccgagctggcctcggggacggagatgggctcaggggccggggtccactctgccacaaagtcggcgagggcctggctcttgactgcgtggcgtggttcaaagtgcaaatcgaactcagagagttcgattgcccatttcaccacccatccagtaccctctcggttatgcaagatttggccgagggggtaagacgtaaccaccgtgacccgatgcgcctgaaaataatggcgcaacttcctcgaagccataagaatagcgtaaagcatcttctgggcctgagggtattgggtcttagcgtctcggagggcctcgctaacgaagtagacgggccgctgcacctttcggcggggccgatcttcttcactaggggccgcatctccagggcgctcttcgtccgagaggccgcgcggggcgcactcggcttctgtgccgatgacctcggggtcggagggcgacaggcgcggccttcccgcagtggccccgtggccatcctgggggtcgggggcacctggcaccttcggacaagcgggcggagggccagctccggccgtcgggggcctcgggccgccgttcgactcgggggcctctcctccctgctctctcccgggtcgagtcgacgcagggtggggacgcgtggagtgaggtttgtcctcgtcgcgctccacgaccaacgctgcgctgaccacctgcggggtcgccgccaggtagagtagcaacggctcatttggctccgggtcgaccaggacagggggagaactgaggtatgccttcaactgagtgagggcccgctcagcctcctccgtccaggtaaacggcctggagcgtttgatgagcttaaataggggtagtgccttctctcctagcctcgttatgaaccgacttagggcggccatgcagccggtgacgcattgcacatccctaagcttgctgggggggcacatccgctctatagctcgtatcttctcggggttggcctcaatgcctcgggcagagaccaagaacccgagaagcttgcccgcaggtacaccgaacacgcacttgtcggggttcagctttatgcgggtggagcggagactttcgaaagtttccgctagatccgagagtaaggtctcttggttgcacgtcttcacaaccaagtcatcgacataggcctctacattatgtcctatttggctacccaaagaaattcgagtagtatgttgaaaagtaggacctgcattctttaacccgaagggcattgtcgtataacaataagttcctatgggggtaatgaatgcagttttttcctcatcctccctagccatgcgaatcttcttgaccgggacctcgtcgcacgtgatcatccgttgcctcggggcggcggggacggaggtgccgagcctctcgtcgccaccctcgggcttggacgcggcggcgaggtgctccgcgcgctgctccatacaagcaagcgcgactttgatgtcgccatggacagagatggggccaccagggcccggcatcttcatctggaggtaggcgtagtggaccgccgctatgaacttcacaaacgcgggcctccccaggaccgcgttgtagggcagactgaggtccgccacatcgaagttcacccgctccgtgcggaagttggcggatccaccgaaggtgaccgggaggtcgatatgacctagcggccaagtgtgtcccggcgtcacaccgataatcggctgggacggccggagcaccatccccggggccttgatggcgtcaaaggctgtgggggaaaggatgttgagggctgctcccccgtctatgaggacacgccccaacttcacgttgcaaacggtgggggaaaccaccatcgcgatctgtcctccccgggcaacgcacggcgggtggtcggtctggttgaaggtgagggcaacctccgaccaccgcgcccgccgcatcgcctcatgggtaggggccgcggccagaagctctcgcttcatggccttgaggctccggcgagagacgtgagcgcacgctcccccatcgacagtggcaatggtggccccaggctcctggaaccccaggccatcgtcgccatcgtcgatgtcctcggcgggggccttctgcttggcctcacttcgccggttgccggcgggagccgccggggacttgccctcacggcgctcctgcctcctctcctcctcccacttcctcgtccgctcagccaaacttttgaccgcgcggcagtccacgaggtcgtggagggaggttgtcacgccctgaagtttccccctctccttcctcctttcccagtgagccgccgcccggtgggccccgcttgccagccgcgcccctcccgccttgtgccactgcccggtgggtcccgcctgccagccgccccctctccctctcttagtgtcactgacccgtgggtcccgcat

SEQ ID NO: 83165 - DNA, 3198 bp, Oryza sativa
  Clone ID: PAT_MRT4530_82523C.1
atggcacggggctccgctccgcttgacggtagcgtgctgccgccttcccgcatcgtgagcgagagacaggccggtctgccgcgccgcttcatgccggaatctgccaccggccgggagatagtctcgctgggcgagggatgcccggcgccacgctacccggggcggtccgtcttcttcctcccttttgctatggcagggctggttccgccattttcttctttcttcatggatgttctggagttttacgatctccagatggcgcacctcacccccaacgcggtaatgacattggccatcttcgcgcacctgtgcgagatgttcatcggggtgcgcccatctcttcggctgttccggtggttcttcaccgtacagccggtgtcgccgccgtcagtgattggtggttgctacttccagccgcgggggccggtgctgaaccgctacattccctgcgtcttccgcaagaagtgggatgactggaagagcgactggttctacacccccctcgccgacgaagcgcgcctccgacttccgagccagcctccagcgcaggcctccaactggcgggcgccgatagatctgggagatggctacgacgccgtcctcgaccgcctggcgggcctgcgatcccaggggctcacaggggccatggtgttcggcgactatcttcgtcgccggatcgcgccactccagcggcgcgcccggggcgcctgggagtacaccgggtccgaggactgtatgaggacccaccggggggtcaaatgggactgggctcctgaggacttcaagatagtggtccaacgggtgctgaatctcagctccgtggaggcatccctcattcctcaaggagtcctccccctctgcagcgatccagatcgcgccaacatcctgaccatcatgcaggcggtaggggtgtcggaggagcgggctcctcgaggccacgatggcacgggcgggagccgcaggggggaacaatctaccccgggagggggtcgtgcttctgggccccgcgacgggggcccggggagcggccgccctgccgacgcccgggggaagaggaagcaggaaggaacccctcccccgtctcctccccgagggggcggggcggcgcgtgccagcagcaggcgcccggagggggccacgccgacgtcgcagcccgagggggagcggaagaagaaacggctccgcaagatgggggggacagaaccatcccggggaaaccttatttcccctccaaggtggtcgtttaaccgaccccctcgcagcgagatcccgtcgcgtccctcccgccattccaagtccggccagtctgaggccgaggacccggcgaccacagaggctcggaggcgggaatctgaccggcgagaagccgtggatcgcctacgggaagccgaggaggccgcccaggtggccgtccgagctcgccaagctgaagaagccgctcgggaggaggccagacttcgccaggccgaggcgacgacatcctccgaggcgacctgtgaaactgaccggcaagaggccgcggatcgccttcgagaagccgaggaagctgctcaggtggccgtccgagctcgccaagctgaagaagccgctcgggaggaggccagacttcgccaggccgaggcgacgacgacttccgaagcagctcgcgacgaggccgcgggcgcatcgcttgggcccactccctcgtgcgacgctcaggacaaaccaggtccgggggacatccccgagtccggcacgtccatcggcgggccaagccgcgcggcatcctcttcgaggcggctcttccccacgccttccgttgctccactgagcgcagaaccccttctgcaggccttggccgtcgcaaacaccacggtgttggacgggttaagtgcccagatggaggccttgcaagcagagcgggtggagctcgacgccgcatgggcatgtgtcgaagaggggtgtcgctcggtggaggccatggtggaggtgggccgcaaggcacaccgccggcacgtctcagagctcgaagcccgtcggaaggtgctgggggagatcgccaaggaggtggaggaggagcggggggctgccctcatcgccaccaccgtgatgaacgaggcgcaggacaccctccgccttcaatacgggagctgggaggcggagctagggaagaagctcgacgccgcccggggggtccttgacgctgccgctgcccgagaacggcgggcggcggagaccgaggtggcatcccggcggcgcgaagaagcccttgaggcccgtgccatggcgctggaagagcgtgcctgcgccgtggagagggacttggcggatcgcgaggccgccgttgccatccgggaggcaacgctgactgcgcacgaggccgcctgcgccgaagaggagtccgcgctccgcctccgcgaggacgcgctcaccgagcgggagcgagctctcgaggaggccgtggccgcggcgcaacggctggcggacagcctgtccctccgcgaggcagtgcgggaggagcaggcgcgccgtaatctggaagatgcccgcgccgagagggccgcgctgaaccagcgggccgctgagctcgaggcgcgggagaaggagctggacgcgagggcgcgcagtggcggggcggccgcgggcgaaagcgacttaaccgcccgcctcgcagctgccgaacacaccatcgccgatctgcagggcgcgctagactcgtccgccggggaggtcgaggccctccgcttggcaggcgaggtagggcccggcatgcttcgggacgccgtctcccgtctagaccgtgccggccggcaggcgggcctctggggcgggcggactgcgaagtacgccgccaaccaggggggcctcgcccagcgcctctcggagatagccgggactctccaacagctccccgaggagctcgagaggacgattaagtcatcctcgagggacctcgcccgaggagcggtggagctcgtactggcgagttaccaagccagggatcccgatttctccccatggacggcgctggacgagttccctcccgggaccgaggatggcgcgcgcgcgcaggtccgggacgccgccgaccatatcgtccacagcttcgagggttcggcccctcggctcgcgttcgccctcaactccgacgaggaggacgatgacggcggagtgggcgacagtggcgacgaggctggcgacccgggcgcatcggagtga

SEQ ID NO: 83166 - DNA, 885 bp, Oryza sativa
  Clone ID: PAT_MRT4530_82524C.1
ggcggacgaccccgatgacgtcagcggtgacgtcaccgacagcggcggcggctcggtggaggagacggctcgaacggcgcacgctcgccggcgaacggcggcgcgaggacgcaaacggagggcaccaagatgaagcgggcggcacggcgaactcaccggcgaccaaaacgacggcggaaggtcaacggacggcgacggcgacgaggaggaagcggcgaagctcttcggcttgacgatggcgacgaagctccgacgatctccggcgacggcgaaggggcggacgaggacggcgacgacttggcgagcacgacggtggtcttcccgagcgacggcgacggctaaaacgacggcggcgcacggctggagcggcggcggcgacggcaaagctagggcacacggcgctagggcttttccgacgacgagaggcgaaggcgaaggtggcaacgggtagaggagacaccgggggtccttttaaaggggctcagaggcggcggcgaaggcccaaggcggcggcaacggcgaaggaaagctcggcttggagagagggaaaccgatccgaaacgaactcgattccacgaacttccaaaacgatttagccaaagattccaaaggagaaaaggtagaggagatcccggagattgtttcccctcaaacaattcggccggagaaggaaaggaacggccggatttggaaaggaacggcggcggcggcgcgctagggtttcgggcggcggcggccgaaggtagacgatgggtccgacaggtgggacccacctgtcagcgtccgaacgcgcgcacgcgacggctgcggactgggccgaactgggccgaggagagagagagcggttttgggccgactttcggcccaaagccaaaagagactttt

SEQ ID NO: 83167 - DNA, 810 bp, Oryza sativa
  Clone ID: PAT_MRT4530_82525C.1
gtcgttcccgggctcactgacgcacagcgatgtcgtggggacgtttgggtacctggcgccggagtacttcatgtacgggaaggtgaccgacaaggtggacgtgtacgcgttcggcgtcgtcctgctcgagcttctcacggggaggaagcccatcagcgacgggtcgcctaagggccaagagagcctagtcatgtgggcgagtccgatacttgacagcggcgacatctcagatctgctggacgccgacctggacgtgaagcacgacgacgccgaggtgaagcggatggccttggccgcgtcgctttgcctcaggaggtcggctcgcctcaggccgaagatatcgcaggtactgagcgtgctccgaggagagagcgaggtgagcctcgacgacctgaaagccgagccggcggactgcgtggacgacgagacctacccggcggcgaacgtgaggacgcacctgggcctcgcgctgctggacgtggaggacgccgagtccatctcaagcacagagcacagcaacctcagccccctcgaggagtacctgcgagagcggtgtagtcgatcgtccagcttcgattgacaagcttgctgtttgctttggctgcttcctttttcttctctttttgttactaaatttttgtttggggttgggttggcattgtttggatacggcttacaaacacatgtacagaaccacatgcgccaaattttcggcgatgagaggattctggttgttccaaaaagaaccaagagaaatgtgagcgctttgtacagaaataaaagttgcccgttgctaatttcttaaaaaaa

SEQ ID NO: 83168 - DNA, 280 bp, Oryza sativa
  Clone ID: PAT_MRT4530_82526C.1
ggtaaagctttttggccacggaaaattgcgcagcaaatgggaaggaccgttcaatgtcatcgacactctttgcaaggggcaatcacactccgtgacgattcaggaagaaaggtggcggccagccgggcccaccagggcggccgaaccagggcagcaccccaaatccttgattccattcatcggctcttcatccaattccacatacaacctcaccggagagccgacactggcaaatcaattgattccggtggaagaatacacgatggaaggggcgaatgct

SEQ ID NO: 83169 - DNA, 3260 bp, Oryza sativa
  Clone ID: PAT_MRT4530_82527C.1
atggcacggggctccgctctgctcgacggtagcgtactaccgccttcccgcattgtgggcgagaggcaggctgggctgccgcgccgcttcatgccggaatccgccaccggccgggagatagtgatgctgggcgaggcgcgcccagcaccagattacccggggcggtccatcttcttcctccccttcgcaatggctgggttggttcctcctttttcttctttctttatggatgttctggagttctacgatctccagatggcgcacctcacccccaacgcagtgatgactttggccatcttcgcgcacctgtgcgagatgttcattggggtgcgcccatctcttcggctgttccggtggttcttcaccgtgcagtcggtgtcgccgccgtcggtggtcggtggttgctacttccagccgcgggggccagtgttgaaccgctacatcccctgcgccctccgcaagaagtgggacgattggaagagcgactggttctacaccccccttgccaacgaagcgcgcctccgactcccaagccagcccccggcgccggtctccagctggcgggcgccagtagatctgggggatgactatgacgccgtcctcgaccgcctggcgggcctgcgatctcaggggctcacaggggccatggtgtacggcgactacctccgtcgccggattgcgccgcttcagcggcgcgcccggagcgcatgggagtacaccgggtccgaggactacatgaggacccaccggggagtcagatgggattgggctcccgatgacttcaagatcgtggtccaaagggtgctgaatcttagctccgtggaggcgtctcttattcctcaaggactcctccccctctgctgcgatccagaccgcgcctccattctgaccatcatgatgggggtcggggcctcagaggaggtggctcctaagggccacgacggcgccggcgggagccgccaggaagaatcaaccccaggagggggccgtgcttctgggccccgcgacgggggctcggggagcaaccgccctgccgacgcccgggggaagaggaaacagggaggaacacctcccccatctcctccccgaggggacggggcggtgcgtgccagccgcaggcgcccggagggggccgcgccgacatcacagcccgagacggagcgcaagaagaagcggctccgcaagacgggggagacggaaccatcccggggaaacctgatttcccctccaaggtggtcgttcaaccgaccccctcgcagcaagttttctcttatccaccttgtttgtcttccggttttttcttctgcttcagcgatgtcccgtcgcgttcctcccgccatcccaagtccgaccaatccgaggccgaagatccggcggccgcagaggaacggaggcgagaatctgaccggcgagaggccgcagatcgccttcgggaagctgaagaggccgcccgggaggccgctcgggtttggcaggcggaggataccgctcgggaggaggccgcccgggctcgccaagccgaagaagctgctcgggaggaggccgcccgggctcgtcaggctgaagaagccattcgggaggaaaccgcccgggctcgccaggctgaggcgatggcgtcttccgaggcggttcacgacaagaccgccggcgcgtcgctcgggcccactccctcgggtgacgctcaggcgacaacctccggggcggctcgcgacaaggccgcgggcgcatcgcctgggcccgctccctcgggcgacgcccaggaccaaacgggtccgggggacatccccgagctcagtgcgtcttctggcgggccgagccgcgtcgcattttctccaaggcggctcttctcctcgtcctctgccgccccgctgagtgccgagccccttctgcaagccttggccgccgcaaacaccgcggtgctagatggattcagcgcccaggtggaggccttgcgagcggaacgagcggagctcgaggccgcatgggcgcgcgtcgaggaggggcggcgctcggtggacgccatggtggaggtgggccgtaaggctcaccgccgccatatctcggagcttgaagcccgcaaggcggcgctggcggagatcgcccgagaggtggaggaggagcgagaggccgccctcatcgccaccaccgcgatgattgaggcgcaggactccctccgccttcaacacgggagctgggaggcggagctaaagaaaaagctcgacgccgcccagcgggtccttgacgccgccgctgcccgagagcagcgagcaacggaggctgaagcggcatcccgacggcgcgaagaggcccttgaagcccgtgccatggcgctggaagatcatgccggcgccgtggagattagcttggcggaccgcgaggccgccgccgctatccgggaggcgacgttggcggcgcatgaggccgcctgcgccgaagaggagtccgcgctccggctccgcgaggacgcgcttgctgagcgggagcgagctcttgaggagtccgagaccgcgacacaacggctggcggacagcctgtccctccgcaaggcagcgcaggaggagcaggcgcgccgcaatctggaatgcatccgcgccgagagagccgcgctggagcagcgggctgctaacctcgaggcgcgagaaaaggagctggacgcgagggagcgcagcggcggggcggctacgggcgaaagcgacttagtcgcccgcctcgcagctgccgaacacaccgtcgcggacatgcagcgcgccctggactcatccaccggggaggccgaggccctccgcttgtcgggtgagatagggcccggcatgctttgggatgcagtctcccggctggatcgcgccggtcgggaagcgggcctctggaaaggccagacaatttcgcgctctaccaatctggaaggcctcgccccgcaccttaggaggatggcctgggctgtccaagaactccccgaggagctcgagaagaccatcaagtcatcctcgagggacctcgcccaaggagcggtggaactcgtgttagcgagttaccaggccagggaccccggcttctccccatggatggcgctggaggagttccctcccgggaccgaggacgatgcgcgcgcgcgggtccgggatgccgccaaccacatcgtccaaagcttcgaggggtcggcccctcggctcgcgttcgcccccagctccgacgaggagggcgacgccagcggtgaggacgacagtggcgacgaggccggcgacccgggcgcattggaatga

SEQ ID NO: 83170 - DNA, 1277 bp, Oryza sativa
  Clone ID: PAT_MRT4530_82528C.1
aggataaaactgtattattttccttttgtttttgtttggaactcataaaattttgttactgtttagtcaagttacatactcctattacagtttaaatactaaaggaaacagcaacagatgatggggatacattctttaaagccttttcgagcaactgcagggggctttcttcgtccatccaggaacgacagcacccaagacattcttgagcaactagctaatgatttcgagatggtcctgactgtcaagattgaagtccaaaaatcatgtcaatacaatttagctcagtctcgatggtttggagctctcctgtcactaggtacttcaacggtctcttcggagcaacaacccagtggtgacagagatgataaacagttcatggcacctaattgcggaaatcaggaggtacagtctcttctgtgaagtattcttttctcactgtctcgacatcacaaaatctcaccagtgatgcatattgtttcaacaaaggtttaacaagctgccacatcggctgaaacacaaatcaacctccgagagtaacaaatgatgcaatgaactcccggagacgatgcaagtgctcacaaatcaaaaacttcaaaaactggagatcaccattttccacctgaaatcctcgaagatcaaaaatgccaagtatattctctgttcccaagggaagtctactcaatgccttctcaactaaaaaggcacacaacttctcattttcaactggatcttgtttctgtaattgtgtggaccagtaacataaagaagggaaatgctttgacgccaccactactagcacaggtctaccatagatgtcaaaagaatcatgcacatatgctttgccagtttgatacaaccctttaaccgattcttctgataattctgagacttgaaaatcctggcgccatttaatggccttggtcagtttagaaactgtttcatcgacggagagcttcctgtccttcaagaaccagaggatcatctcctcatcatccctcccgttcctgcccgtcgggaggcccggatgctccctctccagccgttctttgacctccaagacgagcttggaggaggaggtggaggtgccgccgctgggaggagcggtgctgcagcagtgcacaacccctctcctggcgagaccccgcaggggcggcggagctcgggcgacggagcggaaggagcaagctgcagccatcgcctgcggttctcctctctctctctctctctcgtgagacgctggagcagggggcgctcggatcgagcgagcctcgtgc

SEQ ID NO: 83171 - DNA, 3210 bp, Oryza sativa
  Clone ID: PAT_MRT4530_82529C.1
atggcacggggctccgctctgctcgacggtagcgtactaccgccttcccgcattgtgagcgagaggcaggctgggctgccgcgccgcttcatgccggaatctgccaccggccgggagatagtgatgctgggcgaggcgcgcccagcaccagattacccggggcggtccatcttcttcctccccttcgcaatggccgggttggttcctcctttttcttctttctttatggatgttctggagttctacgatctccagatggcgcacctcacccccaacgcagtgatgactttggccatcttcgcgcacctgtgcgagatgttcattggggtgcgcccatctcttcggctgttccggtggttcttcaccgtgcagtcggtgtcgccgccgtcggtggtcggtggttgctacttccagccgcgggggccggtgttgaaccgctacatcccctgcgccctccgcaagaagtgggacgattggaagagcgactggttctacaccccccttgccaacgaagcgcgcctccgactcccaagccagcccccggcgccggtctccagctggcgggcgccagtagatctgggggatgactatgacgccgtcctcgaccgcctggcgggcctgcgatctcaggggctcacaggggccatggtgtacggcgactacctccgtcgtcggattgcgccgctccagcggcgcgctcgggccgcctgggagtacaccgggcccgaagactacatgcggacccaccagggagtcagatgggattgggcccccgaggacttcaagatactggtccaacgggtgctaaatctcaactccgtggaggtgtctctcatcccccacggtatcctccccctctgcagcgacccagatcgcgcctccatcttaaccattatgacggcggtcggggcctcagaggagcaggctcctaagggccatgacagcgcaggtgggagccgccggggggatcaatctacccccggagggggtcgtgcttctgggccccgcgtcgggggctcggggagcaaccgccctaccgacgcccgggggaagaggaaactgggaggaacacctcccccatctcctccccgagggggcggggcggtgcgtgccagcagcaggcgcccggagggggccgcgccaacctcgcagcccgagggggagcgcaagaagaagcggctgcgcaagatgggggagacagaaccatcccggggaaacctaatttcccctccaaggtggtcatttaaccgaccccctcgcagtgatgtcccgtcacgttcctcccgccatcccaagtccggccaatccgaggccgaagatccggcggccgcagaggaacggaggcgagaatctgaccggcgagaggccgcagatcgccttcgggaagctgaagaggccgcccgggaaaccgcccgggctcgccaggctgaggataccgctcgggaggaggccgcccgggcccgccaagccgaggaagccgctcgggaggaggccgcccgggcccgccaagccgaggaagccgctcgggaggaggccgcccgggcccgccaaactgaggcgatggcgtctttcgaggcagcccacgacaaagctgctggtgcgtcgcttgggcctactccctcgggcgacgctcaggcgacagcctccggggcggctcgcgacgaggccgcgggcggatcgcctgggcccgctccctcgggcgacgcccaggaccaaacgggtccgggggacatccccgagctcagtgcgtcttctggcgggccgagccgcgtcgcattttctccaaggcggctcttctcctcgtcttctgccgccccgctgagtgccgagccccttctgcaagccttggccgccgcaaacaccgcggtgctagatggattcagcgcccaggtggaggccttgcgagcggaacgagcggagctcgaggccgcatgggcgcgcgtcgaggaggggcggcgctcggtggacgccatggtggaggtgggccgtaaggctcaccgccgccacatctcggagcttgaagcccgcaaggcggcgctggcggagatcgcccgagaggtggaggaggagcgagaggccgccctcatcgccaccaccgcgatgattgaggcgcaggactccctccgccttcaacacgggagctgggaggcggagctaaagaaaaagctcgacgccgcccagggggtccttgacgccgccgctgcccgagagcagcgagcaacggaggctgaagcggcgtcccggcggcgcgaagaggcccttgaagcccgtgccatggcgctggaagatcatgccggcgccgtggagaccagcttggcggaccgcgaggccgccgccgctatccgggaggcgacgctggcggcgcacgaggccgcctgcgccgaagaggagtccgcgctccggctccgcgaggacgcgcttgctgagcgggagcgagctcttgaggagtccgaggccgcgacacaacggctggcggacagcctgtccctccgcgaggcaacgcaggaggagcaggcgcgccgcaatctggaatgcgtccgcgccgagagagccgcgctggagcagcgggctgctaacctcgaggcgcgagaaaaggagctggacgcgagggagcgcagcggcggggcggctacgggcgaaagcgacttagtcgcccgcctcgcagctgccgaacacaccgtcgcggacatgcagcgcgccctggactcatccaccggggaagccgaggccctccgcttgtcgggtgagatagggcccggcatgctttgggatgcagtctcccggctggatcgcgccggtcgggaagcgggcctctggaaaggccagacaatttcgcgctccatcaatctggaaggcctcgccccgcaccttaggaggatggcctgggctgtccaacaactccccgaggagctcgagaagaccatcaagtcatcctcgagggacctcgcccaaggagcggtggaactcgtgttagcgagttaccaggccagggaccccggcttctccccatggatggcgctggaggagttccctcccgggaccgaggacgatgcgcgcgcgcgggtccgggatgccgccaaccacatcgtccaaagcttcgaggggtcggcccctcggctcgcgttcgcccccagctccgacgaggagggcgacgccagcggtgaggacgacggtggcgacgaggccggcgacccgggcgcattggaatga

SEQ ID NO: 83172 - DNA, 2103 bp, Oryza sativa
  Clone ID: PAT_MRT4530_8252C.1
atggcggaggagagagaaagctttgagagtcaatgggcacccaccgatgtaacagagaacttgaaggaaatggtggagcacggtgttcttccggcgaaggaaatcatcggctggcgtccggcgtgtggcgaagcattcccgacctcggacatgcatgaggtcgtggtattctcccatttcttctatggtggtttttctctcccaacttcgaaattattcagggggattcttgaattctacgggattagtttgcaccatctcaaccccaactccattgttcatattgcaaacttcattcatgcttgtgaagcctttctagggattaggccgcactttgccctattccgttgcatcttcttcctgaagccccaaccaaacaagagcaagcagtgtgttgttgggggagccggttttcaactgaggggcactttgagccagaaatatttttccatgcctttcaaaacatccaataagggttggcatgcaaattggttttatatgcaaaatcctaagccagcgcttcccgagtactcttgtcttcctccaacatatcaagatacatggaactcgcttccaatagaagatgaagctgctcaagccctcactctgctaaatcgcatgctgaagctcaaggaacaaggtctgcatggggagcaaatcactcggcactttatcaagagctggctggcgcctattaaggaaagatcccgtactgcctttgagtttgatggcaagagtgatcccaaacgcgaagatccagagtctcttgaatttaagattatgaaagacaggatgtataagattttctcatccggcattgtagtcgattactcgcacatactgccaatggaattttctctgatgaagtctgaccctccaaccgctcaacgccgctctcctcgccgacaacctggtcagactagtgggggtccaaaaattcaaccatctgctcaatcaagcaacccaaagccaacgaatcaaacaggctccaggaagaggaaactggtcctaagcaacgatgagggcgatgacgccgaaaaagccggcagcaaagaggcggctggaaaacagcctaaaccagctaacccaccaaagaagaagacatccagtcgtccgatacccaaaatcagaaagtcgtccaggaagccatcggacattgatccatctgggaaagaccccaatccaactaataaggagactggttctgctattgctgatgaagccgggccaactgaagaaaaccgcccgactggcagcccaataattggcgacaaagaagaaatcctttggatccgatcggctgaagactcccgaccacctatcttagtcaaatggtgcgatgatgaaatgcagtcgcaaggcatagttatcaacaagcagaaagaagacgaggaagtagccctgctaaaaaggacacttactcaagctacccgtcttgtaaatagaattcatcttcgaaacgaagcaaaaaccacaacccttgagaaactggtccctcatcttggaactctggaagaaatcagagctcaactccatgaaactagatgtacaatagtccaagctgccaagatcaccgagctggagaaacgaatcaaagctctcgaaaaggacaagggtgatctcgcaaaggaaagagacttggccatcaaagatgtcgaagatcgcaaaattaaatcacaggctcagtttgatgtcttgattaccaagattaaaaaacttgaagaggctagagatgaagtcgccaatgctgctacaccgctgatccaagccatgttctacaataacaatggcccgagtacaatcgatgctgttgaagtcttcgacaaattgagagctgctccggacacatgtttcaagaatatcatggaggctggaagcatgggagcaaccatggctctagcgatgactaagtccttgtatccgaagatcgatattgatgccattgatggctttgcagatggaacaagcgaagaagatgccgttgacatcattaatgatgcccaaaaggctgctgacaaaattgctgcagacattgtagagagatttcaagataccaatcttggtcagactgggtctgatgatgagaaaactgagtctggttga

SEQ ID NO: 83173 - DNA, 3432 bp, Oryza sativa
  Clone ID: PAT_MRT4530_82530C.1
ctaacccatacgcggagcaaaaacccacgaggggtcggggcgcctcggccctcggggccgaggggggtgcggcccgaccccctcggggggactaagaggagggcgaacgcatcaccctcgggcccgacgtccctcgggggtaccaggccacgtgtgcgattgtgtctcatgcgccgcaagcgggcgaatgggattagtggaagcgtgggcgcgagaaacgagggggcgaaatactcttcctccggcgccatggcacggggttccgctctgctcgatggtagcgtgctgccgccttcccggatcgtgagcgagaggcaggctgggctgtcgcgccgcttcatgccggaatctgccaccggccgggagatagtcacgctgggcgagggacgcccggcgccagactacccggggcggtccgtcttctttctcccctttgcaatggcagggctggttccgccattttcttctttcttcatggatgttctggagttctacgatctccagatggcgcacctcacccccaacgcggtgatgacattggccatcttcgcgcatctgtgcgagatgttcattggggtgcgcccatctcttcggctgttccggtggttcttcaccgtgcagtcggtgtcgccgccatcggtagtcggtggctgctacttccagccacgggggccggtgctgaaccgctacatcccctgcgccctccgcaagaagtgggacgactggaagagcgactggttctacactcccctcgccgacgaagcgcgcctccgacttccgagccagcccccggcgcaggcctccagctggcgggcgccggtagatctgggggatggctatgacgccgtcctcgaccgcctggcgggcctgcgatcccaggggctcacaggggccatggtgtacggcgactacctccgtcgtcggattgcgccgctccagcgacgcgctcggggcgcctgggagtacaccgggtccgaagacttcacgaggacccaccagggagtgagatgggactgggctcctgaggacttcaagatattggtccaacgggtgctgaatctcaactccgtagaggcggccctcattccccaaggaatcctccccctctgcagcgatccagaccgcgcctccatcctgaccattatgatggcggtcggggcctcagaggagcgagctccaaagggccacgacggcgcaggcgggagccgcaggggggaacaatctaccccgagagggggtcgtgcttctgggtcccgcgacaggggcccggggagcagccgccctgccgacgcccgggggaagaggaagcagggaggaacacctcccccatctcctccccgagggggcggggcggcgcgtgccagcagcaggcgcccggagggggccgcgccaacatcgcagcccgagggggagcgcaagaagaagcggccccgtaagatgggggagacagaaccatctcggggaaacctcatttcccctccaaagtggtcgtttaaccgacctcctcgcagcgagatcccgtcgcgtccctcccgccattccaagtccggccagtctgaggccgaggatccggcggccgcagaggccctcaggcgggaatctgaccggcgagaggccgcggatcgcctacgggaagccgaggagaccgcccgggctcaccaggccgcccaggaggccgcccgggctcgccaggccgaggaaaccgctcgggaggaggccgcccgggcccgccaggccggggaagccgctcgggaggaggccggatttcgccaggacgaggcgatggcgacttccgaggcagctcgtgacgaggccgcgggcgcgtcgcttgggcccactccctcgggcgacgctcaggcgacaacttccggggcagctggcgacgaggctgcgggcgcgtcgcttgggcccactccctcgggcgacgctcaggaccaaacgggtccgggggacatccccgagtccggcacttccatcggcggcccgagccgcgtggcatcctctccaaggcggctcttccccacgccttctatcgccccactgaacgcagagccccttctgcaggccttggccgccgcaaacaccacggtgttggatgggttaagtgcccaggtggaggtcctgcaggcagagcgggcggagctcgacgccgcgtgggcgcgtgtcgaagaggggcgacgctcggtggaggccatggtggaggtgggccgtaaggctcaccgccgacacgtctcggagcttgaaactcgtaagaaggtgctggcggagatcgccaaggaagtggaggaggagcggggggctgccctcattgccaccaccgtgatgaacgaggcgcaggacaccctccgccttcaatacgggagctgggaggcggagctagggaagaagctcgacgccgcccagggggtgcttgacgctgccgctgcccgagaacagcgggcggcggagaccgaagcggcgtcccggcggcgtgaagaggcccttgaggcgcgcgccatggcgctggaagagcgcgcctgcgtcgtggagagggatctggcggaccgcgaggccgccgtcaccatccgggaagcaacgctggcggcgcacgaggctgcctgcgccgaagaagagttcacgctccgcctccgcgaggacgcgctcaccgaacgggagcgagctctcgagggggccgaggccgcggcgcaacagctggcggtcaacctgtccctccgcgaggcagcgcaggaggagcaggcgcgccgcaatctggaaggtgcccgcgccgagagggccgtactgaaccaacgggccgctgagctcgaggcgcgggcgaaggagctggacgcgagggcgcgcagcggcgggacggccacgggcgaaagcgacttagccgcccgcctcgcagctgccgaacgcaccatcgccgatctgcagggcgcgctggactcgtccgccggggaggtcgaagccctccgcttggcaggcgaggtagggcccggcatgctttgggacgccgtctcccgcctagatcgcgccggtcggcaagtgggcctctggagagggcggaccgtaaagtacgccgccaaccagggaggcctcgcccagcgcctctcgaagatggccggggctctccaacggctccccgaggagctcgagaagacaattaagtcatcctcgagggacctcgcccaaggagcggtggagctcgtcctggcgagttaccaggccagggaccccaatttctctccatggatggcgctggatgagttccctcctgggaccgaggaccgcgcgcgcgcgcaggtccgggatgccgccgaccatatcgtcgacagcttcgagggctcggcccctcggcttgcgttcgcccccaactccgacgaggagggcaatgccggtggtgcagacgacagtgacgtcgaggccggcgatccgggcgcatcggattga

SEQ ID NO: 83174 - DNA, 1435 bp, Oryza sativa
  Clone ID: PAT_MRT4530_82531C.1
tatacccttctcttgttcgcttgcggctcggagaagaggaggagaggaggggggcaaggcaagcaaatgctcggcgccgctccggcgtattttggtggaatagtaacttaatatagagttctgggacagaaaattatggagagggaaatttctgccttatatgaaccaaaaagaaacaatgaaataagaatttttgagagttcagatgagatgtcaacagatctggctgagtatatctcgcaagtttcagaaatatctgtcaaagaaaggggatactttgctattgccctttctggaggtcccctagtcagttttttggggaaactttgtgaagcgccatacaacaagaccttggattggtctaaatggtacatcttctggtctgatgagcgtgctgtagcaaagaatcatgcagagagtaattataggataacaaaagaaggattcctgtccaaggtacctattctcaatggccatgtctactctataaacgacaacgcgacggtggaggatgccgcaacagattacgaatttgtcatcaggcagctggtcaaggtccgcactattggagtctccgaaagcaacgattgccccaagttcgatctaatcctgctcagcatgggttctgatggacatgtggcttcattgttccccaaccatccatcccttgagctgaaagatgactggatcacctacatcaccgactctccccagcctccacctgagcggatcaccttcactctccctgtgataaactcggcttcgaacatcgcaatagtgactaccggtgacgataaatcggaggctgtccatttggccatttctgacaatgcagatggtccagaagccccctcatcgctgccagcaagaatggttcagccaacagacggcaagctggtgtggtttttggacaagtcagctgcgtcctctctggatgccgagaacgatgacgcctttgagcagcatcgcgagtactaactccaatcgtcgaaagaacattccttttgctgtggatgaaggtgtgtgcgtgtgtaagtaggcggtttggtatgatcgaattcaggatgttttgccttccagtttagcagaatgcttgttgcattagtttttttgtggagggttttgttcagggagagccttgagtgtgttttggtcgttttggcaaattggagatggttttagagcgaagaggattgagacgtcagaactgagaacacccaaatttgattaggggtggtatgatattatgtgctacattatatttagttcaatcaaagttagttcaagcaagtcaaggtggaagaagcagaggctttctgttaattttgtttccttgtgatgttgccggttcgagtatagaaaaatatgatcacaaacttgatatttttaacaaaatcgtcgggcaatcatttgcttgattgctactccctctgtt

SEQ ID NO: 83175 - DNA, 328 bp, Oryza sativa
  Clone ID: PAT_MRT4530_82532C.1
aaaagggccccgacggccccccaaaaagtaaaatcataacgccatttaaaggggggaaaaaggccccacggccgggttttaattggaaaaggcggcccaaacagaccagggggatgaccatagggccaaagttgtaccacccgcaacatgcaagggacacctgggcaataagataccggggggggcggaacactctggggtggcccgcttagaggaccatcttgatctgggggccagaaccgaggacgcccggcggggggggagtctcctggaccatgcccgcggggcgggacccccccaccccctgggtcaataagggcaggaaggg

SEQ ID NO: 83176 - DNA, 156 bp, Oryza sativa
  Clone ID: PAT_MRT4530_82533C.1
atggctcatgccggtctcggttccggctggacttgcgcgtttgcaaatgactttgatgagatgaaagcgacttatcccttgccggaaatggtgcaggactggatggcgagcgaagtgggacgttttggccgttcatcaacctcatgggccaattga

SEQ ID NO: 83177 - DNA, 433 bp, Oryza sativa
  Clone ID: PAT_MRT4530_82534C.1
gtcctcctctcgccttctacgtaccttgccaatggcggtctccacctccaggcgcgggggcggcgtgcttgcggcggtggtgacggcggtggcggcgctggcgatgctgggcggggtggcgtggggcggcaacccggggttcacgtgcgggccggcgtcggcgcagaaggggttcgcgttctgcaacgcggcgctgccggcggagcagcgggcggcggacctggtggcgaggctgacgacggcggagaaggtggggcagctcggggaccaggcgcccggggtgccgaggctggggatcccggtgtacaagtggtggtccggaggcgctgcacgggctggccatctccgggaagggcatccacttcggcaacggccccgcgcgcaccgtcaccagcttcccgcaggtcatccacaccgtcgtcggcttcgacga

SEQ ID NO: 83178 - DNA, 295 bp, Oryza sativa
  Clone ID: PAT_MRT4530_82535C.1
cgtcgctatgcatcggcctacgtacgctggctatgcctctcatgagcgagccgcccttcttttttttttttcttatccttgaaaagcctacgaaggaaataggcatcattcatggtcctgtgtcctccgccttcctcctctttctcgtttggtgccgggcccctctttttctcttcgccatccgcatccaagagatgccggtttatacacatgtcccattcttgttcaccacgtgcccagtgggtttaacgtaataatttaggtgatttctaagccttccctagttcttctactg

SEQ ID NO: 83179 - DNA, 1059 bp, Oryza sativa
  Clone ID: PAT_MRT4530_82536C.1
atgactcagctgccttatcttttgctactcctctcaaacgttctcgcactactgtctgtactgcaagaaaaaggatattcagtacgcatttcccaaaagccctacgatacatatatttacatcgacaatttcatgttcggtcgacacgtggaaaagcaacatctcatcaacttcttactggaaaacaatattgctggtcctccacctgtactaccgattattggaggtcgtggagttgggaagagaacacttgtcacgcatgtatgcaatgatgagagggttagctctcagttcaattttattttgcacatcaatggagcaaaccttgggcaaattacagaaaatggaaatctttcagcgaggacacttgtaattgagtttttttcagatgtagatgacaatgattggaaaaaattttattcacatgttacaaacctgagcagagaaaataaagtgataatcttgactacaattgaaaaactggagagatttggaactgtcaagccaatgactctaaataggctggtatatgaagagtacaggtacctattcaagacactcgcatttggaagcacagacccagtagaccatccacaactcattccaattgtggaagaattcgcagagctattggaaggaaggcttatcccagccaacatacttgcagatgtattgagaaagaatttgaatgttcatttctggctttgcaaactgagacaggtccaaattacagccaagaagaacatgaccatgtctggcgcccatccacacaaactttttgatcaaggtcatccagcacatttcacgggctacatattgtctcctccaactattatcacaccaaatgttccccaaaatgatttgccacagttgagatttggtgacttgctaacaggccatatttttccaccgaacggtgattttaagttaatttcatgggagtcgaggataccgccatacacttcatttgttcacacggctcgcttctgtctaagtctttctcaagatcaacctgaatcacctttgtcagggaggaagcatcgaaggccattttcctag

SEQ ID NO: 83180 - DNA, 396 bp, Oryza sativa
  Clone ID: PAT_MRT4530_82537C.1
atggaagacaatgtggtccttgttgcccttgacttcagctctcagttcctcctcatgccggccacgcctccttcactccttggggctcctcccttcttttggtcgtctcttgagccggctgtggagccttttagtggtggaggagaagtgttcgtccgtgtttgtggtccagtcaatctgttgtcagggctcttgggtctcaccggtggagtcggagctgctgaattgggtcagccgatgagccgggcaacgataacacttaacactctggctctggtttctaagaggttctacacctttgagagagtcttaggcgaaagccttgtttggtcttccagaattggcgacatcgacgcctgcgagcgtcgtttcctccttggaggtgttgccttgtag

SEQ ID NO: 83181 - DNA, 397 bp, Oryza sativa
  Clone ID: PAT_MRT4530_82538C.1
gctacacatctgaagacgacacgtacctgatctttatgctggccagatgagcgcgtcgaccgcgacgtatgccaggagtgcactccttaaatgattgaggatcatcatggctcactgcgccaacgctattactctacgccgcgagcgcgttctggtggtcaccaacagtgcagagacagcgttcaacgccgagattgaggccgcacagctggttattacaccacaccactatgcaatcgcgcagatggcgcaaagagaatgatgtgcttacattgcatgtaagaccaatcctaactctatggtcagacagattgcacgactgagttccatgtatgccgctgtgcgaaatgatgttgtagctgatgcatatcggatatatggagatcaggctcagacg

SEQ ID NO: 83182 - DNA, 504 bp, Oryza sativa
  Clone ID: PAT_MRT4530_82539C.1
atttatctgattatgcgtctcgaaacatggcagaaagcgagggggaacggtccttgcgacactggttgctgctatatgagcttctagttactatatacccgtttacatatcccttgctttcttagtatttctgtttggctttattcattagttatgcctatgtgttgtgatacatagttttgtactgtggagattgtacgtctgtcaaactacttaatgaaattacagattattggaccgaaagtctgaaactactatagtatattagactaaggttatatagtttgtttacttggaattgctccaaagtttgtctgattgctgaatttgtactccgtttgtttgctgtttttcgcatgaaacattaccagtcctgaagatatttatcatacatgaggtttgtgtatgcagcttctgattttttagtgcctcttatgcagatgccaagcgtctcatcggccagagatttactgatgcttttgtccagagtgatattatgctctg

SEQ ID NO: 83183 - DNA, 599 bp, Oryza sativa
  unsure (1)..(599): unsure at all n locations
  Clone ID: PAT_MRT4530_8253C.1
ataaaatggatatctaaaatgattttgtgaagatcaatttgtggagaccagctacacctaaaatcactttgtgcatggtcatatttctagcgcaagcatacgatagagcacaagaaagcaccagtttggccgatctgatatccgtatataccttccctacctaagtaaaaggggtaacagacacaggaaaaaaagagagaggaagagtgtacatggattagttacaccaacatttactgtattttgacccaagcggcctcgctgggcacgtccttggatacgacgtagacgaggtagtaccccggcggcgcgagctccggcttccgcggcgtgtcgacggtgagctcgtacatctgcccctgcgccgagaagccggcgacgggcagcacgagcaagcgctggttcatggagtagccgtgcgtcgtgagccgcggcgcgtacatggtcaccctcacgtngccccactccaccgccgccaccggcgtgtggaacctgaacgtgaacttggtcccgtaccgcatcccgcccgccggcaccgacgccacgtcgatcaccgcccggttcccagtcagctccctgctcaggtacgggggggcgaa

SEQ ID NO: 83184 - DNA, 1740 bp, Oryza sativa
  Clone ID: PAT_MRT4530_82540C.1
aggaacactgccctgccctatcgcaatttccatttccatctctcctcctctcctcctcctcctcgtcctacaaatgcggcgcaggacgagagtcagagcggagtagtagcagacgaacacgacgacatcggagcgctcttgtctcctcctcgtttcttctgctcccgagtcaagcagatcctccaagcccagcgagggggcgggcgcgccgccgctgccgttgttgttgtcggccgcagcgcagacatggacccgtccggcggcggcggcggagtcggagtcggaggcatcggcggcggtgaacaaattctttgggactggcaagcggcggagcagtgcgagagcaatgctgcaaatcatgatgtttctagattcatgtgggactgcctcaatcaagatgatgatgacctactgggattgctgggcaatcaaactcctctaagagattgtcgcggcttctttgatattgatgatttcacctgcaaggagacgttggacctagaggaatctcgggaatcaaagcgccgccgcatattggagtacccttctgagtctaatcaatcagaagatggaaatcgtgaaataagttctaccttgggcacatctgaggtatcagaaatttcattgctttgcaccgatgaaccgcagagcttcaattgggattcacagaacaattcaaataattttggcattctagccaggagagcgttacatataccaatgatcaaagtggtatttcaggaaacttaccagttctttctatctataacaggaacaactgagaatgattcagtgacagaaagtcttctaatgcaggagactaggaagctttctacacttaaagtatctaaaggaacctcactggttaaggcgaagcagaatttaactacaactatagcatacccttttaccctcatcaaaccatcctgggaggaaggagatgtcatcactctaaaggatataaatcagcgaatccgtgctcctccgaagaaggctccagaaaccctagggacttcagccttctctggcaagccagtcattggcaagacaaggatcagaactgacgggggcagaggcagcatcacgatactaagaacaaaaggttgagagtccaaacaacttgtttctcagccattacctggattgctttcagcaatttgatctccgcagctctccagtttttcgttgtgtggccttggttttggcctgcacggccacctccgccggctgccgctccggcggctgcccatgccgccgctgcacctgcgccgcgtgcggctgtcccgaagtttatgcgaggtggcggtgctggcaccagcgccctctgcccctctcccgttgcggggccgttcttcgaccaatggggacacggaatgaattttcagaggggaccggcgatcgaatagtgcgagttttttcctccacggccgctcactgcagcctgtcatacgtatccttctttcccatatactcccggcctaagcgctccagtcagcccccggtatgtagtctacgccccttatcttgttcccgcgctcctttcgtatttatatgatctttctctgtatgatggcagagtctccttccccccgacaggtttagtcgcccctccttgccatatgcgcgctcatcgttcttccccagatttactcctcttatattcttttcagtccacggacctcccacccgcctttttctttcatctcatccccactgatttctctcactcctataacaaac

SEQ ID NO: 83185 - DNA, 816 bp, Oryza sativa
  unsure (1)..(816): unsure at all n locations
  Clone ID: PAT_MRT4530_82541C.1
tggagctccaccgcggtggcggccgctctagaactagtggatcccccgggctgcaggaattcggcacgaggaggtcagggaagcttgaactccagtaccttcatgaatatgctggcatcaatgcaagtgttggcctgaattccaatcctatggttaacctttctggtgtctttggaagcaaagagctctcagttggtgttgatgttgcattcgacactgcgactagcaatttcaccaagtacaatgctgcattgagtctaaccaattcagaccttattgcttctctgcatctgaacaatcatggtgataccttgattgcatcctactaccacctggtaaagcaccattcggacactgccgtaggagcttgagctgtnccacagcttcttcaaggaatgaggggcacacttgatcttttggggtcccagcacttatttngacccctcacacggcaagtaaaggnttggttttaacaaccttatnggaattngccngcggggtttgtccagcaattgaantgngggtccnaaatntgntaattancaatttttttggtgngggtttnaaccaaaggaaatttntgatggggacngaaagnttgggttttccnttngngttnngattnagnattgtttttaanccttgggtttttttaagacttttntgntttggnnnnatttnaaaaanttngncntngtncntttnggntattntnncttgnnnnttncnncnnnttntttggaatnncngttngattntnttttttgnggnngtnnntnttnggggttncgnttttgnntntttttttntgngant

SEQ ID NO: 83186 - DNA, 315 bp, Oryza sativa
  Clone ID: PAT_MRT4530_82542C.1
atggcggcatccggaaaatctctgatgctgccgatcgagctcgccgctgttggatggcactgttggttggtagccgctggtgggctggtgccggtgctagctctttcagaaacctgcagagtgatgcaggaacggaagggaggaaagaaacttgaaagtcctgaacgattggcgaacaaggatggaaatggaagcctaacgtatgaggcggtggcagtgacatgcactgaaatggagcggaaacgaaatgttcaaagttctgtctccatctctccaataggaccaatacaatccggtatcaatacctttcactga

SEQ ID NO: 83187 - DNA, 616 bp, Oryza sativa
  Clone ID: PAT_MRT4530_82543C.1
gagcagatgacgatatgagctactagcagcagcagcatccaacgacagaaagggaagagattttcccttatcctcttgatggagctcctcctgcgtccctcccctccgccgccgtgggcgattccacggcggagctctggcgagagaaccaaaccctgccgctcccgctcccgctcccgcacgggaacctctaagcaaacatttcctgtccctttactggttggcaaggttggaagacgtccgtttcctgtgcagtgttctatagttcgatgctgcttgtcatcaactgatgccatccattctacaagtgatgacatccatgaagataatggacacggccattttcttatgaagtctacatctgaccttcagaaagtgatatcttcctgttttgggaaagcatgtcttctcagttctgtcatgcttgttctaccacccagttgtttcgcagaaccgtgtgagccagagtactctctacctaacatgcctttgctttttgcaattgccatgattggagctaccgttggagggctccttgcaagacaacggagaggggagcttaaacgattgaatgatcagctacgtcagataaatgcagcactgagaagacaagcca

SEQ ID NO: 83188 - DNA, 1524 bp, Oryza sativa
  unsure (1)..(1524): unsure at all n locations
  Clone ID: PAT_MRT4530_82544C.1
agagattttcccttatcctcttgatggagctcctcctgcgtccctcccctccgccgccgtggggattccacgggnagctctggcgagagaaccaaaccctgccgctcccgctcccgctcccgcacgggaacctctagtgcgtgcccatttccttctccctttccgtttcttggaagcatttcttggatgatctttcgagctgtttattgcgatgcgagctcgtaggaatttgctggattactttgaacatagcaaacatttcctgtccctttactggttggcaaggttggaagacgtccgtttcctgtgcagtgttctatagttcgatgctgcttgtcatcaactgatgccatccattctacaagtgatgacatccatgaagataatggacacggccattttcttatgaagtctacatctgaccttcagaaagtgatatcttcctgttttgggaaagcatgtcttctcagttctgtcatgcttgttctaccacccagttgtttcgcagaaccgtgtgagccagagtactctctacctaacatgcctttgctttttgcaattgccatgattggagctaccgttggagggctccttgcaagacaacggagaggggagcttaaacgattgaatgatcagctacgtcagataaatgcagcactgagaagacaagccaagattgaatcttatgctccttctttgagctatgcaccggttggtagtaagatacctgaatcagaagtcattgttgatccccagaaggatcgcttaatttcatatctgagggctgggaagaactatctgagaaaccaagcccctgataaggcatttcctgagtttaaggctgcttttgatcttgcacaatccttgggtgatcacgtcgaagagaagaaggcggcacgtggattaggagcatctttgcagagacaaggcaagtacaaggaagctataaagtaccactccatggtgttgaacatctctaagctgaccggagaggacgcaggtgttacagaagcctacggtgcgatcgccgactgctacactgagcttggtgagctcgagaaagcaggcaagttctacgacaagtacatcgcaagactggagaatgactgaacagatttaaagaaccgtgtgtgcaacctttgagagctcaagtagggctgtgtcccatcttttgccttctttggcctgtcttgtagcaacgtttttgtagtggacgctcagttcatggctgtaactgaggcacatgccatctttcaagttatttctactaaatagtgtcatcagattttttttttctttgtctggtcaagatcggcaccatgttgtgtaaaatttctccatctgttccaagttataagcatggctatgtatctggctatgcttgtcctgaatcaggaatgcttatgttttgaaacagaggggagtagttgtagcagcaggaaggcttgttcttaaccttgttttagataaaaggtttgcaaaaaataatagctttaattgttttagataaaaaaaaaaaaaaaa

SEQ ID NO: 83189 - DNA, 721 bp, Oryza sativa
  Clone ID: PAT_MRT4530_82545C.1
atggaggagtcgcggaggagagtacagaggaggggggccgtcgacgcggtgccagccgtaggcggcagcatggcgtcggccggcggcggcggcgaggcagcgcatgcagcgatggcatatgcggcggcgccacgatggggattagggaagcgaagagagagggacagccgcgtgccgctgcggcacggcgtgttcgcggtggtggaggcgaagctcggggaccccggcttcggggacggctgcgccgcagcggtgctcgtgctggtccgcttcaacaaggacgtgttcgtcgggccggtgctgatggggcgcgccgtcggcgcgctggtcggcccgctcgtggacgagctccacgcgcgcggcgagctcccccggctcgtctccctgctctgctccgccgacccccgcatccgcacgctcgcgctggagttcgccctccgcgtcggctactacggccgcaaggagatcgttgacgcgctcctcgccgagggcctcgtcaagcgcctcctcgccctggagggcgtggtcgccgccgtcgctaccgcagctcctcccgagaacccggagcagaggccggccgtgaacgtgatgctcaccagtggcacggtgtcgctgcaggcaaattttttattattttaaaattcggtaggaaatgatgtaaggacaacgatagggagggatccatgattcacagagcagtttagcagtcaaagcagggggg

SEQ ID NO: 83190 - DNA, 437 bp, Oryza sativa
  Clone ID: PAT_MRT4530_82546C.1
catctggtacgtaccaatcagttgctggattggaggctgtgacatcgttcttgagtctggagaagagtgggagagctgaagtgccacgcttgtgcggagtgaggaaaatgttacgtgcgtatgccgcatgctgtgcctgcttgcctgggtggtttgctacatgccgtgcgacccatgccgagtgttggctgcttatgggatggcattgtgtgctgtggtgatgtgcatgagatgcccgtgatgttgcaaacctgtaggatgatgatggccctgtggccacatgcgctgtgtgtgaacctgtggacatctgcaggaaggaatgaactgaaggacggaccgggtcagtacggctaataactaagacgacctgttcagtacggttatattgccagttcattttccgcctcgctttcgctcaaaaaaaaaaaaaaaaaaaa

SEQ ID NO: 83191 - DNA, 460 bp, Oryza sativa
  Clone ID: PAT_MRT4530_82547C.1
ctcgcgctgtggtttcgagctcgggggccactaagcatttggttccttctttgttgaaaggggggaaccttgggggactaatatttttctgcccctacttgtgttcccaaacaaagggaaacctgtagttttttttaaaaccaaccaaaatatttccccgggggggtacagaggccaagctaggcacctgttttagcgcctcagtgacgacaacatgttccgcgtttgggtattccaaggtgtcaaatgccccgagaggctcgacggagttcagctccaagacctttctcgagaacttgcgaaacctcttgcacatggggggccccctatcgtggggcgccacagctgcctgtaatcacctcccaggaggtggctgatccacttggacctgccccagttgtaggcgaccgaggagagctaccggaagaagcttcctatttacacttaaaagatcttattt

SEQ ID NO: 83192 - DNA, 451 bp, Oryza sativa
  Clone ID: PAT_MRT4530_82548C.1
ccggtcgaccacgcgtccggcggcggctgcggaggaggagaaggtgaaggtggcggtgccgctcaggctggcggagctgtgtgctccggtgtatgcgccggtgttcgtttcgtcgtgttctttatgtagtgccataatttgtttaattaacattgtcagctattgacgatgtcctatcgttttagtatcttgttagttttgattttttatggactatttttattttgtatttttctattttctttttttatttttatgattttattttatattttatttattattattttttattatttttttgtttatttttttttgttttttttttttttttttttatttttttttaatttttttttttttcttttttttttttttttttattttttttttttttttttattttttttttattttttttttatatttttttttttattttatttttttt

SEQ ID NO: 83193 - DNA, 501 bp, Oryza sativa
  Clone ID: PAT_MRT4530_82549C.1
atggagtttaccctcagcgaactcgaagaaaatgaggtcgacagcgagtttgacaagcaacctgcccctttggcatggctcgagggaagaggtggccgacaacgagttgagatttgggagtgtcacctccttgatgtcgatgaggccaaggtgcaatgcttcgattctctgcttcacaatgcttatgttgttacctcctactcaagctccactgtcctctcctcgtcgaactcgctgactgtctcctacccaagctccctgcaaagggatgggagcaatgacagtaggaggacatcggcagggggggcgctcggtaaggggttcttcatccgtcactgcggcataggggttgaggagtcacaactcaagtttgagcttgcagtcgcatgtgctagtttactggaggagacgctcaagcttgccttagccacaagaaggagctcggcaatgacgtctgtcgaggaggaggctagtggcagcccacagggaggagcccactag

SEQ ID NO: 83194 - DNA, 2217 bp, Oryza sativa
  Clone ID: PAT_MRT4530_8254C.1
atggcggaggagagagaaagctttgagagtcaatgggcaccctccgatgtaacagaagagaacttgaaggaaatggtggcgcacggtgttcttccggtgaaggaaatcatcggttggcgtgcggcgtgcggcgaagcattcccgaccccggacacacacgaggttgtggtattctctcatttcttctatggtggtttttctctcccaactttgaaattcttcaagggaattcttgaattttacaggattagtttgcatcatctcaaccccaactccatcgttcacatcgcaaactttattcatgcttgtgagacctttctagggattaagccgcattttgccctattccgtcgcatcttcttcctgaagccccagccaaacaagagcaagccgtgcgtcgttgggggagccggttttcaactgaggggcactttgagccaaaaatatttttccatgcctttcaaaacatccaataagggttggcatgcaaattggttttatgtacaaaatcttgaaccaacacttcccgagtactcttgtcttcctccaacatatcaagatacatggaactcgcttccaatgggagatgaagctgctcaagccctcactttgctgaatcgcatgctgaagctcaaggaacggggtctgcatggggaacaaatcactcggcactttatcaagagccggttggtgcctatcaaggaaagatcccgtactgcctttgagtttgatggcaagaatgatgccaatcgcgaagatccagagtctcttgaatttaagattatgaaagagaggatgtataaaattttctcatccggcattgtagttgactactcgcacatacttccagtggtgccttatcatgccttcaaccctcctcctccggaattttctctgatgaagtccgaccctccaaccactcagcgccgctctcctcgccaactacctggtcaagctagtgggggtccaaaaattcaaccatctgctcaatcaagcaacccaaagccaactgatcaaataggctcccggaagtggaaactgctcctaagcgacgatgagggcgatgacgctgaaaaagccggcaacaaagaggcggctggaaaacagccaaaactagctaacccaccaaagaagaagacatccagtcgtccgatacccaagatcagaaagtcgtccagaaaaccatctgacattgatccatctggaaaagaccccaatccgactaataaggagactggttctgctaccgctgatgaagctgggccaactgaagaaaaccgcccggctggcagcccagtaattggtgacgaagaagaaatccttcggatccgatcggctgaaaactcccgaccacctatcttagtcaaatggttggatgacgagatgcagctgcaaggcatagttattaacaagcagaaagtagacgaggaagtagccctactaaaaaggacacttactcaagctactcgtcttgtaaatagaattcatcttcaaaacgaagcaaaaaccgcaacccttgagaaactggtccctcatcttggaactttggaagcaactagagctcaactccatgaaactagggaactagccaggaaaactgaacacgatctcaggaatcggattgctgagcttcaagataccaactttgagttgactagttcgtcaaaagtgcaagctgccaagatcaccgagccggagaaacggatcaaagctcttgaaaaggacaagggtgatctcacaaaggaaagagacttggccatcaaagatgtcgaagatcgcaaaattaaatctgaggctcagtttgatgtcttgattaccatgattaaaaaacttgaaggggctagagatgaagttgccaatgctgctacaccgctgatcccagccatgttctacaataacaatggtccgagtacaattgatgctgttgaagtcttcgacaaactaagagctgctccggacacatatttcaagaatattaatgaggctggaagcatgggagcaagcatggctctggcgatgactaagtccttgtattcgaagatcgacattgatgccattgatggctttgtagatggaacaagcgaagaagatgctcttgacctcattaatgatgcccagaaggctgctgacaagattgctgcagacattgtagagagatttcaagataccaatcttggtctgactgggtctgatgatgagaaaactgagtctagttga

SEQ ID NO: 83195 - DNA, 1728 bp, Oryza sativa
  Clone ID: PAT_MRT4530_82550C.1
gccaacagtcgcacaatgtattttctaaaaacttgactcgccttatcttctcggtgcaagatcagggaggtggggggagggggttccgaaccgctcaaggccgcggcagggcgtcagcagcagcgtcggcgtcggcgttggcgtcgccgtcgacaccaacgagcggtggcggctccgagaaggagcggtgtgtgcgcgacgagcggcggcgtaggctcgtctcctcaccacctccgctggccgcttccctcctcgccccctccgctgccggccactaggagcgacgacaacggctctcctcctccgctgccggcttccctcctcgccgcctccgccggccgcttccgctcctcgccccctccgctgccggccacgacgaacgacgacgacggctcgcctcctccaccgctggcttccctcctcgccggctccgccaccgatcacgacgggtgatgatgacggctcgcatccggccgctggctcccctcctcgttgacgcgatgacgacactgacggtaatttatttcttcggcggttgatatagtgcacggtgagttcaacaatggtgaagttcaaaaggtggtggatatgttttaggtcatacagtaattaatcaggaaaatttgactggtcattggagattgtataatgattatttttccaaggaacctacataccttgatgttcagtttagacgcaggtttagaatgagacaacctctctttttacgcataatgaatgctattgaagcacataatgaatattttgtgcagaagagaaatgcgactggtatccttggactgtcatgtttacaaaaggtaacaacagtatcacgcatgttatgttatggaatagcaacagatgcaattgatgagtatgttcgtattggaggtagtaccgttattgagagttttaaaaggtttgtggtggctgttgatgaagtttatggagaggagtatatgagaacaccaaacgagaatgacaaagctagattacttgctcaggggggagaaagagggctcccaggaaagttgggttctttagattgtttgcattggtagtggaagaactactagaccgcatggcaaggctagtatataaagagaaagagtaagttcctactttagttttagaagccgttgcctcacatgactgatggatttggtatgcgttcttcggttcacctaattctcacaatgatattaatgtccttccacggttgccattgtttgcaaagctagcttaagagcacgctcctaaagttaattttagtatcaaagggcatgactatgggttactatcttacatatggtatttatccttcatgggcaacacttgtgaagagcatgaagctaccacaaggaaataagaggaaatattttaccaaagcacaagaagctgctaagaaggacattgaacaaccatttggagtgcttcaagctcactttgctattacccgtggaccccctcgtttttggaggagggggtgattggggcacgtgaggcacgcatgtgtcacgcctggaaattcccgaatagaatttcaagcagaatgtgaccggccaggcagacacaagagaggagctggtactgaataagaaaagtatgacagcaaccccacaggctttaattacaagtctagtcccacaaaaataaacagcaattcaacccattaagcaaatcatggagaagcatcaacatgtttcccagctctagtctgggaagtca

SEQ ID NO: 83196 - DNA, 175 bp, Oryza sativa
  Clone ID: PAT_MRT4530_82551C.1
tctcctctcgtccgattttttaagtgttcctcgggttggttcaatacacatggggtatgggcacattgctattaactctaagagcaagataagggctaaagatcaaataggttccagcaatgccaaatatttcaccatgttacaaacaccaagatcgattaaaggttctaaggat

SEQ ID NO: 83197 - DNA, 782 bp, Oryza sativa
  unsure (1)..(782): unsure at all n locations
  Clone ID: PAT_MRT4530_82552C.1
ccnncnnctttgtgagatggngnttatncattcgaatcnggtgcctcgcgccaaattccattttaagtttatngataccntcaaactccagtnnctngtannttngatncntcaaanaggttcccctagcnncnnnattagttgatngagtnnttcanannctntaatngcnactnattnggnacatggtaancatctcttannacctttcnnantcgaaaggtatatgttcgctttttcaccnganattnaggaactaggtgacnccnagaagaactttagaatcnagctcgtgccnaattcagcacgaggttaaatgcccgtntaattgattgggttctctcntgtaatagtngtttaaaattgagaccntntgatggcccatctggaaacngcacccccccgcnaaattggtcncattaantaagttttntcccctnccnncnnntnttcntnccccncccncccccccttnccntttnctnngtnnnntntttcnctccccgggggggnnncngtcttctccntnntgctctnctcccncctnnntncnaccnccgngnngttcccntttncncnngggggggggggggggggaacccccctccctncctngnntnttntcttntctncgcggnggggnccnctatnatnanncntntnttttnntggaaannacgcccnncnnncctcncntttncgcnctttgnncttccccccctcccctcccntncncggtgtttnttanaaaanaangcncnnctccgtttcccccccntnnn

SEQ ID NO: 83198 - DNA, 325 bp, Oryza sativa
  Clone ID: PAT_MRT4530_82553C.1
cccgaaaaaatatttactggatggttgggagcacaaattataccatccatagcacaagccataagttttataatagcatacaaaacctggacataaacagccctaaaaaaaaagagaggggcttctgtccctccatttcaaagctttattacatgctaaaaatcgaggggggggaccgatactttagggccccaagcaccggacaagggaaaaaacatttgtacgggagcagggagcttgtaatcaccaaaaataattttgacgggcctactaagcactttatactaatttatggggaaaccatgttcctttgatgggggcacaa

SEQ ID NO: 83199 - DNA, 439 bp, Oryza sativa
  Clone ID: PAT_MRT4530_82554C.1
ccatgtacgcctgtatggatacatggtcggagatcggcttggcacagagaggcgcagccgatggcaacggaggccggctcgatgcgagaggcgcgggcggcggagatggaggctggcttggcgcgagaggcacggccggcagtggaggaggcgacctaggtgtgaggaggagctgccagtgggtggcgcggtcttggacacacgaaggctggccggcaggggatgccggtgcaggggtcccacatgttggcagagcttgtgtggtggtggagcatcggtgcgtcagccgtgcattcgcaggtgtggaggtcggtcacgcttagcggcggtcggtccggtgctaaccttctcctgggcttgtgtgttggcgatgtcggtatgtgggtggtggtatttttttcctttcgcctggttacgaccctctagggttgtaatcttg

SEQ ID NO: 83200 - DNA, 2742 bp, Oryza sativa
  Clone ID: PAT_MRT4530_82555C.1
atggagacatggttgggttgtttctacagcaaggagaaagatttgagtgataggggccagtggctgaatgtgggaggagaggagccggtggtctcctactacttctccccagccaccgggactgggactaggaggcggtggagattggaagcgtcggcagtggggttggggagagaggaaactgaaactaaacttgataccatgatgggtgtattcgtgccatgcctgcagaacatcttgggaataatctattatattcgctttacttggatcgttggtatgggaggcgtatggcagtcacttgttttagtcgcattttgtggttcatgcacatttttaactacgatatcattaagtgcaattgcgacgaatggggcgatgaagggtggtggcccttactatctcattggcagggcacttggtccggaagttggagttagtattggattgtgtttcttccttgggaatgcagttgccggagctatgtatgtgctgggagctgtcgaaacctttttggatgctgttccttctgctgaattttttcaagagagtgtaacagtggtcaccaatacgttcgtaaacggtaccgcagcaggcaatgcaacaactatctcaacacccaacttgcatgacctccaggtctacggcatcatcgtgaccatattgctttgttttattgtatttggtggcgtcaaaattatcaacaaagttgcacctgctttcttaataccagtgctcttctcaatcctgtgcatttacatcggtgtctttattgcaccaaggccaaatgcttcaaagtggataactggtttgagtataactacattgaaagacaactggagttcagactaccaacgaacaaacaatgctggagttcctgatccaaatggtgctttgttaggtctctacttcccagcagttacaggaatcatggctggttcaaatcggtctgcttcactgaaagacacacaacgttcaataccaattggaacattacatgctaccatttcaactactatgatgtatctactatctgtgtttctgttcggagcattgtctacaagagaggggcttctgactgacaggcttctatgtgctgcagttgcttggccctctccagcagtagtttatgctggtataattctatccactttaggtgcagcgctacagagtctgacaggggctccaaggttacttgcagcaatagcgaatgatgacattcttcctgtacttaattattttaaggcttatgaagggtctgaacctcatgtggcaactctgtttacaagcttcatctgtattagctgtgtcatcattgggaacttggatgtaattacacccactatcaccatgtttttccttctgtgttatgctggtgtgaacttgtcatgctttctgcttgacctccttgatgctcctagttggcgcccccgatggaagttgcaccactggagcctttctctcatcggtgcattgctttgtattgttatcatgtttatgatctcttggacttttactgtggtctcccttgcccttgcaagcctcatatactactatgtcagcttaaaaggaaaggcaggggactggggggacggatttaagagtgcatactttcaactggctctaagaagtcttcgatcaatgggagcaaatcaagttcatcctaagaattggtaccctattcctctcatattttgtcggccttggggtaaacttccagaagatgtcccgtgccatccaaaactcgcggattttgccaactgcatgaagaaaaagggccgtggtatgtcaatatttgtctcaattattgatggcgactatcatgaatctgctgaggatgcaaagacagcatgccgccaactgagcgcttatattgactataggcgctgtgagggcgttgcagagattatcgtagcaccctcaacatctatcggttttcgcagcattgttcagacaatgggcctagggaatttgaaaccaaacattgttgtgatgcggtacccagaaatctggcgtcgtgagaatctgacacagataccatcaacatttgtcagcatcataaacgattgcattactgctaacaaggctgtcgtcattgtgaaaggactagatgaatggcctaatgagtaccaacgacagtacgggacaatcgacctatactggattgtgagggatggaggattgatgctccttctgtctcagctcctactcaccaaagaaagcttcgagagctgcaagattcaggtcttctgcatagctgaagaagataccgaggccgaggagctaaaggcagacgtcaaaaagttcttgtacgatcttaggatgcaagctgatgtgatcgttgtgactgtgaagtcatgggaagcagacccagatcgcagcggtggctcgaagaaggatgaccctgaggtgtacagaagcgcgcagagcagaatcagaacatacatttctcagctgaaggaagccgcggaacgcgaacgccggcccctgatggagggtggcaagcaggtcgtggttgatgaacagaaggttgaaaagttcctctacacgatgctgaagctgaacgctactatccttaggcactccaggatggcagtcgtggtgctcgtgagccttccaccgccaccactgaaccacctggcatactgctacatggagtacatggatctgcttgtagagaacatcccgaggatcctgatagttaggggatacagaagagatgtcgtcacgcttttcacatga

SEQ ID NO: 83201 - DNA, 159 bp, Oryza sativa
  Clone ID: PAT_MRT4530_82556C.1
atggacggttggatgctggccttctgggctgaatcggacggccacgacgaggaaagcgaggcatcagcccaggcgctggaggcgggtatggagggcggcgacggcggcggagcggaggaagaggagttcacctccatagatatagacccgcggatgtag

SEQ ID NO: 83202 - DNA, 510 bp, Oryza sativa
  Clone ID: PAT_MRT4530_82557C.1
atgcaagcttttagcagtgtgccgcaacaactagccatcctcgagccatacattgagggacacatgaacgagataagagcatgcaaccctagaagaccggcgacttggatctcaaaggaacagaagcgcaaatttcctgaatgcctgaaggaaaaaacatgtcgttcggtgaatcgcttgcacaggttggcaactggcccaagtagcctcatgaactcatggcaatgtaaactaagccacaaggatgatccatgcgttctcgctgaatatgttggacaggttttctatgtgaaggacccatccaacgagcggatggacattactgtagtgggaaagcaacacattattggcatcgataacactaaagacgtgtcagattacaaccaatatgacgacgtcccattattcacagatattcctaaccagatcaagcgaattgagacaacccttgacgaagagaagttttcgtctgtgcggaaggatggtgctgcgaaaattgtgaaacattag

SEQ ID NO: 83203 - DNA, 162 bp, Oryza sativa
  Clone ID: PAT_MRT4530_82558C.1
cggacgcgtgggcggcctccgcgtgtttatcgacctgtgatttggtaggcatcatactgcacatttcaaatatgagcaacattgctttcccaaatatagttgaaacagtttcagtgatgtcataatagactattgcaagagtactgaatccttattatcgtc

SEQ ID NO: 83204 - DNA, 1557 bp, Oryza sativa
  Clone ID: PAT_MRT4530_82559C.1
atggccgagcttcctctctatctacttctccttgctctgctggtcgccgtccccttcctctgcctgacccgttggtcgctccggcatggcggcggcggcggcggccggctgcctccgtcgccgtgggcgctccctgtcatcggccacctccaccacgtcgcgggcgcgctcccgcaccgcgcgatgcgcgacctcgcccgccgccacggcccgctcatgctgctccgcctctgcgagctccgcgtcgtcgtcgcctgcaccgcggaggccgcgcgcgaggtgaccaagacccacgacctcgccttcgcgacgcggcccatcaccccgacggggaaggtcctcatggcggacagcgtcggcgtcgtgttcgcgccctacggcgacgggtggaggacgctccgcaggatctgcaccctcgagctcctaagcgcgcgacgcgtccggtccttccgcgccgtgcgcgaggaggaggtcggccggctgctccgcgccgtggcggcggcggcggcggtggcggcgttgacgaccccgggggcgacggcagcggtgaacctgagcgagcggatttcggcgtacgtggcggactccgcggtgcgcgccgtcatcgggagcaggttcaagaaccgcgccgcgttcctgcggatgctggagcggaggatgaagctcctgccggcgcagtgcttgccggacctcttcccgtcgtcgcgcgcggcgatgctcgtcagccggatgccccgccggatgaagcgggagcgacaggagatgatggatttcatcgacgacatcttccaggagcatcacgagagcagagccgccgccggcgccgaggaggacctgctcgatgtcctcctgcggatccagagccaagacaagacgaatcccgccctcaccaacgacaacatcaagaccgtgatcatcgacatgttcgtggcgagcagcgagacggcggcgacgtcgctgcagtggaccatgtcggagctgatgaggaaccctagggtgatgcgcaaggcgcaggacgaggtccgacgagccctcgccattgccgggcaggacggcgtcaccgaggagagcctgcgcgatctcccctacctgcacctcgtcatcaaggagtcgctccggctgcacccgccggtgacgatgctgctgccgagggagtgccgggagacgtgccgggtgatgggcttcgacgtgccggagggtgtgatggtgctcgtcaacgcgtgggcgatcggcagggacccggcgcactgggactcgccggaggagttcgcgccggagaggttcgagggcgtcggcgccgccgacttcaaggggacggacttcgagtacataccgttcggcgccgggcggcgtatgtgccccgggatggcgttcgggctggccaacatggagctcgcgctcgccgccctcctgtaccacttcgactgggagctgcccggcgggatgcttcccggcgagctggacatgacggaggcgttggggctcaccacgcggcggtgctccgacctcctgcttgtccctgccttgcgtgtgccgctccgagaccatgagcgatag

SEQ ID NO: 83205 - DNA, 423 bp, Oryza sativa
  Clone ID: PAT_MRT4530_8255C.1
atggagaaggccagctttgaaagcgcgggaaagataaagaaatggcattatttatcttttatggccgttcgctgccgcaagggcacagccacaagtgaccaccgccaccgcctcctccgcttccccgcccacccgccaccgccatcgccacgcctcaacaccgccggcaaggtttgggctgacaccggcggttgtcgccacggccgcgacagcggcggaggtggcatcgagagctcctactcatgcgtcgcctccgtcctcaacgtcctcggatggcaccgccgtcgccgcctggacaccaggaatttgatggacaagcttgtcgcgcggtacccctccccgaggtcgctggccaccttggctgttaaggtcaagaagaaggattggaagttggtgaccgtcgcggtccacggaggggactaa

SEQ ID NO: 83206 - DNA, 1431 bp, Oryza sativa
  unsure (1)..(1431): unsure at all n locations
  Clone ID: PAT_MRT4530_82560C.1
ttcaggggtgcgccacgcggtcgtgactgacaaagctagctagctcgatctcgccggaaatggcagctcgcgtcatcctgctcctcatcctcctcatcgcctgcgtcgccgtcccggcggcggcggcgttcgagacggtgtacgcgttcggcgactcgttcacggacacggggaacacgcactcgacgacggggccctactccttcggctacgtgtccagcccgccgtacggcgccaccttcttccaccgctccaccaaccgctactccgacggccgcctcgtcgtcgacttcctcgccgaccgcctcgcgctgccggggttcctcccgccgtacctctcccccgccgccgccaacgccacccacggcgtcaacttcgccgtcgccggcgccacggccatcgagcacgagttcttcgcgaggaacaacctcagcgtcgacatcacgccgcagtccatcatgacggagctcgcctggttcgaggcgcacctccggcggtcgcccgccgccgccagggccgtcggcgacgcgctcttctgggtcggcgagatcggcgccaacgactacgcctacagcttcatggccgccaccaccatcccccaggaccaaatccggaacatggccgtcgacaggctcaccaccttcatcgaggcattgctgaagaagggggccaagtacataatcgtacaggggctacctctaaccggttgcctgccactgaccatgacgctggcccgcccggaggaccgcgacaacatcagctgcgccgccaccgtcaaccagcagagccacgcccacaaccgccgcctccaggccagcctccgccggctccggcggcagcacccggccgccgtcatcgcctacgccgactactacgccgcccacctcgccgtcatggcggccccggcgaggtacggcttcacggagcccttcaagacttgctgcggcgccggcggcggcgcctacaacttcgagatcttctccacctgcggctcgccggaggtgaccaccgcctgcgcgcagccggccaagtacgtcaactgggacggcgtccacatgacggaggccatgtacagggtcgtcgccggcatgttcttccaggacggcaggtactgccacccgccgttcagcaccttgctcgccaggcggaacaaaggcaattaagcaagtgatcatatcttttctgccattaagcaatattgatcagtgttgttgtctctttagtagctaggtgatcattgatcagcattgccattgaagtattgaactgaattttgagcagcatcaagtattaagctcntcattcttgaatcattttgtgacttgtgtcagccaggcataccatgtgccattattgtcgacgacagagcattcaataagaagaaacctagagttttaggtgaagtttccacttgaaaaaaaaaaaaaaaaa

SEQ ID NO: 83207 - DNA, 375 bp, Oryza sativa
  Clone ID: PAT_MRT4530_82561C.1
atgcctgtaaaggatggcagcggcggggtttcttcccccctcggtgccgctgcacggctagggaccaagacacgctttggaggtggagagtcgccacgccgtattgatccgagcctgcatggctggatccggacaggaagagactggcaagcgtccgtggaggtgctagcagggtggctggcggcggtggaggcggcggccctcggcagatctagcgctccggcgctccactggcctgatccggtgccctcttccatctccggcaagggatgtcggatcccctcggtggtgacgtcaaaggaagctttggcagcggggaagagtgcgaggaggcgcgcgacgggcaagaccagcgggcggaggtgccaacgctga

SEQ ID NO: 83208 - DNA, 639 bp, Oryza sativa
  Clone ID: PAT_MRT4530_82562C.1
atgaggaccctacccgtcagcccctcccctctccttttcctcctccggccgtcacagcctccttctccaaatcttagcgacgaaatcaaccagcgacgcggcaacgtcaatcgtggcatcggggcatcgaaggtggacttcgcagggattaaaaaaaaaggagacaaaggtgagaccaacctaacgatggccacggctctggcgagaccaccctgcgtcagtgttgaggttcggctggtggtgatgaggtcgacggcggtgtcggtgttgacctctcccttgccttcgttggcactgagcgaacgcaaggccgccccgtacgccgccgcaacaagggaggaggcgatgacgaggacaggcactaggacaacacagtgcgccatcgccgccatggatcaggtccttgctcaccttaccgcaggccgctcctccccgtgcacctcctcaccgtcgagagctgcgcgaggtccgcctccgacggcgccgccgatgctagcttgcttccgctgccaagatctagagaaggatgagacttggcagccggaggaggagcagaatgagcgagaaggggctgacgggtggggtccatgttgtttttcacgcgggcacgccacgtatgtaaaagtggaaaataattaa

SEQ ID NO: 83209 - DNA, 232 bp, Oryza sativa
  unsure (1)..(232): unsure at all n locations
  Clone ID: PAT_MRT4530_82563C.1
gggtttaacgcccacccacagtttcacacgcccgcggtcttcgtgaaatggcccacgcccgccccactttgtaagactanacttcttcttcttctcccacttcgccctctcgattgtgaccacataggcttgccacacagattgtacgatgctgtgatgaatctgatatgatccactccagaattcagaaactgaaaaaagttggggtttgcaaaaaaaaaaaaaaaaaaaa

SEQ ID NO: 83210 - DNA, 2043 bp, Oryza sativa
  Clone ID: PAT_MRT4530_82564C.1
gcaggcaagcaaaaacaaaaaacgccttctctgagttcgttagccatgcctctcatgcttctcaagctttgtctccggctgctgccgctcctccttgtcttggttgccgcttcccatggcgcttccaatgacacctacgacacctccatgtgcctgcaggaaacaaccacctgcggggatgtcagtatcagatacccgttctacttttctgataagacgggatatatcaacgggtccagcaactcatactgcggataccccggcctggcgatcgattgtgacgacggcaagcccatcctgcaactcaacggcgccgagaagtacaaggttaactacatcaacgttgggagcatcaccaacgtgtccctggtcgataaggaggtcgtcgacgacagcagcggctgcccaagagtcgatcacaacgtgaccttcgcacagggctcatggctgttcttccctgctggcatgtcgttggattacctcgtcttctttctcggctgctccttcccgaatctcttcctcccaccggaaaacatcgacccgatcacctgcagctttatcggtctcattggaccgtcctacgtgcttccgaaggatcaagtgccgcctgggaactggtcgcagttttgcaaaaccttcgaagttcctgtggtcaaatatcaacagatggacccaaaaggtgacgcatggaggaagggtggatacggccaggttcttcgtcagggattcctgttgtcagtgaacgatagcaggaggccccccaattgtacgcagtgcgaggagtccaaaggacgggtattcaagcttaaaggggagaatgaaacttttctgaagaagtataggcacagaaggatttcaaagggaacaccaaggattgagtccttcctacaaaggaatggaaccttacatccaaagagatacacttacacagaagtaaaaaggatgacaaaatcttttgctgaaaagctaggtcacggtggatttggtgctgtttacagaggcaacctatctgatggccgccaggtagcagtcaagatgttaaaggactccaagggtgacggcgaagaattcatcaatgaggttgctagtattagtagaacttctcacgtcaacgtggtgactctgttaggattttgcttgcatcgatccaaaagggctctgatctatgagtatatgccaaatggttcacttgaaagatatgctttccgcaataactccaaaggcgaactttcattaacttgggagaaattatttgatgtagcagttggaattgcccgagggcttgagtatcttcaccgtggatgcagtacccgcattgtgcatttcgatattaaaccccacaacattctactagatcaagaattctgccctaagatctcagattttggaatggctaagctttgtgctaacaaagagagtatcgtctccattgctggtgcaagaggaacaataggctatattgccccggaggtctattcaaagcagtttggagcaataagtagcaagtctgatgtctatagctatggaatgatgatccttgagatggttggggcaagggagaggaacatagaagccaatagtgaatctagtagccactatttcccacaatggatttacgaacatctagatgaatattgcatcagctcttctgagattgatggtgagaccacagagcttgtaagaaagatggtagtggttgcactatggtgcatacaagtagttccaactaaccgcccaacaatgactagagtcgttgaaatgctagaaggtagcacgagcggtctggaattgccaccaaaagtgctattgagctgttcagctttctaaaaattcttgtatatattagaaatcgcaacttaattccccatttgcgcagcaatgcagaactacggatacttgaactttaaaatggatatcgcagtttcagagtcagagctaaactaaaaacacaacaatgtcgaccctctctttgtaagaagagattgactgtacgttacaaattcatcggttggctatggtttccaaaaaaaaaaaaaaaaaaaa

SEQ ID NO: 83211 - DNA, 421 bp, Oryza sativa
  Clone ID: PAT_MRT4530_82565C.1
ttcacttttgtagccatggaccgatattagatgtacgaaattgatcgacatagcaaagagtatagaagtggcattgcaaattttataaacgtggcggagaagaggaaaagaaggaacaatgatgacatgacttgtgatgacacgacttgtccatgtccagattgcaaaaatgagaagatgttgatagcagagtagatatatactgtcatatgatacgtcaaggattcgtgaagggctacacatgttggacgaagcatgcagagcaagaatcaatcaatattgcagatgcagcgagtagtggtcaaaatcagaaagaagatgaagctgacatgtttgttccttctctgttgggcggtgaaatggttgatgtcaatcacgatcttctacaagcaatattgcatgatgttgaggagtcagctcg

SEQ ID NO: 83212 - DNA, 254 bp, Oryza sativa
  Clone ID: PAT_MRT4530_82566C.1
atggtgggttgtgaacacatagttttgatggtcgtgcgcatgacaattaaggaccggttcacgagtttcggttgtgaaacattaaccgtgccaaccacaagccagcatgggcaacggctttaccttttgtatagcatggttcattgcggagcactagactaagaagtggcggagataagctcacgggggtcgctggggagtccatgccttgttttataagggggtgattatgatccaggaacggtacactgctt

SEQ ID NO: 83213 - DNA, 576 bp, Oryza sativa
  Clone ID: PAT_MRT4530_82567C.1
atggcggtgtccatgtacattgctatcattatgaacattcaggagaagcacgggagggcagtcaagcactgcaccttcctcacgcttaatggcatcatcatatgggagaagcacgcgaggcacgtcaagcgctacaccttcctcacgctacatggcatcatcatatgggcaaggtgcttatcatcgctaagcagctcgatacacgtcaatgctcggaacgtggaggccatgtacaccgctatcactatggtcgtccaggagatgcacgcgaggcacgtcaagcattacaacttcctcatgttgcatggcctaatcatatgggcaagggcgttcttacctcctggccttccctcatcggggattgcacaccacggagcccggcacagtagctttagactgtgccgtagccacacccaaacccgcgccaccgccgccgccgtgggagcagctcgaccgttcgaggaggcggcgatggagcacgggacagtggaggactcgagcgcgtcgacgttctccatcgcggaggaggaacacaccctcgccaaccccgccagattcgtcctcaaccaggagtga

SEQ ID NO: 83214 - DNA, 684 bp, Oryza sativa
  Clone ID: PAT_MRT4530_82568C.1
atggccttgctgggcccgttgaagtggtttgctggggaaaaagtacttggattacctcaactatcgcccaagtatgattcatatcctccaaacacagaaccgggagcggcggcagtggcggtggggactaggcggaggggagtggtggcggcggtggcggtggggacgaggcggaagagagcggtggaggtggggagcggcggcggtcgggatgaggcggaggggagcggtggcggctgggagcggcgacggcggcggtcgggagcagcggcggtggtggtggggacgaggcggaggggagcggcggcggttgtggtggtggggagcggcgatctggcggaggggaggggggtcttcggccggcaaccatggggacgacggctggagaggatggtggcgtcgtcggcggtggggaggcatgggggcggcggatccggcggcacgcggcccctcccctccctctcccttcggctcccctcccgtcgtcggcggtgggaaggcatgggggcggcggatccggcgtcggtgacaggagcgggcagcggatccgatgtctgggagaccgtcggtgatgggagcgggtggcagatccggcgtctgggagaccgtcggcgacgggggcgggcggcggcggcaactggattaggcatcactgatctgatcatggtcattgaagcgaactga

SEQ ID NO: 83215 - DNA, 401 bp, Oryza sativa
  Clone ID: PAT_MRT4530_82569C.1
ttttgttaccccgacaccgagcgagagagagagatcgtaccgatcgatgtacggcacgagacgaccatggcgcgtcctcggttcgtcaccacggcgctattgttggcgctggacgtcctcgccgtcgtggtgctcgtggttgtcgcaacaagtcccgtcggcttggacccgggaagatttcaaggaaccgggcgcgattactagggcccctgtcgtgccggctggctgaccaacggctccaaaagcatcccaggggcgacggtgtaggtggagtgcatgcactacggggcggggagggagagcctgaacgcggaagcgactacggactagatggggtggttcaaggtggagatcgaccaggaccaccaggaggagatctgctaggtggagcccggcaagag

SEQ ID NO: 83216 - DNA, 284 bp, Oryza sativa
  Clone ID: PAT_MRT4530_8256C.1
catatgttgttttattaaattaatatttacagaacaaaaagtataaaatgtatagtagcatcaaatgcagagtacaggaaggttaaagttctctggataaggaagcaagctttaacatgtactttgcgcacatatatacagaaattggaaaagaaattcccatgacgacgggcttgaaagttctgagaagaaaaagccggtggcctgctttaggatacgcccgcccagatgacatatgtcacaaagaggcaaaaactgagcccaatacgaagccagaagaaata

SEQ ID NO: 83217 - DNA, 168 bp, Oryza sativa
  Clone ID: PAT_MRT4530_82570C.1
atggcggaggaaaataggggcaacgtgggcatcaactcctcgttcctcctcacggtgtacctcgagacaccacaactgtctgatccgccagcttctgacgtagtggagcggaggcccgtcgccgggaggcttgggccggagcgtatatatacctcttatgggatgtga

SEQ ID NO: 83218 - DNA, 2406 bp, Oryza sativa
  Clone ID: PAT_MRT4530_82571C.1
atggtggcggcgatgatgatctcgccggaggacgttccatacgaggaggacgtcctgcgcgaaccgttccggctacggtgctggacgcgctacctgtcggccatccgctcggcgccgctggcgaagcgctcggtcatctacgagcgcgctctgcgggctctcccgggctcctacaagctgtggcacgcgtacctcacggagctcgccgacgccgcgcgcgccatgcccgtcgcccaccgcgcccacgccgccctcaactccgccttcgagcgctcgctcgccgcgggcatgtcgcggatgccgcgcgtgtggcacatgtacttctcggctctcctcgaccagcgcctcctcacccgcgctcgccgagccctcgaccgcgcgctccgctcgctgcccgtcacgcagcaccaccgcatgtggccgctcctcctccgcctcgcctccctccccggctgccccgttcccaccgccatccgcgtcctccgccgccacctccaattcgaccccgcccacgccgagcacttcatcgccttccttgtctccgctggccgatggcgagaagccgctgatcacctcgccgcggccgtcaacgatgactgcttcgtctcggccaagggcaggaccaagcgccagctcctgctcgatctgtgccacctgctcgcgcagcacccggaggaggtcgccgggctaccggtcgacgccatactccgcggcagcgtacgcaggttccccgacgaggccggcgcgctgtggacgtgtttggccggccactacgcgcgggtgggtctccacggcaaggcaagggacgtgttcgaggagggcgtcgccacggcgaccaccgtcaaggacttccggttggtgttcgaggcgtacctgcacttcgagaacgccatgattgacgtggagctcggggagcacggcgacgcagaggagaacactctcggtcaaggctgctggctggccgaccgcgacgacggcgacatggcgctcgcgaggctcgagcggcttctggaacgccggccggagctgctcaaccgcgtgcagctcaggcagaacccgcacgacgtgcaggcgtggcacgcgagggccaagctgttcgacgaggaccccgcgaggaaagtagccacctacgtcgaggccgtcaagaccgtcgacccggcgaaggcgacggggaagccgccgccgcacacgctctggctcgcgttcgccaagatgtacgaggaccgcggcctcctcgacagcgcgcgggaggtgttgcggagagccacgcaggcgagcttcaaggcggcggaccacctcgccgccgtttggtgcgagtgggcggagatggagctgagacagcacaatgccaacagggccatcgagctcattcggcaggcgacgtcagagccgtcgctcgaggtcaggaggcaggtcgccgccggcgtcggcgagaccgtcgtccaaacaaagctgcatcggtctctcaagctgtggtgcttctacgccgacctgatggagacgcacgggtcgccggaatccacctgcgccgtgtacgataggatgcacgagctagggatcatcacgccgctgctggtgctccgccatgcttccctcctccaagagcacaagcgattcgaggacgcgttccgtgtctacgagcgcggcgtcaggacgttcaagtacccgcacgacgaggcaatatgggcggcgtacctgacaaagttcgtcgagaggcacggcgcgagcaagccgcagcgggtgagggacctgttcgacgacgccgtccggcatgcgccggcggagaagaaggcggccgtgtacatgcagtacgcgaggttcgaggaggacttcggcctcgccaagcgtgtcctgaaggtgtacgaggaggccgcggccgccgtccccggcggcgacaagctcgccgtctacgaggcgtacgtcgcacgggccaccgcgctgttcggcgtactcaaggcgagggagatataccaccaggccatcctccacggcggcggcctcccggacgcggacgccagggtgctctgcctccagttcgccgacctcgagattggcctcggcgaagcccaccgtgcacgggcgctgtacgtctacgcctccggcttcaccgacccgacggctcaccccgacttctggaggcggtggaacgacttcgaggtgcgtcacggcgacgagtgcacgttccgggagatgctccgcgtcaagagaaccgtggcggccgccaacgccggagccggcgccgtggcgcagctggccgagcaggtcctcgccgacgacgccatggaacagatggacgcggcggtggcggcgccgaagaggcctctgcttgcgtgtgccgctcagcaagccgatcatgccagcggcttcgacgaggaatgcaagagaaggcgtctagtatatgtatag

SEQ ID NO: 83219 - DNA, 261 bp, Oryza sativa
  Clone ID: PAT_MRT4530_82572C.1
atgggggcggcggataggggtgggggtggcgccgaatgggggcggtggcggaagccgaatgggggcggcggcgctgactgggggaggacgaggtgggggagtggcaggggcgggggccggcgccggagacgaagccgatgtggaggcacgctggtgtcgcctctgccgatgccgctcccagcttctccctcctcagtcaacaccgacactggacggctggagagatcgattcgatctgatgataaggacacaagggggtga

SEQ ID NO: 83220 - DNA, 738 bp, Oryza sativa
  Clone ID: PAT_MRT4530_82573C.1
gtcaagcccagtagttatactagataggtgtaatgtatatgcatggcaaccttaattgtgtacctcaattcagatttattccaactatatgtcaaatattgtttttaattaattgggtggtctacttaattatggtgtcccttccagcaatagttattagggcatcatgtttgcaagcaggtgacatacaattcactgctaaagcataaatcacaatatatagttgaaatgtaagtactctccaaccttttcttacaatgcatatttcgatcagatatgtgtgatataagaagattatatggttgagtgaattgtagaaggaaataatcatgatatccttgttaatgccctgtggtattagagaccaaagttagtgacgcagtgtgagtgcttacttgtgaatgttgtagagaaagggaagataactgaggggaaagtaaagtaattaactttgcatgcctggcttatattttgaaacagaaccacaaaaattgtacttctgatttgaagctggaggggagcagttcttatgttacatttgatatcacttgaccaaaatggttctagccttaaaaatattgcatgagttactacactgaattgaatgaaatgagaccatgtagcttgtagatctcaagtaaagatatcatgaatccatggcataacttcagtagcttcatacaggaatcatggactaccattgcaagcagaactaaatgtcctgatgcacatttttat

SEQ ID NO: 83221 - DNA, 301 bp, Oryza sativa
  unsure (1)..(301): unsure at all n locations
  Clone ID: PAT_MRT4530_82574C.1
gaacagaaaacgagcgaaagaggaggagacagcgaaagtgcccgagaataaggacagaacttcaaaaacaacacacgacaaacnaaaaaacaacgacggaatgataaatatgaagaaaaggaacactgaaaaggagggaaaaagacaaggacgacggagcgaaggacggagagaccgccaccaatcaaaaaggacaaagcccaaggaaaaaaagagggggaagaggaaaagaaagagagcacacggaaaagagcccagggccatagaaaaggagcctatcaaaccagaaattagcccataa

SEQ ID NO: 83222 - DNA, 427 bp, Oryza sativa
  unsure (1)..(427): unsure at all n locations
  Clone ID: PAT_MRT4530_82575C.1
caaatccgttgctccccttccatgatcgcaaaaacggattccctacgatctcctctatcttatccaaaaaaaacccccctaaatcgcgtggaatcgacgcggtttcgagctgctattttccggtgaaccctaagctaaaccgcctccgattcccctcaaatccgcaccgatctctcccctcctccgattctctttcccctcctttgctcgagctcccgtgccctagccgccgcctctccccgcgctagcatttctctcttgccgccggcggtcgcncctgccgcccctagccgccgcctcggccgacgtactcctgcggcgcaactcccacggctccgcaaggccgagctctaactcgtccaaccgttcttttgcgcggaagcgcgtaacgtgaangccgagcgtcgcgtgttttgatttcggggaa

SEQ ID NO: 83223 - DNA, 208 bp, Oryza sativa
  Clone ID: PAT_MRT4530_82576C.1
tcggaggaggaagagaagggcggcggcggcgagcggagatggtgaggaaggcgaaggtcgagttcgacgagagcgcgcctgatgacttcgacccgaagaacccgtacggcgaccctgtggtgatgctggagtacagggagcacctgttgagggagatgtagatccttatcgaaaccagctagatcatccttgtacgcctgcgctaggg

SEQ ID NO: 83224 - DNA, 1946 bp, Oryza sativa
  Clone ID: PAT_MRT4530_82577C.1
agaaggatttgcagccggaggaggagtcgcgtccgtcgccgccgccgccgccgccggcgaagggttcgttgtgtctgccggcggcgtgccacgaggacggcgtcatcccggcatttgtgatcccgggcagcaagcatcgcgacgggtccatctacaggacggatgcgcactactggcacggcctctaccacctcgacgacaccagcgaaaagcaggactgcaagccatgcgtcgccgattgccagtggcacattggtggctccatgatgcagatcttctcccttaagctagctgaaatctctaatttcgccaccagagctcctggtgccggtgctattcagctgtatgggttcatggctgtccggaatctcttggacccattgcgaaactacgtcttcaaccgcaccagggacaatccgttcaccatcggcgacgtctcctatccgttcatacagatgactggccctaagaggggcatcgcgatgaacgctcgcgtgatgatcgagtacgacatgaggatcaagatgggggagagtgagcaagatgatctgttgcttgtcgacggggctgccaccttcagcgagataacgaatttcataccatacatttatcgcatcaatggtgattgcggcatggcggtggacataaggctagcacacttctcccgtgcaattgaggccacggcgcaagtttggtactgccgtgctcgggccggcccggcttggcacggcccatttggccaggtctacgcaggggtcagtggcggctgggctgatgtggcgtcggcggtggtgatgggtgggtggaggaggagcgattgccggcggccagcctccgacgatcacgaggggacggcggttgccagtctccctagctccaggaagaggaaggcggctaaggatttagaggaggaggaggaggatttgcagccggaggaggaggcgcgtccgccggcgccgccggcgaagggtcggtcgtgtctgccggcggcgtgccatgaggacggcatcatcccggcatttgtgatcccgggcagcaagcatcgcgacgggtccatctacaggacggatgcgcactactggcacggcctctaccacctcgacgataccagcgaaaagcaggactgcaggccatgcgtcaccgattgccagtggcacattggttgctccatgatgcagatcttctccctcgagctagccgaaatctcaaatttcgccaccggagctgctggtgccggtgctattcagctgtatgggttcatggctgcgcgggatcttttggacccgctgcgaaactacgtcttcaaccgcaccagggacgatccgttcaccatccgcgacgtctcctatccgtttatacagatgactggccctaagaggggcatcacgatgaactcccgcgtgatgatcgagtacgacctgaggatcaagaggggagagaatgaacaagatgatctggtgctcatcgacggggctgccaccttcagcgagataacgaatttcataccgtacatttatcgcatccatggggattgcggcatggcggtggtgaatgaaatgtgggcgtcttgggaactaccggagggctcaatttctgctggagctgttttgaattgcaagctctatgacttctgtggtgaagagagagacctttctgagatggatgctgctcatctgataagagaatttgatattactgagcttgacaaggcaggttcatacttgaaggatgtgttattctacatgagccaaaagcgccaatatcctaacagggctggtcccacacctcttccctgggggattgactcacctacaaatgcagatgatacagtgatttttatcccataccttgctgtgaccaagttccttctttactgctttgaggacatgtctggtctaaagattaactatgataaaggcaaggtgtttgctgtggggttggagtaa

SEQ ID NO: 83225 - DNA, 246 bp, Oryza sativa
  Clone ID: PAT_MRT4530_82578C.1
atgccttaccgcccctggcctacttctccaccgcgtctggcggcgtgggagaggaacaagggaacgacagtgacgcgggagaggaacaattccagcggcgccgcgggacaaaactggtaccccgcgataccaatctctgtggccatgtggccattggagatttgtccggatccaacagtcaagattcgataccgcaaggttgttgcaacttgcaagtacttgaacagggaaattaagttgatttaa

SEQ ID NO: 83226 - DNA, 647 bp, Oryza sativa
  unsure (1)..(647): unsure at all n locations
  Clone ID: PAT_MRT4530_82579C.1
caacttggtacgatatccatggataaagttaccccatcaacaattgttggcccttcaccagttgcaggcattacagttgacaaatcagtagagttctcatatgaagaactttctaatgctacacaggggtttagtattggcaataaaatagggcaaggtggttttggtgctgtctattatgctgaacttagaggcgagaaagctgccatcaagaaaatggacatgcaggctactcatgagttccttgctgaattaaaggttttgacacatgttcatcatctgaacctggtgcgtttgattggttattgcatcgagagctctttgttccttgtctatgaatttatcgagaatggcaacttgagccagcatttgcgtggaatgggttatgaacctttgtcttgggctgccaggattcaaattgcactagattcagcaagaggtcttgaatacattcatgaacatactgttccagtatacatacatcgggacatcaaatcagcaaacatcttgatagacaagaactaccggggcaaaggttgcagattttggtttaacaaagcttacagaagttggtggtacatcaatgcccacaggcacacgtgttgttggtacatttggttacatgcctncagagtatgctcgatatg

SEQ ID NO: 83227 - DNA, 376 bp, Oryza sativa
  Clone ID: PAT_MRT4530_8257C.1
tttgttctgctccggacaccaactatgacccggctggggctatgtatcccccatcgcctcctccaaggcgggggatgaggatcggaggcagcgacacgggaccgggtagaggatgcgccggcagaggcggaggcgaggcccataagttcgggcgcgcgccgaagaagagggacatcaccaagaactacgagatcctgggggtccccaagaccggctcctaggacgacctcaagaaggcggaccggatggccgtcatgaagaaccacccctacaagggcggcgaccccgagaagttcaaggagcttgcaccagcttatgaggaactgagtgacccaggaaaacccgaaacctatgaccaagatggtgaaaatgccct

SEQ ID NO: 83228 - DNA, 765 bp, Oryza sativa
  Clone ID: PAT_MRT4530_82580C.1
atggccatgtcgtcgcggctggctctgtgcctcgcggtggtcgcggcgtgcgcggcgggcggcgcggtggccgactggtcaccggcgacggcgacgttctatggcgggagcgacgggtccgggacgatgggcggcgcgtgcgggtacggcaacctgtacgaccaggggtacggcgtggacaacgcggcgctgagccaggcgctgttcaacgacggcgcgtcgtgcgggcagtgctacctgatcgtctgcgacacgagcagggcgccgcagtggtgcaaggccggcacggcggtgaccgtgacggcgaccaacctgtgcccgcccaactgggcgctcccgagcgacggcggcgggtggtgcaacccgccgcggccgcacttcgacatgtcgcagccggcgtgggagcagatcggcgtgtaccaggccgggatcgtgccggtgctgtaccagcgggtgaggtgctggcgccagggcggggtgcggttcaccgtcgccggcctcaactacttcgagctcgtgctcatcaccaacgtcgccggcagcggatcggtggccagcgcgtggatcaaggggaccaacaccgggtggatccagatgtcgcggaactggggcgccaactggcagtcgctcgccgggctcgccggccaggcgctcagcttcgccgtcaccaccaccggcggccagtacctgcagttccaggacgtggcgccggcgtggtggcagttcggccagaccttctccacctaccagcagttcgactactag

SEQ ID NO: 83229 - DNA, 978 bp, Oryza sativa
  Clone ID: PAT_MRT4530_82581C.1
atggagctggagctgaagctgtgccagtgccaaacagggctgcagattggaagagatcggtctaacgagcaggcggacggacgtctctggcccacgcgaatagtttgtgacagcccatcctaccaggagaaaaaaggcaacgcaacagccatcaaccacgctgcgccgcccgcgatctccatgccgatcatcaccggtgtctccctgcgattttcctgcgggggcaatccaccccggaatcttcacccgtgggggccggtcggacccgggcttctcggatcggtgcagattggagctttcactgacggaccaccgtgggcagcctgtgaagcaaattactcatacatatatgttccttacaccttggacatggataacatcaggggggcgacgtgctcaccggccggcggccgcctccatgatgctaggcggcgatctcatccccgcgtcggccgtgtttgtcgctgtcgtcggccgcgtttcgatcgtcgtgcacatggtcacccgagttctacggagtttctggttgctcgcgggacaccattgataggcatcttcatcatcaccgccggcatgcctcgccaccgccgactagtgtcctcgtctataccgttggatggtcacaccaccgttgatggacgtatttgctttcactgccggcttgcctttgtcgccgtcgattggtgtcctcgcctatacggttggttagtcacaccgccattgatgggcgtctacgctttgaccatcgactgccttcaccgccgccaaccagtttcctcgcttacatggttagttcgtcacaccaccattgttgggcatctacacctttaccgccgcccgccgtcatcaccgccgaccggtttcttcgcctccacacggttggtgtattccgccgccattgctgatggtgaccatgtcctcactatcggctgtcgtcaacgcctgtcacgtcccaaaacgactctaaaatatatcctt

SEQ ID NO: 83230 - DNA, 456 bp, Oryza sativa
  Clone ID: PAT_MRT4530_82582C.1
atgggccatttcctgggccggaagacttcgccctgcaggatgtgggcccaagacgacgacggtgacgggttcaacgaggagaaggacgagcacctcaccatcgctgccccgcccccgtttccaccgtcctccgcgctgcccaccgacctcgatgacgtcctcttcttcctcctctctccagaaacccacgggtcacgggaagttatgcggccgacggcggtggcggcggcagacctgccgacgccgtggcccgtggtgttcgacggcgtcctcccgtgggctgccacagcggcggccgagctcagcatctgcctcgtcaacggcgtcagcgacgatgtcctgaagcgcggacgcggcggggaagccctcacccggttcccgcacgagcaggtcgcagagctcggcatggggctcgctgactccggcgtgaactttgtgtggggtcgtcggggataa

SEQ ID NO: 83231 - DNA, 215 bp, Oryza sativa
  Clone ID: PAT_MRT4530_82583C.1
gccatccggcgagcccactccggccacagccttcctcgtcgcctccggtcttcatcggcgggcggccgccggcaaatgccaccccaagttcccagcgtccgagccagctggcccagcgccgccaccaaggcgtcgcccgccggagggacaacccgcaagttcatccctccttgccggtctcgtctccctccacggccgtcccgattgacgacgag

SEQ ID NO: 83232 - DNA, 288 bp, Oryza sativa
  Clone ID: PAT_MRT4530_82584C.1
aacacaacgggaatcacctaaagtttcctccttccatgtaaaaataaaaggggaaaatttcccttccgttacaatttaaatttggctaaaagaacttctataacctcttgccgggtttaaaattttcccccctttgaattttttccgtgataaccccaagacttaatgcccaaaggataaaaaaaagggtgaaatttcagttccttttcaacaggacccttggaattctccaaggcaccattttttttttctccaaaaaactttttgcccccctccccgttcaccttt

SEQ ID NO: 83233 - DNA, 745 bp, Oryza sativa
  Clone ID: PAT_MRT4530_82585C.1
atggcgttggttccggcaacgtcggatccggcgagggggagctcggggagcgctttcttgtatccacaactcacggccaccaactacactagttgggtgatccgtgtccaggcgatgatggaggaccagggtgtgtgggaggtgattgaaccggcggccggggcggccgtcgaccctcagaaggacaagaaagcgaagtcgcacctgctgcagtcgctgccagaggatctcctcatgcagacgctgaagggcgaattcggcgccatggtgatggagccgggggaaaccctggatcagtacgcaggccgcatcaccacgatgagcgtgcgccactcggcgttgggctcgacgttgagtgatgccgcgatggtgaagaagttgttcgacacggtgccggagaaattcgtcaaccttgtcacagaagctgtgggccggcttaaggcttacgaggaacgggtgcgtaagaagaaggcagcggccggcggagtcaccaccgacgggcaggttcttctcactcaggctgagtgggaggcgcggttcaagaaggatggcggggagtcatcgtcgccccagaaagggaaagcttccggagagggagctaaaggcggccaaagcggtcgcggacgcgggcgaggccgtggcgcaggtgggcgcggtggcgccgctcgcggcaactctgcaagtggctcaggcggcggtggccgtgacaagagccacatcaaatgcttcaactgcgaggagtatg

SEQ ID NO: 83234 - DNA, 159 bp, Oryza sativa
  Clone ID: PAT_MRT4530_82586C.1
gtgagagtgtgagagtacataatagcgcatcatggcattaaggcagctggtactggtgcgtgttcatggagctgctccactggcatggcgcgacgagtatgatccatcggtcagcttctgctggagacgtggatgaactacgctatctaacagtaggag

SEQ ID NO: 83235 - DNA, 234 bp, Oryza sativa
  unsure (1)..(234): unsure at all n locations
  Clone ID: PAT_MRT4530_82587C.1
ccgtactgccggattgctagccgcctcgntgctccggctncgctctccacccatnccgccgccaccnccnacgccgccncntcatccncctctctacccgcgccgtcggcttagctatntctaggaagggaggaganggggccgngtgcgngnncgtcgctcgctcgctcgtctcgncggatctacagnngncgccnccgactccgggngttctctgnttgggatctatctcgt

SEQ ID NO: 83236 - DNA, 891 bp, Oryza sativa
  Clone ID: PAT_MRT4530_82588C.1
atggtttcgctgacatggcgctttgacctagttcaactggctgactcagcatgtaggacccacattgttgacgggcaggacgtaacgttcttcttcggcggacgagaggtgtctggcggtggcgagggggaggacgcaatccagaccagcggcgccggcaagcacgacgcgacgctcttcttggcgggcgaggggaatttgacagcggcaagggggaggaggtcaagcggctgcctaatcgacaaagccaccgacctcctccgcggatctcctcatgccacttgctgcgtcctgcaccacctcaatcctcttgccaaaggtggggtagatcaaggcggtgagcgactcgatccatctgcttcatcccacggcggcgacggaatgcggtcggggagcgctgtgatgtcgccgcgggacaaccacacctacaggaacatctccatccgctttctccaacagcagcaatgggatgtggttggggagcagcatgatgtcgctgacatccgtcgtcggctactacgaggctccctcaccacgaaggccgccgcctcaccacgtgacgcgccgccgccgcgccccgccagccgccgctgtgccagccggccgacccgtcgcgccctgccgccgcgcggccgccagccgccgccgcgccggccgggcctccgcgtcccgccgccctcgcgccggctgccgccgcaggccgccgcctcaccgcgcgacgcgccgccgccacgccggccggaggtcctgccgtgccccgccgccctcgcgccggccgccgcctcactgcgcgccgcgccggccgggcctccgcgcccgaccgccctcggtctgttagagagaaggagaggagaaggagaggaagataaggttgaggagaggaagaaataa

SEQ ID NO: 83237 - DNA, 4083 bp, Oryza sativa
  Clone ID: PAT_MRT4530_82589C.1
atggcgttggttccggcaacgtcggatccggcgagggggagctcggggagcgctttcttgtatccacaactcacggccaccaactacactagttgggtgatccgtgtccaggcgatgatggaggaccagggtgtgtgggaggtgattgaaccggcggccggggcggccgtcgaccctcagaaggacaagaaagcgaagtcgcacctgctgcagtcgctgccagaggatctcctcatgcaggtggcaaagaaacgattggcgaaggaaacgctgaagggcgaattcggcgccatggtgatggagccgggggaaaccctggatcagtacgcaggccgcatcaccacgatgagcgtgcgccactcggcgttgggctcgacgttgagtgatgccgcgatggtgaagaagttgttcgacacggtgccggagaaattcgtcaaccttgtcacaggtattgagcagttttataatgttgatgacatgccattcgaagaagctgtgggccggcttaaggcttacgaggaacgggtgcgtaagaagaaggcagcggccggcggagtcaccaccgacgggcaggttcttctcactcaggctgagtgggaggcgcggttcaagaaggatggcggggagtcatcgtcgccccagaaagggaaagcttccggagagggagctaaaggcggccaaagcggtcgcggacgcgggcgaggccgtggcgcaggtgggcgcggtggcgccgctcgcggcaactctgcaagtggctcaggcggcggtggccgtgacaagagccacatcaaatgcttcaactgcgaggagtatggtcactattccaaccagtgtccgcacccaaagaagaagaaaggagaagcacacttggcccagactgaggacgccggcgccgcgctgctgcttgcggtgaccgagaacgcgccggtgcaagcgacgcaggagatgtttgtgcatgaggatcgtgtgtggccaaacttgctgctggctgatggtggcgcggtggctggaaacgtctggtatttggacaacggcgctagcaaccacatgaccggagatcgcaagaaattcagagagctagatgaatcaataactggcagcatcaggtttggggatgcatcgtcggtgcagatcaaagggaagggatctgttctcttttcttgcaagaatggtgaccaatggcttctccaggacatgtactacattcctagcctctgttgcaacatggtgagcttggggcaactcactaaaacagggcatcgagtggtgatggacgaggatgtcctcgaggtgttcgacaagtgtccttggcgactggtgatgaaggtgaggcataccacgaatcgtctctaccggatcgagctcaaccttgcctatccagtgtccctgctatccagccttgatgatccggcgtggctgtggcatgcacgtttggggcatgtgaatttccaagcgatgaagctgttggtggacaaaggcatggaggtggacgtaccggccatcgttcacccgaatcagctttgtcaggtgtgcttggtggcgaagcaaatcagggcgtccttccctgtggtggtgaactacagggcggaggaaccactggagctcattcacattgatctgtgcgggccgatctcgccggcgacgatggctggtaacaagatcaagcagtggaggccttcaccaagtttcaaacccctggccgagaacgtggccgggcggcgcatcaagacgctgaggtcggatcgcggcggcgagttcctgtccggcgagtttgcacaggtgtgcgaatcggctggcatccagcggcatctcactgcgccgtactcgccgcaacagaacggggtggtggagcgccggaacagatcagtgatggcgatggcgcgctccctcttgaaagggatgagtgtagcaggcagactttggggggaggcggtgcgctacgcggtgtacatcctcaatcggctgccaaccaaggcgatgggtaatcgtactccatacgaggcgtggatggggaagaagccacatttggcacacttgcgtgtgttcgggtgtactacacatgcgaagatcacaacgccacatcttaagaagctggacgaccggagtgcaccgtatgtgtacttgggggtggaagaagggagcaaggtgcaacggctgttcgatccacgtcgcggtcgcatccactggcttggagatgcaggcgagcaagtctccgttgaatttgatgttgaagaaatcgttgagccaccagccggctcggcgacatcgctgccaggcgcgataccgaggtaccaggcgccatcacccggcaaccgtcctggcaaggagccggtggtggtagaagaggaagcttcctctccggcaggcacgatggaggcgtcaccgtcactgccgaccactcctgctacgcctatcggtgaacagagtacaccgcactctgctggcgaaattgacaccgatggtgctcctgttcggtacaggcacattgccgatattatgagagatgcgcccagggtggacttggttgacgatgaacaagatggtgaggcattgcttgcagagatggaggagctgtcagcttaccatgaagcagccggtcacccggcgtgggaggacgccatggctatggagatggatgccattgagtgcaacgggacgtgggaactcaccacgttgccagctggccacagggcaattgggcttaagtgggtttataaactcaagaagaacactgcgggagaagtccaccaccttgatgtcaagtcagcctttcttaatggcgagctagaagaggaggtatatgttgcacagccagaaggttttgtcaagcaaggcagagagcatctcgtgctcaggttgaacaaggcattatatgaactccggcaggcgccgcgagcctggaacattcgcctagatagatgtccgaaacagctcggttttgagcggtgcacgcaggagcaggctgtgtatactcggggcacaggcagtggtggtgtcatcgttggcgtctatgtcgatgatctgattgtgactggtgaaaatcctgttgaattgaagatgttcaaggaacaaatgatgggggagttcgagatgagtgatctcggtctgctctcgttctacctcgggattgaagttgatcagggagaaaatggaaccacgctgaagcaaactgcctatgccagaaaagtgctttctcagttcgggatgctggagtgtaattcaacctcaattccgattgatccaaggatgcagctgaacaaagtcgcagatggtcacccggtggatgcaactgagtatcggcgagtgatcagttgtcttcgatatctgttacacacaaggccagatctttcctttgctgttggagtggcaagcagatttatggagcggccaactcttatgcacttcaaagcagtgaaacaaattctcatatatctgaaagctggaaatggtgatatgcagattactgggtatacagacagcgacctcgctggggatgttgatgaccgccggagcacgggtggtatggcgttctacatcaatggcagtttggttgcttggagctcgcagaaacaaaagaccgtggcgctgtcgtcgtgtgaagctgagtttatggcggccacggcagcagcttgtcatgcgctttggctaagagcactgctggttgagattgttggaggaccgacgaaggtggttaagctgtttgtggataacaaatcatcgattgctctcatgaagaatccagtgtttcatgggagaagcaagcacatcgatacacgatatcacttcattcgtgagtgttttgatggagggcaagtggttattgagtttgtccggactgaggaacagcgagcagacgctctgacaaaagttgcaacggttgaaggaataagtctgcgtttgttagcagatgcgaatgatgcggtgatcgagtcagaagaagaccgcgtcggtagcattcgtgtgcgtgagtttagcgcggtgaatgaaaaccacagaaaattagccccacaaatttcctatctgctattgttctctgaaacttctcaatttcctgtgttcttgttctgctctgtattcctctga

SEQ ID NO: 83238 - DNA, 451 bp, Oryza sativa
  Clone ID: PAT_MRT4530_8258C.1
tcgtccgaccccaggttcaaaaccacagcatgatggatctttctgagagtaattctggagaaggtttttgtctgttcttctaagtgtgaattttggaaactaataatggtgctaatttattgaagaggataccatgcatgcatgtggcagaaagttcatgtgcttccatttgaagtttctgcaaccaagccattcaagtatgccaccagaagtcagctaccagtaacctgctttacatgtgaaataaatagcacgaggcacgggagaagtacgtgctactgaaaacactgtgtgacacatatggaccaagggtgcatttctcttttacgtaggaaataaggcgcttatgagttattatagatagccacctgattaagatccctgtactatgtgtaaactatcaacatattctaccccagccgttggttccaaaaaaaaaaaaaaaaaaaaa

SEQ ID NO: 83239 - DNA, 4185 bp, Oryza sativa
  Clone ID: PAT_MRT4530_82590C.1
atggcgttggttctggcaacatcggatccggcgagggggagctcggggagcgctttcctgtatccacaactcacagccaccaactacactagttgggtgatccgtgtccaggcgatgatggaggaccagggtgtgtgggaggcgattgaaccggcggccggggcggccgtcgaccctcggaaggacaagaaagcgaagtcgcacctactgcagtcgctgccagaggatctcctcatgcaggtggcgaagaaacggtcggcgaaggaaacgctgaagggcaaatttggcgccatggtgatggagccgggggaaaccctggatcagtacgcaggccgcatcaccgcgatgagcgtgcgccactcggtgttgggctcgacgttgaccgatgccgcgatggtgaagaagttgttcgacacggtgccagagaaattcgtcagccttgtcgcaggtattgagcagttttataatgttgatgacatgccatttgaggaggctgtgggccggcttaaggcttacgaggagcgggtgcgtaagaagaaggcagcagccggcggagtcaccgccgacgggcaggttcttctcactcaggctgagtgggaggcgcggtttaagaaggatggcggggagtcatcgtcgcctcagaaagggaaagcttccggcgagggagctaaaggcggccagagcggtcgcgaacgcgggcgaggccgtggtgcgggtgggcgcggtggcgctgctcgcggcaactctgcaagtggctcaggcggcggtggccgtgacaagagccacatcaaatgcttcaactgcgaggagtatggtcactattccaaccagtgtccgcacccgaagaagaagaaaggagaagcacacttggcccagaccgaggacgctggcgccgtgctgctgcttgcggtgaccgagaacgcgccggcgcgagcgacacaggagatggttgtgcacgaggatcgtgtgtggccaaagttgctgctggctgatagtggcgcaatggctggaaacgtctggtatttggacaatggcgctagcaaccacatgaccggagatcgcaagaaatttagggagctggatgaatcaatcaccggcagcgtcaggtttggggatgcatcatcggtgcagataaaagggaagggatctattctcttttcttgcaagaatggtgaccagtggcttctccaggatgtgtactacattcctagcctctgttgcaacatggtgagcttggggcaactcactgaaacagggcatcgagtggtgatggacgaggatgtcctcgaggtgttcgacaagtgtccttggcgactggtgatgaagctttgtcaggcgtgcttggtggcgaagcaaatcagggcgtccttccttgtggtggtgaactacagggcggaggaaccactggagctcattcacattgatctgtgcgggccgatctcgccggcgacgatggctggtaacaagtattttgttttaatcgttgatgacttcacacggtggatgtgggtgtttgtgattaaatccaaggatcaagcagtggaggccttcacaaagttcaaacccttggccgagaatgtggccgggcggcgcatcaagacgctgaggtcggatcgcggcggcaagttcctgtccggcgagtttgcacaagtgtgcgaatcggctggcatccagcggcatctcactgcgccgtactcgccgcagcagaacggggtggtggagcgccggaacagatcagtgatggtgatggcgcgctccctcttgaaggggatgagtgtaccaggcagactttggggggaggcggtgcgccacgcggtgtacatcctcaatcggctgccaaccaaggcgatgggcaatcgtactccgtacgaggcatggacggggaagaagccacatttggcacacttgcgtgtgttcgggtgtactgcacatgcgaagatcacaacgccacatcttaagaagctggacgaccggagtgcaccgtatgtgtacttgggggtggaagaaggaagcaaggcgcaccggctgttcgatccacgtcgcggtcgcatccacgtaagtcgtgatgtcatatttgaagaaaatgctgtttggcagtggcttggagatgcaggcgagcaagtctccgttgaatttgatgttgaagaaatcgttgagtcaccagccggctcggcgacatcgttgccaggcgcggtaccgaggtaccaggcgccatcacccggcaggcgtctaggcaaggagccggtggtggtagaagaggaagcttcctctccggcaggcacggcggaggcgtcaccgtcactgccgaccactcctgccacgcctatcggtgaacagagcacaccacactctgctggcgaaattgacaccgacggtgctcctgttcggtacaggcacattgctgatattttgagagatgcgcccagggtggatttggttgatgatgaacaagatggtgaggcattgcttgcagagacggaggagccgtcagcttaccgtgaagcagccggtcactcggcgtgggaggacgccatggctatggagatggatgccattgagcggaacgggacgtgggagctcaccacgttgccagctggccacagggcaattgggcttaagtgggtttataaactcaagaagaacactgcgggagaagtgatcaaacacaaggctcggttggtggcaaaaggatatgtgcagagacagggagtcgatttcgatgaagtctttgcaccggtggcaagacttgatacagtccaccaccttgatgtcaagtcagcctttctgaatggcgagctagaagaggaggagcaggctgtgtatacttggggcataggcagtggtggtgtcatcgttggcgtctatgtcgacgatctgattgtgactggtgaaaatcctgttgaattgaagatgttcaaggaacagatgatgggggagttcgagatgagtgatctcggtctgctctcgttctacctcgggattgaagttgatcagggagaaaatggaaccacgctcaagcaaactgcctatgccagaaaagtgctttctcagttcgggatgctggagtgtaattcaacctcaattccgattgatccaaggatgcagctgaacaaagatgcagatggtcacccggtgggatattactgggtatacagacagcgacccgctggggatgttgatgaccgccggagcacgggtggtatggcgttctacatcaatggcagtttggttgcttggagctcgcagaaacaaaagaccgtggcactgtcgtcgtgtgaagctgagtttatggcggccacgacagcagcttgtcatgcgctttggctaagagcactgctggttgagattgttggaggaccggcgaaggtggttaagctatttgtggataacaaattagcgattgctcttatgaagaatccagtgtttcatgggagaagcaagcatattgatacacgatatcacttcattcgtgagtgtgttgatggagggaaagtggttattgagtttgtccggactgaggaacagcaggcagacgctctgacaaaagttgcaacggttgaaggaataagtctgcgtttgttagcagatgcaaatgatgcggtgatcgagtcagaagaagaccgcgtcggtagcgttcgttacgcacgcaaggtgttcgatcgagggtctagcactaacacctacggcgtgcgcgtcgtcgccctgcacgccgacacggcggcggccaggacgatcgatctgccaccggggtgcgtcgacaggatgctgggctgcagcaacgccaagagcatgagcgagctcatgctggtcatgtcgcggggcggggcggtgttgagccttgtcatggcggagcgcgaggtgatctcggtgtggacgttggaggaggaggcagcggcggtggagaggtggagccggcaggtggtgatcgcgagggtggcgattgatcggagtgtggaagcacggagattgtaccagaccgtcttcttcgaggggttcggggagagaagcggcaccgtgctgatgaggatcgtcaacgtcgggctcgtgcagctcgccgtagcaacgaagaaggcgatcgttgtgcgggacagcggcgccggtaaatggtggggcaggtccatgtccagggcgtgcttgcacgagatgaatttgtactctttgctccaaagcatgaaacccttttga

SEQ ID NO: 83240 - DNA, 1941 bp, Oryza sativa
  unsure (1)..(1941): unsure at all n locations
  Clone ID: PAT_MRT4530_82591C.1
ggtccggaattcccgggttcctaactttttcttcaaacttccaatttttccatcacatcaaaactttcctacacacacaaacttctaacttttccgtcacatcgttccaacttcaatcaaactttctattttagcatgaactaatcacagcctgatgcaaaacctccctgaactctgtactgcaggaggaagttgagctggacggcagggtggtggagcagaaagggaagatgacggcggtgacggtggagatccggaagaaggattccggcgagctggtggcgatcggccggcagtggatgtcgaccaccaggccaaagaaggatcaagctagcagcaagctgtgactctgaaccaggtatgcctacctagctcccaatggagttcttcagttcatctattgctcaccttagcaaccatcgaggtgattgtaacttttgtgtgttgcaagaaaaatctctctcattttttgtatcctgaaacatactgaattttaacttaattgaaagggtatagagaactagagagatccatgttgccaatgtgaattgtccaaaaaaaataagattctttctgtgattgtgaaaggagaaaactggaaaatatacatgcatatgtctctaaatatgtagccctgcaatgtttttttggactcttcaaatataatacgatccgactcaacaaacctgtcatagcagggccaaggctccttacatgcttcggaacctcacatagataaaaattggcaaaagggagcctaaaaacaatggattgtcacatgtgacagcagtaattgaaaatcattaatgctctctaaaagtctaggcctgtaaattgtaccgatcaaatgaaactttttcatgaaggcacctaaattgtagggctaaaaatgctttttctttgggaatgtatttcaaaccacccacggacctaggcgctacctagctggctatcccaaaagctaaatgtaaaggttattcttcaattttaaaaggcccactgaattatatgaactcaagcagtttgagttatttttggcatgccaaccctatagatgcctcaaagggatgtatgatgcagcaagaaacacgaaatgtccacactacagctgacagaaaaaaaatgaggaggtactatgagatcataaaaaagcctcgatagtagatgatttacccatatttttcatagtgttggttttacagtgttaattaatgatcacaagtcgtgccccaaatttctccaggagggatggtttgattcctgggattcctgctaacctcgacgaaagaaaataatgaggagcaatcagtgaaaatcttgccctgtcagctgtgactccttgttctttataagccagatgccttccatcaggaagttgaattgttttggcacttgggggacctatgtagagtttctttggcagctctactggggtatcatcaacactccctacacctaatacgatgagcgtgacgaacgcgacggcggcggtgatgacccagcacctgacggggttgcagtcctcggcgaggtacgcgttcatgaagctgaggcgcttccccatggccacggcggggcccctgagccgccgcgcgagctcgctgtcctcggcgccggcgaggctctgagcggtcggatccaccggggggagaccaaacgccggatcgacggcctgccagtggatttggcactacaccaagcagggtggagaagatggtggtggtggctcacgacccttttgtccgggcagccggaatcgcctgcggagaggaggtggtcaccggattcgatgcccctggtctcctcgctggtagatgaagtgacctgactggggagagagtcgggggcggtgcagcggcggcgagaggagggcgaggaggcgatgcgcatgagagaggattttttttttttttttttttttttttttttttttttnccggc

SEQ ID NO: 83241 - DNA, 282 bp, Oryza sativa
  Clone ID: PAT_MRT4530_82592C.1
agctattccgcaaatgacaaaaatggatcttcagtccgttttacagtacaagaataactgagtccttcgagctaacgggtcctcctaccttaactgccattgacaaaagtgcagctattacggacctgcccctggctgcccgtcagcggttgcatgttccctatggtgaccatggacctggtgaaactcttgaagaaggccttcaggctgatggcgaatctgttgactatcgccggcgcggacgcgcccgttgaggacaggaacttctggtcggactgtggg

SEQ ID NO: 83242 - DNA, 1029 bp, Oryza sativa
  Clone ID: PAT_MRT4530_82593C.1
atggccaatgcaacagtagtagcctcgtcgtggattccactgctctgcctcgtcgtcgtcgtcctgtccgcctgcaccgccgtctcgtcggcggtggagtgcaacggcgacgaccgcgccgcgctgctgagggtgaaggcgcagctgggcgaccccgtcaggctgtcgtcgtggcggccgtcgaccaactgctgcgcgtgggagcccgccgtgttctgctccggcgagcccggccgcgtcaccgggctggcgctcttctccctcgccggcgtcgccgcgcccgtgccgccggcgctcggcgagctgacggggctcgccgtcctccagatcgcgtccgtccggggcatgtcggggcccatcccgccctccttcgccaacctctcgctgctcgaggacctcgacatcaccggcacctccatctccggcccggtgccggcgtcctacctcgccggcgccaccaacctccgtaccctcgtcatcgccgacagcaggctcgccgggccgatcccgccgtccctcgccggcgaccaccccaacctccggtacctcgacctcagcggcaacttcctcaccggcgccatcccgccggggctggtgcacggcagcttcaggttcttgatcctctcccacaaccagctcaccggcgagataccgcgctgctacggcgacgtggacaccgtcgacctctcgcacaaccgcctcaccggcgacccgtcgccgcacctgttcgggatcgcggcgccggcggccaagatcgacctgtcgtggaacgagctggcgttcgacatgaccggggtgaggttcccgcaccacctcaggtacctcgacctcagccacaaccggatcaccgggaaggtggccaagtcgctgatggacgtcaggctggagcacctcaacgtcagcgacaacgagctctgcggcgagattccggcggggaggttcatggcggcgcacggtgcggattgctacgctcgcaacaggtgcctgtgtggtgccccgctgcctccctgctgcgacggcggcctgtag

SEQ ID NO: 83243 - DNA, 238 bp, Oryza sativa
  unsure (1)..(238): unsure at all n locations
  Clone ID: PAT_MRT4530_82594C.1
cccccgccgaggagtgcaaacaaggtgttcctcggcatcagccagggcaagctcnatcgacacccatgctcgactgcctcaaggagtggaacaggcgagcacccttcccatcaaactaagccaaagatcaccatcacacacattgccacttggccatgacaacccaatcatcgaggaggagaggagactaaaaataaaagaaaacgaaccagcttcgtgtatcttcaagacaaaaaaa

SEQ ID NO: 83244 - DNA, 2045 bp, Oryza sativa
  Clone ID: PAT_MRT4530_82595C.1
gaatgaacatatgatatatggacaaataagtgacccagaaagtacaattcagatcttcattatttgcagaaacagaaggatatgtaactatctacagaaatgttatataggagctaacattgtttaggatcattcatagatgcaggaatctacaatacaatcgtgcaagtacacatcttggtagcttgtacacgtcctgcaacgtgaactagacatcgcttgctagtagacagtagcagctagtaacccatggagttgcagattaacagcatcgctgatgatgtggatcatggccaaaaagattctcatcaacggcttggttgagactttcacttggagattactctcataaaccggctcacggaactaaatacgcccattacattgttcatcaatgatggtgcctcgtcagattgttcatcgccgcctccaaagattaagtccgatatgtcctgctcctcttctttagctttgtcaggtactgttgtttcttctgtgagttcggaggcaacttcaatgggttctggtacagggttgatagggccctgaggaatcccaaacagggtggagaagatctgcctgtggcactcgtcgcagaaacagaagtacgagaagtggccttcatcgagaagtttgtgcactgtggctcctggaaccacccgcctgacgtattcagtaactgacggtggcaccacccggtcatccatcccctgccatatgtgtattgggcccagaaatcccacccactcccgttcagcctgacggaatagagatttgatcaattcaaaaaagctcagatcctctctcttctgcatttgaatgtctgacaagctgaatccccaatctgatacttgcagtacagcttcctctacaaaaggctgtgcatctccttggcgcacagactctgcaacatccttcttccccagtgaaagtgacagccaactctcaggctgcccttgctttccagaaaggaagcttcggtgataaaagagaggtaatagggccggaaacctccgagctaaaatgtgcattagtttccgcttggttgaccacctctcccatgttttgcgtctttcttccttggtcatcttagagtcgtatggatttgccataggcgcgaacattgctgcacctgccactcggtcaggaatgtggcgaagagcactccaagcatgaatgctacctgcagaatatcccacaacccagaacttgtccacaatcctaagggcaccagccaagtgaagcatgtcatgtgcagatgaattcagatcccggcctgggtgaggatcactttcaccaaaaccaggttgatcattggtcacaagtcgtgccccaaattcctccaggagggatggtttgattcctgggattcctgctaacctcgacgaaagaaaagaatgaggagcaatcagtgaaaatcttgccctgtcagctgtgactccttgttctttataagccagatgccttccatcaggaagttgaattgttttggcacttgggggacctatgtagagtttctttggcagctctactggggtatcatcaacactccctacacctaatacgatgagcgtgacgaacgcgacggcggcggcgacgacccagcacctgacggggtcgcggtcctcggcgaggtacgcgttcatgaagctgaggcgcttccccgcggccgcggcggggcccctgagccgccgcgcgagctcgctgtcctcggcgccggcgaggctctgcgcggccgggtcccccggcccgcggcccagcgcccgctccacggcctttatccatataccagcagctaattccagttgcttttgcagctccaagggctcagatggtctgatgacaggactgcccaatagatcagcctgtaggtgggctgaatcccatatccacaccctcaatgcacctgtcgcgggtacaaaccatccccatacccacacccgtgcgggtaatgggtactcatacctatataattgacttgttgcggggaagacgagatgcccgtttagaactcctccaatacccataaaacggagcaaatccat

SEQ ID NO: 83245 - DNA, 1015 bp, Oryza sativa
  unsure (1)..(1015): unsure at all n locations
  Clone ID: PAT_MRT4530_82596C.1
cccacgcgtccgattcaatcctctctggtgttctaaaggtctctgggtttgttaccagcactgtgctgaactcgaaacctgcccagaaattctttaagttgatgctgggcgaagttattcttgcttcactcgatggatttgggaaagtatgggatgctgtagaggtgtctggaaagaacgtgatgcgaacgtcgtcggttgtgacaacttctgttgtaacacatagatacggagatcaagctggacaggtcacacaggattaccttcacgcctctggaaacgctcttggagtcgcatgggctgtcttcaaaattcggaaagctctcgacccaaagggcaatctgaagaagtcgtctctggcgagcgctgctgcccatgctgtagctaaagaatcgatatctcggcaaagaaggaagtgagacaacacggtcgatggtggaactcgctgttactctctaatacggtgtactagcttcaatagaaatgctcttttgtgaacttggcggctatagcagattttgttggatgtgtcgcttgtaacttgtaaggcgtgtgactgttgccgtgatggttttgatgtttgttttggtttttggatgtttgcgaattgcgatgatgtactgatttgtaacctgtcgaattactatatgtgtatacatgatgcacagtgatctcacggtttatttgttttaaaaaaaaaaaaaaaaaatagtcttgatcgagttggttggctctgatctataatcacaacatgcatgacatctaacgccgctcccttgacatctagcgcccaacctacaccaaccttatcagcatcaagactctaagggcggcgggcgtcaccgnctncctgaggtttgatggtgctctgaacgtggatgtcaatgagttccagaccaaccttgtgccctacccatggatccacttcatgctttcattctacgctccagtgatctcttcggagaaggcctaccatgaacaactctctgttgccgatatcaccaacagtgccttc

SEQ ID NO: 83246 - DNA, 1715 bp, Oryza sativa
  unsure (1)..(1715): unsure at all n locations
  Clone ID: PAT_MRT4530_82597C.1
tttttttttttttgtatggagtttttttttattaattctttttgctgtttaaactgctgctatggctagttcggtctatgaccgagaccgaaccgaactaaccgaagatcgaaatgctcggtcttgagtttttttaagaccgatcggtcttgtggttgggaagaccgaatttttcagaagaccgaggaaccgaaccgaatttntcgattagaccgaatgcccacccctagatatgagaaacaagctgcgtctgattttccggaggaatcacgctcagacgaaggacgctggttcggtttggatgaagaacacgcccgtggcgcctcccggcggcgacagggccagtgcgacagggccagccgcgccttcctccaccgtcagctccccggtgccgagggtcatgtccgtcttgacgtacccaggatgcacgcagttgacgcgcaacggcgaggaggaggaggaggcgtgcttcctcgcgaggaccctcgtgtaagcgtgctgcagcgccttggacgtcttgtaggccgcgaacgcgtcggctctggctggccatccccgggactccagctctccgtccttgaagtccctgacgaacagctctgccagctcgtctatcctctcctcgcttagcttgctgaaatcgttgagctcctctttgagtttctccccactgaaaaacgatagttgtccaaaaacagaggaaacagttacaattcttccatcaggtgatgattggaggagaggaaggagtgcttgtatggtttttttgttgccgtgatagtttattttcaagcattcttctgcattctcggcagtctccacggtgtgttgcatcaaccattccagcgtctcgtttgcactcttgccctcaatcgctttattaagatctaagttgccaaaatcaaatgtaacccccaaaattcctgcattgttgaccaatatgtcaagcttgccaaacttgtgctttataaaatcagccaagccagcggcgctggaaggctcagacacatcaaactgatggaacaggacctccgatagcccgagctgacgaagcgcggccgctgctccggcgcccctctcctcgctcctcgctgtcaagacgacggtgactccattggcagccagctgcttgcatatctcgagcccaagtcctttgttccctcctgtcaccactgcaacccttttctcggccgggaaggagttgttgcttcctggtcccatcgtgtaggagagctcttacacgcagtgcaggttctagtgcaagaaaaaacggcggaattgcgcatgtgcaagaaacagaggtgaagaggttgctatacggctgtacctgtatgatgggtcgggggatggatggtagccacatgctctggtttactgttgagtttagatggtgacataaagtgatagcacagagagtcgtagtaatcctcgatcgtggcaagattgatcgccacgaatgaatgtgtacaaccaattttgaaaataaccccatccatatttttcttgtgcaactcatgaagtctcatgtaaaatcaccatcccttccattatattttcactatgagtgacgtagttccattagaattgctagaaaaaaaactatatggtttaacgctagttaataataaagaaataataaagaggagcatgagaattgtccgatcaccttatttcttattttgatttacttttatcttaacttttttttattacta

SEQ ID NO: 83247 - DNA, 303 bp, Oryza sativa
  Clone ID: PAT_MRT4530_82598C.1
atgtggggctcacgtggggcccacgccaagtcagctgccaccaatgatctgttaccgacgtccgtgcttgtggatgcttcggtgactgggctttacgtcgttgggccctcaggccagcagctcaggcctgagggcccaaatgctacggtggccgtcagctttgccatcggaagggcctgctgggcaaccgtagtctttgggccgcgaccttgccccccagaactagctcccccgtcacttggctccaaaagccttcaacaaggtgcagctccagcctccagctatgagaaccttttgctctga

SEQ ID NO: 83248 - DNA, 192 bp, Oryza sativa
  Clone ID: PAT_MRT4530_82599C.1
acgacggcgacggtggcatggacttcactcggcggcgatagctacggcggcggaggcagccaggcaagggcttcacgcagtggcggcatcagagcttcacgggagggcagctttgttctgctggctgccgaaacagattatgatggtaatcttccgtcctcgctgcgcctgaggctcaggccaccgatttga

SEQ ID NO: 83249 - DNA, 517 bp, Oryza sativa
  Clone ID: PAT_MRT4530_8259C.1
aaacctgggattaggatccaatcccaggcgcagttttaaaggcaggaaccacaccatgtaaatggttttttgtaatccacatcggggcccaaatgatcttaaagaacagtaaggcaaaacatttcttcaagcttcctaccagtccaagttacaaaaacaaccagtatagacaaactaaaaggtctatgctaaagcaaaaaaacaaataacacctaaaactgaaaatatatatttccaaatatactaaggagaaacctattctctttctgtattgttggtaaagcgccaaattaggcctccgataatattgtttatggagtgagaagccattggaactatgatgcttgaagaagctatggtagctaaaccatatgctacgccaacaaacgttgcccagattgcaaatgaatattttctgccattgcccaagtgaagaataccgaaaatggcactagttacaaaggcacttatccagttcagtccaaagataggcatcaatgcccctcgaaacagcacc

SEQ ID NO: 83250 - DNA, 198 bp, Oryza sativa
  Clone ID: PAT_MRT4530_825C.1
atggcggcgccggcgagccactacacggcggcgccgttcttgacgccggccggttgccagcacgcgcaccgacctcatacccggtgggactacaacgccgacgttctcctcctctcctaccccggcccgctccttcttcttccgggtgctcaggacgttgggggtgggtccgccggggttcccgtcttttcgccgtag

SEQ ID NO: 83251 - DNA, 762 bp, Oryza sativa
  Clone ID: PAT_MRT4530_82600C.1
gtagggtaagggttcgcaggcctttcttggggacacccttgatattggatagcatttcccaccagtcttggacgctctgacacagatcccattggcttggatccagttgtgatatgccacccaggtggccgtcatactccagatccttctagtgtatctacagtggacaaggaggtggcttgctgactcgtttgttgtgcggtatagagggcatgccccgttgtttggccatcctctagccaccagccgatccgaggtccaaactctattctggatcacaagccatgcgtagaatttgcattttggggagcccaagatttctatattaaggtgttgaagttggtgcccgtggttccatacattgcgctttataagccgaagcgatcgagtattctccatggtttgacagcttcctggtgatttggtcatgttcgtttttatcaaggatgatgccctataaattaatttatatttcataataagctgttttgatttattagagaatatgcgcaaccgataagaccggaccttattcttcaccctcatcccatctgaacgaggcggatcgctgctgccagctgcttggctagctatggctgcaacacgacgacggccatggcggctagctacggcatcgatctgcacaaacagcagtacactgttggctatggttggcattggccggacggaaccgtgcggggtcgtcggcctactgccaaaaacagagatttattttcaatagatcgtactgtcaaaccttaa

SEQ ID NO: 83252 - DNA, 414 bp, Oryza sativa
  Clone ID: PAT_MRT4530_82601C.1
gcaatatataacacgaacacgagattagatggtaaagtgctaagggacataccggatacatagcagatacacacaagtttatataatgcaacgggcagaactatacaagcacagacaccaacacagaaagtgaaatctggaaagtagttgagactcaagtactgcttggagtggatacagcatcgagcactaccctagatcaggcatgcccaggtgaagataagagggcgctttctttcttaaacagtacaaagaggctggtgcgatcgcatttggagataataagctaatgattatggtgggctgtgagcaaccgagactaaacatggctagggctaattggtgtctggagtggaggtagaccagagagggatctagcaactgacgatgctgtaatcacataggatgaaaata

SEQ ID NO: 83253 - DNA, 294 bp, Oryza sativa
  unsure (1)..(294): unsure at all n locations
  Clone ID: PAT_MRT4530_82602C.1
gaagcgatatgcacctntgatctanacttgcatgtagttggagtatgatcttgaacgaaagatcataatattgatggaccgagctccagttcttaagcagctattgcactgatagtggcaggcctgcaggtttgtattgtggcgatntaaacaattgcttggtggcgaagccagcttgtgctggggtttgcgatccctcctttgcaggganattggcgtcccacctcagcattccgggttcccncccaaaacgggattaaccctgtgcatctttggcaaagcaacgtttangca

SEQ ID NO: 83254 - DNA, 1548 bp, Oryza sativa
  Clone ID: PAT_MRT4530_82603C.1
atggcgagctccggtttctcatggacgctgcccgaccaccccaagctccccaaggggaagacggtagccctcgtcgtgcttgacggatggggcgaggccaacgccgacaagtacaactgcatccatgtcgcccagacgcccgtcatggattcgctcaagaatggtgctcccgagaggtggagattagtgaaggctcatggaacagctgttggtcttcctagcgaagatgacatgggcaacagcgaagtgggtcacaatgctcttggtgctggtcgcatttttgctcagggtgctaagcttgtggaccttgctcttgcctctgggaaaatttatgatggagaggggttcaattacatcaaagaatgttttgacaagggtaccctgcaccttattggtttgttgagtgatggaggcgttcactcccgtcttgatcaagtgcagctgcttctgaaaggtgccagtgagaggggagcaaaaagaattcgtgttcacattcttactgatggacgcgatgttttggatggcagcagtgttggttttgtagagacactagagagtgatctttctcagcttcgtgacaagggtattgatgcacggattgcatctggtggtggaaggattttaagtcttaaaaatgcacagaatgactgggatgtggtcaaacgtgggtgggatgcccaggtgcttggcgaagcaccctacaaattccaaaatgcagtcgaagcagtgaaaactctaagagcagagaccaaggctagtgatcagtatttgcctccatttgtgatcgtggatgagagtggcaaatctgttgggcctgttgtagatggtgatgcagttgtgactttcaatttccgagcggatcgtatggttatgcttgccaaagcactagagtatgcagactttgacaaatttgatcgtgttcgtgtaccaaaaatccgtgagacagtgaagtttggccatgtcacatttttctggaacggaaaccgatctggatactttgatgaaactaaggaagagtacgttgaaattcctagtgatattggaatcacattcaatgttaaacccaacatgaaggcacttgaaattgcagagaaagccagggatgccattcttagtggaaagtttgatcaggtacgtgtcaacctgccgaatggtgacatggttggtcacactggtgatattgaagccacggtagttgcttgcaaggcagctgacgaagccgttaagattattttggacgcgattgaacaagtcggtggtatttatcttgtcaccgctgatcatggaaatgctgaggatatggtgaaaagaaacaaatctggccagccacttctcgacaagaacggtggtatccagattcttacctcacatactcttcagccggtcccggttgctattggaggtcccggtcttcaccctggtgtgaaattccggtctgacattcagacccctgggctcgccaatgttgctgcaaccgtaatgaacttccatggtttcgaggctcctgctgactacgaaccaaccctcattgaagttgtggacaactaa

SEQ ID NO: 83255 - DNA, 3419 bp, Oryza sativa
  Clone ID: PAT_MRT4530_82604C.1
aggcaaccaagagcgaagcacatttcattacgcgattttaacacgatccaaactttaaatactggacaagagcatgtttgacgcctcgcattatcgcatatagcggatgaaaaaacgtcaggccagcctgcgcgacaacgtctagttacagataagagcagaactgcaagtcaaatacactcttttctctccatagtagagtttgagcagcgagcgggcaaacataaattattcaattattaaatgatatgatcactcttgatcatctcaacactataggaacaaaacttcgctaccgcgattttactattttagttgtccacaacttcaatgagggttggttcgtagtcagcaggagcctcgaaaccatggaagttcattacggttgcagcaacattggcgagcccaggggtctgaatgtcagaccggaatttcacaccagggtgaagaccgggacctccaatagcaaccgggaccggctgaagagtatgtgaggtaagaatctggataccaccgttcttgtcgagaagtggctggccagatttgtttcttttcaccatatcctcagcatttccatgatcagcggtgacaagataaataccaccgacttgttcaatcgcgtccaaaataatcttaacggcttcgtcagctgccttgcaagcaactaccgtggcttcaatatcaccagtgtgaccaaccatgtcaccattcggcaggttgacacgtacctgatcaaactttccactaagaatggcatccctggctttctctgcaatttcaagtgccttcatgttgggtttaacattgaatgtgattccaatatcactaggaatttcaacgtactcttccttagtttcatcaaagtatccagatcggtttccgttccagaaaaatgtgacatggccaaacttcactgtctcactgcaagcgaaggtgcggacgccattctttaccaagtattcaccagatgttctctctatctctggtggggagacaaggtaatggctcggaagcttcaactcaccatcatactgaagcatcccagcgtaccggatttttggtacacgaacacgatcaaatttgtcaaagtctgcatactctagtgctttggcaagcataaccatacgatccgctcggaaattgaaagtcacaactgcatcaccatctacaacaggcccaacagatttgccactctcatccacgatcacaaatggaggcaaatactgatcactagccttggtctctgctcttagagttttcactgcttcgactgcattttggaatttgtagggtgcttcgccaagcacctgggcatcccacccacgtttgaccacatcccagtcattctcatagcggtccatggtaacatacatccttccaccaccagatgcaatccgtgcatcaatacccttgtcacgaagctgagaaagatcactctctagtgtctctacaaaaccaacactgctgccatccaaaacatcgcgtccatcagtaagaatgtgaacacgaattctttttgctcccctctcactggcacctttcagaagcagctgcacttgatcaagacgggagtgaacgcctccatcactcaacaaaccaataaggtgcagggtacccttgtcaaaacattctttgatgtaattgaacccctctccatcataaattttcccagaggcaagagcaaggtccacaagcttagcaccctgagcaaaaatgcgaccagcaccaagagcattgtgacccacttcgctgttgcccatgtcatcttcgctaggaagaccaacagctgttccatgagccttcactaatctccacctctcgggagcaccattcttgagcgaatccatgacgggcgtctgggcgacatggatgcagttgtacttgtcggcgttggcctcgccccatccgtcaagcacgacgagggctaccgtcttccccttggggagcttggggtggtcgggcagcgtccatgagaaaccggagctcgccatcgcctactagatgctataccttcgctttgccctcgcgcttttgcccaccgagacgaaagcctttcttttctttttcgagagcggagcagacgtccgatgatctttgctgctaatgggcatccactcaatttcctagtaattttcttgcctatctcctgtaggttgaaataatcatcaggatttacttcgaaaaaagcatgcctgttaaaaattgctaaaagatctttgtcatgcagtccctccaatcgtagagacttggttcttcctcctagtaccctttcaacaatatctaccactgattccatccgggttgtcaataagattttgcttcccttttgaccaaatttcagaggagctactagtttctcccagtcaggccttctctcatcattccatacatcatcaaatacaagaaggaacttcttggatttcagattctctctgacgatttcttgaagtgtattgaaattagtaacattagtaccttctctagtgatttcttgtataatctttttcatcagagcagggacatcaaagtcattggacacacaaatccacatagcctgatcaaagcactgcttcactctttgatcattgtagattgcctgtgctagcgtggtcttgcccatgccacctatgccaactatagaaaaagcatttacagcacaaacatcatggtcatgaacgttgtcttgttcaatcagccattcaacaatcttaaccctctcagtatcacggccaattacaatttcatcaacactgaaggagctagtctcacgaggattactaacctcctgatgacatacgtgccttgaagtacaagaatccagccggtccacgagtagaacaaaacgctccacaccaacaacaatttcatcaagttttctgatggcatccaacaatctcttaaaagttccagccttaaaagtactattgaattgctgaacaaccaccctcttgcacttgtacagagagctgctcaccttgttacctctagttttcacctttttctcaagcttgtagtactccacctcatcgagcacatcctctgcctcctcgacggcatccctgagctgccaaagccaggcatcaagcgcctcgctctgatcccttatcctctccatatcaattgcatcaaagacaacttggacttgtgggagagtcctctcaagccgctcctgcaccgacttcatcccctccgccttcgcatacttctcaaggtaatcgaaagacttgcggacaatcatggagatggccgacacagccaccgatttgccggcgaaagccaaggccatttcaacccactcttctagtgctgttaaatgttcaataaaaagatactcaagagatgggaattcaaaaggtcgctcacacccgtagaaggaccccatctattcttttcactgagttcaagcagatataggtaca

SEQ ID NO: 83256 - DNA, 320 bp, Oryza sativa
  unsure (1)..(320): unsure at all n locations
  Clone ID: PAT_MRT4530_82605C.1
ggntgcnggattccgcctactganctcccaancagtgggangggaaaatgatctctgaaccgnttgcctgnttgaaagaaatgaagcnggcgaatccataggnatnggttgggttaagggaaacggaanccncccggaacccntaccaaaaccaattctccttagggnaatgntccnngntntngaacccaacccnggntantnttncctnaaccagantaaacttggatgaaactaancnnaagtccnaacnactgatgttnaaaaatcncngatgaattnttgnttagggntaaattncccnccaaccccaaacntac

SEQ ID NO: 83257 - DNA, 431 bp, Oryza sativa
  Clone ID: PAT_MRT4530_82606C.1
accaaaagaaacttttatatagggggggagacatgaggatttacccatatatatttttcacggagagcacattttggtaaatataaattaacctcggatcatcactggtttgaacaaagtcattgggggggcaaaagctgaaagagcctcatgggggagaggggccctaggttggggttttcccatggggtttgggcttggggtttatgggcactacagggggggggcctcccggcactccaaaggagaagctgatgtcctcctttttaagggctcccttacttgccttgccactgggattagggagctttttggggggaaacgccacctcctgcgagagcaggaggggagaccccgccacgactaacaggaccaccctggggttgggccccatgaccaccggacggagggttagcttagcttaactggga

SEQ ID NO: 83258 - DNA, 288 bp, Oryza sativa
  Clone ID: PAT_MRT4530_82607C.1
gcgttctgtgctcttctccatgggaaactgtgatgaggccacacacaagaatgttcttggatgccccctgccataaacattcctaggaccacatccgcacccaaagacccaaacaaacccaagaaccacccccctgtttcggcctgcacttaactttactctctctctctcccagttcttctaccactgcaggagcagggattgctggttccttgggttgattctttggtcggtggcttcttctcttggagttctgatttgggggggctcgagttccctgtctcaaag

SEQ ID NO: 83259 - DNA, 349 bp, Oryza sativa
  Clone ID: PAT_MRT4530_82608C.1
gtccttgcttctacttgggctctcctggtcacctgggggaggctctacctactcacgggggcccacatacgatgcgccttgcatgtactgtgtgccaatcaccgggcatatatacagggatgtgcctgtgccgacgacctatgacggatcgagagacatggtagcggcggacgtgcgagcttacaggcaggacccggaccacgcccccacctaggaggtggatccgcagcgcaaggtgggctcctcccgcgggtgctaagccaagatccggctgtctcacagatgtgctgggctacccgatcttgcgcactcgcaactcgccaggctacctcatgctgggagcggtgac

SEQ ID NO: 83260 - DNA, 244 bp, Oryza sativa
  Clone ID: PAT_MRT4530_82609C.1
gcgtcgtttggagcggctggcctggtcgtcctttttttttctgtcaacagaagcgagtactgcattgccaagacccagtgcgctgcgggctccaccaacccaatacaacgcgacgacaggcgtgcacaaggaaacacgcgacactctggttgaagacctagccctacgtacgcggacacatccgtatatctggcagacacaccaggggccgacacttgcatgacagcactgctcttgccatgcc

SEQ ID NO: 83261 - DNA, 1136 bp, Oryza sativa
  Clone ID: PAT_MRT4530_8260C.1
aaaagcaagaaacacaacatgtaaatagttatctgtaatacacatcgtgcccaaatgatcttaaagaacagtaaggcaaaacatttcttcaagcatcctagcagtacaagttacaaaaacaaccagtatagacaaactaaaaggtctatgctaaagcaaaaaaacaaataacacctaaaactgaaaatatatattttcaaatatactaaggagaaacctattctctttctgtattgttggtaaagcgccaaattaggcctccgataatattgtttatggagtgagaagccattggaactatgatgcttgaagaagctatggtagctaaaccatatgctacgccaacaaacgttgcctcagtgacttatttcaaacttggtataagatacaataccagcgcagcagattgcaaatgaatattttctgccattgcccaagtgaagaataccgaaaatggcactagttacaaaggcacttattcagttcagtccaaagataggcatcaatgcccctcgaaacagcacctcctcgcttatcccaggaagacaagcaactacgatataatcgaaagtctccagtgaagtaaggatttgtctatttgcagtctcactggaatatctgaaatctggccatgtctgtagaagaatatatctgctagatgatattattattacaagtcctgcaatcaactcaagatgccaggtctcaaaattgaatgacaaattcatagggtcagcaaccggccatccattcaaagatgcaaaatgtgatgcctcacgaagaacgagacctcctgcaaggagtaagctagatgtgagagtacaagcctgaagaaccgcattccttggggcaactgtgaatttctcgtcagtagtaacatcattggcattgacctcaaggctggtggtggggttttcgccactgcctgaagaagaagcttcttcacttataaatgttggaccttgagatatactttgtgatttcctcctcctttcattactctttgctgcaaatattattgcgtcggccactatgcaaccttttccatgtagcaacaactgcgactccgcatttccaaccgccttactctgtaaacctcggggcgggagcgcggccggcgcgagcatcgccgccat

SEQ ID NO: 83262 - DNA, 441 bp, Oryza sativa
  Clone ID: PAT_MRT4530_82610C.1
atgggtggagtatttgtgaaatcaaacaaaactgaaatattgttaaaatatttttcaagacatgtcaatggtatgaatgtcaatgttcttccttcttccttggcgccgcttggatcggagcgagagcggccagccgcttggagcgagagcgggccaggcggcagccggcggctggtgcggcagcgcggagggacgggtggcggtggccggccggcgcggaggggaagctggtgcgacggtgggcagcagcgcggagggccgcggcggcggcgcgggggccggtcggcgttgaggggaggcggtgcggcggcgggcagcggcgcggagggccgcgacggtggcgcggcgtcgggcagcgccgtgggggccggccggtgcggaggggaggcggcgccgcagcatggcggtggccgaccagccggcgtggaggctaggcggtag

SEQ ID NO: 83263 - DNA, 515 bp, Oryza sativa
  Clone ID: PAT_MRT4530_82611C.1
cttttttttttttttttttttttttttttttttttttttttttttttttttttttttttttttttttttttttttagggaagggccctatgaaagacaaaatactttatacaaggcccaagccacataattcaaaattcagtttcgaacaaacagtcatgcttgacagcatagggcaagggggatccgaaatcttatagattctagaggccgaaatcataaaggaccgcataaaaatagcggcaactttaacattttcagcaaaattcaacccttcggaacggcaaaaatgcccccagctccaagcagggacataaggcccccaccatgaaccctcccctccgggacgaaaaacccgaagcactgggggtccggggtccccccggccttttgacctttgccatgcaaaaaaaaaggccccattgaaccaagaaccaggacccggggggggataaggagcttggcgttccccattttttccaagggctcaccgggatcccaccaggccccagggag

SEQ ID NO: 83264 - DNA, 692 bp, Oryza sativa
  Clone ID: PAT_MRT4530_82612C.1
tcaccattcctcaatggggtggctccactccctcttctcccctctcaggaggctctgggtttgcgcgcattcggagcgcaggaaccgtaggggaatgtatatcttgtacaaggatgttcagtcctgccaggatgaggatgttcatgtcctgtggtcgatcctcatcgactcgcaccgtcatccggctctcatgaagctgaagctctgaagtttgaggccatggcatgagcagcaaaacttcagaactactttgtgtagagactaagggaagggttttcctgagaagtcattctagggtgtggtttttggctttgatgatgatgatcctcattggccattgtccttgcattcatgcactccaaaaaagaaatgagagaaaaaaaatatcgaggtttgtttatcttctttctcggtgtccgattcgcatcctgtattagtgaatgtgaaattcggtcgtgtgcatccttagttggtgcggaggctaggagtttcgcttccatcgtcgaaaaaaaaagaaagaaaaacacccagtgtgggtgaaatgttgttacctgtgagtgtcatgtgttgaggttgataaagagtgtgaggctgagctcatttgtacatacatacatacttgaatacttgctcaaatgccttacccttgattgtggtattggagataggttggtagagtgtatcaaaaaaaa

SEQ ID NO: 83265 - DNA, 813 bp, Oryza sativa
  Clone ID: PAT_MRT4530_82613C.1
atggggatgcggaggacgccgtcgacggtggctggaggaggtcagccgccggagctcgaccaccggagcgacggcggctcggtcgctcgtgtcatccccgagctcagccgccgtcgccagtccaacctccgcaccgcggcctcgagctggtatagagctcagtcgccggagctcgacgccacgggcggcggcttaatctacgacgagaaggcaacatgcggccaatgtagccgggcgcggccgtggcaacgctccgagcaaccggggggtgccggccgtggacgtggtggtcgcggcggcttcaatggtgctggcaaaacgccggctgtggaggacgtggcgctggacagcagcagcgctccggcacgacacacgacccgtgtgtctggctacgagggcaacaatgttgagggacggcgatacaagggactctacccgcttcctccttcatctccgcatcctctccaaaggctgtttacggacgtgatctttgttgaaatgcgcatgatcaagggggcgagcaacaggacaaggaggataggatggttccaaaagggaatattccttcaatattcgggacaacccatctggcataaactggcggacaaaacgatcccaccccatgcccgtgaccgcgactcacgcgcggggcgaggcggcgcggcacgcccggggtctctcgtcagcgcgtggggcaaggcggcgacggcgcgcgcgggggcgaggcggcagcggcgctacgggagctcgaggcggtgcgcgagcaaaggtggcgcggcggctctcaggaagggcgacgcggcgcacgagtag

SEQ ID NO: 83266 - DNA, 950 bp, Oryza sativa
  Clone ID: PAT_MRT4530_82614C.1
tcgaaaaatgccaactttcctggcttcaacttcaacacgtcgcatcagggggagtacgttggcatagcatctgagcctctctgcctcgttggcctggacattgtgtgcatctgcaagcctaaactagaaactgccctggaggtcatcatcaacggcacttcctatctcactgatcatgagtggaactgcattgttactgcaggcagccatgatggtatgctaactgagttctacaggtattggtgtcttaaagaagcatttgtcaaagctacaggtgctggcgttggatttgggttgcaacgtttggaattccaccatatgaactggtcgtatacacttctttgtttagcggcctcttggtgttcgacggcgacaatgataagccgtatgttcagattcacctcacctgagaccccggatgtcggtgatgtgggcccaggggtaccaagcttaaagaggagaggccgcaccccaacgtccacgtggcgcttccccccgagggggtcgggcccgtggatgggtggcagccgccccttccgagctcgaggggtcgggctgcccgacccctcccggcagtcaccacgtggccgccatgcaagcgaggttaggtggacgctccccagcgcccatctaaccgaattaagtgcaggcagagcgagcgcaccacgccgcattaaatgcggcgtgctgcgcgcctgactagcctgtgaccggtacgtgaccggccgaatgatagatgggacggcggcaagccacgcgcgctctggccgagtgttaggcggtgtgcggcaggtatgccccgtcccatcacgatgatgagaagctctgcgcctctcaaccgtctggaattggcttgaccgctctggacgtgcctgagatcgtgttcccagtgcatgtgcgtccctaaggtcctcccccattaaatggtgaatgacgggagcgctccccat

SEQ ID NO: 83267 - DNA, 437 bp, Oryza sativa
  Clone ID: PAT_MRT4530_82615C.1
caacgcaacccaatggttttgtataaccaatgctgcttccggataaacagaaagcttatattagtcacagtgggctaggatgtacactatgtcccatgcaattaagatgtacatcacagccggtggtgggaggagtattggtttgctgagccacgaacaacacttgtacattaccacaccccctcactcactcacgttcgtagatgggctaatgcctacggctggatcagaaattcagatattcataggtcggggaagcgcgcctttatcaccctctgctacgagccgcactcctggaacagcgcgttgagcttgcacgcgagctgggacacgacggcgggctcatggcgggtgaggctgtgcttgccggggccgctcgccagggacggtgagcccgggctgatgggctactttgtcggccgcttgaccggatcaac

SEQ ID NO: 83268 - DNA, 2014 bp, Oryza sativa
  Clone ID: PAT_MRT4530_82616C.1
acaatgctgatcatcttcaatatgatccaggactgaggtcccctattacgagctatgatgttaatgaacaagatgcagttcggcgtgcatatattctgaaaggtcctaaccaatgttatccacatgatttcccagtcagggaaatttatggtaagaaatgccacttcagttttgtttggtttcataagtaacaatggcttgaatataatgtcacaaaggatgctgggttttgtatagtatgttacttgtttggtagtggaactagtaattttgttaaggatggttggagaaattggaacaaagccgatacacttgacaaacatgtggggggtataacaagtgctcacaataaagctcaagagaaatacaatctatttgtaagtggtggatgtttgagatatcttttaaatcaaggattggcatttcgtggacatgatgaaagtgaagaatctagtaacaaagggaattttattgaacttttgaaatggcttgctgaaaataataaagaagttgatcggttggtgttgaaaaatgctcctggaaattgcatcttgacttgttcaaaatatacaaagggaaattatccattgttgtgctgatgagactactaagcacatcattgaagaacttggtgatgatcattatgcaattcttgctgatgagtgtagtgacctttcacataaggaacaacttgctctttgtgtgcggtatattgacaaacttggaagggtatgtcaacggttccttggagtagtccatgtagctagtaccacttctgctacacttaagaaggcaattctaactttgcttagtgatcatcacttgactccttctcaaatttgtggtcaaggatatgatggggctagtaacatgaaagagaagattaatgggctgaaaacattgatcatgatttttactcaagtttctcacttgctgaatattgttggtacttcttgtaagcgtcatgacatgcttagagatgttagagctcaaaagattatggaagcacttgaattgggtgaaatagaaagtgggattggattaaatcaagatatgggattggctaggccaggtgatactagatgaggttctcattacaaaacaatattgcatatttattggtatgtaccccacaattcatgagctcataactcttggaaaagatcccacacaaagagaggattggccaagaatacatgctatggttggagcttttgaatcatttgattttgttttcagtgcacatttgatgcttgtcattcttggatataaaaatgagttgtgtttgtgtttgcaaaagagagaccaagatactattaatgcaatgtcacttgtaactttggccaaggaaagaatacaaaaattaagatctgaaggatgggaagaattttttcaaagaactgttgtttcactttgcaataaacatagtatccaagttccaaccttagatgaaaaatatgtgccacatggaagacctccacggttttatccggaccaaacaaatgatgatcattttagaagagaagtgtacattggtgtgattgacaaaattagccaagagctcaatagtaggtttgatgaggttaatatggaattgctcatttgtatgtcagcattgaatccattcaattcatttgcctcttatgatgcataataagtacttaagcttgccaagttttatccaaaagacttttcacccatggatttgatcagacttgaattgcaacttgggacttttattgataatatgggaaaagatgaaaggttcaaaggcctagaaactcttgctgagctctttattaaacttgttgaaacaaacaagcatgttctctatgattgggtctatttacttcttaagttggtattgatattacctgtagcaaccgcaagtgttgatagggtattttctgcattgagtgtagtgaagagcaagctgagaaatagtatgtgtgacaaattattaaataattgtttaatcatatttattgagcgggatatcttctctcaagttagc

SEQ ID NO: 83269 - DNA, 939 bp, Oryza sativa
  Clone ID: PAT_MRT4530_82617C.1
cacgaggctaactactcctaactcccaccacctccgcctccgcgtcgccccgccgcgcgcctcctccccgcctcgccgccggcgcgcacctcctcgcggatcgcgatgcacaagacggcgcaggcctggttcaccggcggccccgccgcccccgccgcctccgccggcgagtcgcagccgtccctcctcgccgactggaactcctacgccgcctcccgccccgacgcctcctcctcctcccctctccctttcgacatcgaggccgccgtccgctccgccaacgacaccgtctccggcaccttcagcgtggtgaccaagggcgtgcgggagctgccggggagcttccagagcgcgacgagcagcttcccgtcggggaaggcgctcatgtacttcggactcttcctcgccaccggcatcttcttcgtcttcatcgcgttcgcgctcttcctccccgtcatggtgatcatgccgcagaagttcgccatctgcttcacgctcggctgcgggctcatcatcgcatccatcttcgcgctcaaaggacccgccagccagttcgcccacatgacctccatggagaggctaccatttacaggggcacttattggatgcatggttggtaccatttatgtgtcaatgtttcttcacagctatttcctctcagtgatattctctgtccttcagttctttgatagtatgatgcccatccctcctacctcatcccttcacataaacaatgccatgaagcatataggccatatcttcgttctatctcttgcttactacaccatatcctactttcctgggggttccagtggattgaaatttatctcctcgagtctcttgtcatcagtaacgagctgttttggccgactaagatcaatacggggtgaaaagaggggccctttgatgactcagctgtacattgtctcttcttcttaa

SEQ ID NO: 83270 - DNA, 2436 bp, Oryza sativa
  Clone ID: PAT_MRT4530_82618C.1
atgaaaaggaatggagacattgcatcgctttttcggaaacatgaagcaaaggcgaagaagagggcagatcttattgatgaggaagctcaaattgaagaagaggagccaccactagttgagccacatcctgtgccaactccagttgttgaggcaacaaatgaagagcaagatgcacctccagagtatgatgctgatcatcttcaatatgatccaggactgaggtcccctattgcgagctatgatgtcaatgaacaagacgcagttcggcgtgcatatattctgaaaggcccaaaccaatgttatgcacatgatttcccagtcagggaaatttatggtaagaagcgccacttcaattttgtttggtttcataagtaccaatggcttgaatatagtgtagcaaaggatgctgggttttgcatggtatgttacttgtttggtagtggaactagtaattttgttacggatggttggagaaattggaacaaagccgatgcacttgacaaacatgtggggggtataacaagtgctcacaataaagctcaagagaaatacaacctatttgtaagtggtggtccttcaatagataatgtcattgtgaaggtgtcaaatgaaagtgaaattcactataaggctaggttgacatattcacttagatgtttgagatatcttttaaatcaaggattggcatttcgtggacatgatgaaagtgaagaatctagtaaccgagggaattttattgaacttttgaaatggcttgctgaaaataataaagaagttgatcggttggtgttgaaaaatgctcctggaaattgcatcttgacttgttctagtatacaaagggaaattatccattgttgtgctgatgagactactaagcgcatcattgaagaacttggtgatgatcattatgcaattcttgctgatgagtgtagtgacctttcacataaggaacaacttgctctttgtgtgcggtatattgacaaacttggaagagtatgtgaacggttccttggagtagtccatgtagctagtaccacttctgctgcacttaagaaggcaattctaactttgcttagtgatcatcacttgagtccttctcaaattcgtggtcaaggatatgatggggctagtaacatgaaagggaagattaatgggctgaaaacattgatcatgaaagagtctccttcagcttattacatccactgttttgcacatcaacttcaattagttcttgtttctgttgccaagggaaatgatgattgcgtatggttttttactcaagtttctcacttactgaatattgttggtacttcttgtaagcgtcatgacatgcttagagatgttagagctcaaaagattatggaagcacttgaattgggtgaaatagaaagtggggttggattaaatcaagagatgggattggctaggccaggtgatactagatggggttctcattacaaaacaatattgcatattattggtatgtaccccacaattcatgaggtgctcataactcttggaaaagaccccacacaaagagatgattggccaagaatacatgctgtggttggagcttttgaatcatttgattttgtttttagtgcacatttgatgcttgtcattcttggatatacaaatgagttgtgtttgtgcttgcaaaagagagaccaagatattgttaatgcaatgtcacttgtaactttggccaaggaaagaatgcaaaaattaagatctgaaggatgggaagaattttttcaaggaactgttgtttcattttgcaataaacatagtatccaagttccaaccttagatggaaaatatgtgccacatggaagatctccacggttttatccggaccaaacaaatgatgatcattttagaagagaagtgtacattggtgtgattgataaaattagccaagagctcaatagtaggtttgatgaggttaatatggaattgctcatttgcatgtcagcattgaatccattcaattcatttgcctcttatgatgcacaacaagtacttaagcttgccaagttttatccaaaagagttttcaaccatggatttgatcagactagaaatgcaacttgggacttttattgatgatatgagaagagatgaaaggttcaaaggcctagaaactcttgctgagctctctattaaacttgttgaaacaaacaagcatgttctttatgattgggtctatttacttctcaagttggtattgatattacctgtagcaacagcaagtgttgagagggtgttttctgcattgagtgtagtgaagagcaagctgagaaatagtatgtgtgacaaattattgaatgattgtttaatcacatttattgagcgggatgtcttctctcaagttagcgaagaagacattaaaaagaatttcatgtctatgaagacccggcgagtagaaaagaagtag

SEQ ID NO: 83271 - DNA, 383 bp, Oryza sativa
  Clone ID: PAT_MRT4530_82619C.1
atgaagttaattgtgcatcccatacttatggacaagtatcctctacatgccgttgtgcctagagagcgtcgccagccgttgtcattgcagtccaccctgtcagatttccatcaatctagttctattgtgcctgaaaaagagaaacacataaaactgattttgccgcggtcatcgcagcttctccacagcagatcccggcgcccgccacggccgacgacgtcgtcgggcaagatcacccgcctcaacgcgcttctccacgccgtcatcgagatcgaggtcaactccgacgcgctccagcagccggcgcgcgccgacaccgagcacgcctctggccacagctactgcgggccgctccacggcgtccccatcctcaaggacaacat

SEQ ID NO: 83272 - DNA, 291 bp, Oryza sativa
  unsure (1)..(291): unsure at all n locations
  Clone ID: PAT_MRT4530_8261C.1
aaaggcaccaaatgnaacccaaaacacatcagcattacaatgcatccagccaccaggctcataaatccgggccacaagcaacacaccacacacacaggcatcaggaccagcaccattggaggtgcaccaaccaccatttcgccattgtgtctgggggcacaatcatagctcgagtccgagctgttagngggctcctgattgcacgccaggctttgtggaacacagcagcatttggggctatcctaaaacccagcataggggccatgggccactttggggtgcatgcatgca

SEQ ID NO: 83273 - DNA, 1432 bp, Oryza sativa
  Clone ID: PAT_MRT4530_82620C.1
ggcgggaaagcgataaggagagcgacagccatagccactcgctgcgcctcctcctcatcgcctcgccgtcgccggagaagacaaccatgaccaccatcgccgcgcggatgccgtttgcgggcccacgcctcaggcctccctgcaacctcaccgcctcgaggccgggtcccaggagggccgggctggccgtcgtctccgccgccgccggtggcccgcttcccaccgtgctcgtcaccggcgcaggcggccgaacaggccagattgtgtacaagaagctcaaggagagggcagaccaatttgtggggagagggctagtcaggactgaagagagcaaagccaagattgggggcgctgccgacgtgttcgtcggggacataagagatcccgcgagcattgctcctgccattgacggcatcgacgcgcttatcatcctcaccagtgcggttccgaaaatgaagcctgggtttgatcccagcaaggggggacgcccagagttctactttgaggatggctcttatcctgagcaggtggattggattggccagaggaatcaaatagatgctgccaagagcattggtgtaaaacaggtggttttggttggatccatgggcggcacagatgtcaatcacccactaaataagttaggaaatgcaaatatactggtttggaagaggaaggcggagcagtacctagcagactcaggtctaccatatacaattataagggctggaggattacaggataaagatggtggtgtgcgggagttgcttgttgggaaggatgatgagatcttgaagacagaaacaaaaactattaccagagcagatgttgcagaagtttgtttacaggccttgctatttgaggaggcaaggtttaaggcatttgatctggcatcaaaacctgaaggtgaaggagtacctacaactgatttcagggctcttttttcgcaagttaatagtcgcttctaagaagtataatctgttcaaccgaggcacaaatatttgtgatggaataatatgaagtgtgtattgagtgaggaggctcctgatggaagagctcaagaacattgttgtctgctaattatggaaaacaggcaagtagttaaagtagacaaacacgcaccttacttatcagcagttccaattcagcaacaacatcatatataggttccttgagacacagaagtgaaggaagaggggcatgggccatgttcatttcagattatatagagatcatgttgtccccatgaaatgaaggtggttttccaatttcggtagctaatgtttggtagtgagaccagtgtcgatgtaaactaaaatctttgtatgtatctttctttcagggttcagattgctccaccgttttttggggggatattcttgatgcaatataaaaaaaggcgaatattagggaaaaaaaaaaaaaaaaaaaa

SEQ ID NO: 83274 - DNA, 255 bp, Oryza sativa
  Clone ID: PAT_MRT4530_82621C.1
atggcggtgacggctcggcggtggcggatgatgatggcttggtggcgcgctaggagcgacgcctcgcacaacagcagcgccaagaggagaagaaggggaggtggtgcagcagcgacgacttttggtgagataagctatggcagctcgacggaggtggttctctgcagcgacgacggcatggtggcgatagagtcgttagcaccacggatgagtaggttgttcagacagcatgagacccttgcttggcaactataa

SEQ ID NO: 83275 - DNA, 325 bp, Oryza sativa
  Clone ID: PAT_MRT4530_82622C.1
cccagcgtccgcccagcgtccggtagaggattggcaattatgcgtctgtattcttttttccttttttactattgttggaaccctgtccgcatgaaaaaaaaaaaaaaaaaaaaaaaaaaaaaaaaaaaaaaaaaaaggggggcgcgcctcaaaaagatccaagattaaagcaagccggaatggcgagggcaatgagttctttaaagtggagccttaaaataaattgactggcccgagctataaaaagttccgaatgggaaaaatcttaggctacccaatgtaaggggactagaagcgattgccatttagcctactggcgttatac

SEQ ID NO: 83276 - DNA, 1173 bp, Oryza sativa
  unsure (1)..(1173): unsure at all n locations
  Clone ID: PAT_MRT4530_82623C.1
atgtcggacccgccggcggacagctgcgacttcgccgtccacctcgtcaggacctcgcgctccgcccacgccatcttcttcgccgccgtcgtggcgtcgtcttcctccactccatcaccatcgtcacctcaccctcgtcctctgctgccgcttctacgccgatctcaagcgcccgccgtggctgcgcacgcaccggcttgctgctgccgccaccgccgcgcccgcgcacaagcaataggctgtgatggcgccggggcggcgaagagatgcggggcgcactcgccgctggtggcggcatcccgagttacgcgcaccgcgacggcgacggcgacgttgagtgcgcggtgtgcctacggcgaggtggagcagggggaggcggtgcggcggctgccggcgtgccagcacgtgtgttccacgccgcgtgcatcgaccggtggctgcgcgcctgcgcgcgagcgccacctgcccggtttgccggangaggaaaagagaggaaagtgttctgtcntgttcccattgttctaaagctcttgctcgccgtcgtcccgctcgccgtcatcgccggcgtgctcgtgtacgtcgccggcgtcccgtgggccatctccatcgtcgtcctcgtcgtcgtcttcgtcgtcgtgcacagggcgcgccgtggcaggtcaccggcggcgggaggaggaggaggaatggtccgggatgatcaagaaccgacggtggcgcggccggcggcgccaagcgccgtcgtcgttgtggtggcgccgccgctgccaccgccgttcccgatccaccgtgtgccggcaacaacggtgcagccctccgcgccgcccggttgtcgccgaagacgtggcgctcttggcgtacgcgtacgagaagaagaagaagaagaggagagggagcgacggcgacagcggcggcggcgacgacggcgacggcggcggcgaggagtgctcggtgtgcctcggcgagatgaggcaaggggaggcggcgaagcggctgccggtgtgcctgcacgtgttccacgaggagtgcatcgacatgtggctcggatcgcacgccacgtgcccgatatgccgctctccggtggacgccggcgccgtggcggcgcgggtgcagcgcttcagcagatgtgttttcatctgcatctactttgagttggatccgtttgttgattga

SEQ ID NO: 83277 - DNA, 239 bp, Oryza sativa
  Clone ID: PAT_MRT4530_82624C.1
ccctgcacgcgtcctgctttacttacggtgagtggtacataaatctctgtgacattggccgtacctgaaatctgggatataatgaattctgccaaccactgctctcaggactctacctgaccgcattgaatgcagatcttcgaggtgcccaagcactgaaccatccaacactcactaggaacacactcactgtcgggttggccacaactaacatacagcttgccaattacattacatat

SEQ ID NO: 83278 - DNA, 312 bp, Oryza sativa
  Clone ID: PAT_MRT4530_82625C.1
atgggtggacgctacctccatcgctccatctgccagcgacggacatccttgattcgccgtcaaccccagccactgccgcccagtgataatatgaacttattccttttgatgatagtacctgttcatctaattaattttataccacacagtatcctgagggaaggcttcatatttgctaagtctgttgttcttccatccttcttagtgatttttacctccagatgtttatatatagatagaatagacaattctaaggttgagtacaatgataacctggaatcgacattgattggaggtggcttggcaccctag

SEQ ID NO: 83279 - DNA, 3980 bp, Oryza sativa
  Clone ID: PAT_MRT4530_82626C.1
atggcgccgacggcggcggcggcggggcccagcgacgacgggctccggaagctggagtacctctcgctggtctccaaggtgtgctcggagctggagacccacattggcgtcggcgacaaggtgctcgccgagttcatcaccgagctcggccgcgactccgcctccgtcgccgacttcgacaccaagctcaaggccaacggcgccgacctcccggactacttcgtccgcaccctcctcaccatcatccacgccatcctcccgccgccctccgactcccgcaaccctagctccgcgtcgcagcccgccgcggggggctccaagttccccggcctctcccgccccgacgaccccgaccgcgcccgcaacctccgcctcgagctcgagcgggacgccgaagaggccgccgcgacggcagcccccgcccccgccagggacgaccgcggccaccgccgtgatgagcgaggacgggaccggggtcgagatgaccgcggccgcgacgacggtgggcgtgaccgcgactatgaacgcggcggccgtgaccatgaccgcagccatggccgggatcgtgaccatggccgtgacagagaccgagatcgagcctgtgatggggatcgacaacgtggccgtgactatggccgtgatagagaccaagacagagatcacgacagggatcgtgaaggtgaacggcggagggaccgagataaggataggggtagagacattgacagagatatggacagggaccataggcgaggcaggaggtatgatgatgaggaagaaccagaacagtttggtggaaggaaagaaggcgctcttgtgaattccagtggcgagccagagttgtaccaggtgtaccggggtagggtgacacgggtaatggacaccggttgctttgtcaggcttgaggatgttcgtggaggacgtgagggtcttgttcacatctcacaaatggcaaccaggcgagtggccaatgcgaaagagatggtgaagcgtgatcaggaggtgtatgttaaggtggtttccgtgaagggccagaaattgagtttatcaatgagggacgtagatcaggatacagggagagatctcctgccaatacaacgtggtggggatgatgcaccaagggcgaacccatctggtggtagtgctagtggtgttggtgtgggctctggcaagaggctgggtctctctgggattatgattgcagaggaggatgaggttgcacctccttcacgtcggccacttaagcggatgagctctccagagaggtgggaggcgaagcagctgattgcttcaggtgttctggatgtgagggattacccaatgtttgatgaggatggggatggtatgttgtaccaggaggaaggggcagaagaggagcaggagattgagcttaatgaagatgaacctgctttcttgcagggacagagtagattttcgattgacatgtcacctgttaagattttcaagaatccagagggctcattgagccgagcagctgctctccaaactgctctcataaaggagcggcgtgaggttcgggaacaggaacagagagcaatgttggattcaatccccaaggatctgaatcggccatgggaggaccctatgcctgatactggggaacggcaccttgcgcaggagctgaggggtgttggactttcagcttatgacatgcctgaatggaagaaagaagcctatggaaaggctctgacatttgggcaaaggtctaagctttcaatacaagaccagaggcaaagtcttccaatatacaagttgaagaaagagctgatacaagctgtgcatgataaccaagtcttggttgttattggagagactggttctggtaaaacaacacaggtgacacaatatttggccgaagcaggctacacgaccagaggtaagattggttgcactcaacctcgtcgtgtggctgcaatgtctgttgctaagagagtagcagaagaatttggttgtcgacttggagaggaagttggttatgccatccgctttgaggattgcactgggcctgacacggtaatcaaatacatgactgatggcatgcttttgcgtgagattcttgtcgatgagaacctttcccagtattctgtaattatgcttgatgaagcgcatgaaaggaccatacacacagatgttctctttggcttgctgaaacagcttattaagcgcagatctgacatgaggcttattgttacttctgctaccctggacgcagagaagttctcagggtattttttcaattgcaacatcttcacaattcctggaaggacgttcccggtagagatactctacaccaaacaaccagaaagtgactatttggatgcagcattgatcaccgtgcttcaaatacacttgactgagccagaaggtgatatcctcctttttttgactggtcaagaggagattgatcatgcttgtcaatgtctttatgagaggatgaaagggctagggaaggatgttcctgagctcataatattgcctgtttatagtgctcttccgagtgaaatgcagtcgaagatctttgacccagctcctccagggaagaggaaggttgttgtggccaccaatatcgctgaagcttctctaaccattgacggcatatattatgtcgtcgatcctggttttgccaaaattaatgtttataattcaaaacaaggactcgattcattggtcatcactccaatctctcaagcatcagcgaagcagagggcagggcgtgctgggcgtactggccctggcaaatgctatcgtctatacactgaaagtgcataccgcaatgaaatgtctcccacaacaatcccagaaattcaaaggattaacttggggtctacagttctcaacatgaaggcgatgggaatcaatgacctattatcctttgatttcatggaccctcctgcacctcaagcacttatatctgcaatggagcaattgtacagcctaggtgctcttgatgaagaagggctccttaccaaactggggaggaaaatggctgaatttccactggatccaccactttcgaagatgcttctagccagcgttgaccttggatgcagtgatgagatactaactattatagctatgatacaaactgggaacattttctataggccaagagaaaaacaggctcaggctgatcaaaagagggccaagtttttccagccagagggggatcatctaactctgcttgctgtatatgaggcgtggaaggcaaaaaacttttcagggccctggtgttttgagaactttgttcaatcaagatccttaaggagagctcaagatgtgaggaagcagcttctcactatcatggacagatataaattggatgttgtctcagctgggaggaacttcacaaaaataaggaaagcaatcactgccggcttctttttccacgctgccaggaaggatccccaggagggatacagaaccttggtagagaaccagccggtgtacatacacccgagcagcgcattgttccagcggcagccagactgggtcatctaccacgaacttgtaatgacgacgaaggagtacatgcgggaggttaccgtgatcgacccgaagtggcttactgagctagccccgagattctacaagtcagcagacccaaccaagatgagcaagaggaagaggcaggagaggattgaacccctgtacgacaggtaccatgagcccaactcctggcgtctcagcaagcgccgagcttgatggctctcacctgtacaatgttctgcatgttctgcggcgctggttcgatcaaattccaaactggaaattttggtgtagctgtaaatattaatgtgactgttgtctcagctgtgtttcttacatgactgttgttagctgagcaggtattgacacatgtaatgtagctggactctgtcctttgttgagacagttcccatgaatttttccgtttgcctaaatgccaacgttcatcattaagtgatgcaattttctgagat

SEQ ID NO: 83280 - DNA, 340 bp, Oryza sativa
  Clone ID: PAT_MRT4530_82627C.1
gcgaatgggtacgggccccccctcgagttttttttttttttttttaagattgggctcagatctagagcagtagaggaagatgaatgcggggaacaacatgagatgacaggctagctgaatggtgactaaccagcaggcccttcatgtgagatgacagggaacaacgtgttattgacggaagtggggttctgtgaaatggaatacctcaaattatggggtttcttaaagtagaccctgaaacctggggtttgtggtaattatgtttcaaaacctggggttttgtgaaatttattcttatataaacaacctatgatattgaaggcccgttccttagagacct

SEQ ID NO: 83281 - DNA, 2784 bp, Oryza sativa
  Clone ID: PAT_MRT4530_82628C.1
atggcggcgccgcccaaggcctggaaggcggagtacgccaagtccgggcggtcctcgtgcaagtcgtgcaggtcccccatcgggaaggaccagctccggctcggcaagatgatgtggaaccatgccagttgcatcctcagaatagacacactcagatgggatgaccaagagaagataagaaattatgttggaagtgcaccagctactgcaagttctgcagctgctatttcagataaatgcaccattgaggttgctaaatctgcccgtacttcctgtagacggtgtggtgaaaagataaaaaagggaacggttcgtgtttcatctaagcttgaagggcaaggttggtatcacgccagctgttttctggagatgtccccagctgcaactgttgagaatttctcaggctgggagatcctgtcgcatgaggataaaagagctgttcttgatcttgttaagaaagatgcccccagctcaggacaaacatcttctaagggttccaagcgcaagaataatcagaatgatatacacgactgcaaagctcccaagataatcaggagtatatcagaaggcacagcagaagataaagggaaagctgttgtatcacatgattccaatgctaattcttctgatcttcaagaaaagcttaaagagcagagtgacacactttggaaattgaaggatgaacttaagaagcatgtgtcaactgctgaactaaggaacatgctcgaagcaaatgggcaggatacatctgggccagagcggcatctattagaccgttgtatcattgcagtggctatgtgtcagaatggtccaaggtcatactctacgacagaacccgtgcgcagtaaaaagaaatggaaaattcctgacgaaatggataatggttatcttacaaagtggttcaagtctcaaaaggctaagaaaccagagagagttcttccgccaatgtcacctgagaaatcattgtgccaatcaacccagcaaaaccgatctttccttagtgaaggactggataaattgagagtttctatagtaggacaatctaaagatgtggttgatggatggaaacagaagctgaaagatgctggtgccaactttaatgccacagttaccaaagacagcagctgcttagttttatgtagtgagcttgagagtgagaatgctgaagtcaagaaagcaaggaggttgaagataccaattctgcgagaaggttaccttggagaatgcattagaaaaaacagagtgcttccatttgatttgtataaagtagaagctgcattggaatcttcgaaaggaggcacaatgactgttaaagttaaagggcgaagtgctgttcatgagtcctctggtttgcaagatacaggtcatattcttgaagatggaaaaagcatatacaatacaaccctgaacatgtctgacctgacacgagaggataatgggtctgattgttatgtattccgaaagtggggacgagttgggaatgaaaaaattggaggcactaagttggaggagatgtcgaaaattcatgctattcaggaatttagaagattgtttcttgagaagactggaaacccctgggaagcatgggaacaaaaaacaaatttccaaaagcagcctgggaaattttatccacttgacattgactatggtgtaaggcaaggaccaaagcggaaagacattgacaaaatgaaaagttcacttcctccccagttgctggagctcatgaatatgcttttcaatattgaaacatacagggctgctatgctggaattcaaaattaacatgtctgagatgcccctgggtaaactaagcaaggaaaatatccaaaaaggttttgaagcattaactgagatacagaatctattgggtaacactaataatcaagaactggcggttagagagagcttgatcgttgccgcgagcaatcgtttcttcacccttattccttctattcatcctcacattatacaagatgaggatgatttgatggtgaaagtgaaaatgcttgaagctctgcaagatattgaaattgcttctaaacttgttggcttcgatagtgacaatgatgagtctcttgatgacaagtacaagaaacttcgatgtgccattacgccactccctcatgattgtgaagattacaagctagttgagaagtatcttcttaacactcatgctcctacccacaaggtattgacatgtcctctttttaaatcttttttgaaggagtggtcactggaattagaggaagtcttttcgcttgatcgagatggagaattcagcaagtactcaagatataagaataatctacataacaagatgttgttatggcatggttcaaggttgaccaattatgttggaatacttagtcaaggactaagaatagcacctcctgaggctcccgtgacaggctatatgtttgggaaaggcctctactttgcagatttagtaagcaagagtgcacaatattgttacgtggataggaagaatccagttggtttgatgcttctttccgaggttgctctaggtgacatgtatgaactgaagaaagccacgtccatggacaaacctccaagagggaaacactcgaccaagggcttaggcaaaaccgtgccgctcgagtccgagtttgcgaaatggagggatgatgttgtggtgccatgcggaaagccagtgccagcatctatcaagacatctgagcttatgtacaatgagtatattgtctacaatacatcccaggtgaagatgcagtacttgttgaaggttaggttccatcacaagaggtga

SEQ ID NO: 83282 - DNA, 397 bp, Oryza sativa
  Clone ID: PAT_MRT4530_82629C.1
cacccttccgattttcaaccctcttgaatttggaggggacccccccccgaaccggacatgcccgaggtcgaccaggtggaagcgagtgggggagggagggatatggcggggggcgggggcccggggattaaggtgtcggccgccgccgtcctgttcccctggaccttcttgaaatccgaaaacgtcgacacctaccataggttgataagagaagctcataggacctgagcatcatttgccttgttcaggaactgtttgacgggcagtacttttgtcaagctcaaaagttggacttctttcatcgtgcttagccttataaagggaacccaactcttatcaggtttcaaaaacttgcacatgagctggaagttgtaatacctgttagcttttttgagga

SEQ ID NO: 83283 - DNA, 336 bp, Oryza sativa
  Clone ID: PAT_MRT4530_8262C.1
ttttgaatctacctgtcctccggggagctagattcgacgcttctttcttccgacgtgtgacagaatgggggtcattgaggatcacacttacgtggttctttagaaggagccattactggccattttagaagctgctgatctcgagtacgggagctgtcatattcatttcatcccacatcgtgaggtgccttaagagcgagggtgactacatttattgcttcttactggaagaaaaatgaggacaagactgaggatatgtttttgccatgagttccatcttgttgtcttgagggtgatggacaatctgccttaatgttaccacctgattctgaccat

SEQ ID NO: 83284 - DNA, 698 bp, Oryza sativa
  Clone ID: PAT_MRT4530_82630C.1
cgggcggctccccggcgggccggggcccttccctccactgcactagcaccactgcaactactagtatagcaagaagggtgatgccgacgacgacgacggcgcggggcggtggcggggtggcgccgttcgtggcgaagacgtaccggatggtggacgacccggccaccgacggcgtcatcgcctggggcagggacagcaacagcttcgtcgtcgccgaccccttcgccttctcccagaccctcctccccgcccacttcaagcactccaacttctccagcttcgtccgccagctcaacacctacgggtttcgcaaggttgatccggacaggtgggagttcgcgcacgtgtcgttcctgcgcggccagacgcacctgctgcgccggatcgtgcgacggagcagcggcggagggggagcgaagaggaaggaggaggccggcggttgcggcggcggaggggaggcggccgccggggacgtcgacgaggagagcgccgtggtggccatggaggtggcgcggctgaggcgggagcagcgggagatcgagggccgcgtcgccgcgatgtggcgccgcgtgcaggagacggagcgccgccccaagcagatgctcgccttcctcgtcaaggtcgtcggcgacccgcagttagtcactatatttcgtgtactagcatatatttcacctagcagtggttttctaagtatc

SEQ ID NO: 83285 - DNA, 1349 bp, Oryza sativa
  Clone ID: PAT_MRT4530_82631C.1
atgacgaacggggcggggggaggaggaggaggagggggattggggggcacgagggtgccgacgtggagggagcgggagaacaaccggcggagggagcggcggcggcgggcgatcgcggccaagatctacgccgggctgcgcgcctacggcaactacaacctccccaagcactgcgacaacaacgaggtgctcaaggcgctctgcaacgaggccggctggaccgtcgagcccgacggcaccacctaccgcaaggtcatagacaaatatgaacataacagagtgccacttacctgcatccagggatgtaaacctcctcaagcagagcgtcctgatccaattggaagatcggcttcgccaagcccttgctcttcatatcaaccaagtccgcgggcttcatacaacccaagtcctgcatcgtcctcctttccaagctctggatcctcctcgcatatcactattggtggaaacagcttgattggtggtgtcgagggaagctccctcattccatggctgaagacacttccgttgagttcatcatatgcctcctcctccaagttcccacagcttcaccatttatatttcaatggaggttccattagtgcaccagtgactcctccatccagctcccctactcgcacacctcgcttaaggactgattgggagaacgcaagtgttcagccaccatgggctagtgcaaattatacatctcttcccaactctacaccaccgagcccaggccacaagattgcaccagacccagcatggctctcaggatttcaaatatcatctgctggtccctcatcgccaacatacaatcttgtttcgccgaatccatttgggattttcaaagaagctattgccagcacttccagggtgtgcacccctggtcagagcggaacatgttccccggtaatgggtggcatgccggctcatcatgatgttcagatggttgatggtgcgccggatgattttgcctttgggagcagcagcaatggcaacaatgaatcacctggactggtgaaggcatgggagggggagcggatacatgaagaatgcgcctccgatgagctggagctcactcttgggagctcaaagactcgtgcggatccctcctgatcgtgctactagagcgtcacttcttcggttgggtttatttcatatttatttgtatgctactcatctgttttttaagttcagtgtttgtagaaagagagaagggaattcagagatcctaccatggtcctctgtagatgatatatccatcctctttcagggatctgaacttgtgttagcttatgcaacttattaacttttttcttttatttactttggttttattctttcttttt

SEQ ID NO: 83286 - DNA, 2892 bp, Oryza sativa
  Clone ID: PAT_MRT4530_82632C.1
atggcggcgccgcccaaggcctggaaggcggagtacgccaagtccgggcggtcctcgtgcaagtcgtgcaggtcccccatcgggaaggaccagctccggctcggcaagatgatgtggaaccatgccagttgcatcctcagaatagacacactcagatgggatgaccaagagaagataagaaattatgttggaagtgcaccagctactgcaagttctgcagctgctatttcagataaatgcaccattgaggttgctaaatctgcccgtacttcctgtagacggtgtggtgaaaagataaaaaagggaacggttcgtgtttcatctaagcttgaagggcaaggttggtatcacgccagctgttttctggagatgtccccagctgcaactgttgagaatttctcaggctgggagatcctgtcgcatgaggataaaagagctgttcttgatcttgttaagaaagatgcccccagctcagggcaaacatcttctaagggttccaagcgcaagaataatcagaatgatatacacgactgcaaagctcccaagataatcaggagtatatcagaaggcacagcagaagataaagggaaagctgttgtatcacatgattccaatgctaattcttctgatcttcaagaaaagcttaaagagcagagtgacacactttggaaattgaaggatgaacttaagaagcatgtgtcaactgctgaactaaggaacatgctcgaagcaaatgggcaggatacatctgggccagagcggcatctattagaccgttgtgctgatgggatgctttttggagcattgggtacttgcccagtttgttctagcttcctatactatcatggtggccagtatcattgcagtggctatgtgtcagaatggtccaagtgtacatactctacgacagaacccgtgcgcagtaaaaagaaatggaaaattcctgacgaaatggataatggttatcttacaaagtggttcaagtctcaaaaggctaagaaaccagagagagttcttccgccaatgtcacctgagaaatcattgtgccaatcaacccagcaaaaccgatctttccttagtgaaggactggataaattgagagtttctatagtaggacaatctaaagatgtggttgatggatggaaacagaagctgaaagatgctggtgccaactttaatgccacagttaccaaagacagcagctgcttagttttatgtagtgagcttgagagtgagaatgctgaagtcaagaaagcaaggaggttgaagataccaattctgcgagaaggttaccttggagaatgcattagaaaaaacagagtgcttccatttgatttgtataaagtagaagctgcattggaatcttcgaaaggaggcacaatgactgttaaagttaaagggcgaagtgctgttcatgagtcctctggtttgcaagatacaggtcatattcttgaagatggaaaaagcatatacaatacaaccctgaacatgtctgacctgacacgagaggataatgggtctgattgttatgtattccgaaagtggggacgagttgggaatgaaaaaattggaggcactaagttggaggagatgtcgaaaattcatgctattcaggaatttagaagattgtttcttgagaagactggaaacccctgggaagcatgggaacaaaaaacaaatttccaaaagcagcctgggaaattttatccacttgacattgactatggtgtaaggcaaggaccaaagcggaaagacattgacaaaatgaaaagttcacttcctccccagttgctggagctcatgaatatgcttttcaatattgaaacatacagggctgctatgctggaattcaaaattaacatgtctgagatgcccctgggtaaactaagcaaggaaaatatccaaaaaggttttgaagcattaactgagatacagaatctattgggtaacactaataatcaagaactggcggttagagagagcttgatcgttgccgcgagcaatcgtttcttcacccttattccttctattcatcctcacattatacaagatgaggatgatttgatggtgaaagtgaaaatgcttgaagctctgcaagatattgaaattgcttctaaacttgttggcttcgatagtgacaatgatgagtctcttgatgacaagtacaagaaacttcgatgtgccattacgccactccctcatgattgtgaagattacaagctagttgagaagtatcttcttaacactcatgctcctacccacaaggcatatagtacaatacagacgattgtttctgttttcttctgtataggttcaaggttgaccaattatgttggaatacttagtcaaggactaagaatagcacctcctgaggctcccgtgacaggctatatgtttgggaaaggcctctactttgcagatttagtaagcaagagtgcacaatattgttacgtggataggaagaatccagttggtttgatgcttctttccgaggttgctctaggtgacatgtatgaactgaagaaagccacgtccatggacaaacctccaagagggaaacactcgaccaagggcttaggcaaaaccgtgccgctcgagtctgagtttgcgaaatggagggatgatgttgtggtgccatgcggaaagccagtgccagcatctatcaagacatctgagcttatgtacaatgagtatattgtctacaatacatcccaggtgaagatgcagtacttgttgaaggttaggttccatcacaagaggtgactagaagacttgaggtaggagtagaaatgtagaattaatcagtggaagtatctccatcgttatcagtagtctgtggtgctacgcttttgatgtgttagaatgatttatccagtagtttcaggttggtag

SEQ ID NO: 83287 - DNA, 2835 bp, Oryza sativa
  Clone ID: PAT_MRT4530_82633C.1
atggcggcgccgcccaaggcctggaaggcggagtacgccaagtccgggcggtcctcgtgcaagtcgtgcaggtcccccatcgggaaggaccagctccggctcggcaagatgatgtggaaccatgccagttgcatcctcagaatagacacactcagatgggatgaccaagagaagataagaaattatgttggaagtgcaccagctactgcaagttctgcagctgctatttcagataaatgcaccattgaggttgctaaatctgcccgtacttcctgtagacggtgtggtgaaaagataaaaaagggaacggttcgtgtttcatctaagcttgaagggcaaggttggtatcacgccagctgttctctggagatgtccccagctgcaactgttgagaatttctcaggctgggagatcctgtcgcatgaggataaaagagctgttcttgatcttgttaagaaagatgcccccagctcagggcaaacatcttctaagggttccaagcgcaagaataatcagaatgatatacacgactgcaaagctcccaagataatcaggagtatatcagaaggcacagcagaagataaagggaaagctgttgtatcacatgattccaatgctaattcttctgatcttcaagaaaagcttaaagagcagagtgacacactttggaaattgaaggatgaacttaagaagcatgtgtcaactgctgaactaaggaacatgctcgaagcaaatgggcaggatacatctgggccagagcggcatctattagaccgttgtgctgatgggatgctttttggagcattgggtacttgcccagtttgttctagcttcctatactatcatgggggccagtatcattgcagtggctatgtgtcaaaatggtccaagtgtacatactctacgacagaacccgtgcgcagtaaaaagaaatggaaaattcctgacgaaatggataatggttatcttacaaagtggttcaagtctcaaaaggctaagaaaccagagagagttcttccgccaatgtcacctgagaaatcattgtgccaatcaacccagcaaaaccgatctttccttagtgaaggactggataaattgagagtttctatagtaggacaatctaaagatgtggttgatggatggaaacagaagctgaaagatgctggtgccaactttaatgccacagttaccaaagacagcagctgcttagttttatgtagtgagcttgagagtgagaatgctgaagtcaagaaagcaaggaggttgaagataccaattctgcgagaaggttaccttggagaatgcattagaaaaaacagagtgcttccatttgatttgtataaagtagaagctgcattggaatcttcgaaaggaggcacaatgactgttaaagttaaagggcgaagtgctgttcatgagtcctctggtttgcaagatacaggtcatattcttgaagatggaaaaagcatatacaatacaaccctgaacatgtctgacctgacacgagaggataatgggtctgattgttatgtattccgaaagtggggacgagttgggaatgaaaaaattggaggcactaagttggaggagatgtcgaaaattcatgctattcaggaatttagaagattgtttcttgagaagactggaaacccctgggaagcatgggaacaaaaaacaaatttccaaaagcagcctgggaaattttatccacttgacattgactatggtgtaaggcaaggaccaaagcggaaagacattgacaaaatgaaaagttcacttcctccccagttgctggagctcatgaatatgcttttcaatattgaaacatacagggctgctatgctggaattcaaaattaacatgtctgagatgcccctgggtaaactaagcaaggaaaatatccaaaaaggttttgaagcattaactgagatacagaatctattgggtaacactaataatcaagaactggcggttagagagagcttgatcgttgccgcgagcaatcgtttcttcacccttattccttctattcatcctcacattatacaagatgaggatgatttgatggtgaaaatgtatttcttattgccaattgtaactttattcagagacccaattgactgtaactttggtgcaatggtgcaggtgaaaatgcttgaagctctgcaagatattgaaattgcttctaaacttgttggcttcgatagtgacaatgatgagtctcttgatgacaagtacaagaaacttcgatgtgccattacgccactccctcatgattgtgaagattacaagctagttgagaagtatcttcttaacactcatgctcctacccacaaggcatatagtacaatacagacgattgtttctgttttcttctgtataggttcaaggttgaccaattatgttggaatacttagtcaaggactaagaatagcacctcctgaggctcccgtgacaggctatatgtttgggaaaggcctctactttgcagatttagtaagcaagagtgcacaatattgttacgtggataggaagaatccagttggtttgatgcttctttccgaggttgctctaggtgacatgtatgaactgaagaaagccacgtccatggacaaacctccaagagggaaacactcgaccaagggcttaggcaaaaccgtgccgctcgagtctgagtttgcgaaatggagggatgatgttgtggtgccatgcggaaagccagtgccagcatctatcaagacatctgagcttatgtacaatgagtatattgtctacaatacatcccaggtgaagatgcagtacttgttgaaggttaggttccatcacaagaggtga

SEQ ID NO: 83288 - DNA, 445 bp, Oryza sativa
  unsure (1)..(445): unsure at all n locations
  Clone ID: PAT_MRT4530_82634C.1
tnctcntctgagccctggcacgacagggacatggtggtgttttatctagccctggctgcgataacaaccagccaatctcagcagcctctgatcgatcaaccagtaaaccaaaagttttttaaacatagtggtggcagttttactgctggtcgacaatgggaggaattacagcgacacgtgtcagcacgtgagggccacgtggtacgggcagacctactgatccgggtccagtacggataggatctcctgcggcatcaatatcatcaaccggtcgtcatgcaacggcttgatcttgtgcggtagcgacccaatcttaagggacggtaggggaagcaatctgcgacttggaactgaagtgggagtagctaggcaaataacagaggaaggcagataacggcgttcatcaaggacatgagctacgagcaccattgggtttaccacttga

SEQ ID NO: 83289 - DNA, 353 bp, Oryza sativa
  unsure (1)..(353): unsure at all n locations
  Clone ID: PAT_MRT4530_82635C.1
ccagatccagaaatttngacccccaatggacnaacccctctaccngcatgggaaccaccccaaatatatccacttaccgggnaccacccaacaatgtgtgaaggtaaacttgaaggggnaaattcctctctgtccnaaacagtaggtgaaatganactgctttggtttgtgttgcgaatgtggatgctgtactanctttanttttgtgtggcatttncaagagagaaacgttgtaccgtatanctgactttantgttgggcatgtgcaantctcttgagatgtntgaantantgctcctgntgntattgttaccantccatcgcatcaaaaaaaaaaaaaaaaaaaaaaaaaa

SEQ ID NO: 83290 - DNA, 297 bp, Oryza sativa
  Clone ID: PAT_MRT4530_82636C.1
atgtggaggaggcatcgaggagactggacggcgcagtcagcgacgtcgaggaggccgcgcgtggaggtcgacggtgatgggattgaggctggcgtccggcgtggagtggatgtcgtgctggaggttgacggcagcgagcttggcgccggagtcagaaaggaggagaaaaaggttgtgtggtgccaatatgatgtctacggaggccaacaagagggatctagcactatgtctaatctcgccaagtgcagactcgaggaggaagactaccctgtagtcgactacgtgttggttatccat

SEQ ID NO: 83291 - DNA, 357 bp, Oryza sativa
  Clone ID: PAT_MRT4530_82637C.1
atggctcgtccccacctcaatccgtccctccctctccttaaagcacgccgcacgccgcctagcacactgacagggtggggttacacagccgccgccccatcagtcattcgaccggtcacggaccggtcacagatcggtcacaaacctgtcagatgcgcaacacgcctcattaaggctgcaacgaccgctttaaatgcgctgccgctccaccccgggttcgaccccccttggggggagccacgtacgcttgggggcggccctgaccccaagctgggtgggggcagccgccgctccaccccgggctcgacccccctcggggggagccacgtgggtttggcggcggcctcctccctctaa

SEQ ID NO: 83292 - DNA, 225 bp, Oryza sativa
  Clone ID: PAT_MRT4530_82638C.1
atggacatcacgagtgggagaagtacattggattccacgctctttgtaggcacggatttcagcttgtacgtcgaggaaaatcgagcaagttttcaagatgttgtcgatgttccgttctccgcttctgcgggaggatctttcgacatggatccatccagggtcgtaaccacgccgttctcgctcctggtagttgctgggccaatcgagaccggcatcatggtgtag

SEQ ID NO: 83293 - DNA, 321 bp, Oryza sativa
  Clone ID: PAT_MRT4530_82639C.1
atggcgtcagcgcgggcggggtcgacggcgggcgggcggtgtccggatccggcattggcggccggcggggtgcctcgaggagcggaggtgtccggcggagggctcgaggaggagaggcggcggcaggcaaagggctcgtggaggtggcggcaggcggagggctcgccggcggggaggagcccttctccccgccagatctggccggctgaatccatctttgaacgttgtgggatgaatgttgtggatccaaatttgctctgtgtgggaggagttcttgcagatgtgggaggatggactgctcggcttgatgcgtcagcttga

SEQ ID NO: 83294 - DNA, 410 bp, Oryza sativa
  Clone ID: PAT_MRT4530_8263C.1
tgcctgatcctgcaatgcatggtgttgggggtggtgcgacgccatctatagacgccatccgatgcgtcccaccgaaagaggacccagcgttacaggctatgcgcatcgccgcagacattaccggattgcagatcttacgcaacaaacaccacaacctgaaactcagggaaaacaagtatcctatggcagctcaagtgctccataaccaagaggagggagggcgcttccctagagcatgggcaaggaacctactgacgcgtcaggaccacttagatcaccccaggcattaacaggtcctgcactgaaccatcaaagtggtcaatgaatcgaaacggttggggattgctctgctattcactactatagatggtacgatttaaagcattttacccatatcaagcattacatat

SEQ ID NO: 83295 - DNA, 4914 bp, Oryza sativa
  Clone ID: PAT_MRT4530_82640C.1
atggcctcgccggcgggggcaatcggcggcgcgtcgccgtcggggcgggtgctgggccctgcgctggaccggatcatcaagaacgcggcgtggcggaagcactcgggcctcgtggcggccgccaaggcggcgctcgacctgctctcctcgtcggcgtacgcgtcggcgtcggcgccgtcgccgccgtcgctgctgctcgggttgccggcggccgccgcggacgcgtgcatccacgcgctcctcctcgcgctcgagtcggcgtcccccaaggtcgccgacccggcgctcgactgcgtcgccaagttgctctaccaccgcctcctcgtcggtgatctcggcggtggcggcggcgacgacgactccccgtcctccaagctgctcgccgccgtgctctcctgcggcgcgctcgccgacgacgccatggagctctccaccctccgcgtcctcgtggccgccgcgcggtgcccctccgtcgccatccgcggggaagggctcggccagatgctcaagacctgctacaacatatacctcagtagcagcagcggcgccaaccagctctgcgctaagctggcgctggcgcaggtgctggtgatcgtgttcgcgcgcgtggaggtggactccatggatgtgcgcgtgcgcacggtgtcgatcaccgacatgatggacatgtctgaccgcaacctgaatgactccagcattgtccatgcggcgcagagcttcataaacgagacgatggagggaagcgatgtccctgagccggggtccccggttgagccggccgagacggatgggaaggaggatgttgtcatgagcaagatcagggaggatgggttgacactgttcaagaacctgtgcaagctgtccatgaagttctcgacgccggataatcccgaagatcaggtcctgctgcgcgggaaggtgttgtctcttgagttgctcaagatggttatcgacaatgctggggcattctggagaacgaatgaaaagtaccttggagcaatcaagcagtatctttgtttgtccttgttgaagaacagtgccttgtcagcaatgagtatttaccaactgttatgctccatatttttgggtttgctgtcaagatttagatctgggctgaaagaggaaattggaatattttttcccatgcttgttctgagggttcttgagaatgtccatcaacctagctttctgcagaaaatgactgtactaaaccttttggagaagatctgtaaagactcccaggttattattgatgtctttgtgaactatgattgtgatgttgatgcaccaaatatctttgaaagattattagcagcaggtatgcatctatttagtggcctgattgtcaatgggcttttaaagactgctctaggggttcctcctggatctgcaacaacattaacccctgcacaagaccagacatttcggattgagtcagtcaagtgtcttgcaaccataataaaatcaatgggttcatggatggaccaacagctgaaaattggtgaattttcacccaaaccttctgaaatatctttaaattcgatagacattcctaacatccttgttggagaagatgggggtgctgttgattatgaactgcaaacagactctggtaacccagacctatctgacgcttcctcacttgagcagcgtcgtacttataaaatagaacttcagaaaggaatttccttgtttaacaggaagccttccaagggtattgattttctcattaaaagcaagaaaataggtcattccccagaagatgttgcttctttcttgagagatactgctggtttaaacgcaacaatgatcggggactatttgggtgaaagagatgaattccctatcaaagtaatgcatgcatatgcagatgcactgaacttcgaaggtatggactttggtgaagccattaggtattacttgcgaggtttcaggttgcctggagaagcgcaaaaaattgatcgaatcatggaaaagtttgctgaacgatactgcaaatgcaatccaaattcttttaccagtgcagatactgcatatgttcttgcttattctgtaattatgctcaataccgatgctcataatacgatggtcaaagataagatgtcgaagtctgatttcattcgcaataaccgaggaattgatgatgggaaggatttgcctgaacattatctgagtacattgtatgatcaaattgtcaaaaatgagataaaaatgagtgctgattcgtcagttccacaaagcaagcagcctagtagtgtaattaagctcttaggcttggataacattatcaaccttgtcaactggaaacaggctgaagacaaggcacttggagcaaacgacttactcattaagaacatacaggagaaattcaaagcaaagagtgggaaatcagaatctatatttcatgttattactgattctaccattttaagattcatgatggagacacagcgagatgcctttgtgacatctgttgccaaattcacttacctccattgtgctgcggacatgaaacaaaagaatgtggatgctgtgaaggctataatatccatcgcaattgaagatggtgactatttgcaggattcctgggagcatgtactaacatgtctttcacggtttgagcatctacatctccttggagagggggcacctactgatgcttcatttttgacagtgcctctggttgagtcagaagataaaacacagaagtcaagtagcactacagcttcgaagcgaactaatgctcttcagaatccagctgtaatggctgccgtcagagggggttcttacgacagcacaacagctaaaaataatgcctcaccattggttactcctgaacagataaatagcttcatatcaaacataaatttgttagaccagattggcatttttgaattaaatcatatatttgctcatagccagagattaaatagtgatgccattgttgcttttgtgaaagctctttgtaaagtttcgatgacagagttgcactcacctacagaacctcgcatcttctgcctaacaaagattgtggagattgcgcattacaatatgaaccgcatacgtctggtgtggtctcatatttggaaagttttatcagacttctttgtgtctgtgggatcgtcagaaaatctctcagttgcaatatttgttatggactctttgaggcaactagcgatgaagtttctggaaagagaggaactggcaaattacaattttcagaatgaattcctgcgaccttttgcagttgttatgcagaagagcaatgcttcggaagtacgggaacttgtcgttcgttgcatctcccaaatggttttgagtcgtgttaacaatataaaatccggatggaaaagtgtttttacggtttttactgctgctgctgctgatgatcgaaaaagtattgtgctgttggcatttgaaaccatggaaaagattgttcgggactattttccatacataactgagactgaaaccacaacatttactgattgtgttaaatgtcttattacattcacgagcagtaaatttagcagtgatgccagtctcaatgctattgcatttcttcggttctgtgctgttaaacttgccgaggaaggatttgtttgtcatgaaaaggatacagatcaccagtcaaataacttagatgtttctgatgggaatgccactctgcacaaggacgatcatgtttatttctgggttcctctgcttgccggtctagctaggttgacaactgacacaagaccaacaatcagaaaaggtgcagtagaggtactctttgacattttgaaggatcatgggcacctcttctcgcagtccttttggagaaatatctttgaatctgttgtttatcctctatttagcactggtagctctacaccaaatgggcacattaatctaactgaggatgactcttggaattctgaaactaaaacagtagcagtcaagtgtttagtggatttgtacattaccttttttgatgagatgcggacagaactttctagagttacttctgttgtcacaaactttatcagaagtccttataaacagtctgctagcacaggtttatctgtttttcagcgtttaacagaaggacttgaaagcagactctccaaggaggaatggaaagagatcttgttatgttttaaagactcagcaatgcaaacatttgtcgtgtttgacaagatagttaggatgatgcaagatatagaaattccagatagaaatgaatcttatcctgaagttgaacgatattcagataatgacatatacaatgatgatgaagaggaagctaatatggaaacaacatcatacgctattattaaattgaagaatcatatggcgcagcagctcttagttgttcagggcatagttaaattgtatgagacacacaggtggtctttttatgctgagcatatgggaataattttagagacactatcagccattgcgtcacatgcaagtgaagtgtctgagccagcagtcattcatttcgagaatgagtcttaccagagctatctcaaacttctgcaagctttggttcatgaccacccatcaatctcagaagatatgaaaattgagtcacatattatgcttgtttctgagaaaatactacggaagtatctcaaatgtgcagggcgtgaacgatctaacgattcatctggtagagatccagcattacgctggaaactgcctttgggcactgctaagaaggaggaactgtctgctagaacttcattggtccttcatgtgatgcagttattgggtggcctagagagggactgctttaggagaaacctgcccctgtttttccccttattaactaacctcattcgctgtgagcatagctctggagaagttcagcttgcactgtatgatatattccagtcatcgataggccctataatatcaacatag

SEQ ID NO: 83296 - DNA, 1880 bp, Oryza sativa
  Clone ID: PAT_MRT4530_82641C.1
agtactatatcaatgtatatgtaattaatgtatattacctgttctacaagatctacactaaaatttaaattagtatgcaattatacaaattactcggcaaaagtttcatcttttttttcttcttccacggcgaaggccggccatgatcagtcagccgcagcgacggtggctaccagcccatgctgcaggggcgacggccggagcgcctccctcggcgtggcgggcgccgccgcgccgttgaagctccggcgctgcggcgacgagaaccgggaggacgcggacgcggcggcggcgctcctcggcgacaggttgacctgctccagcgcccgcagctgcagctccgacgggtagtcgcgcacgcacccgatccgcggcccggcgccggtcgtccaccggaaggagagctgcttcccgagctgatacgacctcatccccttcttggagttgatcctctccaggatcttctccctcggcaccggcgcctgctcgccgccgccttcttgatcctcctcctcggcttcagtgttctcagcagcagcagcaacagctgacgacgaatctaccctcctcgtcgccgccggttcgtcgcagccgtcgatctctgcacaggttggttcgtcagagactcgaggcatctgggaattgccggtttcttcagcttcagcggcttggtcttcagagttgtcagtggcagtgttcttggggtagctctctgaactgatccttttcaggctaccccagaattcctcgtcctcctctgctgggctcatcttaacatcggtgagatcgacagagttgtcgttcaggaagctcttgaactcctcgaagttctcctcagttgggcggtagtgtccactatgtggccaaatagcctttaaggttccattttcaaccaccaatcgcccggcagcagaagtcgcccctccagcaaggaagcttgaatgttgaaatttgcctttcttcttctggccaacatacaagctctttgatgtgctaagaacaaagatccactttgcatctcttggcccacaagaggtatcgaggatttgccggcttttcttgtacaagaacttgccatcctcaagtataacttcatagtcctctctttctttaggaccaaggtacttgatgcattggctcaaaagcttcgacctggagcacttgccctcaagattgatctctttcccttctcccacatcaagccagtagaagaaaggctgcttgctctcgcagtggagccaggtatcatagtagtagtgaaggttgtgaccataccggtggcgcgggtcaatcgcttcgagccagtgctgtaatgcgagtttctgtgccttttcatccttggacaatcccttcccgaccttggcagctcgggttcttgctctggaccatctggagacggccgtctcctgcttctcgatgtcgaagaaggagacggagctccgcttgaggagggcgaagtcgaggagcttccaccagctctgctccaccagcacggcgcagtccgcgagctgccgccgcgtccggaagctcttgtacaccttctgcagcttcaccgccgccgcctcgtgcttcgggctctccgccgccgccgcgccgccgtcggcggcgaacctcgcccttggcgcggcggcaatgtcggcggcggcaggcttgatggagatctcggtctccacctggaggagggaggtggggctcatctgctggtcacgcttgaagctgagcgacccttcgatgagcagcttcccggatcccaacgccttcaggatcgccgccggcttgccgccgccggagttcgactccgacgacgccgccgccgccgccgcggcgctctcctccaatgcgtcgtagtcatcgacggggcacgagaagaggacgcccat

SEQ ID NO: 83297 - DNA, 878 bp, Oryza sativa
  Clone ID: PAT_MRT4530_82642C.1
ttatgacgtgaaggtgaatccctggacggagttagggttcgggcattcgacaaagttcacggatggggttccaggagggtatttcgaatagaaggaatcgagcttcgggactgtacttgagttgaaggaccaagagaggagctggtgcgactcgacaagttccccggtggccgccgagaatcccacggccgcgtcctgcggcaagccggcggctctcaggtccaccgccgcctccacgccgtagttcgacccgttggccgtcaggttgacgaccatcttcctcgcggcggcgtcgtacctgatctccgcccgcatgacgccggcgagggtcaaggtcggcagagcggtgaagttctgggacacaatctggttgacgtcgacgccgatgtggtcgatgacgccgtcctgtggatcccaggggttcctgcaggtgtcgaactctacgccgacggtgcgcggcgaggcttcgccggtgttggggatgaggccgaggaaccctccggtcatgtccggcgcgagcgtgtccgccggtggcccgacgtagaacgccatgccgtccgcctggttcgtggagttgcggccgatggcgaaggagaaggcggtggtgaagctggtgaccgacccgccggcgccgtcgtcccagagccgcacgagctgccggtgcgccacgcgcccggtgctccacgtgcccagcctcgtgaggttgatccggtcgccggcgtaggaggcgttgcccatgaacacgaggtttgcggcggcgacgtcccgccccacggctgcgaagtcgtagtcgaaggagagcgccgccgcggcgcggagggtggtgcagcagaggaagaggtggaggaggacatggctggccatgttcatctgctttg

SEQ ID NO: 83298 - DNA, 343 bp, Oryza sativa
  Clone ID: PAT_MRT4530_82643C.1
ttttgtttttcttttttgtttggttttttttttttttttttttttttttttttttttttttttttttttttttttttttttttctttttttttttcttttttaaaaaaaaggggtttaggggtacccctattggcgttgaacaaaacccccgcccgaaactataaccacgggcctgtatccgggcagaggccacagagatggctagggcgggttgttctacaaaatagggggcttcaggggcacaaagttgccctgggggaagcctaaatacccttacaaagccaaacaaccattgatgccatggcgttaaattgaacacccgggcgtccataagggcgagac

SEQ ID NO: 83299 - DNA, 282 bp, Oryza sativa
  Clone ID: PAT_MRT4530_82644C.1
atggcggtggagcagcccacgcggcaacaagcagcagctccggcggcgtccagcggtgcggcggaagacggcggcggagacgacaccgtcgtcgacggtggaggcgcagcactggagctgcgcagccgcacgcggaccccgccaacgccaccggcgcgcgagggggtggcgagcttcgggagctccacccgaaagacggcggtggatctcgggaggctcctcgagcggccctactccggcgagccccacgcagcggtggcttccctgagccccacgcagtga

SEQ ID NO: 83300 - DNA, 644 bp, Oryza sativa
  Clone ID: PAT_MRT4530_82645C.1
cgcaatcatcgtgcagagcttattggagcatgataaatgcatattcaatagttgcatacatagcagttgctagttgctacaagaagcatggagggcatgagactagagttgtactaggtgagatttatcctatttcaattatgtacaggacagatacaacctttagctgtttgtcatggtacatatgagcagcatctactggttgtcttcctttggtttctggctgagctccgagtaatgccctcccatcagctgcaatatctcggtccagagacaagaaggatcgcctgtcagtgcatcgctgatcagctccgtgctgcaggaggcgacggcccagtatcctgccctgatctcgctcaacagctgctcgtaatcccacgcagcgtgcccgacgaagaacctcaggtcctggctcttaattgccccactcttcatcagaacagcagccttctctaggtcggtccggaagccaaagcgaatgcctggtatgacctcctcgaaccccttgagacgagagttgtcactggccctcaccaggaacatgctcatgtcgacagggcctccgaagaagaggggggagtcaccgaacggagttgcctggtcctggacccacgcgtccgcccacgcgtccgcccacgcgtccg

SEQ ID NO: 83301 - DNA, 283 bp, Oryza sativa
  unsure (1)..(283): unsure at all n locations
  Clone ID: PAT_MRT4530_82646C.1
aaaaaaaaaaaaaaaaaaaaaaaaaaaaaaaaaaaaaattaaataaaaaaaaaaaaaaaataaaaaagaggagatttattaaaaagagaaggaaggccgaacattcatanttttggggccgccccttttaaagaacccaactttacttccccttccttccaacgtaataccttttttatagggccccctaattcaattccactgcccgccttttaacaccttctaaactgaaaaacccttgcctttccccaattaattccctttgaaaaaaatccccttttcc

SEQ ID NO: 83302 - DNA, 138 bp, Oryza sativa
  Clone ID: PAT_MRT4530_82647C.1
atggacgcggtttatgctgtgctccctgccgccgtgtcacctgaaatcgtccggacaaaaaagatccagcgggtccctcaactatcaaaaccggtgcagatgaggttcctcgacggtttagatggtggtcttgactga

SEQ ID NO: 83303 - DNA, 858 bp, Oryza sativa
  unsure (1)..(858): unsure at all n locations
  Clone ID: PAT_MRT4530_82648C.1
tccngggttgcaggattcggcacgagtttttctttctttctttccttcctccacaactactccctcctcttctctcctcttctcctccctttcgctccaagaaacgcagccaagctccgcttcgcttgcctccacgccaccatctgcgcgcgccactccgatcgatcgatcgatcgatcgatgggttcttccgatcagaaggtgatcgggatcgccgcggcggcagcggcggcggcggaggaggctgggaggcggtgctgcgtcgaatgcggcgccaccaccacgcccatgtggcgcggcggcccgaccggccccaggtcgctttgcaatgcgtgcgggatccggtacaggaagaagaggaggcaagagctaggcctagacaagaagcagcaacaagaacatcatcctcatcatcatcaacaacagcagcagcagtatcagcggcagcaacagcaacagcaacaagaagatcacagtgatgcagcaagttcagtaaaagacagtagcagcagcagtagcaacaaaagcagcagcctccaagtgatctctgaaatcgtcatatcgcgatccaaatccgattgcgaaggcgcgatggagggaaattgtgtgcccttgaagaggttagtgcaacaagtagattttctactatcatctactgggattacagaaagctgccaatgtgttgctgtttcttgtgccaatcagatgggattacagaaagctgccaatgtgttgctgtttcttgtgccaatcagagttctgacaatggaaaacaacagctgtgacattttgcatatcatcagaataataggcagaggctgtggcattgagtccaagaccagaataatagacagataa

SEQ ID NO: 83304 - DNA, 717 bp, Oryza sativa
  Clone ID: PAT_MRT4530_82649C.1
atggccgtgaagaagacgatgaaggtcgtgttctcccttgtgctcttgctgctccctctcgcctctacctcggcggtggaggtgaaattcgacttcatgtattttgttcagcagtgggctccatcgtactgctccactgccccgcacgagtgcgagtacgagccccggctacccccaaataacttcaccatccgtggcctatggccgagctacgaggaatggcggccggagtactgcaacatcagcgaccgcctcgacccggggcagatccaggacctggtgaagccgctgaaccagtcatggccgtcgctgctgcgcaacgagaccaacctcgagctgtggagccacgagtggagcaagcacggcacctgctccaacctcagccagcacggctacttcgccgccgcgctcgcgctggacaagcttaagctcaccaaccttaccaagatcctcgccgacggcggcgtcgtgccgtccgacgagaagacctacacgctcggcgagatcagcgacgcactcgccaagggcactgggttcagcacctacctccggtgtagccagaacgagctcaagtacggggagacgctgctgtacgaggttttgcagtgcgtcgaccgctccggcgagaagctcgtcaactgcacgacgccgtactgggtgacccgctgccttgaccctgacaagatcaagataccggcttggttctatggacagtag

SEQ ID NO: 83305 - DNA, 341 bp, Oryza sativa
  Clone ID: PAT_MRT4530_8264C.1
ccacgcgtccgccacgcgtccgacgagcgggtgattctgtaggtatttatgttcaagtcggtctgctaggagatgccatttttacttgctaccaacattgttcaattgctagtgttattactatgtgtagccgttttatttattctaaaggctcccttgtttcttgtggtggttttcgtttactgtgtaagccagtttgctgctgcgtaaacagcttgataagtttagaaggatagagaatttgcctttctttaacctgagaccacttcgaattatttttggagcaatgtatactaatactgtattattcagttcaaattggccctacgtagcattgtcct

SEQ ID NO: 83306 - DNA, 1130 bp, Oryza sativa
  Clone ID: PAT_MRT4530_82650C.1
aaaaacattgaaaccagctcattaatgattaatttaatatgtgaataagcggctctatggtctcaagcaggccccacgggcatggtccagccggtttgccagctttctccttacactcagctttgttgaggcaaaatcagatacatctttgttcatctaccatcgaggatcagacacggtttatttgctcctctatgttgatgacattgttctgacagcctcctctgatgcacttcttcgatggaccatccgtgctctccagtcggagttctcgatgaaggatcttggcagcttgcatcatttcttgggcatctctgtttctcggcagtcctctggccttcatctcagtcaacgccagtactgcctcaaggttctggagcgtgctggcatgacagattgcaagccatgtgctacccctgttgacaccaacgccaagctctctgccgctgatggtgccccagttcatgatcccacgaactatcggagtcttgctggcgccctccagtacctgattttcaccaggccagatatctcttatgctgtccagcaggtctgtcttcacatgcacgatccacgggagcctcatcttgctgctctcaaacgcatcttgcgttatgtccatggcacggttgattatggtcttcacatccgccgctcctccactgttgacttgagtgcatactctgatgctgattgggcaggttgtccggacaccaggaaatccacctcgggttatgctgtgttccttggcgacaacttggtctcctggtcctccaaacgtcagcttattgtatcgcgctccagtgccgaggcagaatatcgtgtcgtggccaacgcggtggtggcttcgacagcttcttcatgagctccatacccctccgagccgatccacattggtttactgtgacaatgttagtgctgtctatctctcttctaacccggtgcaacatcagcgtactaagcatgtggagatcgatctacatttcgttcgcgatcgcgtcgctgccggatctgttcgagtgctacatgtacctactacgtcacagtttgccgacatcttcaccaaagggttgcccagtgccatcttcttggagtttcggtccagtctgaatgtccgttcccacgacgtt

SEQ ID NO: 83307 - DNA, 693 bp, Oryza sativa
  Clone ID: PAT_MRT4530_82651C.1
atgaaggatcttggcagcttgcatcacttgttgggcatctctgtttctcggcaatcctctggcctacatctcagtcaacgccagtactatctcgaggttttggaacatgctggcatggcagattgcaagccgtgtgctactcctgttgacaccaacgccaagctgtctgccaccgatggtgccccggccagacatctcctatgctgtttagcaggtttgccttcacatgcacgatccacgggagccacatatgtccgtggaacggttgattatggtcttcacatccgctgctcttccactgttgacttgagtgcatactctgacgccgactgggcaggttgtccggacaccaggaaatccacctcggattatgctgtgttccttggcgacaacttggtctcctggtcctccaaacgtcagcttactgtatcgtgctctagtgccaaggcagaatatggggcagtggccaatgcagtggctgaaacttgctggcttcgacagcttctccatgagctccatacccctccgagccgatccacactggtttactgtgacaatgtgagtgctgtatatctctcctctaacccagtgcaacatcaacgtaccaagcatgtggagatcgatctacacttcgttcgagatcgcgtcgctgccggatctgttcgcgtgttgcatgtacctactacatcatag

SEQ ID NO: 83308 - DNA, 2914 bp, Oryza sativa
  Clone ID: PAT_MRT4530_82652C.1
acggcctacaacccgtggacaaggagcatccacatgtggccggtccaggcctccttggcgcgcggcctagcttcgccgggacagccttcaccaccacgcccgcgccggcccagcagcaagccttcctcccgccggcctatatggctcttcctaggccggcccacagtgggacccacgggccctcgccaacgcgtacaacacggccacattaactactccaccgtccaatgaatggtacatggactcaggtgctacttctcatatgacgtctgacaccggtaccctctccacttcccaaagccccacccgcaatactccctctcatactattgttggcaatagctcccttctccctattacctccgttggtcacgcatatttacattaccccaattcttcctttgtgcttaacaatgttctcatttctcctgagattattaagagccttatttccgcacgccgttttacttgtgataattggtgttccgttgaacttgacccttttggcctctctgtgaaggattacccaaccaagatcgagatcgtcaggtgcaatagttcctgtgctctttatcctctcccggcagatgcgtactcctcggcggcctccactcgtgcctttgtcgcctcctccaccaacaccgacctatggcatcgccaccttggccacctcggtcatgaggccctcacccacttggccgtgacatctgtcatcccaccacctaaagtcactacatctttatgtcatgcttctcagttaggtcgtcatgttcgtcttccttttcccactagctctagtcgggccaaggcaaattttgatttagtgcattgtgatttgtggacatcacctattcctagtgtgtctggttttaagtattatcttgtcattcttgatgattgctcacattatgtgtggacctttccacttcgctttaaatccgacacattctccacattatctcatttttttgcctttgtgaagacacagtttgccacgaccattcacagcatccaatgtgacaatggtagccataaagggtatcggtgtctagaccttaccaccaacaaggtcatcacctcgcgacatgtggtgttcgatgagacatgttgtcgcgtggaatcgatcccctccacctcctccacttttcccccactctccccgcgaaaatcggcgccggttaacccctccaccaccccacgtcggcgccccacttcgccggccgattccgccacgtccggcctcgatcccgccttcccgagcccataaaaagcacccccgtgctcccctcgtccatttccccttgtttcccgggcccggcactctctccctcgctcttccccacgccgctcccgcgcgccgccacactccggcgaactccggccgccgtttcccgtcactagggtcgccgccgccctgctccgccgccaccgccagctttgccgccgcccgggcaagctcggccaccgctccatttcccctctccacctccgtagcgccgtagccacgcgaaccacctctctccgctgccgcccccgactccagccgcgtcgcgccgccgcttcggtcgacgccgacccgcgccgtcacaccatgacgacacgcggcaagcacggacttcaccaacccgtcaagcgctacaacttgagtgccaccactctctctccagttccgcgcacatatcgtgccgcactggccgaccccaattggcggtccgccatggaggaagagttcactgcgctgcaggccaaccgtacatgggacttggtcccccgcccaaatggcgccaatgtcgtcaccggcaagtggatcttccgctacaagttccagtccgacggcagcctggacaggtacaaggctcgctgggtccttcgcggcttcacgcagcgccccggcatcgacttcgacgagattttcagccctgtcatcaagcctgccacagtccgcactgtcctcagcttggcggtctcccgcgattggccagttcaccagctggatgtgaagaatgccttcctccataggacacttcaggagacagtctactgcactcagcccgccggctttgttgaccccaccaagcccgaccttgtgtgccgtctcaacaagtcgctctatggtctcaagcaggccccacgggcatggtacagccggtttgccagctttctccttacactcggctttgttgaggcaaaatcagatacatctttgttcatctaccgtcgaggctcagacacggtttacttgctcctctatgttgatgacattgttctgacagcctcctctgatgcacttcttcggtggaccatccgtgctctccagtcggagttctcgatgaaggatcttggcagcttgcatcatttcttgggcatctctatttctcggcagtcctctggtcttcatctcagtcaacgccagtactgcctcgaggttctggagcgtgctggcatgacagattgcaagccatgtgctacccctgttgacaccaacgccaagctctctgccgctgatggtgccccagttcgtgatcccacggactatcggagtctttctggcgccctctagtacctgactttcaccaggccagatatctcttatgctgtccagcaggtctgtcttcacatgcacgatccacgggagcctcatcttgctgctctcaaatgcatcttgcgttatgtccgtggcacggttgattatggtcttcacattgcatactctgatgctgattggatgagtgcatactctgatgctgattgggcaggttgtccagacaccaggaaatccacctcgggttatggtgtgttccttggcgacaacttggtctcctggtcctccaaacgtcagcttactgtatcgcgctccagtgccgaggcagaatattgtgccgtggccaacgcggtggctgaaacttgctggctt

SEQ ID NO: 83309 - DNA, 180 bp, Oryza sativa
  Clone ID: PAT_MRT4530_82653C.1
atgacgaatcttggcatcgacgggaatgccagtgaggctcggtcggaggaggctggagcagcagcgacgggcagagcactaggtacaacgttgactccttctagatgttgtgtcagtgagggtaaggccgcaatcatcgtcaagctggttgccggagagaatgaggcactactttcttga

SEQ ID NO: 83310 - DNA, 334 bp, Oryza sativa
  Clone ID: PAT_MRT4530_82654C.1
gtgttttttgatatttggggggttttttttatttactgattattttcatttttttaatcattacataggagggaagtttctttcaagcaaaaataacattctacgcagcggaaaacaaaactaaagcaacccacagaacagcaagggcaaaagaactgcacaggcaccttaaccgagaacaaggctgatgctccagagcaccacccagactgaagaaccggacctcttgggcgtccgcacacgcttgggaaccccccccaaaggaaacgctctcctacggaacgggggaaacaccaccagaaacgatgcccgacggcggccggcgacgaacagg

SEQ ID NO: 83311 - DNA, 1902 bp, Oryza sativa
  Clone ID: PAT_MRT4530_82655C.1
attcatcagaggcatggtggcatttacatcatggaatgtgaacaaaacagtggcagtttacaggttacaactacgcctacattagggaactatattcttctgttacaattgggcaaaaaaaatgaaagaaaactcagtcatggatctaaacatttcggtttcctccgtcataccagctgatcccggtttcactaccaaactcgcgatgcaaaaacttctcgatttacaatgttgttcttcttcgatgattgaattgaacttccaacgaagcatttgcatatcatcatctgaggaatcatattttctattcttcttgttttgcggggattcgaagaatcatctgactcagccttcatgtgaacttcaccggttccgcgaaaacgatccaacaaaaggtctggtggtgtgcatttagcatttttagctcccagtattgaagaagttgtgggtagcttgccgtcgaacatgttctggtatgagcctgctgatgagctcttgagaagaatttgctagctgtagagaccaaaaggcagcaccaatgagcaccaaggagagtacacattttctcatggataccaagatttcgtgtttgaagttgaatagtggtggaaatggacgtccgtttggcaagcgtgcattcggctctcgcagctcatcaaagaaaggatgtgcacatgcatcaagagcagtgcagcggagactcggtgaatattgaagaaggcgtgaagcgaggtctattgcttcaggaggcatcctcttgtggaaaaccttgtgccaagggtgagcttttatctgtggaaacctaaactctgtatagttcgggttcatgcaacgtatttcctcacgggttggtgtaccaagaaccttaattatctctacaagctcgatcggctggtatgacggaggaaaccgaaatgtttagatccatgactgagttttctttcatcttttttttgcccaattgtaacagaagaatatagttccctaatgtaggcgtagttgtaacctgtaaactgccactgttttgttcacattccatgatgtaaatgccaccatgcctctgaaaaaaaactctcgttgtaaccttgttccttccatccttgactgtttaccttaaagccgtggacagtgtacactgtacatgtaccgtgctacacggaaggacatatttgaatttaaaaaaaaaaaaaaaaaaaatgggaccagtgtttttgcgctcccaaagtcacagagcttgacttgatgagttagaggatccaccaaaacattttgtggcttcacatccctatgacagacccctggaacagtatgaatgtacgcaagccccctaaataactgatacatgtaaagcttgacgtagataagtggcatccggtggttggcattgctgtagtgcttaagcacacggtagagtgtttctggaacatattccatgacaagattgaggaacagctcatccctacttgtggttgagaagaagcaatgcttcagggagatgacattggggtggtccatggcgcgcataagctgaagctcacggttcttgtaccgtcggtcctgcaataccttcttaatggcaacagtctctcctgtctccaagcatttagcctgaaagacgataccgaaagaaccagtgcccacaacgcgctccgccatgtagctaattgtcctcttgggctcgccgttcttgcccccgatggtggtggagatgatgtgcccggtcaccgcgtcattcccctccgcgtacggcgcctccccctcctgctgcttcttgtcgcaggcgacggcggcgggcggctgcgcgtcgagcagcatcggctccggcgccggcgccggctggtccatgtggcaaagctggaagctgcaggtgcgtgaatgcactgcacaaagcttaggtgtgcc

SEQ ID NO: 83312 - DNA, 1843 bp, Oryza sativa
  Clone ID: PAT_MRT4530_82656C.1
tccgtctccgcctccaaaaccctaaccctagctcgccgccttcgcgcgagctctcctccatggagaaccccaggccacaggctcctgcggggacccctcccatggctcccctccccgtgcccccgcccatcgcccccatccctgccccgcctccgcgagccccagcacccgccccggccgccgccgccgccgtcgcctcgacctccgcggcgggaggaggcggcgggggcggcggtgaggctgactacgaggtctccgatgaccaccgcgccgcgcgggagcgccacgagcgcgcggtgcaggagctgctccagcgccgccgcgccttcgccatggccgtgcccaccaacgactccgccgtgcgggcgcgcctccgccgcctcggcgagcccgtcacgctcttcggcgagcgcgagatggagcgccgggaccgcctccgcgctctcatggtccgcctcgaggccgacggccacctcgaccgcctcctccgcgcgcaggaggaggagcagggcgccgcgggcgccgaagaggaggaggagcagatccagtaccccttcttcaccgagggcacgcaggagcttctcaaggcgcgcgtcgacatcgcgcagtactcgctgccccgagccaaggccaggatagagcgggccaagcgctgccatgacgaccccgacgaggaccctgaggcagaggccaaccttgtcgttaagcaggcggaggatttcgtgcttgagtgcagcgagattggagatgaccgccccctcaccggctgctccttctctcgagatttttcaatgctcgctacaagttcatggagtgggatgatcaaagtgtggagtatgccacaagtaactaaaattgcaactctgaaaggtcacacagaacgtgcaactgatgttgcgttttcaccagttgacgactgcttagcaacagcttcagctgataaaactgccaaactatggaagaccgatgggtcactcttattgtcctttgatggtcacctcgatcggcttgctcgccttgcttttcatccatctggtaccttgctacaacaagccagctttgacaaaacctggagattgtgggacgttagcactggaaaggaacttctactccaagaagggcacagcagaagtgtctatggagttagctttcacccagatggttctttagctgcatcttgtggtcttgatgcgtatgctcgagtttgggatttaagatcaggaagattgtggggcacactcatgggacatgtgaagcctgtcttaggagtgagcttctcccctaatggttatctggttgcaactggaagtgaagacaatttctgtcgaatatgggatttgaggactaaaagaatgttatattctataccagcacataagagtcttatctcacatgtcaagtttgaaccccaggaaggctattatttggcaacttcgtcctatgacaccaaagcagcactgtggtcagctcgtgattacaaaccaatcaagagtttggtggcccatgagtcaaaggttactagtttggatattagtggagatggacagcagattgtgactgtgtcacatgatagaacgatcaagatttggtcctgcagaagcagggcacaagataatgccatggagctggactgaggcactgaattaacttgttagaagttgtcagcatctacatgaagccatcttgtagttgtagcacctcatagcccttagcctgtgaaatgtttcatatgtaactcttctacttgacgttgtagaaaatttacgatcgaacggcttaggggcgattacccctgtcctgggtttgcatccctggttttgaagttacaaaaaaaaaaaaaaaa

SEQ ID NO: 83313 - DNA, 1141 bp, Oryza sativa
  Clone ID: PAT_MRT4530_82657C.1
ccgagcaacccaatttcgcagtgtagaaccatatactcaaatacacatccttcctacatattttcaataggatttgttcaaaaaaataaagagagaagaaaaggaaacagagaaggaaaacatatgccaatttggaaacggaaagactggcgagagaagaagaaaaaaataactagggaacaaatccaagcagagccaaatacggtaggatatgcaccgagatcaatttgaccaccacctattcttaacaaatcaccgtatgaactggaggagaaaggaggtcaggacgctgtcggggcgacaaacatcgacggcgatggtgcttatcgcccacgcccatacctcgtgccacagggcattggccggcacggcggggcaacggggaggaggagaagaggctgttgtcggcggctcgacgcagggaccatcagtggcgcgtcggcgcgggtgcgacgtcgacgtgaggctattggcgcagcggagacatgctgcgaggaggtggctttgtcttcgcactgcacaccatcgctgcccgccggagacgtgcgcggcattagccggagacgggtgccttgtcaccctcgctccgcaggaatcgccgccgccatcgtcgcttttcgcccgaatcaacgacgtctacatcgccgttggatctgccgcaggaagccgccggcaccaaatctgcccacggaaagccaccgacgtcgttgtcgacgcgaccgttgggagggcgacgccagatcttgagggtggagagggagcgatcaccgacaaaaacaaagaggccgggagggagggacggttgttgaaggccaacagggagagggggagggacggtcgtcgccgctgtcttcgccgtatcccgccgtcgttgggctatgccggcgagacgggagggagaggggagagaaggggaggggaagcaacgccgcttgtgccatgccggcgagacgggaggaagaggggagagaaggggaagggaagcaacgccgctggaggggagggggagggaagggacaaacgactcaagtcgatcgagtgtcgggctggtctccatcattggaccgtagcacttgggctgcacgcgggccggcggtccaacataaacgtggaagtgagaggaggagtatgcggatgttaa

SEQ ID NO: 83314 - DNA, 2678 bp, Oryza sativa
  Clone ID: PAT_MRT4530_82658C.1
atggaggaggagcagagcccgaggctcgccgccggcgagccggagcgcaagctcgaggacggagtcaccgacgccgaggaccccgggtgcacgggcaatgcggccatgagctcgctggagcagccgcttctgaagcggagcaacacgctaacggccagccacctcgccatggttggcgccaaggtctcccacatcgagagcctcgactacgaaattatcgagaatgatctgttcaagcacgactggaggaggcgatcgaacgtggaggtgctgcagtacatcttcctcaagtgggccatggcgttcctcgtcggcctcctcaccggcgtcatcgcgtcgctcatcaacctcgccatcgagaacatctccggcctcaagatgctccacatgttcttgatggtgaaaaatttgccgtcaccctactgcagatactgggccggtttcttgtatttcgccggcgtcaacttcggcctgacgttcatcgccgccatgctctgcgtcgtcttcgccccgaccgccgccggccccggcatcccggagatcaaggcctacctcaacggcgtcgacacgcccaacatgttcggcgcgccgcagctcattgtcaagcatctgcgcggtgtcgtcggggctggatctcgggaaggaagggccactggtgcacatcggcgcgtgcctggcgaacttgctgagccagggcggctccggccggcacgcctccggttgcggtggctgcgctacttcgacaacgaccgcgaccggcgcgacctgatcacctgcggcgcgtcgtcgggcgtgtgcgcggcgttccgggcgcccgtcggcggcgtgctgttcgcgctggaggaggtggcgacgtggtggcggagcgcgctgctgtggcgcaccttcttcagcacggccaccgtcgtcgtcgtcctccgcgggttcatcgaggtgtgcaggaacgggcggtgcggtctgttcggcgagggcgggctcatcctgttcgacgtcggcgacgtcgccgtccggtaccacgccggcgacctcctcccggtgaccatcgtcggcgtgcttggcggcgtcctcggcgcgctgtacaaccacgtcctccacaaggtgctccgcgtgtacaacctcatcaacgagaagggccgcgccgcgaagctcgccctggcgctcgccgtgtgcgcgctcacgtcggcgctgctgtacgtgacgccgttcgccgtgccgtgcacgccgtgcgacccggcgttcggcggcgcgtgcccgacgctggggaagagcggcaacttcaagcggttcaactgccccgagggccactacaacgacctcgccaccctcctccacgccaccaacgtcgacgcgacgcggaacatcttctccacgggcaccgccggcgagttcaggctcgactcgctgctcatcttcttcgccgtctactgcgtcctgggcctcttcaccttcggcatcgccgtcccctcggggctcttcctccccatcatcctcatgggctccgcctacggccgcgtcacggcgctcgtgctgtcgcggttcgcccgcatcgaccacggcctatacgccgtgctcggcgcggcggcgctcatgtcggggtccatgcggatgaccgtgtcgctcgtcgtcatcttcctcgagctcaccaacaacctcctcctcctcccaatcaccatgttcgtcctcctcatcgccaagaccgtcggcgacgcgttcaaccccagcatctacgagatcatcctcgacctcaagggcctcccgttcctggaggcgaagccggagccgtggatgaaggacctcaccgtcggcgagctcgccgccgccaagccccgcgccgtggcgctccaggtggtggagcgcgtgtccacggtggtggaggcgctccgggcgacgcggcacaacgggttcccggtgctggaccggccgcggcccggggtatcggagctgcacgggctggtgctccggtcgcacctcgtcgccgcgctgaggaagcggtggttcctgccggagaggaggaggacggaggagtgggaggcccgcgagatgttcagctcggcggagctcgcggacaagtgcggcggcgtggacgagctggagatctcgccggaggagatggggatgtacgtggacctccacccgctgacgaacacgacgccgtacaccgtggtggagaccatgtcggtggcgaaggccgtcgtgctgttccgctccgtcgcgctccgccacatgctcatcatgcccaagttccaaggacccgagatatctccaattgtggggatcttgacaaggcaggacctgatagcacacaacatcctcggtgcatttccacaccttgcaagcaagaggaaaacacattgagaggaaccatttttgagagttaatccatctttattgtcttgaagccaaatatcagagtcacctgcatatacagcttttatgaggctttgagttttttttcttttttttttcagttatcctcttctctgtaagtagattcaggattattatttgctgctcttctgagagtgcttgaataattgctgccaatgtaaaatcacacatgtaactatgccagatgtaatcaaaagggacacaaccatgatgcaatagagcaattcttttttaaagagataaaaaaaaaaaaaaaaactgagactagttctctccctcgtgccgaattc

SEQ ID NO: 83315 - DNA, 1488 bp, Oryza sativa
  Clone ID: PAT_MRT4530_82659C.1
atggtcgctgccgcatccggcggcgccgaagcatcaacaatctgtggcaaactgaaagatggacctgaagaaggctgcctcatgaagagtgaaatcacagtagcagtagctgccacacccagagcaagtgccactttagcaaggaaagaagcagcagtgctgcttgatttcacttccattgcatcgattatctcgctctcttcgtccctacatttcagtaatcctaaagtcacgtgatttaaggtagatgattgctatatgtggcggatgccggatggccttgagctcaagtccgaagaatagtgagcagcaccccctcttctttttctcatttggagaaccgtggagcactggggaagaaataaatttgcagattgattctatcacagctgccgcaacacttgcgagtgcaacaacaggccgttctctcaggaaaaacccaacagctagctggataggaagagtaaatagacaaccacagcaaactccagcaaaataacagtctgctggtatgcccaatgcgccagctagaaatcctgtaggattgcgaaccccaactgaaaatcgctcaacaaatccaattaggttgccatacttttgcaccgcacgcgatatgcttagtgctttctccttcccaattccaatcttgctgcttatgtcttcagatgctcttgtttgcctaaaaagtttacctagatagaatggaaccatatcactaatacaaacgccccagtaaacccataacactgtggaaattatataagatgcattcattgagaatgaattagcaagagactgccaggttccatccaaacaaaggctgcgtgctaaagaaatcccaacccaaacatttaaagcttcttcactaataaatagtccaaatccagcagccatgagcaaccaaaagtaaacccaccctggagtatattccggaacaataactttcttcccaaacagcgaaaaagtatatccgatggtcgctgccgcatccggcggcgccgaagcatcaacaatctgtggcaaactgaaagatggacctgaagaaggctgcctcatgaagagtgaaatcacagtagcagtagctgccacacccagagcaagtgccactttagcaaggaaagaagcagcagtgctgcttgatttcacttccattgcatcgattatctcgctctcatcttccccaccaccagaagaagattcagccccggaggccgatgcccttgcagcgcaggaatccatacgggagaaattacgcgaactgtttgtatttgcgagaattatcagatgaggaatttcgcaattgcgcagataattactcgtaatgcgaccgcgagcggcggaacggcgtgcgccggcggagaaggtggcgcggcggcggaggcgagggagagggagcggtggcggggagccgaagcggccggcgaccgtcgccatgggaggagacggcggcggcgacggccggcgagagtgtctcggcccacgcgtccg

SEQ ID NO: 83316 - DNA, 1920 bp, Oryza sativa
  Clone ID: PAT_MRT4530_8265C.1
atgggcggcagcgggttgtcaagcgtggacgcgcgcgggcggtcggcacgcgagggcagcggtgggcagcagcgcgtcgtcaagcgtggccgcgcaggcgatcggagccgggaaggcaggaagccggtcgccaggcaaccagctaaccaggagcaagcgtcagaccacactttcacaagccatgaagccaacaacgacatcatccatctccatcaactgatcagcacacagccacattgtgcattagtagagacaaggaaagtgccaaagccgaatagtgctaacaatgcatgtaattcatgtttggatgatataaactgggaagatgagattaaatatgatccaagattaagaaaacaaattgatgagtaccatcataatctcagagagagggttcaagaaggtttgtcccggaatggtttgatgagtttggaagttggcttgaatacaaatggttttcatagaaaagaaaggttgaaattgcatgtaggtgatgtcggtggttcacactatcaagcaatgaagaagtgtgatgatttattacaaaaaagacagcacattgatgtagcttttcatagtgtgagagaaactgaactaaagctaagtctaaagcaagttagagggcaaggatatgacggtgctagcaatatgcgaggtgagttcaatggtttgcaatcattgatcatgagggaatatagttcagcttattatgttcactgttttgctcaccaactccaattggttcttgtggatattgtgagaaaacataaagacgttagtgatttttttactaagatttccatcttactgaatgtggtgggtggatcatctaagagaagggatttgattagagatattaatgttaaagaaatgagtaaggcattgggttctgggcaacttcaaactggaaccaggttgaatcaagagcaatgtcttcagagacctggggatactcgatggagttcccactataaaactctcaaaagtttggttggcatgtttgctacaatagtcaaagtgctagaaattgtggaaaaagacaaaaatgattggaaaattagagatcaaggatcgaatcttttggagtacttccaatcttttgattttgtcttctatttgcacctcatgttgactatattaacaatcacaaacagcttgtcactagcattgcaacggaaggatcaagacatagtgaatgctatgaaatgtgtaaagtcaactaggctcaatttggatgagcttagaagagaaaagtgggagaaagttctagatgaagtctctgacttttgtgacaactatgatattgtcaaattggaaatagaagatacatatattgatcccaagaagcgtaggcacaaatctggaattacaaacaagcattactatcaagtggattgttttaatgatgttattgattggatacttcaagagcttgacaatcgcttcagtgagacaagctctcaattgcttatttgctcatcggcttttagtccaagagactcatttcatgatttcaatctagagaatttgatgagtttagcaaaattgtatcctagtgattttaattctggaaatttgagggaccttagccaccaacttggtctctacatcgctgatgtgagggatgatggtagattctccaacatacaaactattgccgagctttctcaaataatggtggagacaagaaaacatctttgttatccattggtttatcaacttttaaaacttgtacttgtattgcccgtcgctactgccacagttgagaggtgcttttcagctatgaagaatgtaaaaacatatttgcgcaataaaattggtgatgagtacttaagtgatagccttatttgttatgtggagaaagaagaaatgaagaaagtcaccaatgaggccgttgttcgtcgcttcatgaaaatgtaa

SEQ ID NO: 83317 - DNA, 2334 bp, Oryza sativa
  Clone ID: PAT_MRT4530_82660C.1
atggggtgcaaggggtcgaagctggagcagcaggaggcggtggcgctgtgccgcgggagggccgacctgctggcggcggccgtgcggcaccggtacgcgctggcggaggcgcacgccgcgctggccgactcgctcgcgtcgatgtccgcgtcactgcacctcgtcctcgcgcccgcggtcgccgcggggacggccgtcgcgctgccctccgcgcgcaaggacgtggacgccgcggccgaggccgctgcctcgccgccgcactcgtcgtcgcacatcaacttcgcgccgtcctccggatccgagtcggggtccgtgtcctcctcgccgagccgccgcgtcgccgccggccacgagcaactctaccaaccgagcgcgctgccgttcccgcattatgcgtacggatacgggtacgcgcccgagccgccgttcgggtacccgccggggtcgctgcagctctactacgcgcggagccgcccgcccccgccgtccgtcgccgtcgagcagcgcgcccccgcgtcggagcgcgtctacttcggctcgttcgaaccggcgcagtatcacccctacggaggcgagaccaggagggcagacagggcggccgcgccaccgccgtcgccaccgagggcgagctcgtgggacttctttaatgtgttcgacaactatgaggtgtacgacaactactgctacgatgctcccggcaccggcgccacgacgccagcgccgtacacgccaagccggagctcccgggaggtgcgcgaggaggagggcatccctgagctggaggaggacgacgcggtcgtcaaggaggtttccagcgagtactccgcgcacgggagcggcggcgctcgcagccgacgcagctctatcggcggcgtgagcagcagcattgccgaagtcgacgaagaggagaatccagtcgtcgacaagggagtggtcggcggcggcgtggcgcggcaacagacgcctgcgcatggcaacgtcgccgcgtccgttccgactccccggagagccgccgatggtgcagacgttgccggcgagatcaaggcgcagtttgtccgagcggcggacgcggtcagggcgctcgcgccgattcttgaagtcgggaggcggagctaccatccccggagctcagtgtaccatgtttcatctcggatggtgtcagtgattgcgctgccgcattcaggatacggaggcagcgacctgttggatgtcggaggaggggagaaggtggtgggagcaaggaacttgtctttgactctgcaaaagctctatatctgggagaagaagctgtacgacgaggtgaaggctgaagagaaaatgcggctcctgcttgccaagaactctaagaggctgaaattcttggatcaaaaaggcgctgaagctcccaagattgatgcaactcgtaatttggttaggaagctatcaacaaaaatacggatagctgtgcgagttattgctaaggtgtcgaaaaagataaacagatccacatgtgtagtatgtctatcagaaagtaactgccttaattctgaagatattcttgcatttcatattatcttcaaatctagtttgtgtcaaaagaaaagtcttatagccatcttttacaggtttgtgaaaatgtggcaagataagctgaactgctaccacatccagtgtcaagcaatatcagaggcaaaaaacttggattcaataatttctggtggaaccagtcgagatctggcaatggagcttgaactagagttgattaaatggatcgtcaatttttcctcctgggtgaatgagcagaggagcttcatcaaggcactgaatggatggctggcactctgtcttaactatcagcaggaggagacggctgatggagttcctccgtattctcctggaagagtgggcgcaccccttgtgtttgtcatctgtaatagctggtcccaagctatggatcggatttctgagaaggaggtgattaccagcatgcaagctcttgtgtctagtgtacggagcctatgggagaaacaaaatgttgagcaaactgaacagctgattgcaatccgggaaagagaaaaatggaacaagatattggaaaggaagaccctggagattaacaaggaggccgacacactcaacagaaagctagctctagtaccgggccggcaaagccttcttccaacagcacaaacgtaccaggtccattttcttgaggcaaacagtgtgcaggttagtttgaagcgtgttcttgaagccctagaaagttactcttccaattccctgcgagctttggatgagaccctgaggcatgccgaagaggaaaggttgtctagagaaagagccaaagtttcatag

SEQ ID NO: 83318 - DNA, 147 bp, Oryza sativa
  Clone ID: PAT_MRT4530_82661C.1
atggctgaatgggaggagatggagtcgggtaggggaagaagagagaagaaaaaggacaaaaatcctaggcccacctgccggccggtcagaccggctctatgtggccggtcagaccgccgcacctggccggtcagaccgtgcatatag

SEQ ID NO: 83319 - DNA, 162 bp, Oryza sativa
  unsure (1)..(162): unsure at all n locations
  Clone ID: PAT_MRT4530_82662C.1
tgtgttaaattgtgttgatgtgccatctgtgtggggctgctgcgccttctcggcaatgtatatttctccggtntcgcgggtgggcatgtgtcatgggtgancatgacctgatggaatggatgaataagaaagagtttgcttcaaaaaaaaaaaaaaaaaaaa

SEQ ID NO: 83320 - DNA, 897 bp, Oryza sativa
  Clone ID: PAT_MRT4530_82663C.1
atgcaaaactaaaacacataccttagcttgcacctataaaaacatgctttagtcaaagggatgacacatttacagcagcagcagcttgtggcggcggcggcggcggctggtgggatggcgaagcaggagctggtggatgagagcaacaacaccatcaacagcggcgggagcaacgggagcggcggggaggagcagaggcagcagtccggggaggagcagcaccagcaaggggcggcggcgccggtggtgatccggcgtcccaggggccgccccgccggctccaagaacaagcccaagcctccggtcatcatcacgcgcgacagcgccagcgcgctgcgggcgcacgtcctcgaggtcgcctccgggtgcgacctcgtcgacagcgtcgccacgttcgcgcgccgccgccaggtcggtgtctgcgtgctcagcgccaccggcgccgtcaccaacgtctccgtccggcagcccggcgcgggccccggcgccgtcgtcaacctcaccggccgcttcgacatcctctcgctgtccggctccttcctcccgccgccggcgcctccctccgccaccggcctcaccgtctacgtctccggcggccaggggcaggtcgtgggcggcacggtcgccggaccgctcatcgccgtcggccccgtcgtcatcatggccgcctcgttcgggaacgccgcctacgagcgcctcccgctcgaggacgacgagccgccgcagcacatggcgggcggcggccagtcctcgccgccgccgccgccgctgccattaccaccacaccagcagccgattcttcaagaccatctgccacacaacctgatgaacggaatccacctccccggcgacgccgcctacggctggaccaacggcggcggcggcggcggccgcgcg

SEQ ID NO: 83321 - DNA, 1629 bp, Oryza sativa
  Clone ID: PAT_MRT4530_82664C.1
ctccaacccccgcaaaccccaatccgccgccgcggcgatcgccatggccgcctccgccgctgcttcccgcgcgcaacgcctatctcgcatcttctcctcttcttctccatccgtgcgaccacccaagcccgggcaggtcaaggaagcaccaaagcccgcgccgaccaagaaagctcctgctcccggcgccgaggcgaaccccaacttgcgccggaatgccatcgacgacatcatcaagggcctcttgcgggagcgcgacccggacaagctggtgtccgggttcatcgccgcctcgtccacgcacccgcgcttccgtgcccggcaccgcgtgtacgacgtggccgtgtcccgcctcgcgaccttcggccgcctggacggcgtcgaggccatcatcgacgcgcagaagcccttcctggagacctccaaggagggattcgccgcgcgcctcatccgcctgtacggccacgcatccatggcttcccacgccgctgcgacgttccatgacctccccccgcagcttaagtctaccatgaccttcaactctctcctcgcagcctacgtcgaggctggagagttcgaagcgcttgccgccgcgttcaaggagatcccagtctccaacccctcggttgtacctagcgtgtactcctataacatactccttcaagcgctatgcaaggtgcccgacctctcggcggcacttgatactatgacactcatggagaagtctggaatttcacccgatctggtcactttcaacacgctattgaatggattctacaaccatggagacatggatggcgctgagaaagtctgggagatgattacggagaggaatatggtgccggatgcaaagaactataatgcaaagttgaggggccttgttgcgcaagggaggattgaggatgcagttgcagtggttgaaaaaatggagaaggatggaccaaagcctgatacaatatcctacaatgagttgattcgagggtattgcaaagatgggaggttagaggaagccaagaagctgtttgaagatatggcagaaaatggttatgttgcgaatagggggacatatcataccctcataccatgtcttgtcaaggctggtgagctcgattatgctctgaagtgctgtcatgagatatatggtaagaaccttagagtggactgttttgtgctgcaagaggtagtgactgcattggtcacggcatcgagggtggaggatgccaccaagattgttgagcttggatggaacaactcctacccacggaggatcttgaatattccacatgctacagagaaaaacaaggaagaatcaatttcagaagaggaagaggagcctgaaaatgcttgacaaggatgtacctccatgtgttcttctctgatcagtcttaccgatggttatcattttgctatagtatactagtctgctgttgcggacattggaagtatctcatattgtcacaaatgagatgtcgggtgtgtatttgtctctatcgctatattctggaaaactagaaacatctgagctatgttgttattcaagccttccacaggtgagctcacctatgtaataagcttgtttgtccaatacttccttcattccaaaatataaggcataaccacttttttttc

SEQ ID NO: 83322 - DNA, 195 bp, Oryza sativa
  Clone ID: PAT_MRT4530_82665C.1
atggaggtggccaccacggcgttcaccagccttgttgtcgctgtgttgtccgacgatggccaccacgggtcggacctaagctgtgccaggctgtacgtgatcatgacgcacgcgggggcaacccgcaacgccgcgaagcgacggcagtacgggctacactcgctcgcgcggcgcctcctgcgctgcgcatgctag

SEQ ID NO: 83323 - DNA, 317 bp, Oryza sativa
  Clone ID: PAT_MRT4530_82666C.1
agaaaagagtcaaagctttttataatctgaagcggagggtgtaaccagcccaagcaattctcccaaagaaaacattcacccaagtaccccgcagcaacgttaacctttagcacagaaccgggttcgtacttgtttacaagacgtcataggtcttaagatcatcaaaatgaactgagccccactaaaaaatgggtagagaaaagggctgcaaaaagaagcgatacaagacaacatacgggggatgcacattgagatttcacttcagagctttttattgggctgaggaggtgacccatttcgcccgggtgcctgccatt

SEQ ID NO: 83324 - DNA, 1452 bp, Oryza sativa
  Clone ID: PAT_MRT4530_82667C.1
gctccaggtcgtactccacccacacgttcatctggtggtggtgcccgatcacgtacgctgtgatgggcaccatgtccgcgttcccgaacgtgaggcaccacacgccgtcgccgccacggcgctcgccggggaccttgtacaggagcctgtcccccgccaccgtcatctgcgcgccgttgaacagcagcgtgacggcggggagcctcgccggcggcgcgcgcccctggggcacgcggaagcatgtgtcgaacgcctcctggaacgcgaagttggggtcgttgagcgccgggagccagggcttggtctgtctcgagaactcggctttcaatgcggagtaggcgtcgccgaggaggaaggtgaactgcgtgccggagtccaccatggtctgcccggcgccggtgtggtccggcgcgagaacggacgccgggatggggagtggcttgccgccgacgcggatgccgaggagctggacggagtaagccacgcggtcgaagtaggggagcggcatggccggctggtacaggggcgtgtagttgagcggcaggaaggggagatcgctgtggcctaggaggagcacgccggcgtcgtcgcggtcggagatgcagtacgagaagcggcgggtgctcgcctgggagacgaaggagagggcgcccctgttcatgcccagcagcccggcggtcgcgacgccgtcgggcgaggtgtcgaacgcggtggccatgcagccgaacgccgcgcgcagcggcggcccttgccccacggtgaagacttccgtcgcgagcgcaccgtcggaggaggacccgtccgcgtaggacaaggacacgcggcactgtttcgaggccccgtcgcaggccggcggcgacggcaggtcgcgggatcggcactgcgcggagccgcagggcacggaggcgaaggtaagcgatgcccttggccggaaagacagcgcgctcctcccgcccccacccccgccgccgccgggcgcacagagcagccacgacagctcgctgccggtgtcgagcaccatggtgacattctgcggcggcgtgccgacggcgagcgagacggtgaggctgacgttgtggtggaaccgcagcttgctcgcaggccgcggcagcgcccccgccggcacctgccgcgcccgcagctcgaacagcagcggccgcgtcgccgccgccgccgccgccgccgcagcgggcctcggcacggcgagcaagaggaggaggaggaggaggcaaaccggcagcgcgggaggagggggcatggcggtggttgcgcgcatgtgagcggggaggcgggcggagcggagcctcggatgcttggatttgggtgtggggttttggttcggcgtggattttatgggggcagcgacgagtggagtggtggtgacggcaggcaggcgtgcgacgaggagtggactcgctcactcacactgtgcgacggtgaggaccctcgtgc

SEQ ID NO: 83325 - DNA, 318 bp, Oryza sativa
  Clone ID: PAT_MRT4530_82668C.1
atggttgaggaaaatgggtctaaaccaccgctccccgccggcggggatgtgcttcacgccgccaccatcgcgcacctgctgccgctgctcgtggttgccgtcgttgcgccgcctccgctcgtggtcgccgtcgttgccatcgtcacgctgtcgctgctccccgccgccgccgatcgtgctcgctgtcgttaccgccgccgccgctgctccttgcctccgccgccgctcgtcctcgtcgtcaccgtcatcgcactgcctggctgcgccgtcggcagcggcggtggcgacgccgccgccgccccgatttgtcagtcatag

SEQ ID NO: 83326 - DNA, 150 bp, Oryza sativa
  Clone ID: PAT_MRT4530_82669C.1
agtactaccaccaggcgcaccacacttgccgacaccttaccgcacaagatctattacagcgaggggacctcacatccacctcctctacaccatggtatgttatgaccatattgaccctatggatcaaattaacccaatcaacctgactgt

SEQ ID NO: 83327 - DNA, 1314 bp, Oryza sativa
  Clone ID: PAT_MRT4530_8266C.1
atgccgctgctctgcaatcagccacattgtgcgttagtagagacaagagaaaagaaggatggtggatatgaagcatctgttaaaaatggttggaatggttttcatagaaaagaaaggttgaaattgcatgtaggtgatgtcggtggttcacactatcaagcaatgaagaagtgtgatgatttattacaaaaaagacagcacattgatgtagcttttcatagtgtgagagaaacttgtaagagggactatcttactcggttgaatggatccattgatgttgctaggatgctagtaaagctaggattgcctttcctaggttacgatgagtcaaaggagtccaacaacagaggcaacttcagggaatttcgtgattacacagcggagcaaaacccatccttaagaaaggcaatagagagatttgttggtcttgtccatgtgactgaaacaacttctgcctatctcaagtcttctattgatgctctatttgcaaaactgaagctaactctaaagcaagttagagggcaaggatatgacggtgctagcaatatgcgaagtgagttcaatggtttgcaatcattgatcatgagggaaaatagttcagcttattatgttcactgttttgatcaccaactccaattggttcctgtggctattgtgagaaaacataaaggcgttagtgatttttttactaagatttccatcttactgaatgtggtgggtggatcatctaagagaagggatttgattagagatattaatgttaaagaaataaagcttgacaatcacttcagtgagacaagctttcaattgcttatttgctcatcggcttttagtccaagagactcatttcatgatttcaatctagagaatttgatgagtttagcaaaattgtatcctagtgattttaattctggaaatttgagggaccttagccaccaacttggtctctacatcgctgatgtgagggatgatggtagattctccaacatacaaactattgccgaactttctcaaataatggaggagacaagaaaacatctttgttatccattggtttatcaacttttaaaacttgtacttgtattgcccgtcgctactgccacagttgagaggtgcttttcagctatgaagaatgtgaaaacatatttgcgcaataaaattggtgatgagtacttaagtgatagccttatttgttatgtggagaaagaagaaatgaagaaagtcaccaatgaggctgttgttcgtcgcttcatgaaaatgcaaggacgcagatttgatgatgataggttatcaaatcatcgtcgaggattttga

SEQ ID NO: 83328 - DNA, 768 bp, Oryza sativa
  Clone ID: PAT_MRT4530_82670C.1
atggccttcaacgaggggatgcgctccaccgtcctcatcacgctccgtcagctcatcgccactctcttcctcgccccaatcgcctacttccgggagaggaagacaagaccaaagcttacggctgaaatcttgagcgtcccttacccaatggctcttcttcttggggctgcagtacaccacagcaacattcgcttgcgccttcatcaacatgactcccatcttcactttcattgtagcactgccttatgggtggcatgcatgaaatcacttcctcggaaagattcgaggatcgccaagaagtacccggcgctctactcgggcactgccctgatgttcctgctcagcttccttcagatggctgcagtcgcgttggccgtcgacagaattagcttatccccatggatcttaacaacgaagcttcagatcatcaccgtgctctttgtggggatagttggatcaggaatagcgttcttggcgatgtcatggtgcgtggagcagagagggcctgtgttcacgacggcgttcacgcccctcatccagatcatcgcagctgctatcaacgtcatcgttctccatgagcaactccatcttggaattgtgataggatctgctctggtaatcattgggctgtatttcgtactgtggggaaagaataaggaggcctcgtcgtcgtcttctccagcaaaggaggctgtgcctgcgctgcggcaacaatacggcggccatgatcaagaaacgactaatgatgtacaaatgcaaactgtctag

SEQ ID NO: 83329 - DNA, 335 bp, Oryza sativa
  Clone ID: PAT_MRT4530_82671C.1
ttgtggttttttgaattttggggttttctactttttttttttttttttttttttttttttttattttttttactctttttttttttttaccacaaaaaataaaaaaaaacacttctcgacccagggttcaacaaagcgccataaaaaaaagcctccaacacccggaacggggcgccccccccaggcccacaaatgatgaggctagacctatccaaacggttagcaggaagggcttccccgaggcaccagcagagaggggacccgtgctccctttaattacacatgcaaccccaatgtgtgagtcaacctggctataagaaaacatattcattttt

SEQ ID NO: 83330 - DNA, 530 bp, Oryza sativa
  Clone ID: PAT_MRT4530_82672C.1
gtgtgctcgccgccgtcgccgcccgagctccgtagcacccgctcgtcgccggcctcgctcggcgaagctccactcaatccgacgctagcaacggattcccgtggccgcgtagatgctctcaccgccgggaattggcccctcgtgacctcgtcgccgtttccccctttgccctccgccggttgacgccgacggactccctccggcgaatccgagccgttggctcgctccctctccttcttcctcgtcatcccggtgtacgccccgtcgcccctcatcgtcgcaaggcgccccggagaaactgccgccgcccgccgtccattcgcggccggcgccttcgtcttcctcccgccagctcgcgtggcagccacgtaggcgccacgtcggcgccagctcggccgagatcggatcgggccgaccccgccgtgaggatgcgcgtgggcccgccgcatccgttccaccgcgaaccacgcgcgtgcaccgcatccctcccccgcccgcgcgcgtgcgccgcgtgctcgctccgcacggtg

SEQ ID NO: 83331 - DNA, 299 bp, Oryza sativa
  unsure (1)..(299): unsure at all n locations
  Clone ID: PAT_MRT4530_82673C.1
cgcgtccgggnggtgctcctgggtggttccggtctggtnttnngctttttggggcttgtgtcnnttcgnntctggggtccttcctntccngtgttncgccnnctttggngccctncnccgttgccnngccnggcggcttttctggttgtgtgcccgngttnggtngttgcttgtgggtggggggcctttggnnncccttctncccgttgggcgcctgtggggtgggtnctccggttcgtctcccttccggtcngggggttgngcngtgttttgtgccgtttcttttcgcccttcngttg

SEQ ID NO: 83332 - DNA, 2109 bp, Oryza sativa
  Clone ID: PAT_MRT4530_82674C.1
atgcacaccgtcaaggagacggaactgcttgctgccaagctggacctcctcatgaaacgattggacaaccacgagaaaaggccacaaggcaccgtcaaggccttggacttgcacgttacgtgtgagctagctcggttggcattcttagtccctgcaaatgaaactgggagaattccagggcaacccgactcctccattgagaatgtcaaggcgatcacaacgaggggaggaactaacgggattgcaaaagaagcgtcatctagtggctcagctgacaaggaagttcagccagaaaagaccgtgccgcaggagtactccgacacacggatccacatcaacgtgccgcttttggacgctatgcaactgtcaacatatgcccgttacctcaaggacatactcaacaacaagagaccactcccaacaatggaggtggtcaaactgatggagcaatgcaacaacatcatactccacaagctcccggagaagaagaaggatccaaggtgtcctacgatcacctgctcgatcggggcacagcagttcgaccaggccttgtgcgatctgggagccaatgtcagcgtcatgccaaaggacgtctttgacaagctcaacttcacggtgttggcaccaacaccgatgcgcttacaactggctgattcatcagtccgttacccggcagggatagcggaagatgtgccagtcaagatacgggatttcttcatcccggttgatttcgtggtgctggatatggacacggggaaggagacgctgctcatcctggggcgcccgttccttagcaccgcgggagccaacattgacgtgggaatggggagtcaaaatcaagtaccggccaaacccacagaatattcaagtggtcaaagtggagctacccaagacggacagcctggtgaagttcatgcagaatttcctggagaaggaaacaacgatgcccaggaaccgttaatggaggacgccggtacaaccacctataccggccaagaagctagagcagttggctcagaggaagccgtcttccacaccaaagccaaggaaggtgtggaaggaaaagcaaaagtcgcccgctccatcacctccggagacggaatgaggaggcgattgtctcgtctgttcaaggggtccagctcttcatcaagacgtcatgacgagtctagtactcattcatcagctgatgtctcgatagaagacgccaaagctccgcgacgactcctgaacgacaccgacctcgaccttgtcagtgatcgggagaaacaagcctactacatgctgagcgaccaggagtatgctcacacgcgagaatactctccggagctgctgaaaaagataggtatggatgttgaatttcgtgctatttggaaagctgttggttggcagagatttgctatggtagatgagcctagttctcgtttacttactttgcaatttctgtgcactttgaaagaaatagaagatggaatttcctttcgcttttttcgtgaggagtttacacttacatggaaaggcttaagcacacttcttggttttcacgattcctgtaaaaactatctccagaaaggaatttctgggttcaagaaaaatatgttttgggaagatacttctggtgctccaatttgcaaaaaacctagaatgaataatatccataatcctacacttaggctcatgcacaaatggattgctatgactttgtttcctagaggtgatcttagacccattaggagggatgaattgattaccatgtatgccctgaccatagaagaatctcgtgcaggtgaggcatatagggagacgcgcaacatgacaaggaatgaacgagaaaattcatcatcctcaacactcgtgcagatgtatgaggaaggttgggaaccaactggggatgcacccggatggacccaaactccacgccacagcatcggagtctcaaactgggcaagtgccagtgaggaccgatggcatgcgcctcatgacatacattggggggacaaccaaccttccaattcaagttgtgtgcctccaactctaagtgaatggcgctcaagttcctttctttgggacttgggtgaaatcactaggagaatggatacccttgatatgtag

SEQ ID NO: 83333 - DNA, 851 bp, Oryza sativa
  Clone ID: PAT_MRT4530_82675C.1
caatggcgcggacgagaaacagggaggatgggggggaaagaggaagggagggcgcctggggctttaagggcggcaatgtcggtttggaaaccgactttgggcggtcaagcgcgagctggcgctcggcgctcacggccaaatcggcgacaggacggagggaggataacgccggcgggagaaaaaggggaaaaggagggagagaaaggggtttgcctccttgccgctttgggaaaaggaggagggaagcggggcgtcgcggcagagggaggaggggctctgcctccgtcccttggcggcttgcgcgcggagtggcggggccgaggcgatgacgacggcgatgacggcgggacggtttggagcggagcggcgacacgggcgacaggcgcgggctggcgcggcagagggtgacggcgacggcgaccaggcggtcggccaccacggcacgcgcgcgtgggatgcaatgggaggcgcggcggattgagcggcgcggctcgggcacgcgcgctggctgcggggccgagcggctgcaggcgcggcagagcagcggggccgggcggcgcagacggcgtaggcgcgacgcgggcgacgaccacgcgggcgcgcgcgcgaacgacgcgcggggagcggcagcgagggagcgaagaggagggctcggctcggcggctcacgcgcacgcgcgcgcggcgcgcgggcggagcggagggggagggggagagagagagagagcgagagcacggttggtggggggacggcatgcgggcggtgaccgacggcgcacgtggggatggcgcatgggaggtgtccagtggcgggcgatggcgcgcggccgacagccggtagcacacacggag

SEQ ID NO: 83334 - DNA, 1432 bp, Oryza sativa
  Clone ID: PAT_MRT4530_82676C.1
ttggggcggctcggccgagcttaacgggccggccggcccaagacggcccaagcgcgcgcgcgcgctggagggaggagagagagtccggtggaccgggctcaccacgcgcggtcccgtgtgggacccgcttgtcagcggctcggctcaccgtgtggagggagtatgcggcgtacgcgcgcgggcggggctgggacgcggccgaggtggcgccgacgtggcgcctacgtggtagccacgcgggccggcgggaggtagacgacgtcccggccgcgaatggacggcgggcgatagcggcgagcggcggagcgagccacggcgataccggcgaaagcgagcacaccgggtggctgcacaggacgaggggagacgagccaacggctcggattcgccggagggagtccgtcggcggcggattgcggcggcggcaaccggcggagaggaaagggggaaacggcgacgaggtcccgaggggctaattcccggtggcgagagcatctacgcggcttcgggaactcgacgcttgcgtcggattggacggaactacgccgagtgaggccagcgacgagcgggtgctacggagctcgggcggcgacggcggcgagcacacggcgagcgatggcaacgaggaagaagagggcgcgcccggagtccccttccgcgtccacgaacgcaccggctctcccggcgcttggcgatggacggcggaggcgaggcagggcacgggagcggcggtaatgggcggtcaagccggcgagctggcgctccggctagcgtccaaagcggcgacaggaggtgacgccggcgagaggggaaaaaggaaggaaaggggaaaaggagggagagaaaggggcttgcccctttgccgaatcgggaaaaggaggagggagcggggcgacgcggcagagggaagggagagctcagcctccgcctcttggcggcttgcgcgcggagtggcgggggccgggggatgacgacggcgatgacggtgggatggtttggagcggcgcgacgacacgggcgacaggcgcgggctggcgcggcagagggtgacggcggcggcgaccaggcggtcggccactcggcacgcgcgcgcgggaagcaacgggcggcgcccacgcgggcgcgcgcgcgagcaacggcgcgcggggccggctttgcgagcggggagctcgcgcgagaggagggggcgctcggcgcgggcgactcccgcgcacgcgcgcgcggcgcgtgggcggagcggaggggagcggagagagaggcgctcggcgcggctctcgcacgcgcgagcagcgagcgggggggggaacgcgccggggggggagggagcgagagagagagagagggagagagagagggcgcccgggagagagggggggccggggaagagatgggccgagcggaattcggcccatcgaacccgggggaggcaaac

SEQ ID NO: 83335 - DNA, 229 bp, Oryza sativa
  unsure (1)..(229): unsure at all n locations
  Clone ID: PAT_MRT4530_82677C.1
gccttcccttcgcctcgtcttctcctccacctccaccaaactcctccccccccccccccccaaccaatnttcctngaatcctccggntgngccaccacccaccccgngngcgtngtcgtngtntnngtngtntccgccgccggntgctcgattggngccggccaaggaagcggcgagngggnttcantgcgaaggngatatggnggcanagcaacggnggccgacgcgg

SEQ ID NO: 83336 - DNA, 2397 bp, Oryza sativa
  Clone ID: PAT_MRT4530_82678C.1
atgtacatggacaacaacaacaacgggtagcgtccacaaggaggtcaggggtggaaccaaccacgcccatattatcaaggaggtaacaacaacggtaacttttctaaccagccctccttgaaggatctcgtttttgcgcaagctaaaaccactgatgcgttaagcaaaaagcttgcagccaatgacaaggtcctagaaaacataaatgtcaagttagatggctttgcttttgcttttcaaaatcagctgagctttaacaaaatgatagaaacccagctagttcagttggcatccttagtccttgcaaatgaaactaggaggattctggggcaacccgactcctcccttgaaaatgtcaaggcgatcacgacgaggggaggtaagtccactcgtgatccgtcgtatcctaaccctgcaggaactaatgggatatcaaaagaagcgccatctaatgactcggctgacaaggaagttcagccagaaaagacagtgccgcaagagtgctgcgacacacggttgctgccgttccctcaacggagtaggaaaccgtcagtggacgagcaattcgctcgttttgttgaagtaatccagaagatccacatcaacgtgccgttgttggacgccatgcaagtgccaacatacgctagttatctcaaggacatactcaacaacaagagatcgctcccaacaacggaggtgatcaagctgacggaacaatgcagcaacctgtgatactccacaagctcctggagaagaagaaagatccggggtgtcctacgatcacctgctcgatcggggcacaacagttcgaccaggccttgtgcgaccttggagctagtgtcaacatcatgccaaaagacgtcttcgacaagctcaacttcacggaagagaagtttgagtttcaaccgaggacggaataatgctccatagttagaatcaaaatttcctagagaaggaaacaacgatgcttaggaaccgttattggaagacgccggtaaaaccacccataccggccaagaaactagagcagccggctaagaagaagccgccgtccgcaccaaaactaaagaaggtggagggagaagccaaagatgcccgctccatcacctctggagacgggtagaaaatccgcaaactgaactggatggagtttgctctgaagttcattcaagctttgatagtttccctcaaattcaaacacttagttgcatatatacaagttgctttgatgaaactaaccggcggaatgaggaggcgactgtctcgtctgttcaaggggtccggctcttcatcaagtcatcatgacgagtctagtactcgttcatcagcagatgccttgatggaagacgccgaagctccgcaacgactccttaacgacaccgacctcgacattgtcagtgatcgggagagacaagcctactacatgctgagcgaccgggagtatgctcacacgcgagaatactctcaggagctgctgaaaaagataggtatggatattgaattttgttctatttggaaagctgttggttggcagagatttgctgtggtagatgagcctggttctcgtttgcttacctcgcaatttctgtgcactttgaaagaaatagaagatggtatttcctttcgctttttccgtgaggagtttacactaacatggaaaggcttaagtacacttcttggttttcacgattcctataaaatcaatctccagaaaggaatttctgggttcgagaaaaataggttttgggaagacatttctggtgctccaatttgcaagaaacctagaacgaatgatatccataatcctatacttaggctcatgcacaaatggattgctatgactttgtttcctagaggtgatctggggcccattaggggagatgaattgattatcatgtttgccatgaccatagaagaatctcgtgcaggtggagcatatagggagacgcgcaacatggcaagaaatgaacgagaaagttcatcatcctcaacacccgtgaagatgtatgaggtgggttgggagccaactggggacgcacccggatggacccaagctccacgccacaacattggagtctcaacctgggcgagtgccagtgatgaccggtggtgtgcgcctcatgacatccaatggggggacaaccaaccttccagatcaagtggtgtgtctccatctccaagtgaatggcgctcaagtttctctcgttgggacttgggtaaaatcactaggagaatggacatccttgatatgcagacgggagagacccagggttcaatccttatcaaggaccctgagcgaaagccaagcttgggggagatatctctccccccactgaggttgttgcgagatatgagatagtaaatatgagttgctatgattctgatactaatttgact

SEQ ID NO: 83337 - DNA, 1385 bp, Oryza sativa
  Clone ID: PAT_MRT4530_82679C.1
atttcagtatatggtgaagtacgataaaacttggaatacaagagagaagggtgtaaaacagaggattgcaaaacacaagaaaaacgtaggaatgatcgtttgattggaccacaggaaaaacacaggaatttgaggagagataaagactcaaaggattttttccatgaggttctggggccttagtccttctgtgaaggcattcaagcaagccagtccttgctatcaatgcaaccttcttaactgagaaatacaatggcgccttgatgactgcactatcgactgatgcagagagccgacttttaccattagcttttgccttggtggagaaggagaactcgtgagctagtgcttgtttattgagcttgtcatacgggttgtgattgggtgatacacataagtttgtattatctttgatcgtcaccctggtacaatgaacgccatgagaacactgattctaggattgctagttggtcaccaccgatggtgcatgagacataacaatgctaattttcataaggccaacgccgatcagggtcaaacgaaagaactgcaaaggatatgtcagattgatgagaagtagatatttgagagggatgtcaagaaacttagactgacggtaaccgaaatgtcttgtacatggcttgaagacttgttgccggacaaagacaaagtcttgtgcatatgatacaaatggacgccgatggggttatatgacaaccaacatggccgagtagttcaacagtgtgctagtcagtgttcggaagctaccagcgactgccgtagtagcctttatcttcctcaagtgtaatgagttctttgtgaacagatataataaagcaataaaacgccttgagttaggggaaagatagtctgagaaggtcgctagtgagatcaagacgcaaaacaccaaggcaaataggcacacttcaaattgctttgatgagcatactaagatatgcgaggttattgagaggggtggtataacacatggcggtgttaggtatggtgcaagattgtttgaaagtagaaggtgagaggaacacatgtactttccaaatgtcgttattgtaccatatgtcgtgttcacatcttcgtttgtcgagtccatgcagtcgactcagaagctcctaatcataaattgcacgagttcttatcccgagaggttgtaaacacatgggctagtcactttgagccatatagactccacacagtgggcactatatgatggtttgcggattcagaattggaggttaaactagggggaagagaagattgaagcgcttcaaaaaggaaatggactcgggctaggtagttcaagaaggacacctccttcttaagttctccaagtagatgccgtactagtgaaaaataggtgcttgctatgc

SEQ ID NO: 83338 - DNA, 2040 bp, Oryza sativa
  Clone ID: PAT_MRT4530_8267C.1
atggaacgattttacaaaaggaaagtgccagagccgaatagtgctaacaatgcatgtaattcatgtttggatgatataaactgggaagatgagattaaatatgatccaggattaagaaaacaaattgatgagtaccatcctaatctcagagagagggtgagaaggaaatacttggagaatggcccttgtcaacctcgcacatttgcttttcctatgacaggttcaagaagagaaaagaaggatggtggatatgaagcatttgttaaaaatggttggaatggttttcatagaaaagaaaggttgaaattgcatcacattgatgttgcttttcatagtgtgagagaaactggtaagagggactatcttactcgattgaatgggtccattgatgttgctaggatgctagtaaagctaggattgcctttccgaggtcacgatgagtcaaaggagccctacaacagaggcaacttcagggaatttcgtgattacacagcggagcaaaacccatccttaagaaaggcaataggtacaaaaaaatcagataacagtcttttggttgctcctgaaatacagagggatattgtgaaatgttttgcaaaggaagtgctacatgctattctagaagaaattgggcatgatgttttttgcttgctagttgatgaatcaagagatgtttcttgcaaagaacaaatggcagtggtcttgagatatgttgataaatatggaattgtgagagagagatttgttggtcttgtccatgtgactgaaacaacttctgcctatctcaagtcttctattgatgctctatttgcagaactgaagctaagtctaaagcaagttcttgtggctattgtgagaaaacataaaggcgttagtgatttttttactaagatttccatcttactgaatgtggtgggtggatcatctaagagaagggatttgattagagatattaatgttaaagaaatgagtaaggcattgggttgtgggcaacttcaaactagaaccgggttgaatcaagagcaatgtcttcagagacctggggatactcgatggagttcccactataaaactctcaaaagtttggttggcatgtttgctacaatagtcaaagtgctagaaattgtggaaaaagacaaaaatgattggaaaattagagatcaagcatcgaatcttttggagtacttccaatcttttgattttgtcttctatttgcacctcatgttgactatattaacaatcacaaacagcttgtcactagcattgcaacggaaggatcaagacatagtgaatgctatgaaatgtgtaaagtcaactaggctcaatttggatgagcttagaagagaaaagtgggagaaagttctagatgaagtctctgacttttgtgacaagtatgatattgtcaaattggaaatggaagatacatatattgatcccaagaagcgtaggcacaaatctagaattacaaacaagcattactatcaagtggattgttttaatgatgttattgattggatacttcaagagcttgacaatcgcttcagtgagacaagctctcaattgcttatttgctcatcggcttttagtccaagagactcatttcatgatttcaatctagagaatttgatgagtttagcaaaattgtatcctagtgattttaattctggaaatttgagggaccttagccaccaacttggtctctacatcgctgatgtgagggatgatggtagattctccaacatacaaactattgccgagctttctcaaataatggtggagacaagaaaacatctttgttatccattggtttatcaacttttaaaacttgtacttgtattgcccgtcgctactgccacagttgagaggtgcttttcagctatgaagaatgtgaaaacatatttgtgcaataaaattggtgatgagtacttaagtgatagccttatttgttatgtggagaaagaagaaatgaagaaagtcaccaatgaggccgttgttcgtcgcttcatgaaaatgcaaggacgcatatttgatgatgattga

SEQ ID NO: 83339 - DNA, 1124 bp, Oryza sativa
  Clone ID: PAT_MRT4530_82680C.1
ctagattctgaccatggagcattgttccgtccttagttgaaactcaaacttttcctccttcccattgatatggaaacggatactccccattcccacgtcaatgttggctcctgcggtgctaaggaatggatgccccaggattagcgacgtctccttccccgtgtccatgtctagcaccacaaaatcaaccgggatgaagaaatcccatatcttgacaggcacatcctcttctatccccaccgggcaatggactgacgagtcagccagttggaggcgcatcggtgttggtgccaacaccgtgaagttgagtttgtcaaagacgtctttgggcatgacgctgacgctggcaccaaggtcgcacaaggcctggtcgaattgttgtgccccgatcgagcaggtgatcgtgggacacctcggatctttcttcttctccgggagcttgtggagtatgacgttgctgcagtgttccgtcgttgggagtggtctcttgttgttgagtatgtccttgagataacgggcgtatgttggtacttgcatagcgtccaacaacggcacgttgatgtggatcttctggattactcccctcgtcgtgatcgccttaatattttcaatggaggagtcgggttgccccggaatcctctcggattcatttgcagggactaaagatgccaactgagctaactgggtttctatcatcttattaaagctcagctggttttgaaatgcagaagcaaagccgtctagcttgacatttgtcgacgggggatacccatagaccggatatagagggtattggggtacgctggtatgaggatcgacgagaccgtagtcgagttggttcgactagatcacccggcaacttggctcctgttggcttcgatttcgtaggctgtggtggttgtattggcggtgagattcgatgccttaggccctcccggggggtcccttttataccgcgggtcagttgatctccaagtagaacttggagatatcggaccccacgcgatacagtaacgacccagttctgtccgagtaggactccttccatccgtggactctgtttctgttacgtgatggatttccttaacgtgtacgcaacatccgtatacgcgcaggtataccgt

SEQ ID NO: 83340 - DNA, 2675 bp, Oryza sativa
  Clone ID: PAT_MRT4530_82681C.1
agcgcgcgcgcgggaggggaggagagagggagccggtggactgggctcacctcgcgtggtcccgagtgggacccgcttgtcggtgacacggttcaccgtgcggaacgcgcacgcggcgcgcgccagggtttgggggagggacgcggtgcacgcgcgcggttcgcggaggacgcggatgcggcgggcccacgcgcagcctcacagctcgcggtggaccgcgcgcgcgagggaggggaaacggagggagcggctggccgggtcagctgatccggtcacggtcgaggtggcgccgacgtggcgcctacgtggcagccacgcgggccggcgggaggttgaagaagacgccggccggaacggacggcggacggcggtggcaagcggcgaagcgaaacacggcgatctaggcgaaagcgagcacaccgggaagttgcgcgggacgaggggagtcgagccaactactcggatttgccgggggatgctcgacggcggcggattgcggcggcggcaaccggcggcggaagaagggggaaacagcgacgagagcatctacgcggctacgggaatccgatgctagcgttggattgggtggaaacgcatcgagggaggccagcgacgagaggcgcttccgagctcgggcggcgacggcggcgagcacacggcgagcgacggcaaaggggaggagatggaacgaggagggagaacggggagatgcgctaccgtgcgggcggggcgcagtgacgatgggccgatggcacgggagtgatctctccggcctcgggccggggaagaggaagaagagggcacgcccggagtccccttccgcgtccttgctcgtgccggctccttcgacacgcgcaacgacgaacggcgacggcgaacagagcacgggaggcggcgacaatggagtggaggcgatgggacaacgagaggagaagagagggagggcgcctgggctttataggatggcaatgtcgcggccaaatcggcgacagggcggagggaggatgacgccggcgggaggaaaaggggaaaaggagggagagaaagggggctcgccccttgcttctttgggaaaaggaggaggggagcaggggcgtcgcggcagagggaggaggggctctgcctccgtcccttggcggcttgcgctcggagtggcggggccgaggcgatgacgacggcgatgacggcggggcggtttggagcgaagcggcgacatgggcgacaggcgcgggcaggcgcggcagggcagcgggaccgggtgacgcggacggcgcagacggcgcggcacgggcggcaaccacgcgggcgcgcgcaagaacaacggcgcgcgggggccggcttcgcgggtggggagctcgccagggatggggagaaggagagcgagggggagggggcgctcggcgcggcgctcgagcacgcgcgggcagagcgaggggaagggagagggagagagagagagagagagagagagcgccgggagggagggggagatgggccgagagagattcggcccatcgaccccgggggaggcaaaatagacttttgcggagggattgatttggaaggatttggattcggaattggactcgacgatagatcggggctaatattcctgggcccatatcaccgacagtagcccccggcgttagccctgaccaaaacttttcctaggtggtcagggttgacgccactctgttagtcaaatgacatgtggaccagatctcttattctttctttgctggcactaagacccatgcgcctttttcgccccagcctgagggtgactcgctagcccgtgccttaggctgtgaacttattttgagcctgtgtcctcacgctacacattttgtttgctcttttctttcggtggcctccttccaatctcttttccttttacatggacgattactttcgcacgagtgtgagagccgaaaactctagagccagcaattcctgtccacagttgagccaggccgggtaccatggccagccggcgggaccaaagccagccgtgaaaacatgagaggatgattagttgagccgggccaggcaccatagccagccggtgggaccaaagttagccgcgaggcgggcagcaagttcatgagccaaccccgcgcttggcccctgagggccatggggaagaagttcgccatgacccggtcgtcaccccccatcgcctctatgatcgtcatgtggatctggaaggactcaagggattgacgctgtcgtcgtacttctcggtgaggctaggccggaactttgggggccatcggacattccgaagactcgccacaaagacctggtagccaagcttacctggtggggatgtggggggccttgccccctgcctggggtggcacgacactcctaaggatgctgcgccttccccgtagcggtggcgcgacactcaccacgccagcactcaaaagaacctcaaaaatcacgaacgcaccgcctacctggcgcgccagatgtcagagaatgaactcctccaccagggaaccgtgaggcccccctttgtgagttcggccaggggcagcgggtgagattcgagggcatttaacgggtgaagacttctggactcctattacaccgggaaacgggagctttgctttgaccaaagcgggaggaccaactccggctgggataagaggatgagaacctctcatcat

SEQ ID NO: 83341 - DNA, 501 bp, Oryza sativa
  Clone ID: PAT_MRT4530_82682C.1
atggctgtcaccacccgctacctacctcactttctgtggagcacacaacaaacgaaggggggagttggaaaatggatttttgacttgacagagtttgatctcatagatgaatcacctaaggcaattaaggggcaagctatagccgatttcattgttgagcatcgtaatgattcaaacagcctggttgatatagggccttggacattgttttttgatggatcggccaagtacgaagcagttcttaagggattacagttgctaaaagaggttgaagtcgatgctgttgaaatcatgggcgattctttgttggtcactagccaattggctggggaatatgaatggaagagcgatactttgatgatctacaatgaaaagtgtcaagagttgatgggtagttttcggatggtgacaatgaagcatgtttcccgagagcaaaatgcagaagctaatgatttggctcaggggggcatcgggatacaagccgatggtgaaagatattga

SEQ ID NO: 83342 - DNA, 1440 bp, Oryza sativa
  Clone ID: PAT_MRT4530_82683C.1
atgtctctcggcatcaaggctcccctgtgggacccgcttgtcagcggctcggctcaccgtgcggagggagcacgcggcgcacgcgcgcgggcgggaagggacgcggtgcacgcgcacggttcacggtggaaaggatgcggcgggcccacgcgcagcctcacggcttgcggtggaacgcgcgcacgggaggggctgaccggggtcggcccgtcccgacctcggctgagctggcgccgacgtggcgcctacgtggctgccacgtgggctggcgggaggtagacgacaacgccagccggaacggacggcggacaacagcggcgagcggcggagcgaaccacggcgataccggcgaaagcgagcacaccgggtggttgcacgagacgaggggagacgagccaacggctcggattcgccggaggaagcttgacggcggcgaatcgcggcggcggcaaccggcggggaggggagagggaaacggcgacgaggtcacgaggggtcgattcccggcgatgagagcatttatgcggccacaggaatccgatactagcgtcggattgggcggagctacaccgagcgacgagcgggtgctacggaactcgagcggcgacggcggcgagcacacggcgagcgacggcaacggcgcgagctggcgctccggctagcagccaaaacggcgacaggaggaaggggggatgacgccggcgggaggaaaaggggaaaaaggagggggagaaaggggcttgcccctttgccgatttgggaaaaaggaggaggggaacgggggcgtcgcggcagggggaagagggctcggcctccgtcccttgggggcttgcgcgcgggctggtgcggcagagggtgacggcggcggcgaccaggcggtcggccactcggcacgcgcgcgcggggaaacaacgggcggcgcggctgggcagcgggaccgggcgacacggacggcgcagacgacgcggctcgggcggggaaccacgcgggcgcgcgcgcgaacaacggcgcgcgggagccgtctttcgcgagcggggcgctcgccagggagaggagaaggagagcgaggggagggggcgcttggcgcgcgggcggggcggagcggagggggagcgcgccggggaggggagagagagatgggagcgacggcaaagagatcgccgtggcggtggtggcagcagccaccggaggcacagcgttcggtgtgcgggcggaggcggaggccggggcagcagcgtacgtggaggaaagggaggggagcgaggcgagtgaggggaaccggagtctggaggaagatgaggggtcggtggagggctgggggaaagaaagagagataagggagagagagagggaggaaggaggaagaagggaaggagagggggtacgaattagattcggcctacatttaagggagtcaaagtggacttttttccttatatt

SEQ ID NO: 83343 - DNA, 735 bp, Oryza sativa
  Clone ID: PAT_MRT4530_82684C.1
atgggccggccggcccaagacggcccaagcgcgcgcgcgggaggggaggagagagtgggccggtggaccgggctcaccgtgcgcggtcccgggtgggacccgcttgttagcggctcggcttaccgtgcggagggagcacgcggcgcacgcgcgcgggcgggggagggacgcggtgcacgcgcgcggtctgcggaggaacggatgcggcgggcccacgcgcagcctcacggctcgcggtggaacgcgcgcactggaggggctgaccggggtcggcccgtcccgacctcggctgagctggcgctgatgtggcgtctacgtggctgccacgtgggctggcgggaggtagacgacgacgccggccggaacggacggcggacaacagcggcgagcggcggagcggaccacggcgataccggcgaaaacgagcacaccgggtggttgcacgagacgaggggagacgagccaacggctcggattcgctggaggaagcttgacggcggcgaatcgcggcggcggcaaccggcggggagggaagagggaaacagcgacgaggtcacgaggggccgattctcggcggtgagagcacctacgcggccacgggaatccgatgctagcgttggattgggcggagctacgccgagcgaggctggcgacgagcgggtgctacggagctcgagcggcgacggcggcgagcacacggcgggcgacggcaacggttggggcggcgccggctag

SEQ ID NO: 83344 - DNA, 404 bp, Oryza sativa
  Clone ID: PAT_MRT4530_82685C.1
attttcaatgtaaatttgctgtgccacgaccacactgaccgttggaatccaacggccaaaagtggggccggttgggcccaccaggggttcggccgaaccagtgactggccaggccaacggtcggctgcctctctttttgaggcaatggttagtgggccccacagaatgaggaggcgactgtctcgtctgttcaaggggtccggctcttcatcaagtcatcatgacgagtctagtactcgttcatcagcagatgtctcgatggaagatgccgaagctctgaggcgactcctaaacgacaccgacctcgaacttgtcagtgatcgggagagacaaacctactacatgctgagcgaccaggagtatgctcacacgcgagagtactcaccggagctgctaaaaaatag

SEQ ID NO: 83345 - DNA, 2173 bp, Oryza sativa
  Clone ID: PAT_MRT4530_82686C.1
atggaggatggaaccgaagatgctggcgctgccggctgccgctgcggaatcccagaaagaaaatggagagggggcctcctcagcctcaccgcccggcagaaaagcctcttcagcctccgccacgcaacaattaaatacgtgcactcctccgctcgaaaccgcgtcgatcgtgctcgtccgtgcgcgcagcaaaacgccaccaccaccaccaccgcatccccaacacctcacctcacctccttacaccataggcgtgcgtgcgtgatgaacaccacgtccgcgaacgagctgatgatgcaccgccacgtccaggccgcgccctacgcggcggcgccgcagcagcaaggaggcaagcagcgtgcgccggggctgccaccgacgcctccacctccacctgcggcggcgagctcccactcctctcacggcgacgtgtgcatggacgacacggcgcgcggcgggctgctgccgccgcgcaaggcgcaccggaggtcacgcagcgacgtgccgttcgggtacttccagccgctgccaccgccgtcgcccaagatggaggccggcggcggctgggcactccccgggtgcggcggcgccggcgacgtcgacctgctcaatgcgtacatgagcttggagggaatgggcggcgccgacgggctgaacaactccgacggggacagccgcgggagcagcatgcggacgaacggcgccgacagcagcgagaacgagtccgaggactacgtcggcgccgacagccaggccctcctctggggcggcgccggcggcggcgaggctgcgggcaagaagagacggaataacgctgccggcgagaaggcggcccggcacgcgaggagcctttccatggacagcctcatggggaagctcagcttcgccgccaatggtgagccggccaagttcagcctggagttcggcagcggcgagttcacccccgccgagatgaagcggatcatggccgacgagaagctcgccgagatggcactcgccgacccaaagcgctcggcggcgaggtccaaggagcggcggatgcggtacattgcagagctggagcagaaagtgcagatcctgcagacggaggccacaaccctctccgctcagctgactcttttgcagcgcgactcgtcgggaatggccacgcagaacaacgagctcaagttcaggctgcagtccatggagcagcaggcgcagctacgcgatgcattgaacgaggcactgacagctgaggtgcagcgcctgaaactcgcggcgaatgaggtctgcgacacgagctcgtccagcaacctagcacaccaaatccagctccgctgtcagaaccagatgcttgatctgcacaagcagcagcagcagcagagcccggcgccgccgtcgccgtcgccgtcgctgctactaaatctgctcgccgccacggtgccgccgcttgatgaccgggccgacaacgacgagaaggcggtgctggctcctacgctctcctgcgcggatctggtgcggggggatggatcccgagccgccgccggcggtgatgcgcgtggaggcggcggaggcggcagggtggccggatccagccccctcctgtccggatccggcgcgggaggccaagctccggccccaggcagcgaggcggcgggggcgcgcggtgctgggcggcggtggcggaaggcggcggggacggagctggccgagggcgcggcggcggcggcggcggcagtgccacccagaatccgcgcctctcggccggatctggagggtggcggcagttggcaacggcggcggtggtgtggcgacgatggtggcgacagttggccggcggcaggtggcgatggcggtctcggccggatctggacgccggcagcagttggcgacgacaaccgtggtgtggtgacggcggcggcggcagttggcgacgatggcggcggtcgtggatgtggtggctgccgtgccaactggcggcggcggtggaagacatggcatcgggcagctagctgctcggtggtggagggcgacagcgcagcggcggtttgcggaggcggtggttggcgtcggtggcagcggcaccggtggctgcgactctggaggcggtggcgacgtcgacggcggggaaggagtcgggtgcgaggtgaggatgacgccagcgaggtggctgggtgttcggcagcagcgacta

SEQ ID NO: 83346 - DNA, 584 bp, Oryza sativa
  Clone ID: PAT_MRT4530_82687C.1
tgcgagggccgccctttttttttttttttcagcatctgaattccgaagtggagtgggactggcaagcttagatcccacaggccagaacacatctccatttgctaatacattaacacggatacgtgcttaaagttgctaagaacgtcggtactagtgttactacaactgccagaggcaccctaccattgtctccagagaaataggtaaacctacgaggctacgaagtcgagctaactcaggccaacaaaaccaatctacgaacccccttcaagatcactaaaaaccatctaagctaactcaactccactgatgagggcagtcacttcacaaaatgcgggttcagaagcttggcgacctccaggaatcccacgcgctcttggccagcaaacaggaccttcagcttctcatcacacacgatcaccttcttgtccgcaggatcctggaggttgtgctgcttgatgtaggcccagaggcgcttgagcgcctcggtgcgggggatctccgcggctcccaccaccgcctgcagcgccggagacacgagccggggcttcgtcagcccggtggccgccctcttcttctgggcc

SEQ ID NO: 83347 - DNA, 399 bp, Oryza sativa
  Clone ID: PAT_MRT4530_82688C.1
agaacccggaggggaaaagggggaaaacaccaagcattttcattaaaaaattggtacaaaaaaccacgcccaaaaaaggcctcaaaaaacccatggggggtcccgacgattgcctgaaagaaaccccccctttgttcaagagaggaacaaaaaaaatttggttttccgcccgccaaaacggggggggggcgtttcaaaaagaaaaatattggggggtgaaaaatttcaagggaaccgaacccaggaccacgcatgcctttgattaaaagggggccggcgtttttattttcagagcccgttgtgattctttgggaaatgaccttctaccaggcggggaggggggcctttgtgccaaggaatcggacatggaagggctcctttgggggggcccaacttttg

SEQ ID NO: 83348 - DNA, 327 bp, Oryza sativa
  Clone ID: PAT_MRT4530_82689C.1
tttgtgtttttttttaaccacataaaattgtccttgatgtccatttcacatttataataaagtctcatacacacatgaaatgtccttcttgccctttgattaggtcacctaataacaacacaaaagaagaggcacaaacactttggacacatgtagagagactagagagagagagcttactagagctaacttaatgaagacttgacacgctagctatagctatagtagactagtagtagtagttgcaatgcatgcccatggtggtggcgtcgaggagcggcggccgcagctggggcatcatgaagccggcggcggtgccgacggcgc

SEQ ID NO: 83349 - DNA, 252 bp, Oryza sativa
  Clone ID: PAT_MRT4530_8268C.1
atgtgccgccaccgtctgcctctgccggctcacactcggcatccgatgcgcggctccacgcccacggcccacctccgcttactactcgttgtcgccgcaggtctattgccgctgttcgttgcagaagcctgcaacatggctgggtcgttgttgccacttgccaagacgcccccaatgcctcaatcccccaaggctccaaccctaatctatggagtgattgagagagaagtggactggatgagagagaagtga

SEQ ID NO: 83350 - DNA, 317 bp, Oryza sativa
  Clone ID: PAT_MRT4530_82690C.1
ctagataataaagcctctgtgatgttcacctgctttgacccaacctgtatacccgtgcaactggtattgtttgtatgaagaactactttatctcccatgttttccaacaacgaatagaagacaagataaatactccgccaaatagagggtccagtactgaccaaattgaaaaatggagagaaaaaaaatcctgatcagttgtagaagtactagctcgggttgctactacaactttgggatgcaaaatgcaaatgcacccggtcaaaccactttgaccacacgaggtttttacccactaaaaaaaaaaaaaaaaaaaa

SEQ ID NO: 83351 - DNA, 775 bp, Oryza sativa
  unsure (1)..(775): unsure at all n locations
  Clone ID: PAT_MRT4530_82691C.1
cgaattgggaagggtttgctcgatccctttgttctttccttctctttcccctgactcctcccctccccgtactccaaatcatccgctccgccatggctcccgcctgggtcttgctcgatcgcttcgtcgacatgttccccctcgacggcgacgaagagagcgaagacagcgggggagaagaatccataccagctggcatgtggtccgtgaagcccaacccacaagttgccgatccccctggtatatcttccttccccctgctgatctctcggaaggcgatgaaccaagtgcgccacgccatggtcgtgtgcgctagcaagaacctcgtcgtcttcctcaccggcgagtactacccaatcaactacaggcctggttgctacctgatctacgacgccatccacgactctctcactcccgtgcctcacgtcccgggacctgacagcctccttgccatcggcagcggaacatctgtcatttcctttggcggctcgggcagcaacgccttcgtcctcgccgagctactcatgaccgatgtccgcaagttccccgaagaagctgcgctcttcacgtggtggtctactgccgtagtgactcccagcggatacaccgccgctgactggatgaaggagaaggttaccctcccccctgaggtgcgcacgcccacctactgcttcgtttccnacatggcattcttcgtcggagaatcgtgcctgtgctgggtcgatctactcatgggcatcctgatttgnacctttgtccctctcgagatcaaccg

SEQ ID NO: 83352 - DNA, 663 bp, Oryza sativa
  Clone ID: PAT_MRT4530_82692C.1
atggacgacgacggcggcgcgggccgcgacggcatcctagcgttcgcgcaccagctggccaggcaagccgcgttcctacttcaagcctccaacgacctactcgcatcgcttcttcagtccacctcgcgcggcggcggcggcgccgacatcctatcgttcgcgaatcagctggccaggcaagccggcgcgttcctccaagactccaacgacatactggcatcgcttctgcagtccacctcgcgcggcgcttccgctggcgccgccgccgcctcggacgaggcgatccaggcgctcaaggacgtgggcggcggcgacgtcgacggcggcgggcagaagctggactgcgcgatctgcctcaaccacgacgatccgtcagcgtcggcggcggcggggtggaaggagatgccgtgcgggcaccggttccacggcgggtgcctggagaagtggctgcgcatgcacggcacgtgccccatgtgccgccaccagatgccggcggcggaggtggtggagggggcggcttcggaggtgaccacgtcggagccgctcctgctgatagcgcgcgtacgccgctccggcgacggcggcaatgaagaggagcattaccattactatctttacgaaatacgagtacagtactccaccaatgtcgaaattaacccttaa

SEQ ID NO: 83353 - DNA, 222 bp, Oryza sativa
  Clone ID: PAT_MRT4530_82693C.1
atggcttcacaggctgggaggcgctcccgagggcagcgccatgcgaagccacggcgtcgggggtccgacgaagcgggtgcgcaagtggcgacgggctccgagagcggccgggcttcgtcgatggaggtgctccaggacagcgcgtgcacggggaacccgacgcgactccgaggaggtgaaggtgcggcgatgccgcttcccggaaagctccggttagcttag

SEQ ID NO: 83354 - DNA, 1488 bp, Oryza sativa
  Clone ID: PAT_MRT4530_82694C.1
caagagcatggccgccgcggcgagcagcgaggagccggcgcacgccgcccaggtgccgccgctgaggccgcgcgggctgccgctggttctcgtggcgctccctctggccccgccgccgccgccgatgttggtgcggcctccgcctcgccgcccttccgtgacgcccatgaggctcgccacgcagagcatggcgaggacgagcgtgcagacgggcagcaacgacgacgaccgcctcatcttctgtcttgtggttatggcgtcgcccctccaccggccaccgcgcctctcttcctcctccgaccaacctctatcttcctccggtcgtcccctccttttcgtcaccgtcccttttctgtcgccggacgggacggcaagcttggcaacaggcgtggaggcgacgagctaggcagcgaccgtacgaatcgagcgacgagctcgacgcctctctcctcccaggcgttaggacgagtggatggatgagaagctccacggcaccgccggatttggcatggcgtggggcagcaggagcgaagatggatctcggcggtgcaaatcgggtcgacgaactccgcacggcagcccggagttggaggctgcagccgccatcgagctcttccgcggcggttatggaggcctcctccactactcagatcggcgtccacgacggcggcaacccctaaaatcatttccccgtccccttcccgatcatgacgaaagcaatggcggcggcggggattcgggcggagttgacggtggccggcgacgattcccggcggagcgacatagattccaacaagcagcaacagtacgaagtcccttcctttctctcgtgaaaagcggccgcggcgaccattgaggagccagcgcacgccgcccaggtgccgccgctgaggccgcgcgggctgccgctggttctcgtggcgctccctctggccccgacgcccccgccgccgatgtaggcgcggcctcctccgcctcgccgcccttccgtgacgtccatgaggctcgccacgcagagcgacccgcaaacgacgggcgcaaggccagtccatgacgacgaccgcctcatgttctgtcttgtgcttatctgagcacgaaagcaccgtccggcagcttttcgcgtgtgatttcttccactcgcctgccaagtttaggcatgccggaagcctgcacacaaacacgtttttttgatttagggttgctgaaatcatgccaagtgtggtatttttgtatgttgtatattgaagttctcatggtgtaaccacggttgcatttaccgcggtaaaccgcgcggttaccgcgcttaccgcgggggtacggtaaggggtaaaccgcggtaaccgcgtcaaattcaaataaatttgaaaaataatttgaatttttgataaattttgtacggtttgtcgcggtttgtcacggttaccacggttaccgtgcggtaaccgtgctagtgtagcaaaatgtgagagaaaacaaaaaaaaagaacg

SEQ ID NO: 83355 - DNA, 702 bp, Oryza sativa
  Clone ID: PAT_MRT4530_82695C.1
ccacgcgtccggtgatgaccagcggcgtggcggcgacgccgggggagatgagggagatggcggcgcgggaggagagggccgtcgaggagtcgctgctcccggagaccgccgacgggctgcgccgcctcgtccgccggtccatgcaccgcccgccgccatggatgcccgacttcgtgctcgacgatttcatcaagttgatgtgcgtggttcagaggaaggagagggccgagctgctacacgagcttctcaagaacggagctggcatcgatcccctccccgttctcactcagaaaacgttgattctgtggggtgacaaggaccaggtgttcccgttggatctcggccacagactgcaaaggcatctgggagacgtgtcacggctagagatcatcaaggacgcagggcacgcgttgcagttggagggagccgaccaagtgaaccgcttcatcaagtctttcctcctggactcgtgaaatgggccggaagttgggagtggcccagtactagagccctgctaagaagtactagaagcaggagctctcggaaaggcccaaaccaatccaactgtaacccggatttgccctctatcctcagatgccgatagtgtaatgaccctatttgggatgtaaaaaatatataccgtgaactattgattaattgtcaaatatgaaatctcccaataaaaaaatgtgatgctcaaaa

SEQ ID NO: 83356 - DNA, 757 bp, Oryza sativa
  Clone ID: PAT_MRT4530_82696C.1
cccacgcgtccggcggcggcggtgattcgggcggagtgatggtggcggcgacgattccggcgaagcgacagcgtttccaacaagcagcaacagtacgaagtcccttcctttctctcgtgaaaagcggcagcggcgacgattctgacgagcggcgatggcgcgtagcgtgaagctacggctgtccgagccactcggatctcgtgcaacgaactgatgccacccgagcccggtatgatgtcgtgcatggggccgtcctggttctcctccgcacgcagccaatgccgcgacgacgagcctcgacctcacgcgaccgacaaagacgggcgcaaggccagtccatggcgatggctagggtgcgtgcacggcggtgcggatgccgtgatcacatcacatgatggcggcgatttgccaaatcggcaagtcatcaatccgattcgcttagggatttgccaaggttctaattttggggatttttttgatttagggtttctgaaatcatgccaagtgtggtatttttgtatgttgtatattgaagttctcatggtgtaaccagggttgcatttaccgcggtaaaccgcgcggttaccgcgcttaccgcgggggtacggtaaggggtaaaccgcggtaaccgcgtcaaattcaaataaatttgaaaaataatttgaatttttgataaattttgtacggtttgtcgcggtttgtcacggttaccgcggttaccgtgcggtaaccgtgctagtgtagcgagatgtgagag

SEQ ID NO: 83357 - DNA, 1360 bp, Oryza sativa
  Clone ID: PAT_MRT4530_82697C.1
atgaagcagcggcatgccaccgccaccgcctcggcgctcttcgcgctgctcccgctgtcgctgctgctcttccggctgctcgtcctcctcgtgcggctccgcctcgccgccttccgcgacgccgcgctgtccctccacttcctcgcccgcctccgcatccgccccgtccacctccgcctcccgggcaccgacgccaccacggtccgcgtctggtgccccgcggcgccgtccgccaagccgccgctgctcctcctccacggcttcggcggtgactccaagtggacgtgggcgcgcaacctcccggcgctgtcgcgccacttccacgtctacgcgcccgacctcctcttcttcggcgcgcactcccgatccgcctcgccgctccgcaccgtcgcgttccaggcccggtgcgccgccgaggccatgcggctcctcggcgtcgaccgctacgacgtggtcgggatcagctacggcgggttcgtggcgtaccggctggccgccgtggagggcagggaccgggtgccgagggtggtggtgatgaccagcggcgtggcggcgacgccgggggagatgagggagatggcggcgcgggaggagagggccgtcgaggagtcgctgctcccggagaccgccgacgggctgcgccgcctcgtccgccggtccatgcaccgcccgccgccatggatgcccgacttcgtgctcgacgatttcatcaagaaccccctaagtttctttctcacgaaaaacatgtacattgatcggtttttgagcaatcttgccggtcgagcgagagtaaaatatagatcggcaattcagtactcctacacgtgtagtgctggaggagagtggcacgggcacgtaaagtgtaacttgtatttgatgtgcgtggttcagaggaaggagagggccgagctgctacacgagcttctcaagaacggagctggcatcgatcccctccccgttctcactcagaaaacgttgattctgtggggtgacaaggaccaggtgttcccgttggatctcggccacagactgcaaaggcatctgggagacgtgtcacggctagagatcatcaaggacgcagggcacgcgttgcagttggagggagccgaccaagtgaaccgcttcatcaagtctttcctcctggactcgtgaaatgggccggaagttgggagtggcccagtactagagccctgctaagaagtactagaagcaggagctctcggaaaggcccaaaccaatccaactgtaacccggatttgccctctatcctcagatgccgatagtgtaatgaccctatttgggatgtaaaaaatatatactgtgaactattgattaattgtcaaatatgaaatctcccaat

SEQ ID NO: 83358 - DNA, 212 bp, Oryza sativa
  Clone ID: PAT_MRT4530_82698C.1
atggcgataaagatcccgtccaagatggaaattgggcatgggaggcttcttgttgctccactcttccacaccggcaatgatatgctccgcaacctatgcaacaagaagaaagtcaagtggcacacatgcaggaggggaggcagagaagaaaataatgatttgttcaatccaatggggctactgacaacagacggggttgtgatcccggagcg

SEQ ID NO: 83359 - DNA, 250 bp, Oryza sativa
  unsure (1)..(250): unsure at all n locations
  Clone ID: PAT_MRT4530_82699C.1
atcgcccacgcgtnacaagtaatgacaattgcaaatttttgtcagacgcgtggaaccaacacgcgggggatgaacgctgatcccatctaagncncacaccgaacgaacaatgcattatgttttgtaactgttggagggcattaatttagattcaagattggcggatttttatgagcaaaattgtccaagaataaatttatttttataaaaggttttaaaaatttccagcacacatttggtgaagatgatc

SEQ ID NO: 83360 - DNA, 413 bp, Oryza sativa
  Clone ID: PAT_MRT4530_8269C.1
atctagtcgatcacccataatcgcgagcacggctattcgaatagttttactctggccagaggtccacaactgtacccagaagacacaattcaccagcatgtcaccatgtcatcatgtgcccatgatgaacacgtcaccatgtcgagtgattgtgacaagacacttcatataacctcccccctgaccaatcgcaccacacctcaggtttcgctcttgtccccaacaggcaacgggcagcccctccctcgtgccatggtgaatccggaagccgatcaaccgaacaccccggccgacccaactccatcacgctgaccctagcctcgatacgtcagccagaggaaagctatactacagatcaagcagttacccattcccgcttgtggcaagcgttgtatgtcctccagggttttgcg

SEQ ID NO: 83361 - DNA, 414 bp, Oryza sativa
  unsure (1)..(414): unsure at all n locations
  Clone ID: PAT_MRT4530_826C.1
ttaagccgtgctcggagccctcagttgttgaggtaactaccgtgcgcgtacttgtgtcngataaaacctctcttaatagtcgagccacacatatcaaccgaaagaatagtgaagtatagggtcacgacataacaggatgacaacgaaccaggcaggggcaacctagcctctcaataaaactaaagtagacatggacaagacatttcgaacactagtcatcgtctgatcgtcaatggtcgtatgtcggccgacagcttccctactttgaaccccccgcgcatatgtayccacccccgcraagaacacgaacatgtagttcaaactcttacaacatgttatagaagaagtagggtgactgccacaattatggtactcacgttactcggaccaatacacattttttttttttttttt

SEQ ID NO: 83362 - DNA, 1073 bp, Oryza sativa
  Clone ID: PAT_MRT4530_82700C.1
ccgctgcaacgctgcaacgtcccgcctctcccaagacaggcccacttatatccggcagctacgcactcaggaagaatttcccgatcagtcacctatctcaaaattgctctaggccaatattctcccccttaagagagattgacatcctcgtcgatacgtgtgttgcacactttatcctcactcgggcgcactcgggaagaatttcccgatcggtcacccatctcaaaattgctccatgccaagcacgcttaatcttagagttctttggagatgggcttccggaaaaaaaattacaacttgttggtatgagtattctcttaatcctattaagccctgggccgagatgtcacatatacatggcctgagtactcatagttcccagtgatgtaatattgcaaagttcatgcacacataggtgtgctcagtggtaaaacgtgtacccatgttacgtgtttctagacctccaattcttttagatgtgttagcacacactcataagggtgtatatgaacatgaatataatgtgatatgtgcgtttgagtgcttacatgcgtctcacatgtactcgcaaataaaatatcattatttcatttttcatatatatgtgagatgcttttacaggtccataatatttctcattcctatacattgaaattttataactgcaatgcacgcacgaattgtccgccgcaacacgcggagtatcatctaccatgccatgccagatgagtataatcaaaaaaactaaattttattttttgcctagccatgccatgccgtcccgcctctcccaggcgggtcttttttgtcctcattcgtgtgcacccaagaagaacatcccgatcggtcacccatcccgaaactcttttttgtcctcactcgtgtgcacccaggaagaacatcccgatcggtcacccatcccgaaactcttttttgtcctcactcgtgtgcacccaagaagaacatcccgatcggtcacccatcgcgaaactcaactgctccaggcctagaacgcttaacatcaaagttatttgaagatcggcttccgaaaatatagctgtaacatgttggta

SEQ ID NO: 83363 - DNA, 609 bp, Oryza sativa
  Clone ID: PAT_MRT4530_82701C.1
ttagcggtaggaggcagcgcagtgaaacggggttagcggtggcatagtgcggcgggaggcagcacagtgcagcgggaggtagtgcaatgcggcttgcacgctaggcatccccatggattctccaagctcgtcctcatcttgaagtcgctggaagaaggtgttgttgatcaagtacccgttgcataaggataagattattttggagtgcagagcaatgtcaattgctaatcgggaccacatcttctttgacgggcaactcaattgaagcccatcaaaggtatgaccaacacctttgatgggcttttttaatctaacccgtttgaggtgtgttgggtctgctgaaccaagcatggagagcaagaggcgcctgatgtcgcagctgaagaagtgttggatcaggatgtagagaacaccgccgcagctcgagaaggcatgttcgtaccttctcctgttgccagaggggaacaatttaccatagacgacatatgaagcgaagtaagtattatgtccgttgggccaggaattctcaaatgacccaagaaacatgcgtttcgcaatgtgtacggacggcattaatccatttggtgatttgagctcgtcacagtacat

SEQ ID NO: 83364 - DNA, 216 bp, Oryza sativa
  Clone ID: PAT_MRT4530_82702C.1
atgacgtcgaacgagacaacacagccacacgctatgacgtgcgcggcaaaagcaccacacgcccccgcgggggaaaaaccatggccccagccggccagccgtctcgcgtcgccgcgcgccgcgccaaaacgagacaagcagcggctggcctgcgactgcgaggtgactcacgcccacacctccgtgactcacaccaaatgctactgctcccagccg

SEQ ID NO: 83365 - DNA, 929 bp, Oryza sativa
  Clone ID: PAT_MRT4530_82703C.1
aaactcatcgtagctggcttgctcctggaagaactcctcatcaacaggatccgcttcatcttcttcagctgccggatcacccagcccgtggggatcagccacgtcgggagacctccaagctttcatgacaaggcatttccaaagccgacacaggtttaccatatgccgacgagaggggtcccagaccaacaacaggttaggtcccagaccatactgtgccagcgtacacccggtacgttccccggtccgcggttttggaaattcatttagttcacaagcaccgacccagatgtcgggttttccaagtcttttgtaaaactccagttttacccaagttgttactcagattttaagtttgaaggcgaccgtcgatactcgcacagagtgcacgaatatcgaggtgcaactgggtggttacaaggggacatagtatggcaattaacaatggaaggatcaaatgcaacaagttaggtaagtccgccaatctatcttgcagatgggttcggcagtcggtcgccaagccaacccctcatggtgcccgggtagtccccgtgcacaagggggtccatgaaccacccgaacatgaagtccaagcttcgctggacagcgccgcggtcggccggtattgctcttattcatctggatcacacaagtataatatttggggtagcctatctaactgttgtcgacatggcggtctgaaggtctgactcgtagtcgacaacagggtagtcttcctcctcgaatccgtacccggcgagatcagagataacgctttcgtctctcctgatagtatccagagacaccgtagaggactagccatgcttatccctgaagtcgatatccggcgccttgtcttggcgtatgttggcttgtatattgtggcttctgttgttccgtgtatgttgattgtctcttctatggtgagt

SEQ ID NO: 83366 - DNA, 765 bp, Oryza sativa
  Clone ID: PAT_MRT4530_82704C.1
atggagaggagggtggcgttccggtggggcggagaggcgctgttggctccggcggcggcggcggcgttccgatcggtggggacgacgacgatggattgtgggggtaatcccaatcgaattactggagcagcgaccgatatatcccacaaagatcaggattcaggaagactgccttcctctcatctccacaggcaatctgagagctgggcaacacatggatcagacaaagaaaaggaagatgaagaagtggtgcaggctaaaaatgaagaagtggattccttcatcgctgcagcagaaaaaacaggtccaccacagcagaatatcgactgcacagcagctgcacgacgtcaggctaataactatgcaaaagttgctttggagcactacaacaaggatgaaaacaacaagattcaatacaggttcatcaaggccctgaaaagttgcgctatccaaaccaacgaatcctatgggcatgtgaactttgtagcatcttcatcagattcaaaagaagagttcttttttgctgaagtttgttatgatcccaagagcaatggattggtaccaacatgcatggtatctttggaagaaaacaacagaattggaggacttcttggtgttggatttgtagggtgcccagatcttctgaatcctcctgtcgacaacgatcactgctatgcttgtgacgataggcttaagcacccaaaagatggaactctgtttaagggtgggcatgtagccgccacgggtttctatacgtcctactga

SEQ ID NO: 83367 - DNA, 1503 bp, Oryza sativa
  Clone ID: PAT_MRT4530_82705C.1
gagctaaatgggccggccggcccaaggcgcgcgcacgcgggaggggaggagagagagagccggttgaccgggctcaccacgcgtggtcccgggtgggacccgcttgtcagcggctcggctcaccgtgcggagggagcacgcggcgcggcgctaggatgcggcgggcccacgcgcagcctcacggctcgcggtggaacgcgcgcacggggaaggactgaccgagatcggctcgacccggtctttggctgagctggcgccgacgtggcgcctacgtggctgccacgcgggccggcgggaggtagacgacgacgccggccggaacggacggcggacgacagcggcgagcggcggagcgaaccacggcgatacaggcgaaggcaagcacaccgggtagctgcacaggatgagaggagatgagccaatggctcggattcgccggaggatgcccgacggcggcgaattgcggcggcggcatccggcggcggaagaagggggaaacggcgacgaggtcacgaggggccgattcccggcggcgagagcatctacgcggctacgggaatccgatgctagcgtcggattgggcggagctacgccgagcgaggccggcgacgagcgggtgctacggagctcgggcggttacggcggcgagcacacggcgagcgacggcaacgggcgcgagctggcgctcggcgctcgcgtccaaatcggcgacagggcggagggaggaggatgacgccggcggtgacggaaaaaggagaaaagagggagagaaaaggggcttgcctccttgccgctttgggaaaaaggaggaggggagcgggggcgtggcggcagagggaggaggggctctgcctccgtcccttggcggcttgcgtgcggagagacggggccgaggcgatgacggcggggcggtttggagtggcgcgacgacacgggcggcaggcgcggcagaggctgacggcggcggcgaccaggcgcctcacggctcgcactggaccacgcgcgcgagccgggcggaggggagcggcggaccggggtcagcttggcccggtcgcggccaaggtggcgccgacgtggcgccttcatggcagccacgtgggccggcgagaggaagacgatgacgtcggccggaacggatggcggatggcggcggcgagcggcggggcgatctacagcgatgcaggcaagggcgagcgcaccgggaggttgcacaggacgaggggagatgagccaacggctcggattcgccggaggggcctcgacggcggcggattgcggcggcggcaaccggcggcgagagaagggggaaacggcgacggcgcgacgggagatcgattcgggcgagctagagcatctacgcgactccgggaatccgtttctagcgtcggattggacgggtcatcgccaaggaaggccggcgacgggcggctactactgagcgcgggcggcgacggcggcgagcctactgagagcggcagtgtggcttggggcggcgccaactag

SEQ ID NO: 83368 - DNA, 459 bp, Oryza sativa
  Clone ID: PAT_MRT4530_82706C.1
ccgccacgtaggacacctgctgccgcgtggaagagaaaattgcttggggaccatatcttcacttggaagctcaggtcttacttgagccacgagtttttcagcagaaaaggcaaggaatcatcctgcagcggtcccactcgagctcaaaagcccttttctctctccacccaagctcagcagcaacaagctaatgatggagtcatggcgggagggggggaggggcacaacaggccggaggttgccagcgaaggcaacaacgatgcttgctggtgcactatgctcgatctgcacttgccgatgaaggaggagaagggaacccgatccgccgcactaccccatgcctggcttgatccagcgacgctatcaagctccatttccaccgcctctagtactcaatgcctgagagggaagaggccagatccggccatgacatcgggtggcggtgttggatctgagtga

SEQ ID NO: 83369 - DNA, 837 bp, Oryza sativa
  Clone ID: PAT_MRT4530_82707C.1
atgacctctaagcggcgcggcccgagagaaagggcggctcggccgagcttaacgggccggccggcccaagaaggcggcctagagcggcccaagacgcgcgcgcgcgggagggaggagagagagagccggtggaccgggctcaccgcgtgcggtcccgggtgggacccgcttgtcagtggctcggctcaccgtgcggagggagcacgcggcgcggcgctagggtgggggaaggactcggtgcacgcgcgcggttcgcggtggacgcggatgcggcgggcccacgcgcagcctcacggctcgcggtggaacgcgcgcacgggaggggctgaccggggtcggcccgtcccgacctcggctgagctggtgccgacgtggcgcctacgtggctcccacgcgggccggcgggaggtagacgacgacgccggccggaacggacggtggtcgacagcggcgagcggcggagcgaaccacggcgatacaggcaaaagcgagcacaccgggtggttgcacgtgacgaggggagacgagccaacggttcggattcgccggagggagcttgacggcggcgaatcgcggcggcggcaaccggcggcgggaaaaggggaaaacggcgacgaggtcacgaggggccaattcccggcggcgagagcatctacgcggctacgggaatccgatgctagcgtcggattgggcggaactacgccgagcgaggccggcgacgagcggcgcttccgagctcgggcggcgacggcggcgagcacacggcgagcgacggcaacggtcggggcggcgccggctagctacggggaggctactcgtgctaccaccgaaaactaa

SEQ ID NO: 83370 - DNA, 1226 bp, Oryza sativa
  unsure (1)..(1226): unsure at all n locations
  Clone ID: PAT_MRT4530_82708C.1
atggatttcgacgaccatgacgagggtgacggcgacgaggagatgcctccgatgcctctgagctcgggctacgacgcgccgatgcagcccgggcttggaggtggcggtggcggggtgcccaagccgggaggtggagtcggcggcggcggtggtggtggtggtggtggtggaggaggaggggcgaggtatcgggagtgcctcaagaaccacgccgtcggcatcggcgggcacgccgtggacggctgcggcgagttcatggcttccggcgaggagggctccatcgacgcgctccgctgcgccgcctgcggctgccaccgtaacttccaccgcaaggagtcggagtcccccacgggcgtcgggccggcagagactccggccttctccccctactaccgcaccccggcagggtacctccaccaccagcagcaccagatggcggccgcggcggcggccgcggccgccgccgcagcgggcggctacccgcagcggcccctcgcgctgccgtccacctcccactcgggacgcgacgagggcgacgacatgtccgggatggtcggccccatggtgattggccccatggtcggcatgtccctcggctccgccggcccctccggctccggctccggcaagaagcggttccgcacaaagttcacgcaggagcagaaggacaagatgctcgccttcgcggagcggctcgggtggcgcatccagaagcacgacgaggccgccgtgcagcagttctgcgaggaggtctgcgtcaagcgccatgtcctcaaggtttggatgcacaacaacaagcacaccctgggcaagaaggcgccatagctaagctaagccaagcaagctcagctcagctcatctcctcccggtgctaggtacctgcactgcaactgcaactgcatgcatcaccatctccatctacttctactacctccttacccgcggcttattagcctttttctttgccttcttttacctcacctgagtagaagcttagctaggttcgtagcgagcaaagctgttcttgttggttttaggggaggtggtggttgctgctgctgctgcttttgcatccttccttgtttctttttcggtattttattccattgtggttggggtctttgggcttntggttccgtcgttgttgtttctagtagatgatgacgcgacggtttgtgttggaaggaagagacatgatgggntttccgtcgnttaaaaaaaaaaaa

SEQ ID NO: 83371 - DNA, 1179 bp, Oryza sativa
  Clone ID: PAT_MRT4530_82709C.1
ttttgccggccgatgacaccaaaatggagcttactcagccaggggtgtcccatttcacccatgtggtcgtacttgtcttatgtttggatgaaattccaaggaaacggtccttaagtgcaagagcgggaaaccgtacacccggtacgttccccggtccgcggttttggaaattcatttagttcgcaagcaccgacccaggtgtcgggttttccaagtcttttgtaaaaccctagttttacccaagttgttactcagattttaagtttgaaggcgtccgtcgatactcgcacagggtgcacgaatatcgagacgcaagagaggggctgaccggggtcggcccgatccgatctcggccgagctggcgccgacgtgtcgcctacgtggctgccacacgggctggcgggaggaagacgaaggcgccggccgcgaatggacggcgggcggcggcggtttctccgggacgccttgcgacgatggggggcgacggggcgtacaccgggatgacgagggagaaagagagggagcgagccaacggcttagattcgccggagggagtccgtcggcggcggattgcggcggcggcgcccggcggagaggaaagggggaaacggcgacgaggtcacgaggggccaattcccggcggtgagagcatctacgcagctacgggaatccgttgctagcgtcggattgggcggagctacgccgagcgaggtcggcgacgagcgggtactacggagcacgggcggcgacggcggcgagcacactgcgagcggcggcaacggtcggggcggcgccggctagctacggggaggctactcgtgctacggctctcccggcgcttggcgatgaacggcggaggcgagacagagctcggaaggcggcggcaatggcgcggacgagaaacggggaggattgggggggaaagaggaagggagggcgcctgggtttaaagggcggcaatgtcggtttggaaacctaggcggggcggtttggagcggagcggcgacacgggcgacaggcgcgggcaggcgcggcagagggtgacggcggcggcgaccaggcggtcggccaccacggcacgcgcgcgcgggatgcaacgggaggcgcggcggtttgagtggcgcggctcgggcacgcgcgctggcggcggagccgagcggctgcgcggctgcaggcggc

SEQ ID NO: 83372 - DNA, 1754 bp, Oryza sativa
  Clone ID: PAT_MRT4530_8270C.1
atggggcgcggcgatgtgggggcggcgcgaggttggatgcggaggaaggggacgcaacaaccggggattggggggcgccgttattttctcgctaactgcgggtcgcgatccggaggaggagcgcgatgggatcgcgcattcctcacctacggattaagtagtagagagtattttttgagaaatttgtcaatggatatgcatagcaaaaaaaatcgaaaaaagcacatcacaatgagaggctttcttatgcatcaactcttggattcgtcatcatcagatgatgatgatgaactcattctggcagcagcactcatagcacaacatcaatatgacattgacaatgcaccacggcgccgtggtggttctgtacgcagttccaagatgaaaataacttggggtaagaatgctaagacgaataggcagccctcagtggcaccatctaagccaggcctaccttttggggtggacagtgacaatgatgagacagaaaaggaggaaacaagagtggttaccacggactgtcctggaacaaagccatctgataatgctgagtccctcaagcaccaggggaacaggctagctgaggaagggaagtaccatgaagcacttggtaagtgggaggctgcacttaccttgatgcccaataatgcaatacttcatgaacagaaagctcagattctacttgagctgggagatgcatggcgtgcactgacagcagcaaccagggcaacagaattggatccattatggcctgagggttgggttacacttggcagagcacagttaaattttggggagccagattcagctatattatcttttgacaaggcgttagcaatcgagcctgacaacaatgaagcaaagtctgatcgtgaaactgcagcacgtcttgttaagaaacgagggcagctacattcatcaggtctgagtgccaacaaaagacgattcacagttggagaggatagcgaaaaggagaaagacgattcacagatggaggatgtagagaagtgtaaagaggatgaagaaaaggagagagatgattcacaactggagaatgtcgattccattcgaacattcctcctccaagactccacaagtccagagggagaaagtgtgagaagaatgtggcggaaggggaacaagcggttcggcggcggcggcgagccggcggccaagcgccgtgccgccggggacgacgggccctccgagagcgccgacgacgatatcgtcgtcgcccagatatcgaagaacaggagggtggcggtgcggacctggaacggcaaggtcgtcgtcgacatccgcgagttctacgagaaggacggcaagaccctccccggccgcaaaggtatacagctcccgatggatcagtggaagatactgagggacaatatcaaagctatagatgaggccatcaaggagaatgcgtgatcggagcccattctcttgtgatgcaagtagactaagcctacgtctgtcttttatgactccgaggaatattgcacttttggtatggtaatcttcattaccctgtctagtaatatcaagtaatgttttagtttggtcatgcgcggaaaatgtggccttgtctggtattgtgccaaagaagcagctatgtgcctaatgtgctctcctcattttgtacgttgggtaaggaggtccatctgttaatggttggttggtttctgcgtgtacttatgttttactttaaatctctaatgccgctttgtatttgcttgtgaaaaaaaaaaaaaaaa

SEQ ID NO: 83373 - DNA, 1270 bp, Oryza sativa
  Clone ID: PAT_MRT4530_82710C.1
atgcgcacgggggaaaaacggagggagcggctggccgggtcggctgatccggtcgcggccgaggtggcgccgacgtggcagccacgcgggccggcgggaggtagatgacgacgccggccggaacggacggcggacgacagcggcgagcggcggagcgaaccacggtgatacgggcaacagcgagcacaccgggcagttgcacgtgacaaggggaggcgagccaacggcttggattcgccggaggttgctcgacggcggcggattgcggcggcggcaaccggcggcgggagaagagggaaacggcgacgaggtcacgagaggtcgattcccggcggtgagagcatctacgcggcttcgggaactcgacgctagcgtcggattgggcggaactacgccgagcgagaccggcgacgagcgggtgctacggagctcgggcggcgacggcggcgagcacacggcaagtgacggcaacgaggaagaagagggcgcggccgaagtccccttccgcgtcctcgaacgcaccggctcttccggcgctcggcgaaggacggcggaggcgagacagagcacggggcggcggcaatggcgaggagacgaatgggagaggaaaggaagggagggggaagacgggtttaaatgggcggcaatgtcggtttgggagagaggaaccgacatgggcggtcaagccggcgagctggcactccggctagcgtccaaagcggcgacaggaggtgacgccggcgagaggggaaaaatggagaaaaggggaaaaggagggagagaaagggggctcgcccctttgccgaatcgggaaaaggaggagggagcgggggcgacgcggcagggggaaaggagggctcggcctccgtcccttggcggcttgcgcgcggagtggcgggggccgggcgatgacgacggcgatgacggcgggcggtatggagcggagcggcgacacgagcgacaggcgcggcaggcgctgacgacggcggcgaccaggcggtcggccaccacggcacgcgcgcacgggaggcaacgggcggcgtccgcgctggcgcgcacacgctggctcgcggggccgagcggctgcacggctgcaggcgcgacagagcgagggaaaagggagggggcgctcggcgcggcggctcacgcgcacgcgcgcgcggcgcgcgggcggggcggagaaggagggcgagggcgcccgggagagagggggccggggagagatgggccgagcggaattcggcccatcgaacccagggaggcaaactag

SEQ ID NO: 83374 - DNA, 1730 bp, Oryza sativa
  Clone ID: PAT_MRT4530_82711C.1
atgaccgtgggcacggctgttcgaacacccgtggggatcagccacgtcgggagacctccaagctttcatgacaaggcatttcgaaagccgacacaggaaacggtccttaagtgcaagggcgggaaaaccgtacacccgattttaagtttgaaggcgaccgtcgatactcgcacagagtgcacgaatatcgaggctcaagatgttcaaaggtggcttgccttgctcgagatctggagcttgatcctcgaaatcctcgcactgcggggcgcggcccaaaggaattggagcggaccggccgatcttaacgggccggccggcccaagaaggcggcccagagcggcccaagacgcgcgcgcgcggaggaaggagagagagtccggtggaccgggctcaccacgcgcggtcccgggtgggacccgcttgtcagcggctcggctcaccgtgcggagggagtacgcggctcatgcgcgcgggcgggggagggacgcggtgcacgcgcgcggtccgcggtggacgcaggtgcggcgggcccacgcgcagcctcacggctcgcggtggaacgcgcgcacgggggggactgaccggggtcggctcgacccggtctgggctgagctggcgccgacgtggcgcctacgtggctgccacgcgggccggcgggaggtagacgacgacccggccgcgaatggacggcgggcggcggcggcgagcggcggagcgaaccacggcgatacaggcaaaagcgagcacaccgggcggtcgttcgtgatgaggggagacgagccaacggcccggattcgccggagggagcttgacggcggcgaatcgcggcggcgacaaccggcggggagggaagagggaaacggcggcgaggccacgaggggtcgattcccggcggtgagagcatctacgcggcttcgggaactcgacgctagcgtcggattgggcggagctacgccgagcgaggctggcgacgagcggcgcttccgagctcgggcggcgacggcggtgagcacacggcgagcgacggcaacggccggggcggcgccggctaactacggggaggctactcaagctactaccgaaagctaggggggagatggagcgaggaggaagaacggagagaggcactaccgtgcggaggaggggcgctgtgacgagaggccgacggcgcgggagtgatctctccggcctcgggccggggaaggggaagagaaagaagagggtgcggccgaagtccccttccgcgtcctcgaacgcaccggctctcctggcgctcggcgagggacggcggaggcgagacagagcacgggggcggcggtaatgggcggtcaagggcgcgagctggcgatcggcggtcgcggccaaagcggcgacagggaggatgacgccggcgaggaggaaaaaggggaaaaggaggggggaaaagggggcttgcccctttgccgatttgggaaaaaggaggaggggagcggggcgacgcggcagagggaaaggagagctcggcctccgcctcttggcggcttgcgcgcggagtggcgagggccgggcagtgacgacggcgatgacggcgggcggattggagcggagcgacgacacgggcgacagacacggcagacgctgacgacggcggcgaccaggcggtcggccaccacggcacgcgcgcgcgggaggcaacgggcggcgcggctgggcagcgggaccgggcgacgcggacggcgcagacgacgcgg

SEQ ID NO: 83375 - DNA, 250 bp, Oryza sativa
  Clone ID: PAT_MRT4530_82712C.1
agggctaagcacacacacacacgcatcagtactggttggttgatttctctgagttgtgttctggcatcatcatcattattagccatgagaagtgcagctctgagcttccaagatcacggccatgggcttcaggcgatcaccggccgtggcggcaatggcggcgccgccgctcacgcattgccatggtgggctggagccggagccggagctggatcccaaacactgcttggaacaggaggaggagaagaat

SEQ ID NO: 83376 - DNA, 1555 bp, Oryza sativa
  Clone ID: PAT_MRT4530_82713C.1
ttgtcgcgtggggcaagtcgcaagccccagggggtcaccttggacggcagcgatggccacgcaagaacgggaacccgaacggcaaccccacgccggccgccgcgtcgcgctgttcccgctgccgttccagggccacctgagccccatgctccagctcgccgatctcctccgcgcgcgggggctcgccgtcaccgtcctccacacgcgctccaacgcgcccgacccggcgcgccaccgccacgggccggacctcgccttcctccccatccacgaggcggcgctccccgaggaggccacctcccctggcgccgacatcgtcgcgcagctcctcgcgctcaacgccgcctgcgaggccccgttccgggacgccctggcgtcgctgctccccggcgtggcgtgcgccgtggtggacgggcagtgccacttcgttctcgctgaatctttgtggattatccctgcaggcgagcggctggatgaggcggtgccggagctggagccgctccgggtgcgagacctgatccgcgtcgacggctgcgagacggaggcgctgtgcggcttcatcgcccgcgtcgccgacgcgatgcgggattcggcgtctggggtcgtcgtcaacacgttcgacgccatcgaggcgtcggaactgggcaagatcgaggccgagctgtccaagccaaccttcgccgtcgggccgctgcacaagctcaccacggcgaggacggcggcggagcagtaccgccatttcgtgcgcctgtacggtccggaccgcgcctgcctcgcgtggctggacgcgcacccgccgcgctccgtgctgtacgtgagcctggggagcgtcgcctgcatcgaccacgacatgttcgacgaaatggcgtggggtctcgccgccagcggcgtgccgttcctctgggtcaaccggcccggctccgtccgcggctgtatgccagcgctaccctacggggtcgacgtgagcaggggcaagatcgtgccatgggcgccgcagagggacgtcctggcgcacccggccatcggcgggttctggacgcactgcgggtggaactcgacgctggagagcgtctgtgagggggtgcccatgctcgcgcggccgtgcttcgccgaccagacggtgaacgcgaggtacgtgacgcaccagtggggcgtcgggctggagctcggcgaggtgttcgaccgggaccgcgtcgccgtggcggtgaggaagctgatggttggggaagaaggcgccgcgatgagggagacagcgcgtcgcctgaaaatccaggcgaatcaatgcgtcgctgcgactctcgccattgacaatctagttaagtacatttgttcgctgtgaactgctcgttgtagcatatcaagtcttcagataattagtactcctgtctcttcatgttatctcaatatctgctgtaaatttgtagccgaattgtaactggcaaacttctgttgatgaactcttggaaatctttgatgtataagatttcagtgggatcactcaactgaagtgttctgtccaaactttattcaagttatgttcttttctgatggtttt

SEQ ID NO: 83377 - DNA, 1062 bp, Oryza sativa
  Clone ID: PAT_MRT4530_82714C.1
ttaaagagcatttccacgtggtagaacctcctcagggaatataagattttcatgaggctgatcctgagctgccatccacgcacgaataccctcgtttaaaagaatatttttggtgtagaaagtctcaaattcaggatcttccgctgcacggatttcctgggaaacgaagtcataggcacgtaggttcagagccaggccgactacgccaatagcactcatccataaaccggtgaccggtacaaatagcataaagaaatgtaaccaacatttattggaaaaagcaacaccaaagatttgggaccaaaagcgattagcggtgaccattgaataagtttcttcagcttgagttgggttaaaagcgcggaaggtatttgcaccatcaccgtcctcaaatagagtgttttccacggttgccccatgaatagcgcatagcagagccgcgcctaatactccggcaactcccatcatatgaaatgggttcaacgtccaattatgaaatccttggaagaagaggatgaatcgaaatatcgctgctacgccaaaactcggcgcaaagaaccaaccggattgccccagtggataaatcaggaatacggaaacaaaaacagcgattgggccagagaatgaaattgcattataaggccgcaattgaacagaccgagcaagttcaaattgacgtaacatgaaacctcctagtgcgaaagccccacggggagcaacaataggccacaccccacctaattgacaccaacgagtaaaatccccttgtgcttccgggccccatagtagcaacaaagagtgtgctaaactattggcaggggtggaaactgctgcggttaagaaattgcaaccttccaaataggaactcgccaatccatgggtataccaagaagttacaaaagttgtccctgtaaaccaacctcctaaagcgaaataagcacaaggaaaaagcaataggccagaccatcctacaaaaacaaaacggtcccttcgtaaccagtcgtccataatatcaaataaatcattttcttctttagtaactctaccaagggctatagtcat

SEQ ID NO: 83378 - DNA, 626 bp, Oryza sativa
  Clone ID: PAT_MRT4530_82715C.1
aggggaagaaagggggcttgcccctttgccggttcgggaaaaggaggaggcggggcgacgcggcagagggaaagggagagctcggcctccgtcccttggcgggttgcgcgcggagtggcgggggccgggcgatgacgacggcgatgacggcggggcggtttggagcggagcggcgacactggcgacaggcgcgggcaggcgctgacgacggcggcgaccgagcggtcggccactcggcacgcgcgcgcgggaaaacaacgggaggcgcggtggtttgaacggcgcggctcgggcgacaggcgcgggctggcgggaccgggcgcgcgcgagcaacggcacgcggggagcggcagcgagggatggggagacggagagcgagggggcgctcggcgcggcggtacacgcgcacacgcgcgcgcggcgcgcgggcggggcggagcggagcggagggagagaggcgctcggggcggctctcgcacgcgcgagcagcgtgcgagcgaggctgacgggggggggaggagcgccccggggggggagagagagagagagcccgggagagagatgggccgagcggaattcggcccatcgaaccccggggaggcaaactaaacttttgcggagggatt

SEQ ID NO: 83379 - DNA, 1381 bp, Oryza sativa
  Clone ID: PAT_MRT4530_82716C.1
ttaaagagcgtttccacgtggtagaacctcctcagggaatataagattttcatgaggctgatcctgagctgccatccacgcacgaataccctcgtttaaaagaatatttttggtgaagaaagtctcaaattcaggatcttccgctgcacggatttcctgggaaacgaagtcataggcacgtaggttcagagccaggccgactacgccaatagcactcatccataaaccggtgaccggtacaaatagcataaagaaatgtaaccaacgtttattggaaaaagcaacaccaaagatttgggaccaaaagcgattagcggtgaccattgaataagtttcttcagcttgagttgggttaaaagcgcggaaggtatttgcaccatcaccgtcctcaaatagagtgttttccacggttgccccatgaatagcgcatagcagagccgcacctaatactccggcaactcccatcatatgaaatgggttcaacgtccaattatgaaatccttggaagaagaggatgaatcgaaatatcgctgctacgccaaaactcggcgcaaagaaccaaccggattgccccagtggataaatcaggaatacggaaacaaaaacaacgattgggccagagaatgaaattgcattataaggccgcaattgaacagaccgagcaagttcaaattgacgtaacatgaaacctcctaaagcgaaataagcacaaggaaaaagcaataggccagaccatcctacaaaaacaaaacggtcccttcgtaaccagtcgtccataatatcaaacaaatcattttcttctttagtaactctaccaagggctatagtcatagtgatcctcctattcaattacttcaaccatttccgagcaccttatatcacttccaaggcatacgatagattatctgtggacgattttttctcgttcaatgccttttttcaatggtctcgaagatagaaattttgcatttttatctatggggtcacagccgaggtcgtggtaaatccatgaatttgattcaattagtttttcttatactatagaaataaacattggaattcaggattattccatgattcctatttccaagaaagcctattttttaagggaaaaatgaaaaaaagtaacctcccttttcccactcgctctctattgcatgggtataagaacaaaaataggattctgaaaaaaagtaaagatattgaaaagaaaaattgactttcgaaatccatttttatgtgtagcggaaaggggttgcgatttcttcttattcctatagaacatctagtaacaagaatataaaatagtaaatagcgagaaattcttgccttgcgtggtctaagtctaaggaaatacaaaaaaatccacttatacaatttc

SEQ ID NO: 83380 - DNA, 1131 bp, Oryza sativa
  Clone ID: PAT_MRT4530_82717C.1
atgggccggccggcccaaggcggcccaaggcacgcgcgcgcgggaggggaggagagagagagagccggtggaccgggctcacctcgcgtggtcccgagtgggacccgcttgtcagcggctcggctctccgtgcggagggagcacgcggcgcggcgctaggatgggggagggacgcggtgcacgcgcgcggttcgcggtggatgcggatgcggtgggcccacgtgcagcctcacggctcgcggtggaacgcacgcacggggaggggctgaccggggtcggctcgacccggccttggccgagctggcgccgagcgtggcgcctacgtggctgccacgcgggccggcggaaggtagacgacgacgccggccggaacggacggcagacgacagcggcgagcgacggagcgaaccacggcgatacaggcgaaagcgagcacaccgggtggctgcacaggacaaggggagacgagccaacggctcggattcgccggagggagtgcgtcggcggcggatttcggcggcggcaaccggcggcgagggaagggggaaatggcgatgaggtcacaaggggccgattcccggcggcgagagcatctacgcggctatgggaatccgatgctagcgtcggattgggcggagctgtgccgagcgaggccggcgacgagcggcgcttccgagctcgggcggcgacggcggcgagcacacggcgagcggcggctagctacgggagggcgcgtccggagtcccattccgcgtccacgaacgcaccggttcctccgacacgcgcaacgacgaacgacgacggcgaacagagcacgggaggcggcggcaatggcgtggaggcgaatgggagaggaagggaaagggggaagcttgggtttataggggcgacaatgtcggtttgggaaccgacctaaggcggtcaaaggagagggctagcgctcggcggtcgcggccaaagcggcgacagggaggagggaggaggatgacgccggcgggaggaaaaaggggaaaagagggagagaacaggggggcttgccccttgcctctttgggaaaaggaagaggggagcgggggcgacgcgacagagggaggagggggctctgcctccgccccttggaggctagcgcgc

SEQ ID NO: 83381 - DNA, 578 bp, Oryza sativa
  Clone ID: PAT_MRT4530_82718C.1
atgcttgctgcctgtcagagatctagtgtccgtagcgatggctgtactgccaagtgtacatatgactcaggagctggagcagtagcggagccagaaagatttttaagcccggagaaaactcaacagctaaaatttctatggtcaacctttcaacaactacaggtggcagcagtttatttaatgctatagacatcatcctagttattgggttgggaatggcctcagaggcatgcaaagttaatctgcaaaacgaagacaaaacaaagttaataccgtaccatactggaagacaaaaacgaagctgcagaatgaatatgctgcaaagctccagttttttttggtcatcatggatttattattgctggaccactgcaactctgaagttcagacactgtgacaacgacaacaacgaggacgatgatgcatggccttgtttagttcccaaaataaaaacttttaacccatcatatcgaatgtttagacatatgtatggagtattaaatatggaaaaaaaaccaactacacagtttgcgtataaattgcgagacgaatcttttaagcctaattgtaccatgatt

SEQ ID NO: 83382 - DNA, 489 bp, Oryza sativa
  Clone ID: PAT_MRT4530_82719C.1
atggagcgaggaggaagaacggagggaggcatcaccgagatgaggaggggcgctgtgacgagaggccgacggcgcgggagtaatctctccggccttgggccggggaagaggaaggagagggcgcggccgaagtccccttccgcgtccttgctcgtgccgactccttcgacacgcgcaacaacgaacggcgacggcgaacagagcacggaggcggcagctatggcgaggaggcgaaaacgagggagattggaggggaaggagctggggtttaaagggggcggcaatgtcggtttgggaaccgacttagggcggtcaaggcacgagctggcgctcggcggtcgcggccaaagcggcgacagggaggatgacgccggcgggggaaaaggggaaagaggaggaggggagcgggggcgacgcggcagagggaggaggggcgctgcctccgtcccttggcggcttgcgcgcagagtggcgggggccgggcggtga

SEQ ID NO: 83383 - DNA, 1849 bp, Oryza sativa
  Clone ID: PAT_MRT4530_8271C.1
atggagaaggccgctggattcctctcctttttcttcttctgcggcttgcaggccgcggagcaggccggcgccaaggccgcggcgccgcggagagccccgctcgactcctgccgcgccgcctcggtggcgccggctgtaccccagctgaccctgcagcggccggcccgggcgcgggcgctcctgaacttccaccggatggcgtgcagggcgaccgtggcgccccaggaccccctcacggagaccgggctcccggcggatggaccccgggcgggggtggactccaggggggatgcctacacgggcgggctcgaacccgaactcgcgcccgtggaggtgctgatgctgccggagaagttcgccgaagagaggcggccgtccgcgggttgctacttggtcctaagagtaacggggatggagcggctgagtgtttttccagttacttcgggagccaaagtcgactagtgcgtttcaaaggagtgtccggattctgaccaacaaatactggctatgcccgaggctagaaaatcctgtttatagatgactccccgtctttcattgcgttccaatgtacagttgttaaacaaaacgacgttccgtaactacgttcaccgataaaccactttggttccaacatttcggtgtctgttctcaacccctactcagattaactatgtgaactgaatgaaatactgaaagtacctgtaccggttgtcaacttatggaaccgctgcaaggtgccaacgattaaccaagtaaatgggatacttgtcaatgaacctaaagatactcaagtgacaattcgtaatcatgaagatgggattcctggtgaggaaccaacggaagctctacaagcactccggacttatgacgtgttgcagccgagccacaaaaataaacgccgggtctattttgggcaaaatttagtctgcgaaggaatctctgtcggcaaaagatgaaggaaggatcatcaaggtcggcgatccagtttatgttcttgagtcattcccttcttcagatgaagttccagcatgagcaaggagggcacagtggcaaccgttcggaggttagtaataggtcgatttatgcgcacctggatgtaaatcttacgctgcagataaggcttgagaaagtgtgctatgttccagaataaacattaccatctggcactgaaaaatgttgcccatacagtcgatggtttttcagtgatcactgtagcgcaattacatccactatacaaccctcttgccgcgaaaagagttatagttaataaaaaaaaaaaaaaaaagtggtctggttctgcgcagaccaatcctgactatgctcaagcatcagaaattagagagaccaatcctgactatgctcaaggttacaaagttctgtttgctgacgacttcccattcctgctggcctcccaggtgcctactattaatcaagataatgggattcctggtgaggaaccaacggaagctctacaagcactccggtctgatgaagtgttgcggccgagccacaaaaataaacgccgggtctattttgggcaaaatttagtctgcaaggaatctctgtcggcaaaagatgaaggaaggatcatcaaggtcggcgatccagtttatgttcttgagtcattcccttcttcagatgaagttccagcatgaccaaaggacattctggcacctgttcaaagacctagtagtactgtaaaatgctgaatttttcggcatcattgtaaattttatgctgcaccaaggcttgaaaaaatgtgttttattatgtggcagaataaacagtcccatctggccctgaaaactgttgctcatccaattgatattcagggatcaaagtttttcct

SEQ ID NO: 83384 - DNA, 713 bp, Oryza sativa
  Clone ID: PAT_MRT4530_82720C.1
ccggccgtgtcgtcttctccaacccatccaaaccaaagccgcggcggcgcgaggaggcagcgagagctagggtttggggcggcggaggggagatgtcgcggacgctggtgcagccggtggggcagaagcggctgacgaacgtggcggtggtgcggctccgtaagcacgggcagcggttcgagatcgcgtgcttcccgaacaaggtgctgtcatggcggacgcgggtggagaaggacatcgacgaggtgctccaatcccacaccgtctactccaacgtctccaagggcgtcctcgccaagtccaaggacctcctcaaggccttctccaccgacgaccacaccgccatctgcctcgagatcctcgacaagggcgagctccaggtctccggcaaggagcgcgaggcccagctctcctcccagttccacgagatcgccaccatcgtcatggacaagaccatcaacccggagacacgccgcccctacaccatcaccatgatcgagcgcctcatgcacgacgtccacttcgccgtcgaccccaacctcacttccaaggagcaggcactgaaagttattaagaagctaacagagcatttccccataaagcgtgcaccattgagggtgcgcttcactgcaccaaagtcaaaatttgcaagccttacagagaagcttgaagagtggaatgctaatgttattttcaaggacgagtctggtagc

SEQ ID NO: 83385 - DNA, 150 bp, Oryza sativa
  Clone ID: PAT_MRT4530_82721C.1
cagatctctcctcgctgatgtgccgcccaccccctctaccgaggcgggggtgccttttccgatcgcggggggaatgctccgcctcagggcgttccggccgaccagcgacaaggtggtgaagatccaacttcaccccacgcacccctggtt

SEQ ID NO: 83386 - DNA, 721 bp, Oryza sativa
  Clone ID: PAT_MRT4530_82722C.1
atgacattactaacccggatcatccagcccgtggggatcagccacgtcgggagacctccaagctttcatgacaaggcatttcgaaagccgacacaggtttaccatatgccgacgagaggggtctcagaccaacaacagagtgcacgattatcgaggcgcaactgggtggttacaaggggacatagtatagcaattaacaatggaaggatcaaatgcaacaagtctggctcaagatgttcaaaggttgcttgccttgctcgagatctggagcttgatcctcgaaatcctcgcactgcgggtcttcgggctcacgcgcggtcccgggtgggacccgcttggcagcggctcggctcaccgtgcggagggaatttgcggcgtacgcgcgcgggcggagcatgcgcacggggaaaaaacggagggagcggctggccgggtcggctgatccggtcgcggccgaggtggcgccgacgtggcgcctacgtggcagccacgcgggccggcgggaggtagacgacgacgccggccggaacggacggcggacgacagcggcgagcggcggagcgaaccacggtgatacgggcaacagcgagcacaccgggcggttgcacgtgacaaggggaggcgagccaacggcttggattcgccggaggttgctcgacggcgccggattgcggcggcggcaaccgatggcgggagaagagggaaatggtgatgaggtcat

SEQ ID NO: 83387 - DNA, 1601 bp, Oryza sativa
  Clone ID: PAT_MRT4530_82723C.1
tgatttctccaacccatccaaaccaaagccgcggcggcgcgaggaggcagcgagagctagggtttggggcggcggaggggagatgtcgcggacgctggtgcagccggtggggcagaagcggctgacgaacgtggcggtggtgcggctccgtaagcacgggcagcggttcgagatcgcgtgcttcccgaacaaggtgctgtcatggcggacgcgggtggagaaggacatcgacgaggtgctccaatcccacaccgtctactccaacgtctccaagggcgtcctcgccaagtccaaggacctcctcaaggccttctccaccgacgaccacaccgccatctgcctcgagatcctcgacaagggcgagctccaggtctccggcaaggagcgcgaggcccagctctcctcccagttccacgagatcgccaccatcgtcatggacaagaccatcaacccggagacacgccgcccctacaccatcaccatgatcgagcgcctcatgcacgacgtccacttcgccgtcgaccccaacctcacttccaaggagcagcgtaataactttgtgtgtgtggtttggtacctgcggtcgcatttatttaacttggatcttcaattcttcttcaatcacgttgtgtatcgcttgcaacaattctgttctaccttctttctacagttgatcaaccttgcagtgacagcactgaaagttattaagaagctaacagagcatttccccataaagcgtgcaccattgagggtgcgcttcactgcaccaaagtcaaaatttgcaagccttacagagaagcttgaagagtggaatgctaatgttatttcaaaggacgagtctggtagccagccctctgttgtgtgtgagattgagccatctattctacggtcatgtgaggagagattgaaggatgtgcaggggagggtggaagtactctcagtgtcagcgcacgcagaaggtggctcttctgtggatcaatatgaaaacactgaagaatctcaatcagtgcctgcagtggagattgatcctgttgctcggataggtgaggccatgcagaaacagtccatctcaagtgagccagaaaatcctgggcagggacaaggcaagcagcagagaagatgcaaagaatgtgacgtgcttgtggaggacaagttgtatagggagcattgcaaatctgggtggcacaagcacaactacacacgccacaagaacggccttcctccactcagccaggaggagtgcttggtggaaatggaattagccgactccaagagggacctaaaagactatgatttctgaggctgatatggtaaacattccgtgtggtacatggagatgcagtgtttttgtctgaggagaaaggttgtctgtttgatgctgtatagggaagcagggaagggaatatttgtgtaaccgcaatgtacgctacttgcaatctactgaaatggagtggtctatccacattgtctaaccgccaaagagtagcagaaacctggttgttgctgtatagctgggccagtaaatctggtggcagttttgaatgttgcttattctgtaatggatgctatgctatgctatgtgagactacatgttagtaaaa

SEQ ID NO: 83388 - DNA, 492 bp, Oryza sativa
  Clone ID: PAT_MRT4530_82724C.1
tgtctaaggagaggtgaaggcagcaaggtcaagactacctgcagagctgtaaagccacacagcagtgtgcctttgagcaaaatgaccactggaccactggacaacagaccagcatcactgagaccctctctaccagatgtgtctgtggactttaaaccagcattgagctctggacaccaggctcttaaccgggttggctcaacacagcccctacttcctctgcaaggggacatacaacagggacacacaccttctgggattatagctcttgggtctgcccagcccgctgcatgtggaggaagggggaagatgctgccaaaattgcaggcagggctgtgggcccatgttcagatgttgcattcttcacaaaaggctcaccagatcctctgatggggcagagacctccaaaagtgagaaaaaactggtatccatagcttctgagggaactttcagaagaagccttggtcctatgtgttgccagaggctctggtt

SEQ ID NO: 83389 - DNA, 383 bp, Oryza sativa
  Clone ID: PAT_MRT4530_82725C.1
cgacaaattaccacgctagaatattaaaccgggtcatttcaaagatcatatgcagctagcaaagtgtcatagaagtccccagatctgtagagactgaaggacttagtcgtacaaaatgtttcatcgcctagtcaaacaaaatcttctgctgaaggcgatctcagatgacagctggagttgtagtctgaccacagattacaatctgtagggtagtacaaaataattccttctagaacaaaagcagaagacagggcatgccatcacctgggagaaacaaaattccagcatggcatgtagctacatagagatgcatgagcccgtgtcgcagccttcggcataggacatgagcatggcagaagctcatgatgtgcttttggatctga

SEQ ID NO: 83390 - DNA, 345 bp, Oryza sativa
  Clone ID: PAT_MRT4530_82726C.1
caagattaagtacacaccattgaaattcttagcatgtcacttcacataaccataagaaacatgaaaaccggagtacatacacaatcatagcaagaaacatgaaaatactggagtacatgtaactttgcacgggtccgaaaaggcagcagaaacacatgcagcagagatgactgggctgcacctcctgcacagctgcactgccagaacggacacactatccatcactgcgccgggacagaagaacagcacgcaatctctcaagataatttcccagagagacgcaccccccacacccaacccaaccttgcagaagattcccaattccaccagagaagttgcagctcc

SEQ ID NO: 83391 - DNA, 622 bp, Oryza sativa
  unsure (1)..(622): unsure at all n locations
  Clone ID: PAT_MRT4530_82727C.1
tttttttttttttttcgtctataattatccattcacataaatagacaagtatttgtacagcgtagaattgcatagtacagagataagcacacgtcggcagtttaaacaagattaattaaggagaaaaaaaagctgaatcagtgtgctacacaatcacccaaagcacacgctctacacgcagcaaaagaacatgtaaagcacgagaaattaaaattaaaaacaccgagcggatctcccagcgaaatcgttcgttttgatctcatcagctgatgccgtcgaagttgctgctcatgagcgacaatgtcgcgctcggtagcacccggttcacctgaggttgcttcttaaccgcctccagctccgacggagtgagcctcgccgagaacccgctcacgacgttcttgtagttgtatatgattgcccccttcgccttctcctcgctgccgagcgcggcggcgaggatggagagctggtaggcggtgcagacgacgccggagggcggggggtcgacgaagacgaggtaattagctgcgccttctccgacggcgacagccgcggccatggcgacggcggcggcgaggaggagggagacggtggcggtccaaggtttcatggcgagattggn

SEQ ID NO: 83392 - DNA, 418 bp, Oryza sativa
  Clone ID: PAT_MRT4530_82728C.1
cgggtgaataagttttgatacaaaagatagtttgatcaacaggtgttttgatgtatacggtttgacctgattgatttggatctgtgttccaaaaggtcacaagacaacgaggaataacataaactcattcatacgtcccattttcaagttcctttgtgaaatggaacaaattcggtgtgatatgttttgattgactccacagtagcaccagcattagcttgttgttcgggataataagcgatcggatcagatagatgcgggtctggaatctttatcgccccttttagcatggcgtggaggcagtatgctgtatatgttacatgatacccgtcttgttgctccatatgtaacctttcatgggtgggctcctgtggaacttccctgattgtgtgcccaatccttgtgtgtccatttattg

SEQ ID NO: 83393 - DNA, 240 bp, Oryza sativa
  Clone ID: PAT_MRT4530_82729C.1
atggcggcggtggcgcggcgaaggggcgccggcgagtcgctggaaggcggcggggactcaggcaggcggcggcggcgaatcgacgcggcccaagcacggcccaatggcccgacgggcctattcgtgccaggccggcacaagcacgacccaaaagacgggagcaggccggctgcgctaagaagaaactctggcggcgacgcggcagcggtggcttgcggcttcgtcgtcccgtcgcggtga

SEQ ID NO: 83394 - DNA, 346 bp, Oryza sativa
  Clone ID: PAT_MRT4530_8272C.1
gtgttggctgttcaacctgcaatcgactgtggtgcacgcggaagagaaggatgtcaactatctgggctggaccgaattgcatggccacttagaataggtgactgcacttgagtatagcataaacaggggacttacgctcttactctcttgggtgtcgcaggtgtctcaataaatctgatgtactgtggcactgccagagtgagatgctcgccaactagctcgctcacatgatggctaacagtgctcagagcttgtcaaacaagctaatagacggcgatctctacatttatgcagagtgctgtttaatatacgaggaggactctggtcaagtgacagatctccacat

SEQ ID NO: 83395 - DNA, 518 bp, Oryza sativa
  Clone ID: PAT_MRT4530_82730C.1
gcgcagcaacaggtgtaacagaacgttagtaaactgtctggatcagttattgggtgagatttgggggaaatacagaggcaagaacagtatgaagtaggataataataaggactagataaaggactgagtacctgacgcagtgcctgttgctgaggttggttcttaaggctggtcagctggtatctataaaaaatcacatggaaaaaaacaaaggagtgaaacaaagtgatacaacgcgactgatgcactgagctgaggagctaaacaaggatcataacaaggaagatgctaaggaagccattatactggcaatgctagagaaattgctggatgaggtgttaaactacgcagtaatacaacaggaagatgaatagggagatggagctattgatggagatatagtcaaaatgaccacagatgtgcatatacatgtatatttacaggtttattgacaggcaaatggtggacaagttcgtggagagtcaactgcaaagccaacatgaagtgagagcatacga

SEQ ID NO: 83396 - DNA, 121 bp, Oryza sativa
  Clone ID: PAT_MRT4530_82731C.1
ggcgattcatggctctgaaggctaagaggagatgaaatttccttatgtgctctctttgctactgcttcatgcaatcgcttatgtacgcgttctatctctcttaccgccaagcgtatacgac

SEQ ID NO: 83397 - DNA, 860 bp, Oryza sativa
  unsure (1)..(860): unsure at all n locations
  Clone ID: PAT_MRT4530_82732C.1
cgcggctgcggctcggcacgagggcgcgccccgcttgatcggagaggagggggtttatattgatttttgcgatcactgcatacatcgtcgtcttctttgcggatttgagaccgaggatcgatggcggccggagggatgctgtgcgtgtcgtcgtcgccgacggcgtcggcgtcggtggcgagggggcggcggcagcggcggaggagcgtcgaggtgaggtgcagctccgtggcggccgccgggccggggggccccgtggaggatcactaccggactctgcagctgccgccgggggccaccaagggcgaggtcaagagggccttccgccgcctcgcgctcacgtatcatccagacgtttcaaaggagagcgatagcggcgtccatttccagcggatcaacgtggcctaccagatggtgatgggcaacatgagggaggccgaggagaggctggagtactggaggctcaagtacggcctcgacgacgaggacctggacaagtacaggaaccacctcaacgacgaagacgacgatgaatggttcgacgtctaatctgaggatcgtgaatcgctgcctggactgacgggatcaacgagcacagatgcaaaccatctcgttgatctccatcattgatactagaaatttaatcttgtttatagcactgaaaaatctgttcatttgtatgtatgcctgtatgtagaacagtagtagtagcagctagaactgaaaaaatctgtttatttgtatgtatgcctttcccccggttttattgtaggggaaggggtacgattagactgatatatatataactcaattggtactaattttgtgnttntaaaaaaaaaaaaaaaaaaaaaaaaaaa

SEQ ID NO: 83398 - DNA, 1657 bp, Oryza sativa
  Clone ID: PAT_MRT4530_82733C.1
agagagagattccatcatgcccaagcaatccggtattcaggtcttccactgctactttctggagagacgctgtttgacttatcatgcaatttttgaggtataccttcaacattctaccacagattcataaaggtggccaaacatcacgtgtcttactagctataatgacacatgccagatcaaaattacagggatttgataagagggtaaaaccattgcattccaaatttatgagaaaactgaatgggtgcacctagaccatataaaagcacaagctacatgaatgttccttccatgcataccgcacatgacacttcattattcaaagtacagaattcagacctggacggtcaatgcgctcataggtgtgtgccccaaacaagtctctctgtgcttggatcagatttgcaggcagccgactacacctgtaggtgtcaaagtatgaaaggctagcagacatccctggagtgctaatcccagcctccacagcacgagccacaacccaccgccatgcattctgccgctgaaccatctcccttgcaaactccctgtccacgatcagattggccagctcagggttcctgtcatacgccttcttgatcctatcaagaaacttcgcccggataatgcacccgcccttccaaatccttgcaagctctgcgaggttaagattccaccccttctccacactctttgctcgcagaaggttcatcccctgcgcgtagctgcaaatctttgacgcatacagagcttgcctcaccctgtcaactagcatcttcttatcaacattaatcgtctcgagtagccctgatggcatcccctccgcctctagaacccctgcggccgccacacgctcgtccttcaacccagacaagtacctcccatccagtgatgctgcaatcgtgggcgcagcaatcgcaagctctgctgcctgctgcaccgtccacttcccggttcccttcatccccgtcttgtcaagaatcttgtccaccagcccaccgccgccgctgccatcaagcgggtcggccaccgtgaatatatcggcagtaatctcaaccaagaaactctccaattccccccggttccactccgcgaagacgtcagcgatctccgagttggacaggccgccgacgcggcggagcacgtcgtaggcctcggcgatgagctgcatgtcgccgtactcgatcccgttgtgcaccatcttaacgaagttgcccgcgccgccggggccgacgaaggtgacgcacgccccatcctccgtctgcgcggcggccttctcgaggatgtccctgatgttgttgtaggcgtcgatgtggccccccggcatcagcgagggcccgttccgcgcgccctcctcgccgccggagacccccatcccgaggtagagtatccccctcgcggcggcctcctcgatccgccgctccgtgttctggtaccactcgttcccgccgtcgacgatggcgtccccggcgtcgaggtaggggacgagcgcgtcgatggtggcgtcgacggcgcgcccggcctggacgagcagcacgacggtgcggggcctggagagggagaggacgaagccccgcgggtcgcggtggccgagcaccgggagcgcgccctcggcctcggcgcgggacacggtggcgtcgaccttggcggcggtgcg

SEQ ID NO: 83399 - DNA, 1688 bp, Oryza sativa
  Clone ID: PAT_MRT4530_82734C.1
ggagagcgagaggccccctctctctcctttttttttttttttttttttttttgataagagggtaaaaccattgcattccaaatttatgagaaaactgaatgggtgcacctagaccatataaaagcacaagctacatgaatgttccttccatgcataccgcacatgacacttcattattcaaagtacagaattcagacctagaatcataaagacaacagtagtgaattcaaagagaacccacaaagagacaccacacagagttactgataccattcaagtcctcaaatggccgcaccattactctttctcgccagcttagtccactctgtgtggaacgaacctggacggtcaatgcgctcataggtgtgtgccccaaacaagtctctctgtgcttggatcagatttgcaggcagccgactacacctgtaggtgtcaaagtatgaaaggctagcagacatccctggagtgctaatcccagcctccacagcacgagccacaacccaccgccatgcattctgccgctgaaccatctcccttgcaaactccctgtccacgatcagattggccagctcagggttcctgtcatacgccttcttgatcctatcaagaaacttcgcccggataatgcacccgcccttccaaatccttgcaagctctgcgaggttaagattccaccccttctccacactctttgctcgcagaaggttcatcccctgcgcgtagctgcaaatctttgacgcatacagagcttgcctcaccctgtcaactagcatcttcttatcaacattaatcgtctcgagtagccctgatggcatcccctccgcctctagaacccctgcggccgccacacgctcgtccttcaacccagacaagtacctcccatccagtgatgctgcaatcgtgggcgcagcaatcgcaagctctgctgcctgctgcaccgtccacttcccggttcccttcatccccgtcttgtcaagaatcttgtccaccagcccaccgccgccgctgccatcaagcgggtcggccaccgtgaatatatcggcagtaatctcaaccaagaaactctccaattccccccggttccactccgcgaagacgtcagcgatctccgagttggacaggccgccgacgcggcggagcacgtcgtaggcctcggcgatgagctgcatgtcgccgtactcgatcccgttgtgcaccatcttaacgaagttgcccgcgccgccggggccgacgaaggtgacgcacgccccatcctccgtctgcgcggcggccttctcgaggatgtccctgatgttgttgtaggcgtcgatgtggccccccggcatcagcgagggcccgttccgcgcgccctcctcgccgccggagacccccatcccgaggtagagtatccccctcgcggcggcctcctcgatccgccgctccgtgttctggtaccactcgttcccgccgtcgacgatggcgtccccggcgtcgaggtaggggacgagcgcgtcgatggtggcgtcgacggcgcgcccggcctggacgagcagcacgacggtgcggggcctggagagggagaggacgaagccccgcgggtcgcggtggccgagcaccgggagcgcgccctcggctagcttaagtttggacttagacatagatgctacttgcctcctagatttggaaattttcatcaggaactcccccat

SEQ ID NO: 83400 - DNA, 416 bp, Oryza sativa
  Clone ID: PAT_MRT4530_82735C.1
cagttccttcccacacagcttcagaatgattcgccaccagttctcacctcccagcccattaccagtgttcagccgattgtccaccagctacagctacaccagtttgctggcgtctacttcgatcaggctcaagctcaagcccaagctatgttgcccctaaactcccgtcaatatccggtatctacccaagctacaaccctgctcccctgtagcattcctaccgtcggtggtatctgttgtgtaccagtatagtagcaggagagataaagtcagcatcatcgtgtggacaagtgaaacatcggggtgaccaaatcggaataaaagtcagcaaatttaacataacctctgtaagataaatctagcatggtgaaattaatatcatcaccgtctactaggtgcattccaaaaaaaaaaaa

SEQ ID NO: 83401 - DNA, 542 bp, Oryza sativa
  Clone ID: PAT_MRT4530_82736C.1
gcgggaggagcaagatcaacgagaagatgaaggcattgagagcctgataccgaattccaacaaggtgatccgtcgcaaaaaggcgacgtttaattttaacgttcatgaactgggattctgttgggtttgcgctggaaatttatcagtgtttgtgtgctggttttgtgggttgcagactgacaaggcatccatgcttgacgaagccatcgagtacctgaagcaactgcagctccaagtgcaggtcagcagatagatcatagatgtctggatgatgctaaaaattgctgatgcattgagtttggtctcagattggtagaaatgtggttgtaggattgcagtgagtgcatcctgtcttacagattattcttccaatctatgtcgtgattagggtgcgccgtagatgctctagtgaagaagaatccttatactttcttgttcttgcaggattttagttgcgatgtgatatgttcatgcaagatgttagaagggtccactatgtacatagacaacagtacttgatcaatgccaaactcgttctgtcc

SEQ ID NO: 83402 - DNA, 445 bp, Oryza sativa
  Clone ID: PAT_MRT4530_82737C.1
gtggatgcgactgcgacttcgccatcatcatcgagctcctccctcgcgctccaagcccataacggcggacgacacaacgccgacgaggagcggcggaggctcacaatccaacaacaggaccaccggcaagcgcagctagaggggctcccaggtagagtactacatctaactgtcaccaataagcatggcacatggaacaccggggcgctctggcactgggctgcaccagctccagatactgaagccaccttttcttgccttatactatcccttggtgaacaagaaagcccatagatggaggatatctacaagcgtgtttatcctgggcaagatcactatcaacgttgggattaggcttctgatgatagcaagatacggcgtgcagatagaatagggtgcatttgagaagcgcacagatgaattgttgggacgatgatatttggtg

SEQ ID NO: 83403 - DNA, 189 bp, Oryza sativa
  Clone ID: PAT_MRT4530_82738C.1
atggagcgtcgtgctgcaccgcgcgtcgagaggaagaagagggcggagcggcggcgctgtttgcaagaggaagccgggcaacgaggggaggaagagggaggggaggtggcgaggcaagggaagcgcgggcgagttggaccggggctcaaaattccatggacaaaaatacccctcgctaatgaggattag

SEQ ID NO: 83404 - DNA, 609 bp, Oryza sativa
  Clone ID: PAT_MRT4530_82739C.1
atggcgatcaacggcctcaggatgggttgggccgaactggtggtttggccgaacccgagatggctccattggccccttttttcctcatacgagagagaggcggtggcatcggcgggtgggaggcggatccatcacggcacggctgcggacgcggtggcgacgggcgactacgggcgcgacattggcgggcaggaggcgcggcggtgcaacctccaccgccgagaggcggtgggcgctgcgtcaagcggatcgggcacaccatggttgcgagcacgcggcgacggacgactgcgggcgggaggcgaggaggcgacgcatccggcggctgctccgcgccccacacacgcggatctgactacggtggggcgtatccggcacagatacggacgatgcgacgtcggatccggcgcggatccttcacaggtgacggcggtcgggaggcgaggaggtggcaggttcggccgccgctccgcccagatgcgcatggcgcgacctccaccgtggcaagctcggacttcgatggatatggaggagtggcggcggctacctccacgatgtgctgtcgtcgatgtccggagcaagctccaacaaaaatttaagttatgctta

SEQ ID NO: 83405 - DNA, 910 bp, Oryza sativa
  Clone ID: PAT_MRT4530_8273C.1
ccccggccccctccccccgcccctgcgccgccgcccgctcccccccccccccccccccccggacgccccggtctcctcgtccccgatctggtcggcgttgcctctcctcctccggacctccggtggctgacgccaggatatcggaacctgccgccctcgtcatcctcctccccgaccgctgattggagttcccgatccgcccctcccgccgtttgccctctcgggtcctccaccttcctcttgggaaaaaatgggggctcacccggcctagcgttcgtttcatggatgcgaaccgaggtgcatccgccatggccccggagtggtgccggatatggtggccacagcggcggctgcagcccgagccgcttcccgcgccccaaaggttcgtcctgttcggatggctcttcgcccgcacggactccggttgatgttgatggtcggggtcggctctcccgacaggaggaaatcttgcggtccttccccaccccagaagcactccagctcgctgaatcaagtccctgtgcttcattatttgtgccttgatgaccagaagtttgagactagtcctggccacggtcgtccttctgtatgccgttccggctgcttgtgctagcctgctttccctgggtgtgggtgctccttccagttctttggcgtccttctggttcccatgctgcttgactatccgtggctccggacgctgcgacctggatttcggtccctcgctttcgcgtcgcatctgtgcttttgccgctagtccatcagttgctcaggaagctgctaccagtaattctgtggctcgctttctctttgcatctgtggttttagcgatagttcaagtaacatggcactccgtgggaatacttttggcttcaatatcgactatcgtctacatcttcattcaagtgtt

SEQ ID NO: 83406 - DNA, 110 bp, Oryza sativa
  Clone ID: PAT_MRT4530_82740C.1
acatatcattctgttatcatcattgttgtggtattaaaaaagaggatatgcagctgaaaggaatgcacatccagcacagcaacaatctgcatatcctgtaaaacagaatt

SEQ ID NO: 83407 - DNA, 678 bp, Oryza sativa
  Clone ID: PAT_MRT4530_82741C.1
atgggcggcaatgtcggtttgggaaccgacttgcgcggtcaagggcgcgagctggcgttcggcggtcacggccaaagcggcgacagggaggatgacgccggcgaggagaaaaaaggggaaaaggagggggagaaagggggcttgcccatttgccgattcgggaaaaaggaggaggtgagcgggggcgacgcggcagagggaggagggatgctgcctccatcccttggcggcttgcgcgcggagtggcggggccgggcgatgacgacggcgatgacggcggggcggtttggaacggaacggcgacactggcgacaggcgcgtgcagaggctgacggcggcggcgaccgggcggtcggccaccacggcacgcgcgcgcggctcgcaacgggaggcgcggcggatggagtggcgcggctcgggcacgcgcgctggctcgcggggccaagcggctgcgcggctgcaggcggcagggcagcgggaccgggcggcgcagacgcgacgcgacacgggcggcaaccaagcggccatttaaataacatgcaaacaacgagtggatatcccctcgagggatcaaaatccacttccggtagtggccacaagaagggaaaggagaatgtcacaatagctagagattgggcccttctggttgacgaatctgatgtcattgcaattgattaa

SEQ ID NO: 83408 - DNA, 2203 bp, Oryza sativa
  Clone ID: PAT_MRT4530_82742C.1
tcaatggtccacattgccccacctctcgataactctaaatagctcgtaaacacgctctccccacgcgccgctgcctactaccgcctccggccgcgcgccaccaccgctaaagccgccgccgcaccgtgaaaccgtcgctgtcgcgctcgccagtgtcacccgcacctcggtcgccactcggttgccatccgccgccgccggaacccgattccctcgcatcgccggtgaggaccccttccctccacctcctttccttccccttcccgcgagcgccgagccacgccgccgttccggccgtgcgccgtcgccttcgcgccggccaccgctgcctcgccgtccgtcggtcgtagtcggaggccgcgtgccgccgccgccgccctgccatggtcggccggcttgagcggtgccgaaccaccatatactccccctcccgccttgtgccgctgcccggtgggccccaccagctggtgaaccacccctccccttgagccaccagccggtgccccctccctctccccttgtgccactgacaagcggggcccgcctgtcggcgccgcccctccccccttgggtgacgttagccccggccaacagcttttcaacggccacccgggccaacaacttttcaaacggccacccgggcctagccggatcacccagcccgtgggaatcagccacgtcgggggacctccaagctttcatgacaaggcatttcgaaagccgacacaggtttaccatatgccaacgagaggggtcccagaccaacaacaggttaggtcccagaccatactgtgccaggaagcccaggggtcctccccgacaccaccccggcgaatccacatgtctctcggcatcaaggctcccccgcttgtcgatggcacggttcaccgtgcggagcgagcacgaggcgcacgcgcacgggcggggagggatgcggtgcataggcgcagttcgcggtgaacgcggatgcggcggacccacgcgcagcctcacggctcgcggtggaccgcgcccgcgagtggtgctggagggagcggctgaccggggtcgactcgacccggtctcggtcgagctggcaccgacgtggcgcctacgtggctgccacgcgggccggcgggaggtagacgacgacgtcggccggaacggacggcggacgacagcggcgagcggcggagcgaaccacggcgatacaggcgaaagcgagcacaccgggtggttgcacgagacgaggggagacgagccaatggctcggattcgccggaggatgcccgacggcggcggattgcggcggcggcatccggcggcggaggaaggggaaaacagcgacgaggtctcggggggccaattcccggcggcgagagcaactacgcggctacgggaatccgatgctagcgtcggattgggcggaggtacgccgagcgaggccggcgacgagcggcgcttccgagctcgggcggcgacggcggcgagcacacggcgagcgacggcaacggtcggggcggcgccggctaactacggggaggctactcgcactaccgtgcgggacggggcgcagtgacgagagaccgacggcgcgggagtgatctctccggcctcgggccaaggaagaggaagaagagggcgcgcccagagtccccttccgcgtcctagtgtgcaccggctccttcggcacacacgcgacgacgaatggcgatggcgaacagggcaccgggggcggcggcagaagggagcgcgggcgtcgcggcagggggaggagggctcggcatccgtcccttggcggcttgcgcacggagtggcggggccgggcgatgacgacggcgatgacggcgggacgaggctgacggcggcggcgaccgggcggtcggccactcagcacgcgcgcgcggcttgcaacgggaggcgcggcggggcagcggggccggacggcgcagacggcgcagacggcgcagacggcgcgacgcgggcgacgaccacgcgggcgcgcgcgcgcgaacgacggcgtcgggaagcggcagcgagggaagcggagaggagggctcggctcggcgcgggcggcttacgcgcacgcgcgtgggcagagcggggagggagagagggagagatagctggggagggagggggagatgggctgagagaaattcggcccatcgaccccggggaggcaaactagacttttgcggaggaatttgatttggaaggattt

SEQ ID NO: 83409 - DNA, 1440 bp, Oryza sativa
  Clone ID: PAT_MRT4530_82743C.1
ctaaaacccatcgtagccggcttgctcctggaagaactcctcatcagcaggatctgcttcatcttcttcagcaaccggatcacccagcccgtggggatcagccacgacgggagacctccaagctttcatgacaaggcatttcgaaagcccacacatgtttaccatatgccgacgagaggggtcccagaccaacaacaggttaggtcccagaccatactgtgccaggaagcccaggggtcctccccgacaccaccccggcgaatccacatgtctctcggcatcaaggctcccccgcttgtcagcggctcggctcaccgtgcggagggagcacacggcgcacgcgtgcgggcgggggagggacgcggtgcatgtgcgcggttcgcggtggaaaggatacggcgggcccacgcgcagcctcacggctcgcggtggaacgcgcgcacggggagggactgaccggggtcggctcgacccggtcttggctgagctggcgccgacgtggcgcctacgtggctgcaacgtgggctggcgggaggtagacgacgacgccggccggaacggacggcggacgacagcggcgagcggcggagcgaaccacggcgatacaggcgaaagcgagcacaccgggtggttgcacgagacgaggggagacgagccaacggctcggattcgccggaggaagctcgacggtggcgaatcgcggcggcggcaaccgacggggagggagaagggaaacggcgacgaggtcacgaggggccgattcccggcggtgagagcatctacgcggccacgggaatccgatgctagcgtcggattgagcggagctacgccgagcgaggctggcgacgagcgggtgctacggagctcgggcggcgacggcggcgagtaaactacgagcgacggcaacggtcggggcggcgccggctagctacggggaggctactcgagctactgtgaggaggggcgctgtgacgagaggctgacggcgtgggagtaatctctccggcctagggctggggaagaggaaggagagggcgcggccgaagtccccttccgcgtccttgctcgtgccggctcctccgacatgcgcaacgacgaacggcgacggcgaaacagagggcggcaatggcgcggaggcggcgagcgaaacgggagggggaaatcgatgggagggcgccttgggtttaaatgggcggcaatgtcggtttgggagaggggaaccgacattggacggtcaagccggcgagctggcgctccggctagcggccaaaacggcgacaggaggtgacgccggcgagagggaaaaaggtagaaaaagggggagggaaaggggggcttgtcccttgcctctttgggaaaaggaggaggggagcggaggcgcgcggcagagggaggagggaggctctgcctccgtccttggaggctagcgcgggagtggcg

SEQ ID NO: 83410 - DNA, 602 bp, Oryza sativa
  Clone ID: PAT_MRT4530_82744C.1
atgtcaaaaccatcgccgccctggaaagcgacgcggcgatcgaacgcgatatcatatcgaatcatctccacttctcgatcttcttcagttggccgtgccaggcgtcaccggatccgcgccttcagatttgggaaagttgctggctgcatcgccaagatttggctggggaaagttggtagcaaccgagaaatcgtccgatcaggaggatttcttggctgagaagagaaaaacatatctgtgctagctttgccttcttccatggcagtggctatagaggctccgttccatgtcctggctgtggatgatagccttcctgacaggaagctcatcgagaggctactcaagacctcttctttccaagttaccactgttgattccgggagcaaggctctggagttcttggggctccatgatcatgaggacagcccaatttctactcaatcagatcagcaggaggttgcagtgaacctgatcatcacagactactgcatgcctggcatgacaggatatgatcttctcaagaagatcaaggaatcgtcttatttaagggacatcccagttgtgatcatgtcatcggataacattccttcaaggatcaatag

SEQ ID NO: 83411 - DNA, 463 bp, Oryza sativa
  Clone ID: PAT_MRT4530_82745C.1
ccggccgggaagttaaaattccaatcaccaatcgcttgcatcggcatcatcaattgatcaatctgttcaggccacaagagcagcacagctatacacatactcagcagaactacacttggttctttaacaccacccactcgcttgctactgtagctacccgccattatcaacaaccgacttcaccatgtcttctcagcctcttctccagaccacccccggcaagcgcatcgccctgcccactcgcgtcgagcccaaggtcttcttcgccaacgaacgaacgttcctatcatggctcaacttcaccgttatccttggtgcccttgccattggtatgctcaacttcggtgacagagtcgcattcatctcggcattcctattcaccggcgttgctatgtgtaccatggtatatgcacttgtgacctaccattggcgagcccagtctatacgtatgaagggacaggct

SEQ ID NO: 83412 - DNA, 1173 bp, Oryza sativa
  Clone ID: PAT_MRT4530_82746C.1
tttcctttcttgatgaatcctactctgtcgtacttgtcttatgtttggatgaaattccaaggaatcggtccttaagtgcgagagcgggaaaccgtacacccggtacattccccggtccgcggttttggaaattcatttagttcgcaagcaccgacccaggtgtcgggttttccaagtcttttgtaaaacccaagttttacccaagttgtttttcagattttaagtttgaaggtgtccgtcgatactcgcacagggtgcacgaatatcgagacgcaagagaggggctgaccggggtcggcccgacccgatctcggccgagctggcgccgacgtggcgcctacgtggctgccacgtgggctggcgggaggaagacgaaggcgccggccgcaaatggacggcgggcggcggcggtttctccggggcgccttgcgacgatgaggggcgacggggcgtacaccgggatgacgagggagaatgagagggagcgagccaacggcttggattcgccggagggagtccgtcggcggcggatttcggcggcggcaaccggcggagagcaaagggggaaacggcgacgaggtcacgagggaccaattcccggcggtgagagcatctacgcggctacgggaattcgctgctagcgtcggattgggcggagctacgccgagcgaggccggcgacgagcgggtgctacggagctcgggcggcgacggcggcgagcacacggcgagcgacggcaacggtcggggcagcgccggctagctacggggaggctactcgtgctacggctctcccggcgcttggcgatgaacggcggaggcgagacagagctcggaaagcggcggcaacaatggcgatgggaggagaagagagggagggcgcctaggctttaagggcggcaatgtcggtttggaaccgacggcggggcggtgtggagcggagcggcgacacgggcgacaggcgcgggcaggcgctgacgacggcgacgaccaggcggtcggccactcggcacgcgcgcgcggcttgcaacgggaggcgcggcggatggagtggcgcggctcgggcacgcgcgctggctgcggggccgagcggctgcaggcgcggcagggcagcggggccgggcggcgcagacgcgacgcgggcgacgaccacgcgggcgcgggcgacgaccac

SEQ ID NO: 83413 - DNA, 1493 bp, Oryza sativa
  unsure (1)..(1493): unsure at all n locations
  Clone ID: PAT_MRT4530_82747C.1
cccacgcgtccggatctaccatattatttcgaccatctattacaatacaagcatcttatgatatttggatgaacatgccaaagtcagatgtgcagataatttagtaaaaacatagagcacataataggagaacatctttgtatgcatatagagaaaaaaggtagtggaaaccttatcaattgtgaaaaataatcaaatatagaaccaagctggtttaggctaaactngatatggagatctctccgaatccctatgtcaaaaccatcgctgccctggaaagcgacgcggcgatcgaacgcgatatcatatcgaatcatctccacttctcgatcttattcagttggccgtgccaggcgtcaccggatccacgccttcagatttgggaaagttgctggctgcatcgccaagatttggctggggaaagttggtagcgaccgagaaatcgtccgatcaggaggatttcttggttggtgtggcaaccccatccgatccgaggatttgaagcctgattatattctaatcttcaacaaatctgatgcagcaaactggcagcctcttccttctgttcttccagagaagagaaacatatctgtgcaagctttgccttcttccatggcagtggctatagaggctccgttccatgtcctggctgtggatgatagccttcctgacaggaagctcatcgagaggctactcaagacctcttctttccaagtaaccactgttgattcggggagcaaggctctggagttcttggggctccatgatcatgaggacagcccaatttctactcaatcagatcagcaggaggttggagtgaacctgatcatcacagactactgcatgcctggcatgacaggatatgatcttctcaagaagatcaaggaatcgtcttatttaagggacatcccagttgtgatcatgtcatcggataacattccttcaaggatcaatagatgcctggaggaaggagctgatgaatttttcctcaaaccagttcggctctccgacatgagcaagctgaagccccacatactgaaaagcagatgcaaggagcactaccagcaggaacaaaacctgcaaagcaacagcgaaagcaacaacagcagtaaccccacaagcgagaacagcagcagcagcactagcaccaacagccacaagagaaaggcagtcgatgaagaaattttgccccacacaataagaccaaggcatagttgatttagcatctgactggtcatttgacactgatttttttttcttgcttctgtctgatcggtttttgacatactgatttgtaaaagggatactaacatctagtttacaaaatagaatggaatccgttaacggatactgcttgaattcgaatgggtgattctcagttcatcacattgtgattttaagccagttaagccttcaaattcctgctgagattaagggccactgaaaacatcttgtgccatatttgttaaggaatatcttaaaacccctaaaaa

SEQ ID NO: 83414 - DNA, 1385 bp, Oryza sativa
  Clone ID: PAT_MRT4530_82748C.1
atgggccagccggcccaaggcggtccaaggcacacgcgcgcgggaggcaaggagagagagagccggtggaccgggctcaccttgcgtggtccttggtgggacccgcttgtcggtgacacggttcaccgtgcggagcgagcacgcggcgcacgcgcgcgggcgggggagggacgcggtgcacgcgcgcggttcgcggtggacgtggatgcggcgggcccacgcgcagcctcacggctcgcggtggaacgcacgcacggggaggggctgactggggtcggctcaacccggtcttggccgagctggcgccgacgtggcgcctacgtggctgccacgcgggccggcgggaggtagacgacgacgccggccggaacggacggcggacgacagcggcgagcggcggagcgaaccacagcgatacaggcgaaagcgagcacaccgagtggttgcacaggacgaggggagacgagccaacggctcggattcgccggagggagcttgacggcggcgaattgcggcggcggcaaccggcggcgggagaagggggaaacggcgacgaggtcacgaggggccgattcccggcggcgagagcatctacgcggctatgggaatccgatgctagcgttggattgggcggagctgcgccgagcgaggccggcgacgagcggcgcttccgagctcgggcggcgatggcggcgagcacacggcgagcggcggcaacggttggggcggcgccggctagctacggggaggctactcgcactaccgtgcgggtgggcgcagtgacgagaggccgacggcgcgggagtaatctctccggcctcgggccggggaagaggaaggagagggcgcgcccagagtccccttccgcgtccttgctcgtgccggctcctccgacacgcgcaacgacgaacggcgacggcgaacagagcacgggaggcggcgagcgggggcgacgcggcagagggaggaggagctctgcctccgccccttggaggctagcgcgcggagtggcggggccgaggcgatgacgacggcgatgatggcgggggcggtttgagcggcgcggctcgggcaggcgcggcaggctcgcggggccgagcggctgcgcggcagggcagcggggccgggcggcgcagacggcgcaggcgcggcacgggcggcgaccacgcggctctcgcgcacgcgcgggcagagcgagggaggggcgctcggcgcggctctcgcgcacgcgcgcgcggcgcgcgggcagagcggaggtagggagggagagagagagagagagagtgccagggagggagggggagatgggccgagagagattcggcccatcgaacccgggggaggcaaaatagacttttgcggaggaattgatttgggaaggattt

SEQ ID NO: 83415 - DNA, 1297 bp, Oryza sativa
  Clone ID: PAT_MRT4530_82749C.1
atgggccggccggcccaaggcgcgcgcgtgcgggaggggaggagaaagagagccggtggaccgggctcaccacgcgtggtcccgggtgggacccgcttgtcggtgacacggttcaccgtgcggagcgagcacgcggcgcacacgcgcgggcgggggagggacgcggtgcacgcgcgcggttcgcggtggaacggatgcggcgggcccacgcgcagcctcacggctcgcggtggaacgtgcgcacgggaggggctgaccggggtcggcccgacccgatctcggccgagctggcaccgacgtggcgcctacgtggcgccacgcgggctggcaggaggtagacgacgacgccggccggaacggacggtggacgacagcgacgagcgacggagcgaaccacggcgatacaggcgaaagcgagcacaccgggtggttgctcaggacgaggggagacgagccaacagctcggattcgccggagggagcttgacggcggcgaattgcggcggcggcaactggcggggagggaagagggaaaaggcgacgaggtcacgaggggccaattcccggcggtgagagcatctacgcggctacgggaatccgtagctagcgttggattgggtggagctacgccgagcgaggccggcgacgagcgggtgctacggagcacgggcggcgacggcggcgagcacacggcgagcggcggcaacggtcggggtggcgccggctagctacggggaggctactcgtgctactatgaggtggggcgctgtgacgagaggccgacggcgcgggagtaatctctccggcctcgggccggggaagaggaaggagagggcgcgcccgaagtccccttccgcgtcctcgctcgtgccggctcctccgacacgcgcaacgacgaacggcgacggcgaaatgggaaaaggaggaggggaacgggggcgacgcggcagagggaggaggggctctgcctccgtcccttggaggctagcacgggagtggcggggccgaggcgatgacgacggcgatgactgcgggggcggtttgagcggcacagctcgggcacgcgcgctggcttgcggggccgagcggctgcgcggctgcaggcgcggcagggcagcggggccgggcggcgcagacggcgcaggcgcgacgcgggcgacgaccacgcgaacgcgcgcgcgaagagcggagggggggagcgctcggcgcggctctcgcgcacgcgcgcgtggcgcacgggcggagcggagggggagggagagaaagagagagagagggcgccggggagggagggggag

SEQ ID NO: 83416 - DNA, 1438 bp, Oryza sativa
  Clone ID: PAT_MRT4530_8274C.1
ttttttttttttttttcgggctgctggttttcggctcgtggttttttttttcatcctagtaaagatttccccttcccttccgtaagttcatttccatcgtgttaataaatcaggttccaagttcaacacatgctaggctacagatgtgtcctagccagtccaccatgccgcaaattgtatttgtacatcaatgcacaacaagtctccccatttttctcctctcccagcacatcacaatgtgctatcagcgtggaatcatcaatggggagatcttggcatttgctatcagtctcagtagcactgctgctgcatcgttcacgtcattgctccttccagatgcggccggtaacccgcagcttgagctcctgcctgttgccgccggagaagaagagggccatgttccggtggatgatgaggccgtcgaagctgtcccggaccttcttgtggctgtccctgatgctccgggggatgccctgccatgtcagcttccgcccgttcccgcccacctccaggctgtagcagaagttccgggcctcgctgtcctcgcccatgaacctcaggaacgccatgtacactggtgccatccccagcaggaatgcctcaaaatgcaggcagaagtgctgtccaaaacacttgaaaaccgtcagcatccatgtagcgttttccacttcataagggttggacttcacataacggtggttaaaggtgcagccttcatgcaagtccaccttatggtcgtttatgagatgagagacaagcatcggaacatcgccagcaatcaggcattctgaacctgcatatggacaactatatggcctgaacctgcagagctcctcatgcttaagtttgttttggtaaggatgaatctcagcacagcctaggctttgatatttgcatggaagctgaagtgactcagccaccttctcaagagccaaacatctgatattacccagttcttggcgacaagtagggcaatgattctccaccctatgcttgcagttagagcatattgtgtgaccatttgggcactgcagtataggtgggcgcattgagtttgtgcagactggacactcgagcaaatcattcaagcccgtcagcgatgatagctcaactgtgacaagtgatgtagaccagggcttgcatgtagaatctccatcaagcctaatgccagtgagtgcctcagagagcccatcagatacacaatccgactcagggatatcggtcacaatgctgcttcctggggccattgcaaaagcttctttcacattgggaaacactacaaaatatcaccacacccaccactccatccttccttgtaattagctggagaccggagacgccgccgccgccgcgaatcggagaggagagagacgacgacgcagacacagtagcagagtggagtagagcggacgcgtgggtagtattttttttcttttct

SEQ ID NO: 83417 - DNA, 1455 bp, Oryza sativa
  Clone ID: PAT_MRT4530_82750C.1
aagaaggcggcccagagcggcccaagacgcgcgcgcgcggaggaaggagagagagtccggtggaccgggctcactacgcccggtcccgggtgggacccgcttgtcagcggctcggctcaccgtgcggagggagcacgcggcgcggcgctagggtgcggcgggcccacgcgcagcctcacggctcgcggtggaacgcgcgcacggggagggactgaccggggtcggcccgtcccgacctcggctgagctggcgccgacgtggcgcctacgtggctgccacgtgggctggcgggagggagacgacgacccggccgcgaatggacagcggacggcgacggcgagcggcggagcgaaccacggcgatatgggcaaaagcgagcacaccgggcggttgttcgtgatgaggggagacgagccaacggctcggattcgccggagggagcttgacggcggcgaatcgcggcggcaacaaccggcggggagggaagagggaaatggcgacgaggccacgaggggtcgattcccggcggtgagagcatctacgcggtttcgggaactcgatgctagcgtcggattggacggagctacgccgagcgaggctggagacgtgcgggtgctacggagctcgagcggcgacggcggcgagcacacggcgagcgacggcaacgggcgcgagctggcgctcggcggtcgcggccaaagcggcgacagggaggatgacgccggcgaggaggaaaaaggggaaaaggagggggagaaagggggcttgcccctttgccgattcaggaaaaaggaggaggtgaacgggggcgacgcggcagaggaaggagggatgctgcctccgtcccttggcggcttgcgcgcggagtggcggggccgggcgatgacgacggcgatgacggcggggcggttcggagcggagcggcgacactggcgacaggcgcgtgcagaggctgacggcggcggcgaccgggcggtcggccaccacggcacgcgcgcgcggcttgcaacgggaggcgcggcggatggagtggcgcggctcgggcacgcgcgctggctcgtggggccaagcggctgcgtgactgcaggcggcagggcagcgggaccgggcggcgcagacgcgacgcgacacgggcggcaaccacgcgggcgcgcgcgcgaacgagcgcggggagcggcagcgagggagcggagagggaagactcggctcggcgcgggcggctcatgcgcacgcgcgcgggcagagcggagaggcgcagggcgcggctcccgcgcttccgcgcggcgcgcgagggaggggcactcggcgcggcgacgcgcgctcgcgcgcgcggcgcggggcggagcggagggagagaaggagagaggaaagggccgggggagaggggaagatgggccgggaggaaatcggcccatcgaccccaggggaggcaaaatagacttttgcggaggaatt

SEQ ID NO: 83418 - DNA, 756 bp, Oryza sativa
  Clone ID: PAT_MRT4530_82751C.1
atgggcgaaagcctgacggagcaatgccgcgtggaggtggaaggcccacgggtggcttttcaagtccgccgtcaaatcccagggctcaaccctggacaggcggtggaaactaccaagctggagtacggtaggggcagagggaatttccggtggagcgggcttgacatgccgcgaatcctcttgaaagagaggggtgccctcgggaacgcggacacaggtggtgcatggctgtcgtcagctcgtgccaccgccggtgttaagccggaggaaggagaggatgaggccaagtcatcatgccccttatgccctgggcgacacacgtgctacaatgggcgggacaaagggtcgcgatctcgcgagggtgagctaactccaaaaacccgtcctcagttcggattgcaggctgcaactcgcctgcatgaagcaggaatcgctaatgtggatcatccaaggcacattagcatggcgtactcctcctgtttgaatcggagtttgaaaccaaacaaacttctcctcaggaggatagatggggcgattcaggttgaggttcgtcctcaatgggaaaatggagcacctaacaacgcatcttcacagaccaagaactacgagatcaccctttcattctgggggaccaggaggttggatctagccataagaggaatgcttggggcgatgatttacttcacgggcgaggtctctggttcaagtccaggatggcccagctgcgccagggaaaagaatagaagaagcatctga

SEQ ID NO: 83419 - DNA, 812 bp, Oryza sativa
  Clone ID: PAT_MRT4530_82752C.1
atggggatcagccacgtcgggagacctccaagctttcatgacaaggcatttccaaagccgatacaggcgcccttcggtactcgcacagattgcatgatttccgaggcgcaactgggtggttacaagggaacatggacccgcttgtcagcggctcggctcaccgtgcggagggagcacgcggcgcacgcgcgcgggcgggggagggacgcggtgcacgcgcgcggtctgcggaggaacggatgcggcgggcccacgcgcagcctcacggctcgcggtggaacgcgcgcacgggaggggctgaccggggtcggcccgtcccaacctcggctgagctggcgccgacgtggcgcctacgtggctgccacgcgggccggcgggaggtagacgacgacgccggccggaacggacggcggacaacagcggcgagcggcggagcgaaccacggcgataccggcgaaagcgagcacaccggggcggtcaagggcgcgagctggcgctcggcggtcgcggccaaagcggcgacagagaggatgacgccggcgaggaaaaaaaaggggaaaaggagggagaaaaaggggcttgcccctttgcccgattcgggaaaaaggaggggggagcggggcgacgcggcagagggaggagggatgctgcctccgtcccttggcggcttgcgcgcggagtggcgggggccgggcggtgacgacggcgagcggtttggagcggcgcgacgacacgggcgacaggcgcgggcaggcgctgacgatggcggcaaccagacggtcggccactcggcatgcgcgcgcgggaaataa

SEQ ID NO: 83420 - DNA, 1545 bp, Oryza sativa
  Clone ID: PAT_MRT4530_82753C.1
actgttattcgagatatcatcagatcaacttgaaggagtctgattgcttgaagacctctttcatcacaccgttcgacgcatattgctacatcactatgccttttggcttcaagaatgctggggccacgtaccaatgcatgatccaaagatgtttgcagtcatagctcgagcgcaatgtggaggcctacatcgacgatgccatcatcaagaccatgcgtaaggatgatttgattgctgatttggaagaaatcttcaaaaatattcgggtctttaggatgaagttgaactcggatatgtgtaccttcagagtactgtcagggaagctgcttagttttacggtgtcgcatcgcggcatcgaagccaacccgtagaatattaatccaatatgcaacatgcaaccgcctagtacatagaaggatgttcagaagttgattgggtgcatggtggcacttagccgttttgtttcatggcttgtagagcaaggcatgccctttttcaagctcttgaagaagacttaagattttcaatggacactcaaagcccagcaagcctatgaagactttaagagtattttgacgacgcctctcgtgctagcatcgccaatgccgtaggagcctttgttattatatgtgtcggcaacttctcatatggtcagcacgttcttgattgtttagcgtgaggaggaaggacatgtctagaaggttcaaaggccgatctatttcattagtgagatcctggccaactcgaagacactctaccctcaagtttagaagatgttgtatggagtgttgattatagttaggaagttaccccattattttcaaagttatccggttactgtggttacatcttttccgcctggcaacgttctccataaccgcgaagctatagggcagatcgcaaagtgggttatggagcttatgccttttgatacatctttcaaggcccgcacatcaattaagtcctatatgttagtgaattttgttgccgagtagatggaggccaaattggaagcgcctgcaacaaagctagaatattggaccatgtatttgatggatatctatgggttctaggagttggagctggggttgttgtaatttcaccgactagggagcgattgagatatgttcttcaaattcattgtccaacatcacatgacgtggccaagtatgaagcccttcttcatggcttacatctcggttgattgtccgtggtgattcgtagttggttgttaatcaagtcatgaaggattggtcttgcctgattgacaatttgactgcctatctctaggaagtatgcaaattggaggtggttttgatggcttggagctttctcgtatgttagggcataataatgaagatgcaggcatgtttgccagcttcaggtctttgcggtaacatgctccgactgacgtcttcattgagcaccttcaagagccgattgtttcgaagacaaaagttttggaagataatgcatcaagacaagtttccatgctggataacgattggcggatgcctttcattaagttttaactaagcaagagtc

SEQ ID NO: 83421 - DNA, 774 bp, Oryza sativa
  Clone ID: PAT_MRT4530_82754C.1
atgccgcgaatcctcttgaaagagaggggtgccctcgggaacgcggacacaggtggtgcatggctgtcgtcagctcgtgccaccgccggtgttaagccggaggaaggagaggatgaggccaagtcatcatgccccttatgccctgggcgacacacgtgctacaatgggcgggacaaagggtcgcgatctcgcgagggtgagctaactccaaaaacccgtcctcagttcggattgcaggctgcaactcgcctgcatgaagcaggaatcgctaatgtggatcatccaaggcacattagcatggcgtactcctcctgtttgaatcggagtttgaaaccaaacaaacttctcctcaggaggatagatggggcgattcaggttgaggttcgtcctcaatgggaaaatggagcacctaacaacgcatcttcacagaccaagaactacgagatcaccctttcattctgggggaccaggaggttggatctagccataagaggaatgcttggtataaataagccacttcttggtcttcgactccctaaagcaggtttgaaaaaggatcttagagtgtctagggttgggccaggagggtctcttaacgccttcctttttctgcccatcggagttatttcccaaggacttgccatggtaagggggagaaggggaagaagcacacttgaagagcgcagggcgatgatttacttcacgggcgaggtctctggttcaagtccaggatggcccagctgcgccagggaaaagaatagaagaagcatctga

SEQ ID NO: 83422 - DNA, 1935 bp, Oryza sativa
  Clone ID: PAT_MRT4530_82755C.1
atgctaaaagacgtctttgacaagctcaacttcacggtgttggcaccaacaccaatgcgccttcaactggctgattcgtcagtccattacccggcagggatagcggaggatgtgccagtcaagatacgggatttcttcatcccggttgactacgtggtgctggacatggacacgggaaaagagacgccgcttatcctggggcgccctttccttagcactgcaggagccaacattgacgtgggaacagggagtatccgtttccacatcaacgggaaggaagagaagtttgagtttcaaccgaggacggaacaatgctccatggtcagaataaagtatgggtcgaacccatggaatattcaagaggtcgaagtggagccacccaaaatggacggcccagtgaaattcatgcagaatttcctggagaaggaaacaacgatgcctaggaaccgttattggaagacgccggtaaaaccacccataccggctaagaagctagagcagccggctcagaagaaaacgcaatccgcaccaataccaaagaaggtgtggagggagaaaccaaagacgcccgctccatcacctccggagacgggatttttgaattttgaggaaatttcttcaaatgaatttttcagagcaaaccaaaatgaagttttcaacgaaacttcgctgttccacgaccacactgaccgttggaacccaatggccgaaagtggtgctggttgggcccactgtgggttcggccgaactggccaggcaacggttccttgccacttttggcaggccgatgtctcgatggaagacgccgaagctccacgacgactcctgaacgacaccgacctcgaccttgtcattgattgggagagacaggcctactacatgccgagcgaccgggagtatgctcacacgcgagaatactcaccgaagctgctaaaaatgataggtatggatgttgaatttcgtactatttggaaagctgttggttggcagagatttgttgtggtagatgagcctggttttcgtctgcttactttgcaatttctgtgcactttgaaagaaatagaagatggaatttcctttcgctttttccataaggagtacacacttagatggaaaggcttaagtacacttcttggttttcacgatacctgtaaaatcgatctccagaaaggaatttctgggttcgagaaaaataggttttcggaagacatttctggtgctccaatttgcaagaaaccaagaatgaatgaaatccataatcctacacttaggctcatgcacaaatggattgctatgactttgtttcctagaggtgatcaaaggcccattaggggagatgaattgattatcatgtttgccatggttagaaagatgaaaattgctcctgtgaaatgtatgataagccgctgtccgtgtattgacgagaattatctagtgcaagggcatattctgaaacatggagtagatggatctttgatttactttttccccggttgtacaaatgaaatcccgttgccaaatgcggggtatcatttgtacaactgccatgaactaaccattcccctgcagaccatagaagaatctcgtgtaggtggagcatacagggagacgcacaacatgacaaggaatgaacgagaaagttcatcatcctcaacacccgtacagatgtatgaggcaggttgggcagcaattggggatgcatccggatggacccaagctccacgtcacaacatcggagtctcaacctgggcaagtgccagtgaggaccggtggcttgcgcctcatgacatccaatggggggacaaccaagcctccagctcaagtggtgtgccttcatctccaagtgaatggcactcaagttcctctcattgggacttgggtgaaatcactaggagaatggacacccttgatatgcagacagaggagatccagtaa

SEQ ID NO: 83423 - DNA, 2067 bp, Oryza sativa
  Clone ID: PAT_MRT4530_82756C.1
gtcgcgatctcgcgagggtgagttaactccaaaaacccgtcctcagttcggattgcaggctgcaactcgcctgcatgaagcaggaatcgctagtaatcgccggtcagccatacggcggtgaatccgttcccgggccttgtacacaccgcccgtcacactataggagctggccatgtttgaagtcattacccttaaccgtaaggagggggatgcctaaggctaggcttgcgactggagtgaagtcgtaacaaggtagccgtactggaaggtgcggctggatcacctccttttcagggagagctaatgcttatgcttattgggtattttggtttgacactgcttcacgcccaaaaagaaggcagctacgtctgagctaaacttggatatggaagtcttctttcgtttagggtgaagtaagaccaagctcatgagcttattatcctaggtcggaacaaattagttgatagtgataggatcccctttttgacgtccccatgcccccccccgtgtggtgtggcggcatggggatgtcaaaaggaaagggatggagtttttctcgcttttggcgtagcaggcctcccaaagggaggcccgcgcgacgggctattagctcagtggtagagcgcgcccctgataattgcgtcgttgtgcctgggctgtgagggctctcagccacatggatagttcaatgtgctcatcagcgcctgacccgaagatgtggatcatccaaggcacattagcatggcgtactcctcctgtttgaatcggagtttgaaaccaaacaaacttctcctcaggaggatagatggggcgattcaggtgagatcccatgtagatctaactttctattcactcgtgggatccgggcggtccggggggggcactacggctcctctcttctcgagaatccatacatcccttatcagtgtatggagagctatctctcgagcacaggttgaggttcgtcctcaatgggaaaatggagcacctaacaacgcatcttcacagaccaagaactacgagatcaccctttcattctggggtgacggagggatcgtaccattcgagcctttttttcatgcttttcccggcggtctggagaaagcagcaatcaataggacttccctaatcctcccttcctgaaaggaagaacgtgaaattctttttcctttccgcagggaccaggaggttggatctagccataagaggaatgcttggtataaataagccacttcttggtcttcgactccctaagtcactacgagcgccctcgatcagtgcaatgggatgtggctatttatctatctcttgactcgaaatgggagcagagcaggtttgaaaaaggatcttagagtgtctagggttgggccaggagggtctcttaacgccttcctttttctgcccatcggagttatttcccaaggacttgccatggtaagggggagaaggggaagaagcacacttgaagagcgcagtacaacggagagttgtatgctgcgttcgggaaggatgaatcgctcccgaaaaggagtctattgattctctcccaattggttggattgtaggggcgatgatttacttcacgggcgaggtctctggttcaagtccaggatggcccagctgcgccagggaaaagaatagaagaagcatctgactctttcatgcatactccacttggctcggggggatatagctcagttggtagagctccgctcttgcaattgggtcgttgcgattacgggttggctgtctaattgtccaggcggtaatggtagtatcttgtacctgaaccggtggctcactttttctaagtaatggggaagaggactgaaacatgccactgaaagactctactgagacaaaaagatgggctgtcaaaaaggtagaggaggtaggatgggcagttggtcagatctagtatggatcgtacatggacgatagttggagtcggcggctctcctaggcttccctcatctgggatccctggggaagaggatcaagttggcccttgcgaatagcttgatgcactatctcccttcaaccctttgagcgaaatgtggcaaaagg

SEQ ID NO: 83424 - DNA, 1495 bp, Oryza sativa
  Clone ID: PAT_MRT4530_82757C.1
atgggccggccggcccaaggaggcggcccaagtgcgcgcgcgcgggaggggaggagagagagggccggtggaccgggctcaccgtgcgcggtcccggggtggacccgcttgtcagcggctcggctcaccgtgcggagggaacacgcgatgcatgcgcgcgggcgggggagggacgcggtgcatgcgcgcggtctgcggaggaacggatgcggcgggcccacgcgcagcctcacggctcgcggtggaacgcgcgcacgggaggggctgaccggggtcggcccgtcccgacctcggctgagctggcgccgacgtggcgcctacgtggctgccacgcgggccggcgggaggtagacgacgacgccggccggaacggacggcggacaacagcggcgagcggcggagcgaaccacggcgataccggcgaaagcgagcacaccgggtagttgcacgagacgaggggagacgagccaacggctcggattcgccggaggttgctcgacggcggcggattgcggcggcggcaaccggcggcgggagaagagggaaacggcgacgaggtcacgagaggtcgattcccggcggtgagagcatctacgcggcttcgggaactcgacgctagcgtcgaattgggcggaactacgccgagcgaggccggcgacgggcgggtgctacggagctcgggcggcgacagcggcgagcacacggcgagcaacggcaacgaggaaggagacgagtgcccggagtccccttccacgtccacgaacgcaccggctctcccggcgcttggcgatggacggcggaggcgagacagagcacgggagcggcggcaatgggcggtcaagggcgcgagctggcgctcggcggtcgcggccaaagcggcgacagagaggatgacgccggcgaggaaaaaaaaggggaaaaggagggagaaaaaggggcttgcccctttgccgattcgggaaaaaggaggggggagcggggcgacgcggcagagggaggagggatgctgcctccgtcccttggcggcttgcgcgcggagtggcgggggccgggcggtgacgacggcgagcggtttggagcggcgcgacgacacgggcgacaggcgcgggcaggcgctgacgatggcggcaaccagacggtcggccactcggcatgcgcgcgcgggaaataacgggcggcgtccgcgcgggcgcgcgcacgcgaacacggcgcgcgggaagcggctttgcgagcggggagctcgcgcgaggggagggggggcgctcggcgtgggcgactcccgcgcacgcgcgcgcggcgtgcgggcagagcggagggggagcggagagagagacgctcggcgcggctctcgcatgctcgagcatcgtgcgggcgagggagggagcgagagagagagagagagagagagcgcgcccgggagagagaggagagggccgggggagagggggagatgggccgagcgagattcggcccatcgacctcgggggaggcaaaa

SEQ ID NO: 83425 - DNA, 1014 bp, Oryza sativa
  Clone ID: PAT_MRT4530_82758C.1
atgtatacccttcaaccacgcgtatgcatctccagctccaggtcatccatctcccctaaagctgctcgtctatctcatcagaaagcatccactggaaagccgtatttcagggagattcaggtgcatctaagctccaaactgggagaggcatcaaatgccatgaacagtacttaccaacagctgctggattcatttgttgatcacaccttcacattcaaatgtcaacctttgcgtcccactgagagcaattttgcaccagtcgacgagatcggggagatcacacgggttatagagattgaaggagagattccagcagattttcctgagggtgtctacataagaaatggcggaaaccctctctatggaggcctccaatctgttagttccattttcgggcagtcccataacatctgggtggaaggagaaggcatgctccatgctgtatacttctgcaaaactgaattccgaaaggtaatgaaaagcatgagcaacactagcgtgtttgagcatgcagggagagtttatgcagcatcagaggatgatgttccccacgaggttgacttgcataacctcagtacactaggcagctggcatctcggtggtgaatggaagttgccatttacagcacaccccaaggtaatccctgggtcaaaagagatggtcattttcgggatcaatgcggtacagcctttcctaacagttggcataatctcagaggatggagaaaaacttaaacaaaaggttggtctcaagctagacagatgcacatattgtcatgaaattggggtcacggggacgtacaacatcatcatagattcaccacttaccctcaacccaactaggatgctaagaggggctccagtgcttgagtttgaagaggaaagctattcaagaattggggttatgccccattacggtgatgcagactcagtaatatggttttatgtagaaccattctgcacattccatcttgtcaattgcttcgaggaaggtcatgagatctaccttagttag

SEQ ID NO: 83426 - DNA, 1164 bp, Oryza sativa
  Clone ID: PAT_MRT4530_82759C.1
atgtatacccttcaaccacgcgtatgcatctccagctccaggtcatccatctcccctaaagctgctcgtctatctcatcagaaagcatccactggaaagccgtatttcagggagattcaggtgcatctaagctccaaactgggagaggcatcaaatgccatgaacagtacttaccaacagctgctggattcatttgttgatcacaccttcacattcaaatgtcaacctttgcgtcccactgagagcaattttgcaccagtcgacgagatcggggagatcacacgggttatagagattgaaggagagattccagcagattttcctgagggtgtctacataagaaatggcggaaaccctctctatggaggcctccaatctgttagttccattttcgggcagtcccataacatctgggtggaaggagaaggcatgctccatgctgtatacttctgcaaaagtaataacagcacatggtcaatctcgtacaataaccgctacgtgcaatctgaaacatttaggattgagaaagaacgtcagaaaccatgctttctccctatgaccgatgggaaccctcccgccatgctcatcgcctctgttcttaacacactgagattccgaaaggtaatgaaaagcatgagcaacactagcgtgtttgagcatgcagggagagtttatgcagcatcagaggatgatgttccccacgaggttgacttgcataacctcagtacactaggcagctggcatctcggtggtgaatggaagttgccatttacagcacaccccaaggtaatccctgggtcaaaagagatggtcattttcgggatcaatgcggtacagcctttcctaacagttggcataatctcagaggatggagaaaaacttaaacaaaaggttggtctcaagctagacagatgcacatattgtcatgaaattggggtcacggggacgtacaacatcatcatagattcaccacttaccctcaacccaactaggatgctaagaggggctccagtgcttgagtttgaagaggaaagctattcaagaattggggttatgccccattacggtgatgcagactcagtaatatggttttatgtagaaccattctgcacattccatcttgtcaattgcttcgaggaaggtcatgagatctaccttagttag

SEQ ID NO: 83427 - DNA, 837 bp, Oryza sativa
  Clone ID: PAT_MRT4530_8275C.1
atggcggggagggcggcgacgtggggacgcggagtgggggcgcggcgtggagcggagaaggcggcggcgcggacggtttcggcggcggttgccgtcgtggggctggcggctggaggaaggggacgacctgacagccacgccggcatgtacatcggctacacggcagacgccgccgcgtcctcctcctcctcctcctcgtcttcgtcgtcttcctcctcggagatgcttcggttcgacacgggctggcccgacgagacacctgcgccatcctccgtggcggggaggaggaggagcgcgggcggtgatcatcgtcaaggtcggggacagacggaggcggcggcggcgttcatcggggtgcggaggcggccgtggggcaggttcgcggcggagatccgggactcgacgcggaacggcgcgcgggtgtggatcggcacgttcgacagcgccgaggccgccgcgatggcctacgaccaggccgcgctctcggcgcgtggcgccgccgcggcgctcaacttccccgtggagcgcgtccgcgagtcgctccacgcgctctccctcggcgcggccgggggctcccccgtgctggcgctgaagcggcggcactcgaagcgaaagcggcgcaagaaagctgaactactcgccgccgccgccgccaccgccgcgacggcgaatgccacgccgcaaacgcggaggatcagcaagagcacggaattgactactgcgacgacggacgagcagaagcggttcgtcgtggagcttgaggacctcggcgccgagtacctggaggagcttctctggctgtcggagatcaatggtggtagtgaccctgctgactga

SEQ ID NO: 83428 - DNA, 402 bp, Oryza sativa
  Clone ID: PAT_MRT4530_82760C.1
atgtcgtcagctaccttgttctcccgtgcttccccctctcgtgttggccgtgtttgtgaggtaatggagcggacatgcaagaagcaagataatttcaatcgcaagttctatcgctgcctgagaggacaaaatagtggtgcgcaatgtaaatttttcatgtggcaaggggaatatgctgtttggttggtcaaggagggtgttttacatgcatggacagattgcaatgctcagaggacacaagttgaggtgccagattcattgaatgcttcaatgggaggagtaaatgatacaattgagaagatgagaagtgagctgaagaaggcaatgagtacaattagggtggctgggattatacttgtgactgcagtagttgtgtttgtagccatgaatgcaatgaaataa

SEQ ID NO: 83429 - DNA, 221 bp, Oryza sativa
  unsure (1)..(221): unsure at all n locations
  Clone ID: PAT_MRT4530_82761C.1
gtagaccaccctttgccgtccgcaacgncaacgngcgcattgggcatctactaagacctcgtcgacggtctacgacgagtacaagtggnctncgtaatcacncgtatccgacgtcgctgccgccggtgtaccanggtacaacnggnncttacanttttggtnccctttnntatgcggaaacaaagtccagntaccnatctaactcggngtcttcattaacc

SEQ ID NO: 83430 - DNA, 503 bp, Oryza sativa
  unsure (1)..(503): unsure at all n locations
  Clone ID: PAT_MRT4530_82762C.1
ttttttttttttttttttttgcaagtctaatttaacttatataagtaggaacaaactattcacaccctactactacgaggatttttccgtgaggatgaaatcgattttcgcgtgcggaagattcgaccgtctggaagaaatcgtctgcgaaaatgcacgatttttttgtgcgagtgacgcacccgcacgcgaaaatcgattttcgcgtgcgggggcttaagccgcccgcacgggaaaataaaaaatcgaaacaaaaaaaaagaaaaaacaaaccctaaccctaatccagccgccgccgccggcaccgccaccctagccgaggcgcgccgccgtcgcccccgtggttgccggcgacggatccgccgtccgttaccttcaccgacgccggatccgctgcccgcgcgctcccgtcgctgccggggaggaagggganaaggaagnancttccncggntcccgtcgtcgccgccgcctggcgcccgccgccccatgcctcaccggccc

SEQ ID NO: 83431 - DNA, 297 bp, Oryza sativa
  Clone ID: PAT_MRT4530_82763C.1
atggtgctcctttgcgagcgtggcactgctgtctgctcagcactcgaatggacgaaaaagggtgctaacgggcatggtgctgaggttggggactcgccgtcaagacggttggcgatgaagtcctgccacgtcagcaagaggatcaacttcgatgaaatctgggcagcggccgagacggcgacgatcgacgacggcaaagaggtcgaggcggcggtggtcttcgggtcgtcgatggcggcggcgctccggcagtcttcggcagaaacggaggacaggacgaggacggcggcgacctag

SEQ ID NO: 83432 - DNA, 299 bp, Oryza sativa
  Clone ID: PAT_MRT4530_82764C.1
acttatgttcatgaataaaaagtagcatttctatccttattatatctcttcctgctcgctaattggtttatccatttttctggaaggcttcccaggtactccctccgtcccataaaaaaccaacctagatgtgacacatcctagtactacaaatctggacattctagattcattatactagaatatgtcaaatccagtactagattcgttttttttttggacggagggagtattccttatatgctggtagattcatagttcatatcctgtagcaaacatggagtttcagtttacaaaac

SEQ ID NO: 83433 - DNA, 2034 bp, Oryza sativa
  Clone ID: PAT_MRT4530_82765C.1
gaggggaagcccctcctcttcccccaccctcgcatccccgtcgcggccctcgtccccaaccaccttccccgccgccctcgcgcttccggcatcctcctcctcctcggcgaccggagaccgaggcagctcggcgtcgccctgcggcgtcggccaagacgccaccaggccgagaccgcgccgcccagccgccgcggcggcggaggctgctgggggcggtgggcggcacgcgccgcggcggggctggtgctccatctggcggtatgctccgtcgccttgctcttccccacctatgcgcgcgcctgcgtgggcggcgctctccccccgccacctcctgcggcggcgatggcggcggaggaggacgacgacgacgaggagtggaaggtcgcgctgcagcagtggaagtccaagacgtattccctctctgttcccctgcgggtcgtcgcgctccgtggctccttccctcctgcgtggatcaaggattttgttgaagctcaggggaagagactgaaattcagtcctgagttcaggacaaaccttgatgtgctctactccgagatgtcacaatgtttggacaagggtcaacttaagcaaaaatccgcaatggcggctgatgttgtttcaattggggactcttggctcgggtatgccattcgtaagggattggtagaacctgtcaagaacgctgaagaacaggattggtttcagagcctaagtaacagatggaagattcatctgtgcaggaaccgcaatggtgaggtagatcctaatggctcaatatgggcggttccatacagatggggcaccgtggtcattgcttacaagaaaaacaagttcaaaaggcataatctgaaaccgatacaggactggggggatttgtggaggcctgaacttgccggaaaaatttcaatggtggattctccaagagaagtcattggtgcagtcctgaagcatctgggatcctcatacaacactaatgacatggaatcagaaatcactggtggtagggaaacagtcttagaaagcttgacacaactacagaaccaggttcaattgtttgacagcacgaactatctgaaatcatttggagtaggagatgtatgggttgcagtgggttggagcagtgatgttattcctgctgcgaagcgaatgtctgacgttgcagtggtggttcccaagtcaggcagtagtctatgggctgatctatgggcgataccatctgcaaccaaatttcagactgatcgaattggcggcagaactagaggcccatctccacttatcaaccagtggtttgacttctgcctgcagagtgctagaagcttaccctttcggcaagatgtcatcccaggagcatcgccactattcctcgagaaaccggtgcctgaagttcctcaagaacgaaacaagagaaagccaaagctggagacgaatcttgtcagaggagcacctccccttgaaatcctggaaaaatgtgagtttctagagcctctatcagaaaaggcgctggacgattaccaatggctgataacgagaatgcagagaccaaatcgtggtctgtttggaaatttgttgcaaaatatatcgagtgtactgaatttcaaatcaagagtttaagaatttctgtgcatgacgaagtttttcttcggctctgtacttctgcaagccatcatctccgtgtgtttctctcgcacgtcggtgatcttgtgattttggctggctacataccgcatagcgatatggtggtatattggagaactgttgaagaaacagtattgtctattactccacttggctgctattgcctcttcacattatacaagtaagagaatttacagaacacaactcatggaaatcatcatgtctgattcttgaagttcagaaaagagcgaagggaacagtgaatctaaaccatctatacatgccgtacttattgccgtgtaaaaatgtcggaatgtcactgccaaatcaaatcactcttcttaggcaaacaaatgaagctcttcgttactgtatcagcatcaccgagactgagagatg

SEQ ID NO: 83434 - DNA, 921 bp, Oryza sativa
  Clone ID: PAT_MRT4530_82766C.1
atgggcaggtcgttcagggactcgctgaaggtgctcgaggccgacatccagcacgccaactcgcttgacacctgtcaccagatatactgcttaagtggccaaagctatctcctttggccttgcagtgctgctgaatttagaagggaatatgatggcgcctgtcttcagatgagaatgtcatactgtccagctgcacacttcttcctttttcttgtgcagtggacagattgcaaccttgctggtgcacttgggctgttgaggattctcatttataaggtttatgctgatgggactaccaccatgtctgctcatgaaaggaaagcaagcattagggaattctatgctgtcatatttccttctttgatgcaactacatgaagggatcaatgaagtggaagacaagaaacaaaaggcaatctgtatagaaagatatagaagacgagatgaagatcagaaaatggtgatttcagagattgatgataacatcgaggaggaatgtggcatatgtatggagataaatggcaaagtagttcttccaacttgtagccatgctatgtgcattaaatgctaccgtgactggagatcaagatcccagtcttgtccattctgccgcgatagtctcaagagagtgaactcggccgacctatggatatatacagataacagggacatagtggacatagcgacggtccgaaaggaaaatcttaggcggctcttcatgtacatagacaagttgcccacggtcatccctgaaactgtttttgacgtttacgattcccactgctgtagaaattgtggagcccttggtgttcatgctgccccgcttgtagaagcttgggttactgggctcagcttcagaacacttcagagggctcccggaatggtccagcttcagagtgaaaacgcctgtcggagcgcgtga

SEQ ID NO: 83435 - DNA, 692 bp, Oryza sativa
  Clone ID: PAT_MRT4530_82767C.1
tccacacggacgctgacgcatcatagcacagagctagtggcatagctgttcttgcatgaaccgaggtctctacagacattgggtttaaacggtggtttctactgctagctgccatgatttgtccagttgtgtacatcttagggcttaggaacttaattggaaccaagatgttaccaatatgatatgttcgattggcaatttgaagcacctgcgttatctgtctctaaattgctatctgcaagaactgcctgaatcggtgtctggtttttacagcctggagacattggtgatttccaatttgagaatattgagggcaacaaacttccacaatcttgtcagccttaaaagtctgcatgtatatttcgagtttttggatggatcattggatcaattttgcaagcttgatatgttggacacactatgtctgaagagatgcagtaacttgacatacttacccttacatgtaggaagcctcatcaacttacagcgtcttaaactcattggaataccaaacatccggaatttggatcatgcatctttcaagtacagaagaaataacagcataacaaggtaccaagaagcaacatttccattcttggaggagttagaactcgataaattgtgcaaactagaagattggtatggaataccacaatcagattgcccgaaattgcagagacttacaatcagag

SEQ ID NO: 83436 - DNA, 828 bp, Oryza sativa
  Clone ID: PAT_MRT4530_82768C.1
ccgcgaggtggcgctccgagttccggcggtggggctccggcggggggggtgcgctcgggcggcaggcaagaaacaaaaggcaatctgtatagaaagatatagaagacgagatgaagatcagaaaatggtgatttcagagattgatgataacatcgaggaggaatgtggcatatgtatggagataaatggcaaagtagttcttccaacttgtagccatgctatgtgcattaaatgctaccgtgactggagatcaagatcccagtcttgtccattctgccgcgatagtctcaagagagtgaactcggccgacctatggatatatacagataacagggacatagtggacatagcgacggtccgaaaggaaaatcttaggcggctcttcatgtacatagacaagttgcccacggtcatccctgaaactgtttttgacgtttacgattcccacgtaaaatgaccttgcactcatgcacaaattctttactggtgtgttactactagtgctgtagaaattgtggagcccttggtgttcatgctgccccgcttgtagaagctgtaagcagctaagctcgccgaggaggctcgctatacaaaggtatatatgtaaattgtcttggctgtatggtgtgtacctttgtgaggagttaggagaatctgatgccagtcagtctgtaagtaaggaagaaccagcaaccattgactttgtttcttttaattgtaagcatttcactttcacccaaaaaaaaaaaaacaccccccgaaaaaaaaaaaaaaaaaaaaaaaaaaaaaaaaaaaaaaggggggggggcctcgtgccgattcctgcag

SEQ ID NO: 83437 - DNA, 738 bp, Oryza sativa
  Clone ID: PAT_MRT4530_82769C.1
atagtaacattagctctcaaaattttgaaatttggatcatagatccttcttcttgcctactgatctagaatgggagttcaacatccattgcttgtaattggtgtacaatgttaaaatgacaaattgggaaaagcaaatgaacatcatcaatgcatcaaagaggaaagggtacctctttggaggttctatttgcaggtatagaacttgaagtaagagcgagcataacaatgccagacttagaactgccttggctccagatggaatgctcatcccctttttggagcttccaccaggagagtagtaaataagaacgaagagaccaagaacagctatatattgtagaagaaggtgatcacggcagataagtgggtacattgagaaaaggccaaagtacatgagccatccatacaagtgaggttcttgtagtgctaagaggcttgcaggcaaaagaggaagcaaaattgatttctcgtgcacttggtatgagaatagatagaacgaaattgagctgttcaacaaagaatagagaaagccaagattacttggtgatctgatttgctgaaccaatgaaggcaggaaagccaagatggtagcagagagactcatgagtttcagcggttttattgcaaacaatctcttccacttaataagcacctgaagtgctacaccaaaaattggcaacataatcctcatatatacctcgctcaaatggagctaatcgagagatcacctaacaag

SEQ ID NO: 83438 - DNA, 461 bp, Oryza sativa
  Clone ID: PAT_MRT4530_8276C.1
ttgacttaaaaatactaatgagttacatgcaaattttctttttagcttaaaaaggatattgagctaatgatagtgatgaccaggtgggtagtaacttattgtcttgtcgggaagatttgaaaatattattatgctatatatgttgtatattatcggagccaaccatttacttataagtgattatggctggctgcagtgttccttttgaacatttatgtgaattttgaagcctggatacattatgaaatccgaatatctccttttcttttcattggaaaaaaaatttgtatgcaactttttttctgagcaattacttcctgttgtagaggctgcagagtttgaacttgttgagcccatctaaatactctaaaggagatgctgaaagaggaggtggatgagagcactaaaagaaagtttgatagttgggggtgtcttttggttactatggttaaaaaacaaac

SEQ ID NO: 83439 - DNA, 141 bp, Oryza sativa
  Clone ID: PAT_MRT4530_82770C.1
tgcagacgcgtgtgatcaacgccgcgtcaccggatctaccgatcgttggccagtcctgattcaactaatgtgggtattatctgtgtctgatgacttgataaatgttggatctaacgtttgaatagaacggagattagctgc

SEQ ID NO: 83440 - DNA, 150 bp, Oryza sativa
  Clone ID: PAT_MRT4530_82771C.1
atgggggacaaaggatcaagtagggaagagatagctggtaccagaggcgatatgagggatggctacggaaataacaaggagagacaagatgcagacgagcaaaaagatgatgcagggactctaaaaaatattttaaaaggatggaaatga

SEQ ID NO: 83441 - DNA, 368 bp, Oryza sativa
  unsure (1)..(368): unsure at all n locations
  Clone ID: PAT_MRT4530_82772C.1
gcccgcaccgcgctgccgccgccgggccgccccgcgcccgcccgtggcttgctccgtccagaccccgccatggccatgcccacgcccatgcccacctggacggcatctccgctgccgccgccgaccagcccgctgttcgagaggggcaggctctacgacctctactccgcgcggcgcaacgagcggctcaagcgcaagcacggcttccccgccggcgaggaggaagcggaggcgatggccgccgacccctgcgtcgccgtcgagctctccaagcgccgcggcgccaagaagatgaccggtgccgagtccgtgaggcggtccatgcnggnggcggcggacttctccgccgccgggccgtgccgccacat

SEQ ID NO: 83442 - DNA, 1483 bp, Oryza sativa
  unsure (1)..(1483): unsure at all n locations
  Clone ID: PAT_MRT4530_82773C.1
tcgaccacgcgtccgcccacgcgtccgaccacgcgttcgnccacgcgtccgtgcaaagctgagtgcttcagagtcagaacgggaatggcagaagttggtaaagaaagagaagaaggacagaaaaggcttgagatgtgggaccgccaaaaggcaaagcttcaggaggacattgctgaatgcaagacaaagattacgcaggtggacagggaacttgctgagatcaacaaggcgataagaaatatggagatgaaaataagagaagacacaaaagccaaagaagaaaacctggcgcttgcagaacaggagcacgcaaagcgggaatctgccaaagcgaatgctgaacgccgactggaagaaatacgccagaagacagaagtggagtctcggtgcttcaaagatgatatcaagaggcttgaagatgaactagcccgtctacaaaagtcgatgggtgttaatcatccaactgttccctcaacccaccctcctggtgtggccgatcgaaactccacacgggcgccaaagcagcccaccaaccaaaggccatcgcccgcgtcgaacaagcagtcgcaagcgcctacccagaaggcaagccgtcgcagggactgcgtgatctgcaagagggaggaggcgtgcgtgatcctgcttcagtgcgcccaccaggtgctctgcgtcggctgcaacaagaggcatgaggagaagggcgtggcccggtgcccctgctgcaatgccaaagtcgaggagaggatcagggtttttggcgccagctccaactgagggtcatctggtggtggtggtgctgccgattgggttttggtgctgatgctgctctctgctatgcctacctgccttctgttttttctttcccccggggtgaggagaagtttgtggttttgcttcctttacctcctttactgtgaagaatgtcttataggtctgcacctgagatgtttttaccttgctgcttcagctgtttcatggatgttatgctgaatggcgactctcttggggtacatgggtataattgaaccttttttttggttataggaaaaacaaacaaacagcaactgattggatacatgcaacaacaatggtacatttcccaccctatacatctgtctagtggtggtttaaaaatatacactctcacttactcccctcatcaccatatactattcttttctcttcttcgggggggggcccggtccccaattcccctttatgtggtctttttgccccccttacctagtcgtagtgtaaacggtccgcttaggaaaacctttgtatttcactatgtgtttgtcttgttttattcctcttcttgtgggattaagtattccttgttttctttagtctttctatcgtctttatattacgtgcatcctgatattttacgttaatttttattttagatcaccttatgttcgtattaaccagtaatttagcttcgcattaattatttttttttatattatttttttcatta

SEQ ID NO: 83443 - DNA, 324 bp, Oryza sativa
  Clone ID: PAT_MRT4530_82774C.1
atggcggcggtggttcggtggcttggcggcgtggggaaatgggtctgcgagcaccagggaagtgtggcagtcgggcttgaggcagccgggaacggcggcacgacgtgcgtccaccgcgtggtcgaagcagcgcaggagaagaggaccggcggcaaggggtcgcgctcgcaccagcgagctccggtggcgatcctgcaaggaaagggaaaggaaggggggcttttggtgagtttgggacggcgagctcgacgtcgacgtgcccctcgattggagaaggtggtgagcgacggcgacgtatttgaggaattgaagtcagcagcctga

SEQ ID NO: 83444 - DNA, 2295 bp, Oryza sativa
  Clone ID: PAT_MRT4530_82775C.1
atggagagtcagagaatgacctggctctacgatcgtcaccactccttgaaacataataaagctgaaagacaagccattctatcaacttatagattagcaaaacgtccaaatctctcttcagaaggtatgattggcgaaagttgcattgtgaggacaaattgtttcagtgttcatctggagtctttggatgatcagactatctatgaatatgatgtatgtgtcactcctgaggttggaatcaatcgtgctgttattagagagttggtaaaacagcagaaagattctggtttgggtggccgtcttcctgcctatgatggaaggaagaggctatacacatctggtccattgccatttgattcacatagatttcttgttctgctggatagtattgaagacagtcctgaagagtcaaggcacttgagagtgagagattttgtggtcactttaaaatttgctgcaaaaatttccttatggactttacgcaagttccgtggtgggaagccaaaccgagaaagtcgagcggccctgcgagcacttgacgttgttctaaaggaattacccactgcaaggtatacccaatttgctggttcattttactcacctaacttaggagaatgccgacaattgtgtaaggtcttggaaagctggcgtggttttcaccaaagaatacaagctactcagatgggacttcaactgaatatcgacgtgtcatcatcagtgttcatcaagcctgtacctgtggttgactatgttgcacagcttcttaacgaggacatcttattagacagaccattatgtagcactgagttcttgaagattaaggaggctctagaaggtctgaaggttcagattaatggcattttgttcaacacatatcatgtacaagaccttgtccatcaagcagcaagttttccagttaactttagtattcagtacccatctttgccttgcttgaaagtggctcattttggggagacaatatttctgccattggaggtctgtaaaattgctgagggacaatgtcaccagaaacagctcaatgcaaaacatatggctgctcttcttcaggtagctcgacagccccctaatgagcgtgactacaacattctgcagactgtgcatcagaacaaataccaggaggacccacatgctaaagagtttggcattaaaattgaggaaaaacttgtatcaattaaatctcgcatcctacctgctccttggcttaaattccatgacagtggcgagacgacagaattcttgccacaacttggcatatggaatatgatgcataagaaaatgatcaatggtgggagagtgaaaagctgggcatgtgttaacttttgctggagtgtacgggagtatgctgctaggaatttctgttatgaccttggctttatgtgccgagaatctgggatggtcttttcagttaaacctgtgcttcctctagtgattgctaaacctggatgtgtagaatctgcactcaggacacttcatgacgatgtcatggacatacttagaccacagggcagaaaacttgacctgctgattgtaatattgcctaacaacaatggatctctttatggtgatgtcaaaagaatatgtgagacagatattggactgatctctcaatgttgtcttgcaaaacatgttcttaagatgaacaagtggtatcttgcaagcgttgcccttaaaatcaatgctaagatgggcggaagaaatactgtactggttgatgctttagaaatgagactcccccatgttagggatacaccaactattgtatttggtgctcatgtcacccatccacatccaggaaaagctaatagttcttccattgctgctgttgttgcttctcaagactggcccgaggttaccaagtatgctggtttaatcagtgtgcaagcgtgccaccaggagtcaatacaaggtctttttaaagtccaggatgatccggaaagaggaaccacaactagcggaatgatcaaagagcatctcatgtctttctatcgagccactaaacggaagcccggaaggattatattttacagggatggtgtgagcaaaggacagctccctcaggctttgatgcacgaacttggtgccatcaaaatggcgtgtgcatctatgggacccgattataatccattagttacatacgtggtgctccagaagtgtcgccatacacgtctgtttgctgactactataatgcgaatactcatgattcaactgcaaacatacgggctgctccgcaacttgcacccaatccatatcagttgatgcgtcctgttgattag

SEQ ID NO: 83445 - DNA, 1313 bp, Oryza sativa
  Clone ID: PAT_MRT4530_82776C.1
ccgccgcgccgccgcgagtagggaagggaccgggcggcggctgcacgaggaccctgatgtatctgaactctgtgttggttttggcatatttttgatgtttggagttccatctcgccaattctactgaacatatgctcacccatgtggtcatacttgtcttatgtttggatgaaattccaaggaaacggtccttaagtgcgagagcgggaaaccgtacacccggtacgtcccccggtccgcggctttggaaattcatttagttcgcaagtaccgacccaggtgtcgggttttccaagtcttttgtaaaacccgagttttacccaagaagtttttcagattttaagtttgaaggcgtccgtcgatactcgcacagggtgcaggaatatcgagacgcaagggaggggctgaccggggtcggcccgacccgatcttggccgagctggcgccgacgtggcgtctacgtggcgcctacgtggctgccacgcgggctggcgggaggaagacgaaggcgccggccgtgaatggacggcgggcggcggcggtttctccggggcgccttgcgacgatgaggggcgacggggcgtacaccgggatgacgaggaagaaagagagggagcgagccaacggcttggattcgccggagggagtccgtcggcggcggatttcggcggcggcaaccggcggagagcaaaagggggaaacggcgatgaggtcacgaggggccaattcccggcggtgagagcatctacgcggctacgggaatccgttgctagcgtcggattgggcggagctacgccgagcgaggccggcaacgagcgggtgctacggagcacgggcggcgacggcggcgagcacactgcgagcggcggtaacggtcggggcggcgccggctagctacggggaggctactcgagctacggctttcccggcgcttggcgatgaacggcggaggcgagacagagctcggaaggcggcaacaatggcgatgggagggagaagagagggagggcgcccggggctttaagggcagcaatgtcggtttggaaccgacggcggggcggtttggagcggcgcgacgacacgggcgacaggtgcgggctggcgcggcagagggtgacggcggcggcgaccagacggtcggccactcggcacgcacgcgcggcttgcaacgggggggggggggggcggcggatggagtggcgcggctcgggcacgcgcgctggcggcggggccgagcgcgacgcgggcgaggaccacgcgggcgcgcgcgcgaacgacgcgcggggagcggcagcgagggagcggaaaggagg

SEQ ID NO: 83446 - DNA, 1547 bp, Oryza sativa
  unsure (1)..(1547): unsure at all n locations
  Clone ID: PAT_MRT4530_82777C.1
ttggggcggctcggccgagcttaatgggccggccggcccaaaaggcggcccagagcgcgcgcgggaggggaggagtgagggggccggtggaccgggctcaccacgcgcggtcccggggcggggaagggacgcggtacacgcgcgcggctcgcggtgaatgcagatgcggcgggcccacgcgcagcctcacggctcgcggtgaaacgcgcgcacggggatgggctgaccggggtcggcccgtcccgacctcggctgagctggcgccgacgtggcgcctacgtggcggccacgtgggctggcgggaggtagacgacgacccagccgcgaatagacggcgggcggcggcggcgagcggcggagcgaaccacggtgatacgggcaaaagcgagcacaccgggtggttgttcatgatgaggggagacgagccaacggctcggattcgccggaggttgctcgacggcggcggattgcggcggcggcaaccggcggcgggagaagagggaaacggcgacgaggccacgaggggtcgattcccggcggtaagagcatctatactgcttcgagaactcgacgctagcgtcggattgggcggagctacgccaagcgaggctggcgacgagcggcgcttccgagctcgggcggcgacggcggcgagcacacggcgagcgacgccaacggaagaggaaggagagggcgcggccgaagtccccttccgcgtcctcgaacgcaccggctcctccggcacacacgcgacgacgaacggcgacggcgaacaggggcgatagcaatggtgtggaggcgaaaacgagggagattggagggggagggcttgggtttaaatgggcggcaatgtcggttttggagaggggaaccgacattggacggtcaaggcgcgagctggcgctcggcgcttgcggccaaacggcgacaggaggtgacgccggtgagggggaaaaaggggaaaagagggagggaaaaggggagctcacccctttctcctttgggaaaaaggaggaggagagcgaggcgactcggcaaagggagaggggacgctgcctccgtcccttggcggcttgcgcgcggagtggcgggggccgggcgatgacgacagtgatgacggcggggcggtttggagcggagctgacggcggcggcgaccaggcggtcggccactcggcacgcgcgcgcgggaaacaacgggctggcgcggcgcgtgggcgcgcgtgcgaacagcggcgcgcgggagccgcagcgaaggtgcggaaaggagggctcggctcggcgcgggcgactctcgcgctcgcgcgcggggcgcgcggcggagcggagggggaagggggcgcacagcgcggtggctcacgcacgcgcgggcagagcggagggagcggaggaggggcgctcggcgcggcgctcgcgcacacccgcgcgcggcgcgcgggcagggnggancggagcggagggagaggaagagagcgcgccgggagagagggggccgggggagagatgggccgagcggaattcggcccatcgaacccgggggaggcaaaa

SEQ ID NO: 83447 - DNA, 420 bp, Oryza sativa
  Clone ID: PAT_MRT4530_82778C.1
atggtggtgactggtgaccatctaccagctgctatcaaatggaggtcggccaccggcaacggtgacacgcccggctcgccgctcgccgccaccgcgtgctcgcggtcatccttcccgtgcgggtgctgcatcagcccgccactgcacggtcttcgctgccggacttgtggctgagctcccgcgtgagtcggggacgcggaagcggacgacgaggcgagtcgggtttagacgccggcgcggcgaggcgagccctcggacgatgacggtgagtcgggcccgcgacggggagcgaccggcgcggcgaggcgggtccgcggcggggagggagggaggcacggttctagcattcaaaatttatcctaaaatacaataatttttccacttatattctcttcttaaccaatcgcaatattcttccat

SEQ ID NO: 83448 - DNA, 270 bp, Oryza sativa
  Clone ID: PAT_MRT4530_82779C.1
atggagcccaagctcggccagagctgcaatagcgggcggagccagagcggcgagggcgggcagatgggcaacccgccgtccgccaaggacgacgccgaggccgcggcccgcaagatggaggacgacttcaacgccttcaccgtgtccaaggccgacgacctggccaagccactcaaggacgccgggatcccctacaagatccacatctccgccgtttgcccctcgccttccgccgccttgccgtcgccgactcgcggcggcggcagatga

SEQ ID NO: 83449 - DNA, 1011 bp, Oryza sativa
  Clone ID: PAT_MRT4530_8277C.1
atggccgccgcctgcgcgtgggacgccctcccggagcacctccaggagcggatcctctctctcctcccgctcaccgcgctgctccccgtcgccgccgcctcccgcgcgctccgccgcctcctccgctcccgggccttccacgccctcctcaccccgcaccgcctcgacgccttcttcctcctctccccgcgcctcgccttccacccgctctcccgccgcctcctccccgccccgcccgccgcctcccctcccgtcgtctcctccccctcccacctcgtcaccgccgcctcgctcctccgcctcccgcccctccccgccacctcctacctcctcgccgtcgtcctccccatcccggcctcctcctcctcctcctcctcatgctcccgcgagtttaccctcgtcgcggtcaccgcgggcgcccgtgtccgctcctacaccctcgactctgccgatccctccccgcggtgggaccctcgaggggatctccctctcccgttcgcgctcctcggcaacgcggctggcgaccgccgccagctcttcgttctcggccgcggccccgacgcgattctcgtctttgatctcgcgacggggcagtggacggtgctgcccgctgcgatgccactcggcctcacgacggcacacctgttcgtcttcggtgggcggctgttcttggtaggcggggtggagaggtttggggtggtggaacgtgtgctggtgtggaggctggagggctccgaggcggccgcggagtggacggaggtgggagcgatgccggaggaggtgttcgatgagcttgtggctggtcggcatggcagcttctggcattttcaggctgcagacagaatggggatcgtttgcctgtacaatgctgtagatgggaggctggtgatgtttgatgcggtggatggtgggtggactaggctgtcacgagtgtctggtttggacgttgaggagagccgccggtggtttgggcatgtcgtggagccgcgcgtggaactcctgctgggatag

SEQ ID NO: 83450 - DNA, 774 bp, Oryza sativa
  Clone ID: PAT_MRT4530_82780C.1
atgggccggccggcccaaggcggcccaagcacgcgcgcgcgggaggggaggagagagagagccggtggaccgggctcacctcgcgtggtcccgggtgggacccgcttgtcggtgacacggttcaccgtgcggagcgagcacgcggcgcacgcgcgcgggcgggggagggacgcggtgcacgcgcgcggttcgcggtggaacggatgcggcgggcccacgcgcagcctcacggcttgcggtggaacgcgcgcacggggaggggctgaccggggtcgacttgacccggccttggccgagctggcgccgacgtggcgcctacgtggctgccacgcgggccggcaggaggtagacgacgacgccggccggaacggacggcggacgacagcggcgagcggcggagcgaaccacgacgatacaggcgaaagcgagcacaccgggtggttgcacgagacgaggggagacgagccaacggctcggattcaccggagggagcttgacggcggcgaatcgcggcggcggcaaacggcggcgggagaaggggaaaacggcgacgaggtcacgaggggccgattcccggcggcgagagcacctatgcggctacgggaatccgatgctagcgttggattaggaggaaacgcatcgggggaggccggcgacgagaggcgcttccgagctcgggcggcgacggtggcgagcacatggcgagcggcggcaacggtcggggcggcgccggctagctacggggaggctactcatgctactacccgagtctaa

SEQ ID NO: 83451 - DNA, 1507 bp, Oryza sativa
  Clone ID: PAT_MRT4530_82781C.1
atgggccggccggcccaaggcggcccaagtgctcgcgcgggaggggaggagagagagggccggtggaccgggctcaccgtgcgcggtcccgggtgggacccgcttgtcagcggctcggctcaccgtgcggagggtgcacgcggcgcacgcgcgcgggcgggggagggacgcggtgcacgcgcgcggtctgcggaggaacggatgcggcgggcccacgcgcagcctcacggctcgcggtggaacgcgcgcacgggaggggctgaccggggtcggcccgtcccgtcctcggctgagctggcgccgacgtggcgcctacgtggctgccacgtgggctggcgggaggtagacgacgacgccggccggaacggacggcggacaacagcggcgagcggcggagcgaaccacggcgataccggcgaaagctagcacaccgggtggttgcacgagacgaggggagacgagccaacggctcggatttgccggaggaagcttgacggcggcgaatcgcggcggcggcaaccggcggggagggaagagggaaacggcgacgaggtcacgaggggtcgattcccggcggcgagagcatccacgcggctacgggaatccgttgctagcgtcggattgggcggaactacgccgagcgaggctggcgacgagcgggtgctacggagctcgagcggtgacggcggcgagcacacggcgagcgacggcaacgaggaagaagacgagcgcggccgaagtccccttccgcgtccttgctcgtgccggctcctccaacacgcgcaacgacgaacggcgacgatgaacagagcacgggggcggcggcaatggcgcggaggcgaatgggagaggaagggaactccggctagcggccaaaacggcgacaggagggagggaggatgacgccggcgggaggaaaaaggggaaaaaggagggggagaaagaggcttgtccccttgcctcttcgggaaaaggaagagggagcgggggcgtcacggcaggggggagagggctcggcctccgtcccttggcggcttgcgcgcggagtggcggggccgaggcgatgacgacggcgatgacggcgggacggtttggagcggcgcgacgacacgggcgacaggcgcgggatggcgcggcagagggtgacggcggcggccaccaggcggtcggccactcggcacgcgcgcgcgggaaacaacgggcggcgcggctgggcacgcgcgctggctcgcggggccgagcggctgcgcggctgcaggcgcggcagggcagcgggaccgggcgacgcggacggcgcagacgacgcggctcgggcgcggggagctcgccagggatggggagaaggagagcgaggggagggggcgctcggcgcggcgcttgcgcaggcgcggcagagcgaggggagggggcgagagagagggagagggagagcgggagcgcgccgggggaggggagagagagagatgggccgagcgagattcggcccatcgacccgggggaggcaaaa

SEQ ID NO: 83452 - DNA, 255 bp, Oryza sativa
  Clone ID: PAT_MRT4530_82782C.1
atgaagaagaataggaagaagaaaagttttctcaacacgagggaaaaggtcccttcgaaattgcattattgtaaggggattttgagtatttatctaaaggaaggaacaaatgaggataagagaaaattgcttctaatttgtccaagtgggatatatggcgtaaatcattttgattttttttctaatcaaacttatttaaatttaaccaaaattatataaaaacataataacattcttaacacaaaacaaatatat

SEQ ID NO: 83453 - DNA, 918 bp, Oryza sativa
  Clone ID: PAT_MRT4530_82783C.1
ctaggctgagctggcgccgacgtggcgcctacgtggctgccacgcgggccggcaggaggtagacgacgacccggccgcgaatggacggcgggtggcggcggcgagcggcggagcgaaccacggtgatacaggcaaaagcgagcacaccgggcggttgcacgggacgaggggagacgagccaacggctcggattcgccggaggttgctcgacggcggcggattgcggcggcggcaaccggcggcgagggaagagggaaacggcgacgaggccacgaggggccgattcccggcggtgagaccatctacgcggcttcgggaactcgacgctagcgtcggattgggcggaactacgccgagcgaggccggcgacgagcgggtgcgtgcgggacggggcgctgtgacgagaggccgacggcgcgggagtaatctctccggcctcgggccggggaagaggaagaagagggcgcggccgaagtcctcttccgcgtccttgctcgtgccggctcctccgacacgcgcgacgacgatcggcgactgcgaaacagagggcggcaatggcgcggaggcgaaaatgagagagtttggagggggagggcttgggcttaaatgggcagcaatgtcggtttgggagaggggaaccgacattgaacggtcaaggcgcgagcgggcgctcggcgcttgtagccaaagcggcggcaggaggatgacgcccgcgaggaggaaaaaggggaaaaggagggggagaaaggggcttgcccctttgccgattcgggaaaaaagggggaggggagcgggagcgtcgcggcagagggaggaggggcgcggctccgtcccttggcggcttgcgcgcggagtggcgggggccgggcgatgacgacggcgatgacggggggacggcttggagcggagcggcgacat

SEQ ID NO: 83454 - DNA, 807 bp, Oryza sativa
  Clone ID: PAT_MRT4530_82784C.1
atggctcgcaacaaggtgaagctgcagcggatcatcaatgatgcgaagcggcgggcaacattcaagaagcggctcaagggcttgatgaagaaggcaagcgagctggcaacactatgcaatgtggacacatgcctcatggtgtatggtgagggtgaggcgcaagcaacggtggtttggccgtcggagtcggaggtgatgagagttctcgagcgcttcaagaccttgccacagctggacaaatataagaagatgaccgacctggagggcttcatccaggagcgcatcaacaagttccaagagcagttagacaaggtgaggcgtgatgccgatgaaagtgagaccaagctactcctcattgaagctctcgaaggccgccgcccaggccttgaggggatcaccattgagcaacttaccagccttggctggcttgtagatgcacgcctcaacatcgtcaatgatcaactccagaagctccacgagcagggcctcctaccagcgtctatttcactgccaaccatgggggtactgccttacaccacggcgggctacactgttgcgcaagaggcaccaatccagagggggggatggctcatgggtgttgtaaggggcattggctcattgggctatagtttgttcagaggtagcggcagaagcaacactgctggacccagtggtgacatggtgcaacctttcaacattggcgcaggatcctcattggccaaccagggcggctgcagaaacaaccagcaggaggaggtcgtcacgagcgtgaggtcggggaagctcaacgttgtggccttcccttag

SEQ ID NO: 83455 - DNA, 966 bp, Oryza sativa
  Clone ID: PAT_MRT4530_82785C.1
atggcggcggaggcgtggagggcgcggttccgggagcgtgtggtggaggcggcgagccgcatggcccgcatggagcgcgtgcaggggcatctcgccgccgcgcaggggcacctggcgctggcggcgccgttgctcgcggacaacgcggcggcggcggccgcgcgcgacaggatccagcgcgtgctgggcgcgctcggggaagcgtccagcgatctcgccttcgcgatgtccgtcatgaacggggccaagctcctcgtgttcagcgatgtgatcgggatcgaacagctgggcgaccaatacttcccggagggcaacgccggggtcgtgctccatgactccgtggaggacgtggaggaagcgttcgccatggtagacagctgccgcagtcacctggatgcggtcctcctcctgctggaccatccgcgtctccctggcgtcgacggcttgatccaggaggagctcgccgccgccgatggtgacctccaggccgcgatagggaacgcggagttgggcaccgagttggccgtcggcgcccggcaggatccgcacagccgctcggccccgcagccagtgcgcgtgcccgagccgcgccactccatccgccgcgcctcccgttgcgacccgcgcgcgcgtgccgtggtggccgaccacccggtcgccgccgccgtcagcccctgcacgtgcctgtcgcccgtgtcgtcgcgccgctccaaaccgccccgccgtcatcgccgtcgtcatcgcctcggccccgccactcccgcacaagccgccaagggacggaggcagagcctcccccctccctctgccgcgtcgccccgctccctcctccttttccccaaagaggcaagggggcaagcccccttttctctccctctttttcttttcccctccccgccggcgtcatcctccctccgccctgacgccgttttggccgcaagcgccgagcgccagctcgcgccttga

SEQ ID NO: 83456 - DNA, 571 bp, Oryza sativa
  Clone ID: PAT_MRT4530_82786C.1
aacctctgcagaggggatacactttacccacacgatattactaacccggatcacccagcccgcatttcgaaagccgacacaggttcaccatatgccaacgagaggggtcctataccgacatcaggttaggtcccagaccatactgtgccaggaagcccgagggttctccccggcaccaccccgttgaatccacatgtctcttggcatcatggctcccctgattagctaattactcagccaggggcgtcccattccacctatgtggtcacatttgccttatgtttggatgaaattccaaagaaaacggtccttaagtgcaagagcgggaaaccgtactcccgattttaaatttcaagggaagtgttccgatgctcgagcccgaaggcccatgcatcgaagcacaacagtcgacaaaggagatctagtgacttgccttgctcgaaatcttgagcttgatcctcgaaatcctcgcactacgggtcttcgggctccgaaactacacgcgaaacgggacagctcaacaaacggcaaaaataaagccctattattgacctctaaacgtgccattaaa

SEQ ID NO: 83457 - DNA, 1159 bp, Oryza sativa
  Clone ID: PAT_MRT4530_82787C.1
accaatagcgacacaactacctcgagctccactcaccggcggtcgccttcagccaggggtgtcccattccacccatgtggtcgtacttgacttatgtttggatgaaattccaaggaaacggtccttaagtgcaagagcgggaaaccgtgcacccggtacgttccccggtccgcggttttagaaattcatttagttcgcaagcaccgacccaggtgtcgggttttccaagtcttttgtaaaagccaagttttacccaagttgttatttagattttaagtttgaaggcatccgtcgatactcgcacagagtgcacgagcaccgaggcgcaagggaggggctgaccgggatcggcccgacccgatctcggacgagctggcgccgacgtggcgcctacgtggcgcctacgtggctgccacgcgggctggcgggaggaagacgaaggcgccggccgcgaatggacggcgggcggcggcggtttctccggggcgccttgcgacgatgaggggcgacggggcgtacaccgggatgacgaggaagaaggagagggagcgagccaacggctcagattcaccggagggagtccgttggcggcggatttcggcggcggcaaccggcggagggcaaagggggaaacggcgacgaggtcacgaggggccaattcccggcggtgagagcatttacgcggccacgggaatccgttgctagcgtcggattgggcggagctacgccgagcgaggccggcgacgagcgggtgctacggagctcgggcggcgacggcggcgagcacacggcgagcgacggcaacggtcggggcggcgccggctagttacggggaggctactcgagctacggctctcccggcgcttggcgatgaacggcggaggcgagacagagctcggaaggcggcggcaacaatggcgatgggaggagaagagagggagggcgcctgggctttaagggcggcaatgttggtttggaaccgacggcggggcggtgtggagcggggcggcgacacgggcgacaggcgtgggcaggcgctgactacagggcgaccaggcggtcggccactcggcacgcgcgcgcggcttgcaacgggaggcgcggcggatggagtggcgcggctcgggcacgcgcgctggctgcggggccgagcggctgc

SEQ ID NO: 83458 - DNA, 282 bp, Oryza sativa
  unsure (1)..(282): unsure at all n locations
  Clone ID: PAT_MRT4530_82788C.1
cgcctagggaggtgctggcctgggcggcgccgcgtgccgcgcgggccacagctcctgcggtgnnnnntgacccgggggggggcgggggcgggcnnnnncctactccactctacgtgcccgggccggtgccggatgacaacgggaggggnacggcggggctggcgcaccagccggggacggagactaggaacccggggctgggcgggccccgctggcggtcagcaaggcggggggcaccgggctgcacatcacgggggaaccgaggacggagcgggcggcagc

SEQ ID NO: 83459 - DNA, 1249 bp, Oryza sativa
  Clone ID: PAT_MRT4530_82789C.1
atagatgttgaatttcgttctatttggaaagcggttggttggtagagatttgctggggtagatgagactggctctcatttgcttactttgcaatttctgtgcactttgaaagaaatagaagatggaatttcctttcatttttttccataaaaagtacacacttacatggaaaggcttaagtacacttcttggttttcacgattcctgtaaaatcgatctccagaaaggaatttctgggttcgagaaaaaataggttttgggaagacattttgggtgctccaatttgcaagaaacctagaaataatgatatatataatcctacacttaggctcatgcataaatggattgctatgactttgtttcctagaagtgatctgagacccattaggggggatgaattgattatcatatttgccatggttagaaagattaaaattactcctgtgaaatgtatgataaggcaatggttagaaagtataaagttctctgctcctgttgagtgcacttctctaattactcggatagcaaaagggctaggggtcgttagtgaccaaattgcttttatctcagccactcgtccgcgtattgatgaggcttatctagtgcaagggcatattttgaaacatggagcagatgaatctttggtatactttttccccgttgtacaaatgaaatcccgttgccaaatgcggggtatcatttgtacaactgcaatgaactaaccattcccctacagaccatagaagaatctcatgcaggtagagcatacagggagacgcgcaacatgacaaggaacgaacgagaaagttcatcatcctctacactcgtgcagatgtatgaggcaagttgggagccaactggggatgcacccggatggacccaaactccacgccatagcatcggagtctcaacttaggcaagtgccagtgaggaccggtggcatgcgcctcatgacatacattggggggacaaccaaccttctagatcaagtggtgtgcctccatctccaagtgaatggcactcaagttcctctcgttgggacttgggtgaaatcactaggagaatggacacctttgatgtgcagacgggggagatccagtacaacctcacggaacacatagctcaaacgcgagaatggcaacaatctgctgatgcttagttcaccaacatcaacatcatgatgcagcaacagcacgtctaaaataccagatactactctaatatcatcgttcggccgaaccaggggccg

SEQ ID NO: 83460 - DNA, 750 bp, Oryza sativa
  Clone ID: PAT_MRT4530_8278C.1
atggaatcggacacttcaggcggcggtttgaaccgttcgatggctgcaatcaacagggagatgaccagacgtggtgctcggtttgatggcggtagaaacgattggcgatctaatcggtgggtcggacacttcgggcgggtggctcgaactttccggtggagtcaagagggagaagttgcagggatagcgaagtctcttgtttatggtgagcctggtggaggcttatcggggcagctcggcgtgagcggcgaaatgatcaactcaagtccgggtgcatggagattcgcgcatggtacaaattcaggttggcgtgtcatattcgccaaggtggagtttgttagagtttgtgtcgaatatgtattcgtagtcggttacagtttaggacttggagttgtaataggtattaggagtagactatgtgtactctctcaaccgctcaaggcagtagcaaaaggagcaagcgtggaagaccagcgattgccagattggcctcactatggaccagatccggtttcttctaagaggaactttctctgcgactgtagacaggattttgttgaccttgctggaagtgaacaagctgcacaaacacatgcagttggcgcaagactgaaagaaggctgccatataaatcgcagcttactgactcttactactgtcatcagggagctaaggaaagcgaagtgtgggttgttcgtcacccatagggtcatgccaattgccaagattgatgttgggcgttcggtttag

SEQ ID NO: 83461 - DNA, 1156 bp, Oryza sativa
  Clone ID: PAT_MRT4530_82790C.1
acgacattactaacccgggtcacccagcccgtggggatcagccacgtcgggagacctccaagctttcatgacaaggcatttcgaaagccgacacaggtttaccatatgccgacgagaggggtcccagaccaacaacaggaaacgatccttaggtgcaagagcgggaaaccgtacacccggtacgttccccggtccgcggttttggaaattcatttagttcgcaagcaccgacccaggtgtcgggtttttccaagtcttttgtaaaactccagttttacccaagttgttactcagattttaagtttgaaggcgaccgtcgatactcgcacagagtgcacgagtatcgaggcgcaactgggtggttacaaggggacatgggcgcggcccaagagaaatggagcggtccggccaagctaaatgggccggccggcccaaggcggcccaaactcgcgcgcgcgcgggagggaggagagagagagccggtggaccgggctgaccacgcgcggtcccgggtgggacccgcttgtcagcggctcggctcaccgtgaggagggagcacgcgacgcacgcgcgcgggcggggaagggacgcggtgcatgcgcgcggtccgcggtggacgcaagtgcggcgggcccacgcgcagcctcacggctcgcggtggatcacgcgcacgcggagggaccgaccggggtcggcccgacccggtctggctgagctggcgccgatgtggcgcctacgtggctgccacgcgggccggcgggaggtagacgacgacccggccgcgaatggacggcgggtggcggcggtgagcggcggarcgaaccacggtgatacaggcaaaagcgagcacaccgggcggttgcacgggacgaggggagacgagccaacggctcggattcgccggaggttgctcgacggcggcggattgcggcggcggcaaccggtggcgagggaagagggaaacggcgacgaggccacgaggggccgattcccggcggtgagagcatctacgcggcttcgggaactcgacgctagcgtcggattgggcggaactacgccgagcgaggccggcgacgagcgggtgctacggagctcgggcggcgacggcggcgagcacacggcgagcgacggcaacggtcggggcggcgccggctaa

SEQ ID NO: 83462 - DNA, 201 bp, Oryza sativa
  Clone ID: PAT_MRT4530_82791C.1
acgcgcgcgtttttaggttatcgccaacattcagactggagggagctgctcgtggagccgccatggactggtggagggccgggccaccgtgaggatgcttgattcacacattgattctacctttcttgcgcttgacggcgacgctcatggccaatgggtcactgtccccaagaagaacattggcctttgtgacgcccacat

SEQ ID NO: 83463 - DNA, 567 bp, Oryza sativa
  Clone ID: PAT_MRT4530_82792C.1
catatacaatagattccgttcatcatattcatctattcgacgggaagcctttatatgtgcaggttactatggttctcatgcctcctttatatgtgccggtatactcatggctctgctgccagtcccggaatgaagagtttgtcggctctgtttaaagtttcgaaattccatcgattaaaaaacggcagttttttcttaccataatttatagagaactccagctacaaaggtgactgacaagcaccagttttaccaaggaatgtgttgcagaccggccatggtgcccaaacactggtatttggtaaggtggctgaaacacggtgttacagtcaggtgctcagggctccggcaatatgtgattgctgtgatcctctcctgtgacactggcactgccatcagtgacaccgttaggaaggcttgctctgttagcgatagctgggctggaatacggggagtatgaagaagccgcgctaccattgttgttcctagttcgtccagcggtactacttcttgttgtttttgtgcgagctttgcgtcccttgcccatgcacttctcgaggtgagggg

SEQ ID NO: 83464 - DNA, 265 bp, Oryza sativa
  Clone ID: PAT_MRT4530_82793C.1
tgaatgctcgaccacgtagagagagaaagaagagagagagagagagagagagagagagagagagtgaaatgatggagctcatgagagggaagagatcactttgggttcagaacaaactatgaatatgcagggtactgattaacagctaacggataaatatatttggttttggttggggaagagtataaacttatgtaaatcaagcaaaacagttgttccaagattggacaatttttggatcttgaaattcaaaaaaaaaaaaaaa

SEQ ID NO: 83465 - DNA, 219 bp, Oryza sativa
  Clone ID: PAT_MRT4530_82794C.1
atgcgggatgcggcgaggcccaagaagagcgtagcggaggagaagtcgaagggggagaggaccggggacgacggagtggaggaggaggtgttggcgatgaggtccatggaggtcggcgagaggagtagcccgtcgttggcacggccatggcccgcgcagtggttggcacatgtcatgtggacctacatggcggtggatcccacaattttttttgtgtga

SEQ ID NO: 83466 - DNA, 196 bp, Oryza sativa
  unsure (1)..(196): unsure at all n locations
  Clone ID: PAT_MRT4530_82795C.1
tcagagcttcttcttcccagctgggccatcgatcttgttgacgaaggcatggccgatgcccgggctgtgccccgggttcgttggccggacatcgtcggcgtcatcgtnggcactattgacgacggcgtgaccgatacctgggctgtgccccgggttcgtcgggcggacatcatcggcgtcatcagcggcattgacg

SEQ ID NO: 83467 - DNA, 393 bp, Oryza sativa
  Clone ID: PAT_MRT4530_82796C.1
atggacgagagggagttccggcggatgctcgagctcttccccgtcgtccgatctcgcgactactgcgctgaatcaggggcatcaagcaaaggcagcacacagcaatcacgggctcaggaggcaacaaggggcaacaaaaatgagtcatctgacgccaaactgagggattttattgaggcgcggcgtgctggcgctgttgataattctgattgctggttcttcaagcttgacttcgagtccaccatattcaggcaggagaacagtgtctccttccttgagagcaacagggatcagcttgccatccttgtcacgttcgccagggccaacagccaccactttaccagagttgagctggattcagcggaacattcagagttaaacaatcaacattag

SEQ ID NO: 83468 - DNA, 162 bp, Oryza sativa
  Clone ID: PAT_MRT4530_82797C.1
ctcgacacctgtacccttcttgagtggcaagttgagactgaccctgagcagttcaccatcacacctcatgtcatcaggcagaaaacaaataacaaaacaatggacagaaaaccagcacaacctggacaggtgacctctagtgcctggatccagtgttcctga

SEQ ID NO: 83469 - DNA, 466 bp, Oryza sativa
  Clone ID: PAT_MRT4530_82798C.1
tcgtaacttgatccctgttatattacatgctgcagccagggagtatgctcggaccattgcaaacaatatatcagactgccacaaagccggcaagatcggcgacaccataccagacacggtaaaggacacataatgtccgctgttcaacatgatgataacactcatggtcagggaacaccttgcgatagcgcctttattagacacacacagtggtgagatgacaagatacctataaaaacataataccatcgatagcaaagctcaacatatactagggacatgacaaataaagactggcagaggacgttatgcttggtaacaatgcgaacatgttctttgaaccactcaaagcagataacgacgggtgtggcgaaaaatggggcacacacaggagacgttgactgacatgatacttgatgaggatattgagaagagaccacagagcatacttgatgggatctctaat

SEQ ID NO: 83470 - DNA, 818 bp, Oryza sativa
  Clone ID: PAT_MRT4530_82799C.1
ctagaacagtttcaggcattttcattctcatgaaagctgacataaatccaatcacaaaaaaaccgatcagttgattggaactgtcgtctgttcgggaggatgtaataatctgaaataatgcggctagctcatgtctattgatattatcgtctatcacaattagcagaatcatacaagaaccagcaatcagaattatcaacagcgccagcacgccgcgcctcaataaaatccctcagtttggcgtctgcagatctttgaacaatatctggctataattcatgatcgtttctcataggcattcagaaatctttgagcagcatctaggttcagctctttgtaaacctggcacagagaacaatatcgtgagatctcaaggcagttttgcgtggtggtggttattgaagtgatggctgggagtcaagtccatacaagtttcttatgggcttcttcaaatgtcttgcagaacaactttgcctttggttgctccaacctttttctcagcaaccatcttcaattttttcatgaattgatcagatgactcatttttgttgccccttgttgcctcctgagcccgtgattgctgtgtgctgcctttgcttgatgcccctgattcagcgcagtagtcgcgagatcggacgacggggaagagctcgagcatccgccggaactccctctcgtccatggcgccgcgcgccgccgctactccggcgatgagtccgcctccgcccgcgctcgtagggttcgatccgattcgagcgagctcctcctctcccgattcgttgctctctcgctctcgaagcctcgaactcgctggagac

SEQ ID NO: 83471 - DNA, 181 bp, Oryza sativa
  Clone ID: PAT_MRT4530_8279C.1
gcaacgaaaacaacatcatgcacgcgcccggccgttccgacctccaactaacgcccacgcgccacatacgtctaagaagaacgtaccgagcggcgatggcccgtctcaggaaaacccgaccggggtgggcccgccggctcgcggcgagtcccgcgcgcggcgcccgcggaatggcgcataa

SEQ ID NO: 83472 - DNA, 453 bp, Oryza sativa
  Clone ID: PAT_MRT4530_827C.1
cgcgcactgtttgggaaggcgatcgcttttttgtcctaaaagaactagtatctccccatgggtataaatatgtacacccggggtcattataatttagctctcgatcaataatactctcggcgcatcgccaccctcttttctgaggtttttacttatcaaccgacgaaatttggcacctgacgcggggctgcatctgttcagttcgatctccggcgaatgggtaactcctacgttccgccggtgcaggcaattgtcttgtttacgttggtgtcgtttaaggctgcatcagtacattcgacctcttggattgctccggtttggatgatatatttgtctgcctatttatcatatgtcttagttagtctaggcttagtatctcaatttagctctatcgattgtctctcgctttagggtttctgtcggtatcggctaaattgttttacaagattagat

SEQ ID NO: 83473 - DNA, 732 bp, Oryza sativa
  Clone ID: PAT_MRT4530_82800C.1
ctctagaacagtttcaggcattttcattctcatgaaagctgacataaatccaatcacaaaaaaaccgatcagttgattggaactgtcgtctgttcgggaggatgtaataatctgaaataatgcggctagctcatgtctattgatattatcgtctatcacaattagcagaatcatacaagaaccagcaatcagaattatcaacagcgccagcacgccgcgcctcaataaaatccctcagtttggcgtctgcagatctttgaacaatatctggctataattcatgatcgtttctcataggcattcagaaatctttgagcagcatctaggttcagctctttgtaaacaagtttcttatgggcttcttcaaatgtcttgcagaacaactctgcctttgttgctccaacctttttctcagcaaccatcttcaattttttcatgaattgatcagatgactcatttttgttgccccttgttgcctcctgagcccgtgattgctgtgtgctgcctttgcttgatgcccctgattcagcgcagtagtcgcgagatcggacgacggggaagagctcgagcatccgccggaactccctctcgtccatggcgccgcgcgccgccgctactccggcgatgagctccgcctccgcccgcgctcgtagggttcgatccgattcgagcgagctcctcctctcccgattcgttgctctctcgctctcgaagcctcgaactcgctggaga

SEQ ID NO: 83474 - DNA, 516 bp, Oryza sativa
  Clone ID: PAT_MRT4530_82801C.1
atgcctcctgtcaacgcgggcacggcggcgccggactccggcaccggcagcattgccgcgaacgacggcgacggcgacctgcacggcgagcagagcaagctggtcgcgatctccgacgaggcgccaaacgtcgacagggcgctcgccaccagccgcccggcgaccgccgacggcgcaggcggcggggacgacgtctcgccgagactgcggcggcgtcagcggcggcggctgctggagatcaagaaacgtggtctggaggtcgaggagcagacgctggcgctggagcagcggcggctgaggtgggccgccgcggacgccgaggcgcgcagggaggaggacgcggagctggagaagatgcgggtggagaacggcgtggcgagggcggagaacgcgcggctgtggaggcggctgctccggcggcggcgggaacgggagctcggcgtcggcggcgtcaggtcgaacaagtgtcgcgacggcgctgcagcaatggaaggagaagagaaatctgtaccgtag

SEQ ID NO: 83475 - DNA, 374 bp, Oryza sativa
  Clone ID: PAT_MRT4530_82802C.1
ggggggaaatttggctaaaaaaacaaccccgggataggggccccatggaaaccccccacccttcctgaaccggaaaagcctgaaaaagggaaaaagggaagggcataaacccccaaagggcccaaaaccttggtgaaaaaaaaaaacgggcaaaaaaaggcccggaacccaattggaaaaaaaaaaaccggggggggagtttaaaaccccccaaaaaacattgggaaaaagagctccgggcccgccccgggttgaaatccaccgaagggccccttggatggttctcggccccccttgagctttaaaagggaacccggggcccgggggatttcccaatggattaaaacactttccggttgccccaaggggggggg

SEQ ID NO: 83476 - DNA, 624 bp, Oryza sativa
  Clone ID: PAT_MRT4530_82803C.1
atggcgaaggccctggaccaggaagaaaagcttggagctgcgcctgcaaggccgaagccccttctgccattgcttgcgacatctgaccaagtggcggggggcgtacttgggctcgaccagccgaacttgtggctgtacaagaagggtcgggtagaccttgggtgggatgtccgccgaatattggagaatggggaccgaggcgaccttggcttgccgggccgcttcgtacgcctgctgttgctcttgcatttgacgaagcatgtcctagagtcgcgccatgttctgacgcatggcccccatgtcggcttcagcttgcgcttcgaggttggtgttgacttgtgcggcgccgcctttgccgtatcaacagtgttcggcgcctgccccgtcgaagcggcaggagccgaaggtggtggttgcggcgtaggggccgaagtcgatggagccacaccagcttcggcaccaagcaccgaaggctccgctccctcttcgactgccatctccactcctgcttcactctccttacaccttgcaaccttctcctctgcgaccttcttcggtggcattcgctctcagtggtttccctcagaggtccccacggtcgacgcctgccgcttgtcgaaatga

SEQ ID NO: 83477 - DNA, 4613 bp, Oryza sativa
  Clone ID: PAT_MRT4530_82804C.1
atggcggagattatcaagcaaagacggcgaagggcgaaggatcgtgctggtatcccacaaggttggaggcatcttgggtgaagactatatggcgaagaatgtatggcgaaggcggatggctttgccataacaagttcaacttcaaggaggcccaagaggccatctcagccgatcaagcccaggggccactgggccagcgtttgccagtcggcccactagaggcccatgtacctcaattacactatatacccatgtaaatgtccctttcataagggaaaccatttgtcatttcgacaagcggcaggcgtcgaccgtggggacctctgagggaaaccactgagagcgaatgccaccgaagaaggtcgcagaggagaaggttgcaaggtgtaaggagagtgaagcaggagtggagatggcagtcgaagagggagcggagccttcggtgcttggtgccgaagctggtgtggctccatcgacttcggcccctacgccgcaaccaccaccttcggctcctgccgcttcgacggggcaggcgccgaacactgttgatacggcaaaggcggctgcaacgacaagggcgctccagaccagggcggagatcctttcgacaagtgaagtggtggtgccccaagctgcttcgccgcagcaggctacaacttcgaccgcgcttaccgccgcacaagtcaacaccaacctcgaagcgcaagctgaagccgacatgggggccatgcgtcagaacatggcgcgactctaggacatgcttcgtcaaatgcaagagcaacagcaggcgtacgaagcggcccggcaagccaaggtcgcctcggtccccattctccaatattcggcggacatcccacccaaggtctacctgcaagcgccgattcaagcccttccgtcacaagctgtgcaagcaccagcgtactgcgccggacagcgttcggtcgcaacagtacacccgacccttcttgtacagccacaagttcggctggtcgagcccaagtacgccccccgccacttggtcagatgtcgcaagcaatggcagaaggggcttcggccttgcaggcgcagctccaagcttttcttcagtagctcaaccaaccctaaaacatttcagaagcaaccccttcggtccagctggagggaaacacaagtcaaggtgcacccagttggctaccatcgaaccttcctggtccagggccttcgccatggagtcaaggaccgtagttcgacttcagcaatgctactcaagcaccaaccatccgaccacaggcaccgacaccaagcttcggagcgaatcaggcgccgaacaagatcgccatggcatggacccagccttcgttcgacccatccatggcggcacaccaagcgtcaccatttagggccgggcagccgaacactatggcccaactgcacgtgcaagccatcacatcgcacttcgccacgccatatccaaacggtcctccgcagcaaggtgccgtgagaaagacggggggcgaaacggggctgccgctaagtgggggaatcaagattcgtccaattccaccccaattcaagttcccacccattccgcgatactcgggcgaaacggacccaaaagagttcctgtccatctacgagtccacgatcgaagccgctcatggtgacgaaaataccaaggcaaaggtaatacatctcgctctagatggcatcgcacgctcttggtacttcaatttactagctaacagcatttactcatgggagcaattgtgcgacgtctttgtccttaacttttgaggcacctatgagaagccaaagccgcagcaacatctactcggcatttgccagaggccgggagagtcgataagggagtacatacgttgcttctcgcaagcccgatgccatgtttaggacataactgaggcgttcgtcatcaacgccgcttcggctgtgttgcttgagggcgaactcataagaaaaatcgccaataaggagccgcagacactcgagcacctgcttcgcatcattgacggatacgcaaggggcgaagaggataccaagcgacggcaagcaatccaagctgagtatgataaggcctctgtcgctgctgctcaagcccaagcacaagcacaggtcgccgaatcggctcctctcgctgttcgctagccacagccagcgaaccaaggataatcgccaaggccaggtcaagctcccatgacttggaggaaattcagaaacgaccgtgtaggcaaggccgtgatggctgttgaagaaattcaagcactccgcaaggagttcaacgcccagcaagcaagcagccatcaacagcccgttcgcaagaagtatttgaaccagcagatctctttcgggccagaagatgccgaaggagtgctgttcccacatcaagatagagctatcttggccgaggtactggcttcgaagttcagcgaatcctagtcgacggaggaagttcggtcgacgatggggttgcctatcttagccctcacccaagcaccggcggcttcgtggttttagcggagaagcagttcaagttctaggccaagcacacttggtggtagccttcggcacaggtgaaaacaggggcgaagagcaaatactgttcgacgtcgtggacatcccgtacaactataatgcaatcttcggccgcgcaaccttgaacaagttcgaagccatctccgaccacaattatctcaagctcaagatgcctggccctgaaggagtgatcgtggtcaaggggcttcaacattcggctacatcaaagggcgatttggccgtaatcaacagagcagtgcacaatgttgaggccgaaccgcatgaccgggtgaagcacgtgccgaagcccgcccctcacggcagggtgatcaaggtgcaggtcgacgacgcctatcccacaagacttgtatcactggggggtgacatgggcgtaagagaagctgagatcatcctagaggtgctcaagaaaaacattgatatcttcgcctggggccccgacgaggtgggaggtgtttcgacagacctcatcatgcatcatctggcgggcaagccggatgccaagccaaggaaacaaaagctgcgcaagatgtccgctaatcgccaagaagcagcgaaagccgaggtgcaaatgctgtgcaaggctagggtgatccaggagatcgaccaccctgagtggttagcgttcgcgagggcaagttgttgggttttctcgtttctaaaaggggtatcgaggcgaaccccaaaaaaaatcgatgccattcagcaaatgaaccccccgtcgagcgtacgtgaagtacaaaagctcgcaggccgaattgcggcactcaatcgattcctctcaaaagcagccgaaagaggtttgcccttcttcaagaccctctgggcgcgggaaaatttacctgggcacccgaatgccaagcagcgttcgacgagctgaagcaatatctacagagcacatctgctttggtcagcccagcactgggaagtgaattgctactttacctagcagcttcgccagtggcggtcactgcagccctcgttcaagaaacagagtcaggccagaaaccagtgtatttcgtcttcgaaactttgcaaggggcgaagatacgatacatcgaaatggaaaagcttgcttacgccctagtgatggcttcgcgcaagctccaacactactttcagggccacaaagtcacggtgccatcgcagtatcttttgggcgaagtgctccggggcaaggaaattactggccggctcagcaagtgggcagcggagttatctcccttcgacttgcattttgtcgcccgcactgccatcaagtcccaagtcctagctgacttcgtggccgaatggacaccgacattcgcccttgaaccctagcctgtcgaacaaccttgggtgatgtactccgacggctcatggtcacacaagggggcaggcgttgcggcagtgctcacttcgccagggggcgtgtcgattcagtacaccgcaaggctaaagttcgacacaaccaacaacacggcagagtacgaagctatactgttgggcctaaaaaaggcgaaagctttgggggttcggtgcttgctcatctgaactgactccaaattggtggcaagtcatgttgacaaatcctttgaggcagaagaagaagggatgaagaggtatcttgaggctgttcgatctatggaaaagtgtttcgccggcataacggtcgaacacttacctagaggccagaatgaagaagcagacgccctggcgaaatctactgcttgtggaggcccgcattcgccagacatcttttttgaggtcctgtacgcaccaagtgtgcccatagagatcctggacatcatggcaatcgaccaggcagagctgtgtgaagacctaaaggactggtgaaccccgttcgtaaaatacctcaagaacggttggctcccggaggatgaagcagaagcgaagagccagctatattgctccggggtgctccaacccttgcttcgctgcatctcctttgccaaaggcgaacccgattcgaaaccgcaccaccagcctgctgagtccactcgaagaagttgaaggctgaggcgtcttcggcagggactcctcgcacccttgcacccatgtcagta

SEQ ID NO: 83478 - DNA, 328 bp, Oryza sativa
  Clone ID: PAT_MRT4530_82805C.1
atgtctatttttactccctattgtttatgtgtcgggcctggcatgcggcccatcgtgccgtgccgggccggcccaacgtgccggcggagaggcccaggcacggcccggtggccgggccgggccggcacgggcccgacccttgacgggccgtgccgtgcttgggccgggcctaaacgccgtgccatgggccaggccgtcgggcctcgggccttttggccatctatagatcgctcgcacctccccgcttgtggaccaagttttggcactaccaaatatttggtaaggtaaaattgcatttgatcatatttggtttgctgccaaaatgtaa

SEQ ID NO: 83479 - DNA, 621 bp, Oryza sativa
  Clone ID: PAT_MRT4530_82806C.1
cattagtcctacaacaacatggcatccataacacttgccccatacttttcttcacagtttgcttgttcctcttgtgcgatggctccctagcccaccagctattttgccaaagcactagtcattggcagagttctcgtcggggaagtccgagaggatgtagatttgatagggttgcaagcatttgagccaattcggagtgtgaggtctcaagctgacacatctgagttcttccatgtctctaatgagttgcttcaatgtaccggagtatctgatggacgacgagttattgaacctagaggcctactactacctcattacactaatgatgcactttctagcatatatgatccaagggagaggtataacaggtccgacttttccagcctgccctcgagacctaccagcagcatgctccaacaatcagggcaagcccaattgaccgatagtcatagccaaagccataagttcaaggatgaacattacaagattgaccgttttagacaaggagatgttatcgcgtcgcctgctggtgtagctcattgtcgctacaatgatggtgaagtgccggttgctgccatatatgtgactgatatcaacaacgaggctaatcaacttgaccct

SEQ ID NO: 83480 - DNA, 414 bp, Oryza sativa
  Clone ID: PAT_MRT4530_82808C.1
ggaacaacaaacctaggggggttccttaaacttattaaacccatcggggttcagggaaaaaaaaaacaatcattggccacgggggccagggaaggggatccccctatgggggggggggtttcgggccaagttacatcatgcataaacattttccaaaaaaagacatacaatttttctcctagacggaatcagcaaacgatccaggggggggccccccagctctaattttttagagggggaccaagacccaatttttctataaaaccacccagccttgggcccaagtttggaaaaagctgctatattcgggggtccacactctgggctgaaaaggcccacgagcaatgccgatgctgagctcacagagattgccccgcatgaggcccccccggaactccttggaactgttttttt

SEQ ID NO: 83481 - DNA, 755 bp, Oryza sativa
  Clone ID: PAT_MRT4530_82809C.1
cggctcggccgagctcaacggaccggccggcccaagacggcccaagcgcgcgcgcgcgggagggggagccggtggaccgggctcaccacgcgtggtcccgggtgggacccgcttgtcagcggctcggctcaccgtgcggagggagtatgcggcgtacgcgcgcgggcggggctgggacgcggtgcacgcgcgcggttcgcggaggaacggatgcggcgggcccacgcgcagcctcacggctcaccgcggaccacacgcacggggagaaacggagggcgcggctggccgggtcggcttatccggtcgcggccgaggtggcgccgacgtggcgcctacgtggcagccacgcgggccggcgggaggtagacgacgacccggccgcgaatggacggcgggcgacagcggcgagcggcggagcgagccacggcgataccggcgaaaacgagcacaccgggtggctgcacaggacgaggggagacgagccaacggctcggattcgccggaggttgctcgacggcggcggattgcggcggcggcaaccggcggcgagggaagagggaaacggcgatgaggccacgaggggccgattcccggcggtgagagcatctacgcggcttcgggaactcgacgctagcgtcggattgggcggaactacgccgagcgaggccggcgacgagcgggtgctacggagctcgggcggcgacggcggcgagcacacggcgagcgatggcaacggtcggggcggcgccagctaa

SEQ ID NO: 83482 - DNA, 455 bp, Oryza sativa
  Clone ID: PAT_MRT4530_8280C.1
tattctttcgttctttttttttttttttttttttttttttttgttttttttttatgaatgcctaacaccataaacccatggccgctgaagaggtggtgcaaaaaccccaaaacaaaatcaaagcagaattgttaatttataaaccattcacaagacaaaactaccaaagtagccccccggcggggggacaaaaaaacttccccagcgttgaccggggaacctccccccttcgcggggggaaggacccccccgaagggggaaaaaatggcttttgtccaggacccaagggaacaaaacgaaaagaggatcattccccccaactaccctgctatccccgccggtcaaagcttctttggccagggggatgggttgaacgctgaaacaaagacccgcctattggggtcaaagaaaacatggcggggggccccgaacacaaaaaaaagcggggtttttgg

SEQ ID NO: 83483 - DNA, 272 bp, Oryza sativa
  Clone ID: PAT_MRT4530_82810C.1
gcctaaggattcagcatggttccgttgtactacagggacatgattgttcttgttgctttcggaggaaacaaaaaggaaccatctgataaggtcgaagtactagtggtactgcaaaacgagcactgcttcagctggcggtctgcccctgatgttgaacctttactgcatgaggactcacctccaagctcataggatctttctgatcacctgaacaacaattgtgctcctctgtactctactggatctgtagcctgagcatactcttttcctcc

SEQ ID NO: 83484 - DNA, 489 bp, Oryza sativa
  Clone ID: PAT_MRT4530_82811C.1
atggcgatgggaggagaagagagggagggcgcctgggctttaagggcggcaatgttggtttggaaccgacttgggcggtcaaggcgtgagctggcgctcggcgctcgcgtccaattggcgacagggcggagggaggatgacgccggcgggaggaaaaggggaaaaggagggagggaaaggggggctcgcccctttcttctttgggaaaaggaggaggggcgcgggggcgtcgcggcagagggaggagggctctgcctccgtcccttggcggcttgcgcgcggagtggcggggccgaggcgatgacgacggcgatgacggcggggcggtgtggagcggggcggcgacacgggcgacaggcgtgggcaggcgctgactacagggcgaccaggcgggtgatggcccctagccgaaaagtggttcggttcctacctggcgagctagggataccctccacggtggagcgttggccatggcctgaggagtactag

SEQ ID NO: 83485 - DNA, 630 bp, Oryza sativa
  Clone ID: PAT_MRT4530_82812C.1
atgaggaggggcgctgtgacgagaggccgacggcgcgggagtaatctctccggcctcgggccgaggaagaggaagaaaagggcgcgcccggagtccccttccgcgtccttgctcgtgccggctcctccgacacgcgcaacgacgaacggcgacggcgaacagagcacgggaggcggcggcaatggcgtggaggcgaatgggagaggaagggaaaggggggagctgggttttaagggcggcaatgtcggtttgggaaccgacttagggcggtcaaggcgcgagctggcgctccggctagcagccaaaacggcgacagaggtgacgccggcgagagggaaaaaggaggaaaatggggaagagaaagggggcttgccccttgcttctttgggaaaaggaggaggggagcgggggcgacgcggcagagggaggagggctctgcctccgtctcttggcggcttgcgcgcggagaggcggggccgaggcgatgacgacggcgatgacggcggggcggtgtggagcggagcggcgacacgagcgacaggcgcggcaggcgctgacgacggcggcgaccaggcggtcagccaccacggcacgcgcgcgcgggaagcaacgggcggcgtggcggtttga

SEQ ID NO: 83486 - DNA, 1795 bp, Oryza sativa
  Clone ID: PAT_MRT4530_82813C.1
atgacattactaacccggatcacctagcccgtggggatcagccacgtcgggagacctccaagctttcatgataaggcatttccaaagccgacacaggtttaccatatgccgacgagaggggtcccagaccaacaacaggaaacggtccttaagtgcaagagcgggaaaccgtacacccggtacgttccccggtccgcggttttggaaattcatttagttcgcaagcaccgacccaggtgtcgggttttccaagtcttttgtaaaacccaagttttacccaagttgtttttcagattttaagtttgaaggcgtccgtcgatactcgcactgggtgcacgaatatcgagacgcaactagatggttgcaaggggacatgggcgcggcccgagagaaaggaggcggctcggccgagctaaatgggccggccggcccaaaaggcggcccagagcggcccaagacgcgcgcgcgcgggagggaggagagagagagccggtggaccgggctcaccatgcgcggtctcgggtgggacccgcttgtcagcggctcggctcaccgtgcggagggagcacgcggcgcggcactagggtgggggagggacgcgatgcacgcgcgcggttcgcggtggatgcggatgcggcgggcccacgcgcagcctcacggctcgcggtggaacgcgcgcacggggagggactgaccggggtcggctcgacccggtcttggctgagctggcgccgacgtggcgcctacgtggctgccacgcgggccggcgggaggtagacgatgacgccggccggaacggacggcggacgacggcggcgagcggtgagcgaaccacggcgatacaggcaaaagcgagcacaccgggtggttgcacgtgacgaggggagacgagccaatggctcggattcgccggagggagcttgacggcggcgaatcgcggcggcggcaaccgacggcgggaaaaggggaaaacggcgacgaggtcacgaggggccaattcccggcggcgagagcatccacgcggctacgggaatccgatgctggcgtcggattgggcggagctacgccgagcgaggccggcgacgagcggcgcttccgagctcgggcggcgacggcggcgagcacacggcgagcggcggcaacggtcggggcggcgccggctagctacggggaggctactcgcactaccgtgcgggcggggcgcagtgacgagaggccgacggcgcgggagtaatctctccggcctcgggccggggaagaggaaggagagggcgcgcccggagtccccttccgcgtccttgctcgtgccggctcctccgacacgcgcaacgacgaacggcgacggcgaacagggaaaaggaggaggggagcgggggcgtcgcggcagagggaggagggctctgcctccgtcccttggcggcttgcgcgcggagaggcggggccgaggcgatgacgacggtgatgacggcgggacggatttgagcggcgcggctcgggcacgcgcgctggcttgcggggccgggcggctgcgcggctgcaggcgcggcagggcagcggggccgggcggcgcggacggcacagctctcgcgcatgcgcgcgcggcgcgcgggcggagcggagggaggggcgctgggcgcggctctcgcgcacgcgcgcgcggcgcgcgggcggagcgggggaagagagagagagagagcgccgggagggagggggagatgggccgagagaaattcagcccatcgaccctggggaggcaaaatagacttttgcggagggattcgatttggaaggattt

SEQ ID NO: 83487 - DNA, 3398 bp, Oryza sativa
  Clone ID: PAT_MRT4530_82814C.1
atggggcggtccggccgagctaaatgggccggccggcccaagatggcccaagcgcgcgcgcgggaggggaggagagagagggccggtggaccgggctcaccacgcgcagtcccggggtgggggagggacgcggtgcacgcgcgcggttcgcggtggacgcggatgcggcgggcccacgcgcagcctcacggctcgcggtggaacgcgcgcacgggaagggactgaccggggtcgactcgacccggccttggctgtgctggcgccgacgtggcgcctacgtggctgccacgcgggccggcgggaggtagacgacgacgccggccggaacggacggcggtcgacagcggcgagcgacggagcaacccacggcgatacaggcaaaagcgagcacaccgggtggttgcacgtgacgaggggagacgagccaacggctcggattcgccggagggagcttgacggcggcgaatcgcggcggcggcaactggcggggagggaagagggaaacggcgacgaggtcacgaggggtcgattcccggcggtgagagcatccacgcggccatgggaatccgatgctagcgtcggattgggcggagctacgccgagcgaggctggcgacgagcgggtgctacggagctcgagcggcgacggcggcgagcacacggcgagcgacggcaacggaagaggaagaagagggtgcgcccagagtccccttccgcgtccttgctcgtgccggctcttccgacacgcgcaacgacgaacggcgacggcgaacagagcacgggaggcggcggcaatggcgcggaggcgaatgggagaggaaaggaaaaagggagggagctcgggtttatagggggcggcaatgtcggtttggaaaccgactttggcggtcaaggcgcgagctggcgctccggctagcggccaaaacggcgacaggagggagggaggatgacgccggcgggaggaaaagggggaaaaggagggggagaaaggggcttgtccccttgcctcttcgggaaaaggaggagggagcggggcgtcgcggcagagggaggagggaggctctgcctccgtcccttggcggcttgcgcgggagtgacggggccgaggcgatgacgacggcgatgacggcggggcggtttggagcggcgcgacgtcacgggcgacaggcgcgggctggcgcggcagagggtgacggcggcggcgaccaggcggtcggccactcggcacgcgcgcgcgggaaacaacgggcggcgcggctgggcacgcgcgctggctcgcggggccgagcggctgcaggcgcggcagagcagcggggccgggcgacgcggacggcgcagacgacgcggctcgggcggggaaccacgcgggcgcgcgcgcgaacgacggcgtgcgggggccgtcttcgcgagcggggagctcgccagggagaggagaaggagagcgaggggaaggggcgctcggcgcgccgcagccgagccatcgtcgttgccgccccgcaccccaccgcccttcccaggcctccctctggccggatctgggaggggaggggaggggagtcgccgcgccgcaccgggagccgcatcgtcatcgccgtccacgccgccgccgccggcggtcaattggcttcaagggtcatgtccgcctgtgaaaatcagacctccacgtcgagaaaaatcaaccaggaaccagcactcgtcggagttcttcgttctgacctgagcaagcccctgatcaccatggccgagagtgttgtctctgtcgatgctgtcgacggcgagcaggagcagcagcagcggctgcagcaggaggagttgcagctggctgacctgcccaacgacgccttgcggagcatcctgctccgccttccgtcggagccggggtacttggctgtcgccgccgccgtcaccaagaactggcgccggcaggtcctcggcagcaacggcagcttcctccgcgccttccgcgcggcgcacggcggagtgcctcccctccttggcttcttctgcaacaggagaaatctgccctgtccgttcttcaccagcacggtggatgccggcgtggtggatctgtccccaccggccgggaaacagcggccgttcatccacgacgtgcgccatggccgcgtgctactcgacgacggggaggacggccagctcctggtctgggaccctctcgcccgccgccgggatatcatccccacgcccagatgctacttcaccaacgatgacagctgcggcgctgccataatctgcggctgcgatggcctggaacacgtcgtcggcgccagcgtcggtggtggtgactgccatttggcgccgtaccgtgtcatcgttgcattcaatgaccggcccaactatcgttcggacgagtggaaccatgaatgcatctgcactagagtctggatctcggagaccaaagagtggagtgaggtatactccatgagaggaagttgcgactttgatttcatgccgagcgccctcgtcgccggtgccatccactggctggtgggggacaccaatagtgttcttcagttcaatctcattaccaaaaagcttgccttgattcagaccccattggacatctcggaattcatgctctttccaactaaggatgggaagctaggcttcaccggtgtgctgggctctcacattatcttcttccacatggacattgccggtgatgccctcaccactatgaggacctggagtattcagaacgttattcaggtggaccacttcttgccaccctatattaacattcttaggactcgtcgttctttagcttctccatgggtggtggactattacgtctctgactctgatgaaggagaagaagaacacggtgttgatgatgatgatgagcctagggaaattctaccaacaatgcaacatgacaatgaggctagtggcagtcattccccacagtggagtgagtcatggtatgatgaagattttgaccaagagaaggacgcattgatcccaacagtcagcgaaaatggcgcggggaagggggcggccggccctaatagcgacgcgacgggcgggcggcgcggcgcggggcgtgaggcgcgacggcgacgggcgagcggcacgaggtgcgacggcgacaagcgacgtgacgacgacgcggcgcggccgggcgcgaggcgcgaggcgtcgacagtgacgggcgagcggcgcgcggcgcggcagacggcagcggcgacgcgacgggcgggcggtgcggcgcggggcgcgaggcgtgacggcgacggccgagcggcgcgcggcgcgacaggcgacagcggcgcggcagcaggcggcgatggcgacggcgacggctcggggcacgaggcgcgtgcggcagaggacgaggcaagggctagggacgctctcgaacacctagcgcgcaatgaatag

SEQ ID NO: 83488 - DNA, 380 bp, Oryza sativa
  unsure (1)..(380): unsure at all n locations
  Clone ID: PAT_MRT4530_82815C.1
agccttggttttttttttttttttttttttntttttttttttttttttgtttttttttttttttttttacaaaataaaaggccatttctttcttcagcatgggaaatgatgggtcgctacacttaactctgggggaggggggcctggaattttagggccccctaaagctctttgaaaattaacctttgggggcgcggacaaacaaaatggggacttccaaataggggtggaaaaccactgaaaaaacggaagctgggtttccttccctatttatatacgggggtgtaaaaccctgccctttcccggagaaaaaaggggggcccgccccgggcaattaaaaaacctggaaaactccgggtgggcccttttcccaaaaaggt

SEQ ID NO: 83489 - DNA, 940 bp, Oryza sativa
  Clone ID: PAT_MRT4530_82816C.1
ctcagaacagcccgagaatgcaaccgacgacacggacgaggaaacaccaacaacagcagcagtagcggaaccaacggactaacacccaacaccacaggcgacggctgggaaccaggacgaaaccatattcttcactccacttcatcttctctttaagagggggtacactttacccacacgacattactaacccggatcacccagtccgtgagatcagccacgtcgggagaccttaaggctttcatgacaaggcatttcgagagccgacacaggtttaccatatgccgacgagaggggtcccagaccaacaacaggaaacggtccttaagtgcaagagcgggaaaccgtacacccggtacgttccccggtccgcggttttggaaattcatttagttcgcaagcaccgacccaggtgtcgggttttccaagtcttttgtaaaactccagttttacccaagttgttactcagattttaagtttgagggcgaccgtcgatacttgcacagagtgcacgagtatcgaggcgcaactgggtggttacaaggggacatgggcgcggcccaagagaaatggagcggtccggccgagctaaatgggccggccggcccaaggcggcccaaactcgcgcgcgcgcgggagggaggagagagagagccggtggaccgggctcaccccgcgcggtcccgggtgggacctgcttgtcagcggctcggctcaccgtgcggagagagcacgcgacgcacacgcgcgggcggggaagggacgcggtgcatgcgcgcggtctgcggtggacgcaggtgcggcgggcccacgcgcagcctcacggctcgcggtggaacgcgcgcacggggagggactgaccggggtcggctcgatccggtctaggctgagctggcgccgacgtggcgcctacgtggcggccacgtgggctggtgggagg

SEQ ID NO: 83490 - DNA, 327 bp, Oryza sativa
  Clone ID: PAT_MRT4530_82817C.1
atggcggcggcgctagcgggcggcggtggggtggcggaggaggaggcgacaggcggtcgggggataggcgccggatccgcgttccccaaacgtgtcgaggccggcggccagatccggcggccggcggtcggaaggcgggggaggcagcgtcagctggcggtcaggaggcggaggaggaagcggccggcggtgggggaagaggctgtggtggccggatccgcgccccataggccagatccggtggccggcggtggccgctactcacgcatggagtcagaggccgccaccggacccgccggatggctcaccgatgacggcatcctgtag

SEQ ID NO: 83491 - DNA, 1516 bp, Oryza sativa
  Clone ID: PAT_MRT4530_82818C.1
atgggccgaccggcccaaggcacgcgcgcgcgggaggggaggagagagagagccggtggaccgggctcacctcgcgtggtcccgagtgggacccgcttgtcagcggctcggctcaccgtgcggagggagcacgcggcgcggcgctaggatgggggagagacgcggtgcacgcgcgcggttcgcggaggacgcggatgcggcgggcccacgcgcagcctcacggctcgcggtggaccgcgcgcacggggagggagcggctaaccggggtcgactcgacccggttttggccgagctggcgccgacgtggcgcctacgtggctgccacgcgggccggcgggaggtagacgaggacgccggccggaacggacggcggactacagcggcgagcggtggagtgaaccacggcgatacaggcaaaagcgagcacaccgggtggttgcacaggacgaggggagacgagccaacggctcggattcgccggaggatgcccgacggcggcgaattgcggcggcggcaaccggcggcgggagaagggggaaacggcgatgaggtcacgaggggccgattcccggcggcgagagcatctacgcggctacgggaatccgatgctagcgttggattgggcggagctgcgccgagcgaggccggcgacgagcggcgcttccgagctcgggcggcgacggcggcgagcacacggcgagcggcggcaacggtcggggcggcgccggctagctacagggaggctactcgcactaccgtgcgggcgggcgcagtgacgagaggctgacggcgcgggagtaatctctccggcctcgggctggggaagaggaaggagagggcgcgctcggagtccccttccgcgtccttgctcgtgccggctcctccgacatgcgcaacgacgaacggcgacggcgaacagagcacgggaggcggggagcgggggcgacgcggcagagggaggaggagctctgcctccgtcccttggcagcttgcgcgtggagtggcgggggccgggcgatgacgacgacgatgacggcgggggcggtgtggagcggagcggcgacacgggcgacaggcgcgggcagacgcggcagaggctgacggcggcagcgacctggcggtcggccaccacggcacgcgcgcgcgggaagcaacgggcggcgcggcgatttgagcggcgcggctcgggcacgcgcgctggcttgcggggccgagcggctacgcggctgcaggcgcggcagggcagcggggccgggcggcgcatacggcgcaggcgcgacacgggcggcgaccacacgggcgcgcgcacacgaacaacggcgcgcggggggagagcgagggggaggcgctcggcgcggcgcggctcacgcgcacgcgcgggcagagcggagagagagagggaaagagagagagagagagccggggagggaggggaagatgggccgagagagattcggcccatccaacccgggggaggcgaaatagacttttgcggagggactttcgggaaggattt

SEQ ID NO: 83492 - DNA, 2139 bp, Oryza sativa
  Clone ID: PAT_MRT4530_82819C.1
atggcctcctccaccaccgcctcgtcccagctcgccctcgccctcggcatccccggcctgggcggcctcctcatccccaccgacgccgccgccaccaccaccaccaccgccgagggcaacgatctccacgccgacgcctcccaccccgtcatccgcctcgccggcgccgtccagcactacaagtgggggcggcggtcgcggggtcttccctcgtcgcgcgcctcgcccggcgagggcgatgatggtgatgagaggccgtacgcgaagctgtggatggggacgcacccgacggcgcggcgcggcccctccgcgctcctcggccgcgacgtggcggcgaggtggggcggcgacctcccgttcctcttcaaggtgctctcggtcgccagggcgctctccatccaggcccaccccgacgccgccctcgccagggcgctccacgcgctccgccccgccacgtaccgcgacgacaaccacaagcccgagatggccgtcgccgtcaccgacttccgcgccctctgcggcttcgtctccgtccaggagctcaaggatgtcttgaggactgtacctgaggttcgagagttagttggcaaagaagaggctgtgaagcttatgggtgccaaagagcatgatggaggcatcggagtaaggtcatatctgcaatcagcttttactaatttaatgacagcaagcaaagaaacagtttctgaagcagtctcaaagctaaagagtcggctgaatattgagagtaaggttagaaccttgacaaagaaggagcagctagtgttgtcactggagatgcagtaccctgaagatgttggtgttttagcagcattcttctttaactatgtcaagctcaaccccggtgaagcactctatattggtgctaatgaaccacatgcatatctttcgggagagtgcgtcgaatgtatggccacatctgacaatgtagttcgtgctggtctgacccctaaatacagagacgtccaaactctttgctcgatgctgacatacaagcagaactacccggagattctgcgaggagttccagtgcaagcatatgtaacgcgctacatacccccatctgaggagtttgaagtcgatcgctgcctgctgccctccggtgaatcggtcaccatgtcaccggtgcctggcccatccatcttccttgtcatgacaggggaaggcaagattgaggcagattccatgcttgatgaaggaaaggcaaaggaaggcgatgttttcttcgtgccggcgcacaccgaggtcaggatccttgcttctggtcctgggagcatgcagctttacagggctgggcatcaaactgactggcacgcccgcatctcaccaatctttggacctgcacaggagctaagcagatctcccaggccgatcaacatcaaaaacatcacaaatcaagaaattcatccacacaacaaatttctcagccgagccaggcgccgctgtcgctgccgccgtgccaccgcggaggggagggtgccgcacgggccgtgccgccgcgtggcccgcgtcgccgcggaggggaggagagggcgccgggtgggccgccgcgccgccgcaaaggggagggcgccgcccgtcggcaccgcggaggggaaggcgccgcctgccggccccgtggaggggagggcgcgcgccgcagacgatggagatggggaggggagaagagggaggagagggggaggaggaggagataaggaggatacaggagggtgttcgacgaggttccctagccccttcccctcccctgccatgcgcgcctcgcgccgctcggccgtcgccgtcgcgcctcgcgcctcgtcccgccgcgcgccattgccgtcgccatcgccgcgccgcgtagccgtcgcgtcgccgctgctgccgtcgcgtcatctcgagccccgcgccgccgctgccgcgctgacgccgcctcgcgccgcgcaccactgccgcgcccgcgcccgcacctcgcgccgcgcgccgccgctgcccgcccgtcgcgtcgcccgtcacgttgaccgtcccgtcgccgctcgtccgtcgccggtgcgccttgcgccccgcgccgctgccgtctgccgcaccacgcgccgcgcgccgtcgtccgtcgcgtcgcccgtaccgtcgccgctcgcctga

SEQ ID NO: 83493 - DNA, 441 bp, Oryza sativa
  Clone ID: PAT_MRT4530_8281C.1
ggacaaaattaagcctgctcccaaacaaagcgtcttccataaaaacccctcccgggccgggcttgcttacaagtacttacacgccccccactttttttaaagccttatccacttttaccctggagggcccaaaaaaaactgccaacagacccctgggtgggtcatataatatgcctgaccgcccctaggcgtaaattggaaattggacacccaaatcaaaaacaatttatcaagccggtggtcgatctttcgtataaaaagaacatcggggttttccttaccccgcccccctggggctcctaaacaaactgagccccttgggggcctctccgggcaaaaccattttgggggaccccccccccaaaaaccccccgatacccggccccccccaaaaaaaccaggggtttttccaacctgggtgctggtttgaaaacacggggg

SEQ ID NO: 83494 - DNA, 612 bp, Oryza sativa
  unsure (1)..(612): unsure at all n locations
  Clone ID: PAT_MRT4530_82820C.1
cgctttttaaagngcgctacactacaaggcctctcccccccgctgccgactgccgtcttgctctccctccctcccaaccccccactctccccgctcctcctgcgagggctcggcgaggggtggctgggcctgagcgcgggcatggacgccaccgccttcccctacgggctgcgcgtcctcgtcgtggacgacgaccccacctggctcaagatcctcgagaagatgctcaggaagtgttcctacgaagaaatatcgcctctacctgagtaggttgcaaaagcagaatgaggaaaggatattaggcgctgctaggcaagatttcagtcacaagggaacatcagaaaaccttaacctccgaagttccttccaagagcaaccaagcaacatagcaaatggatatccgcatgcttctcagaatatacaaactcaggccaacatgctagattctcagctagaggacaccaagagcacagtgcccttgcctgtgccagataaaaaaagaactctagcaagtgatgctgctgactcacagaatgtcaccagtgcttcaagtttaggtgggggttctgtctttcaaaagcatggccggtgaatcaggacaggaagccatca

SEQ ID NO: 83495 - DNA, 640 bp, Oryza sativa
  Clone ID: PAT_MRT4530_82821C.1
atgacctctaagctgacacggttcaccgtgcggagcgagcacgcggcgcacgcgcgcgggcgggggagggacgcggcgcacgcgcgcggttcgcggtggacacggatgcggcgggcctacgcgcagcctcacggctcgcggtggaacgcgcgcacggggaggggctgaccggggtcggcccgtcccgacctcggctgagctggcaccgacgtggcgcctacgtggctgccacgtgggctggcgggaggtagacgacgacgccggccggaacggacggcggacaacagcggcgagcggcggagcgaaccacggcgataccggcgaaaacgagcacaccgggtggttgcacgagacgaggggagacgagccaacggctcggattcgccggaggaagcttgacggcggcgaatcgcggcggcggcaaccggcggggagggaagagggaaacggcgacaaggtcacgaggggccgattcccggcggtgagagcatctacgcggctacgggaatccgatgttagcgtcggattgggcggagctacgccgagcgaggctggcgacgagcgggtgctacggagctcgagcggcgacggcgacgagcacacggcgagcgacggcaacggtcggggcggcgccggctag

SEQ ID NO: 83496 - DNA, 1848 bp, Oryza sativa
  Clone ID: PAT_MRT4530_82822C.1
ttccattaccaccgcgccaacccttcgccgccgccggggccgacgacgacgaggacgacgacgatcgaaatggcctcctccaccaccgcctcctcccagctcgccctcgccctcggcatccccggcctcggcggcctcctcatccccaccgacgccgccgccaccaccaccaccaccgccgagggcaacgatctccacgccgacgcctcccaccccgtcctccgcctcgccggcgccgtacagcactacgagggggggggacgaagtgggtactctctcgtcgcgcgccaggccggcaagggcgatgatgagaatgagaggccatacgcggagctctggatggggacgcacccggcggcgccgtcgtcgctggcggcgacggtggagttcctgagggagtggctggggaggcgcggccccgccgcgctcctcggccgcgacgtggcggcgaggtggggcggcgacctcccgttcctcttcaaggtgctctcggtcgccagggcgctctccatccaggcccaccccgacgccgccctcgccagggcgctccacgcgctccgccccgccacgtaccgcgacgacaaccacaagcccgagatggccgtcgccgtcaccgacttccgcgccctctgcggcttcgtctccgtccaggagctcaaggatgtcttgaggactgtacctgaggttcgagagttagttggcaaagaagaggctgtgaagcttatgggtgccaaagagcatgatggaggcatcggagtaaggtcatatctgcaatcagcttttactaatttaatgacagcaagcaaagaaacagtttctgaagcagtctcaaagctaaagagtcggctgaatattgagagtaaggttagaaccttgacaaagaaggagcagctagtgttgtcactggagatgcagtaccctgaagatgttggtgttttagcagcattcttctttaactatgtcaagctcaaccccggtgaagcactctatattggtgctaatgaaccacatgcatatctttcgggagagtgcgtcgaatgtatggccacatctgacaatgtagttcgtgctggtctgacccctaaatacagagacgtccaaactctttgctcgatgctgacatacaagcagaactacccggagattctgcgaggagttccagtgcaagcatatgtaacgcgctacatacccccatctgaggagtttgaagtcgatcgctgcctgctgccctccggtgaatcggtcaccatgtcaccggtgcctggcccatccatcttccttgtcatgacaggggaaggcaagattgaggcagattccatgcttgatgaaggaaaggcaaaggaaggcgatgttttcttcgtgccggcgcacaccgaggtcaggatccttgcttctggtcctgggagcatgcagctttacagggctgggcatcaaactgactggcacgcccgcatctcaccaatctttggacctgcacaggagctaagcagatctcccaggccgatcaacatcaaaaacatcacaaatcaagaaattcatccacacaacaaatttctcagccgagccaggcgccgctgtcgctgccgccgtgccaccgcggaggggagggtgccgcacgggccgtgccgccgcgtggcccgcgtcgccgcggaggggaggagagggcgccgggtgggccgccgcgccgccgcaaaggggagggcgccgcccgtcggcaccgcggaggggaaggcgccgcctgccggcgccgtggaggggagggcgcgcgccgcagacgatggagatggggaggggagaagagggaggagagggggaggaggaggagataaggaggatacaggagggtga

SEQ ID NO: 83497 - DNA, 713 bp, Oryza sativa
  Clone ID: PAT_MRT4530_82823C.1
gttcttcttccgaaatccgaatcgatcaatcgagcaagggacgggacagggacgaatcgtcgccggagaagaggagagggagagagagagagaacagaggggcagaaggcgagacaagatgatactagcggtgctcttctccaactccgacggcaacatcctcatcgagcgcttccatggtgttcccgcggaggaaaggctgcactggcgttctttcctcgtcaagcttggcgccgacaacctcaagggggccaagaacgaggagctcctcgttgcctctcacaagtatctacttttcccctttagctcactgattgattgattgattattctactctagcttaagttctccagtaagttggtaccaccaaatggatcttcaagatttaccaattgttcaggcccttttttttattcgatccctggttaacatcaatattacctggttcatgtcttttggccataactgcccagtagcaatattgtgttaagatcgctccctgatgtgccaatgttaatcttattcctatcccgtacaaatctattttcggaaaattcattcattcattcatctcctaaattcgctctccagtttgccaccattctgagcatcaacttgatgctcctctgtttttttttaaaaaaaaaaatcttctggatgaaacagcaggactgctatttggttaccttggggaggaaataaacgttccaaa

SEQ ID NO: 83498 - DNA, 450 bp, Oryza sativa
  Clone ID: PAT_MRT4530_82824C.1
atggcacggaggcgaatgggagatgaagggaaagggggaggcttgggttttaagggcggcaatgtcggtttgggaaccgacttagggcggtcaaggcgcgagctggcgctccggctagcggccaaaacggcgacagaggtgacgccggcgagagggaaaaggaggaaaaagggggagagaaagggggcttgcccccttgcttctttgggaaaaggaggaggggagcgggggcgtcgcggcagagggggcagggctctgcctccgtcccttggcggcttgcgcgcggagaggcggggccgaggcgatgacgacggcgatgacggcgggacggtgtggagcggagcggcgacacgagcgacaggcgcggcaggcgctgacggcggcggcgaccaggcggtcggccaccacggcacgcgcacgcgggaagcaacgggcggcgcggcggtttga

SEQ ID NO: 83499 - DNA, 296 bp, Oryza sativa
  Clone ID: PAT_MRT4530_82825C.1
attggacaatcaacgatttatattaaacggacctcatttacttgacggccgtagccacatcgacatccagccacgtggctcaggacagccggattcatacatggttgagacaaacacaggcacgcgcagggttgagccatcacactggacgggctatggatccaggaatactggaaacaggctgtagcattggcaacataccaatagagcattgtgtgctcagcaccggccggcgaggcacttgcatctggagccacagatgcaggcacgggctgcatgacgagactcacccgcct

SEQ ID NO: 83500 - DNA, 1397 bp, Oryza sativa
  Clone ID: PAT_MRT4530_82826C.1
atgggccggccggcccaaggcggcccaaggcacgcgcgcgcgggaggggaggagagagagagccggtggaccgggctcacctcgcatggtcccgagtgggacccgcttgtcagcggctcggctcaccgtgcggagggagcacgcggcgcggtgctaggatgggggagagacgcggtgcatgcgcgcggttcgcggaggacgcggatgcggcgggcccacgcgcagcctcatggctcgcggtggaccgcgcgcacggggagggagcggctaaccggggtcgactcgacccggttttggccgagctgacgccgacgtggcgcctacgtggctgccacgcgggccggcgggaggtagacgacgacgccggccggaacggacggcggacgacagcggcgagcggtggagcgaaccacggcgatacaggcgaaagcgagcacaccgggtggttgcacaggacaaggggagacgagccaacggctcggattcgccggaggatgcccgacggcggcgaattgcggcggcggcaaccggcggcgggagaagggggaaacggcgacgaggtcacgaggggccgattcccggcggcgagagcatctacgcggctacgggaatccgatgctagcgttggattgggcggagctgcgccgagcgaggccggcgacgagcggcgcttccgagctcgggcggcgacggcggcgagcacacggcgagcggcggcaacggtcggggcggcgccggctagctacggggaggctactcgctctaccgtgcgggcgggcgcagtgacgagaggccgacggcgcgggagtaatctctccggcctcgggccggggaagaggaaggagagggcgcgctcggagtccccttccgcgtccttgctcgtgccggctcctccgacaagcgcaacgacgaacggcgacggcgaacagagcacgggaggcggcggcaatggcgtggaggcgaatgggagaggaaaggaaagggggaagcttgggtttataggggcagcttgcgcgcggagtggcgggggccgggcgatgacgacggcgatgacggcggggcgacaacgggcggcgcggctcgggcacgcgcgctggctcgcggggccgagcggctgcgtggcagggcagcggggccgggcggcgcagacggcgcaggcgcggcacgggcggcgaccacgcggctctcgcgtacgcgcgggcagagcgagggagtggcgctcggcgcggctctcgcacacgcgcgcgcggcgcgcgggcagagcggaggagggagggagagagagagagagagagagcgccggggagggagggggagatgggccgagagagattcggcccatcgcacccggggaggcaaaatagacttttgcggaggaattgatttgggaaggcatt

SEQ ID NO: 83501 - DNA, 524 bp, Oryza sativa
  Clone ID: PAT_MRT4530_82827C.1
tttgcctgctattgcatcagtgcttattttggtgcatgaggtgtgaatatattacatgaacttgcgaggtggttgcattataatacacaaacttgtaaaacattcgttccggtgcacaaacttgaggtttgtgtgaaccaaggtcaaaagggcaaaatatggctaatcttgctgagttgagtgttgattaggatgccatgtaagcatgcatgttaggactatgccatatacatatgcatgtactgagtaaaacatagaacaagacatactgattgaacaaagaaagacatatagcaaaccgataaaggatgcaagggatacaaaggaaggacaaagtggaaaccaagtacaaggttatttgcaaatataacatgtatcatgccctcctcacatgtgcacgccatgttctaatgagcatccaacttggtaataagttgccatgcccttttggccttggtttacacgcaccagacatgttcatgcaccaaaatgaacgtttaataagtttatgtgctgcaccccct

SEQ ID NO: 83502 - DNA, 582 bp, Oryza sativa
  Clone ID: PAT_MRT4530_82828C.1
tgaacctacgcttcttcgaccgacaaccactaaccgactcttccaacagccgtcgccgacaaaatgggtgctaccgttcctaccaacgaccagatcctggtccccgagacccttctcaagaagcgcaagtctcaggagaaggcccgcgctgagcgcagcgacgccgttgagaagaagaaggctgccaacaaggagaagcgtcaggtcatcttcaagcgtgctgagaagtacgtccaagagtaccgcgatgctgagcgtgagaagatccgtcttcaccgcgttgccaagtctgaggactctgcctacgtccccgctgaggccaacctgatcttcgtcgtccgtatcaagggtatcaacaagatgccccccaagccccgcaagatcctccagcttctccgtctcctccagatcaacaacggtgtcttcgtcaaggtcaccaaggccatcactgagatgctcaaggttgtcgagccctggatcgcctatggttaccccaacctgaagaccgtcaaggagctcgtctacaagcgtggttacggaaaggtcaacaagcagcgcactgctcttaccgacaactccatt

SEQ ID NO: 83503 - DNA, 370 bp, Oryza sativa
  Clone ID: PAT_MRT4530_82829C.1
ggggggccccaaaggccctctgatatacattccaaaaaaagggggccaacccaagaaaggttccaacccggcaatataccccccggcccttggggatccggggctcaacaaaggggtataagaccgggtctccaaccaaacaaaaggggccgaattttcgcttcccacagaaggaagggggaggtttatccaaggggggggaaggaaggcccccccgggggccccggcaggggggcacccctggcacccaagtggcttaacatcgcccccaccgggggggagtcccccctcgtttttaaacctgacgaattaactggggcggaactggggaaaaccccactttttaccctaaagggtctttgggggacca

SEQ ID NO: 83504 - DNA, 2268 bp, Oryza sativa
  Clone ID: PAT_MRT4530_8282C.1
ctagtggatcccccgggctgcaggttttttgtggttccccgggctcgctggttttcggcacgaggccggaattctagattcaattttttttttttttttttttttaaacaaatatacagacagacttcattcatgcttgtgcttaaaagtctgcatacatattatgaaaacacattgcaatcaagactcatatatagcacaacaattagtaatcaatctcaaatgtttgacacgagaagtgcagatcaactggctattaattctgcatgtcaaattgcaaagcaaacagaatgttacctttaacgtgaccatgacacagcatcgatctcatccctggcagacttgtataactcaagcctcttaaagcactgctgccttcgctccataagagcaggatcctcatcaaggagttgcgcaagctgcttagcatctttcctgcccacttgggtatagaaatagttaagcaaggaacgcttagcttccctgacttgacaatgaacaacagctttggggatagtattcttcaatgtatcagataccatgccaatgtatgaggacacattggaagcaatcctcctgaagtgcgcgtcagcataacgatcaacagaaggagtggaagggttcccagttccagtcttgtccacttcctgtggaagcttgcggaagaactccactgtcaagtatgctgactccatatcaaccagtcgtacagtggttttacgtccatcttcacggaatctctctagggcatgaaagcatgcagccgcaagctccgcttgaagagtgggaaaccttttcaattcctgggtctcaccgatggatttccttaccagctctttcaaaacataatgcacagcatctacagaagcttcagctggccctctaaaataattgagagcagattcaatcagtcggcggtacccttgctcaggagcaattaaatgaggttgataaccatcagcttctgagataacacgcttaacattttgcagagagaggtagcggtcaaatggaagcttccgcagagcagaggggagttggttatcaaagacaccataaattcgatcacctccaggccgtcctccatcaagatgttctctaaatattttctcaaatgcacggcaaagctccaacacgaggtatagttgagccccagcatcagaggcaataggtctaccaatgtgatccatctcagattcaagttcatcaatagttttgttgatcagagatgtaatgcttggaatacgtgccctgatcacagcctctaagtgctgtgaaagaagtttggcaagatattctgaacccatcctgcttgataaatgagaatattcaggactagaagcaaagaactcctgttcttttcgcctggcaataatcatatcaatattcttattgatatctgcttgtgaacgattaacaatcccgacccatggatgctgcagtctgtacgatcttccttcgagaacatcaagtgcatttgttcccttgtccatcaaatcaagcttagtcaacacaccaaatgtcctttcaccagttggatcaacatctcgagcaagcttaatagcatcagatgttgctatatcttgattggcaggagatatagcaagtatgatgcagtttggcttgtcaacatatgagcgcaccatattttcaatatcctggacaatgctttcaggctgtccttctactgcaactttagttagacccggcagatcaatcaatgtcaagttgaccacatgtggtgagtaaatgctgagatgaattggaacaggtgatatttgtttagtcttccctgtcagcctatcagtttcatcttgaatttccttccgcacaagagcaaaatcgttgaaccggcgcttgggcatatgcaagaactcagcgtactcctgcaccccgtcctccgtcttgtgcagctgcaaaaccagcggccttctcgtcacgatacctgagcccctaggcaggaagtcgcggcccacgatgctctccagcaccgatgacttgccggaactctggccaccgacgacggcgacggaagggagcgcctcccacagcgtggggagggaggcggtgccgtcgccgccgccgtggtccccgaggacggtgcaggctcgctggatgcggttcacgagcacgatcacgttctccatcgtcgccatctccggcgaggcggagggaggcggcacctccttgcccggacgaggagcgggagtggaaggttctagaaggaggcggaaggttcgagagggagaaagcactgtgtctctgaag

SEQ ID NO: 83505 - DNA, 2880 bp, Oryza sativa
  Clone ID: PAT_MRT4530_82830C.1
atgaagatcactataattggactgtttcagttgctgcttatggtgtgcagtgcagtccaaatcatttgcagttcgttgtatggaaacgagacagataagctctcactgcttgagttcaagaaggcaatcactcttgatccccagcaagtcctgatttcttggaatgacagcaatcacttttgcagctgggaaggagtcttgtgcagaaagaagacaaccaatcgtgtcatttctcttaaccttacgaaccaacgtttagtaggagtaatctccccttctcttggaaacctaacattcctaaaatttctgtacttagacacaaattcattcaccggagagatccctctgtcccttggccacctgcatcatctccaaaacctctacttgagcaacaacacattacaaggaaaaatacctgattttacaaacagttccaacctcaaggtgctactcctcaatggcaatcacctcattggacaattcaataataatttcccccctcatcttcaagggctggacctttcattcaataatcttactggaaccatcccctcttctcttgccaatatcacggagctattgggtgttggtttcatgtcaaacaatatcaagggaaacatcccaaatgatttctcaaagttcgtctcgattgggtatcttgctgcgagtcaaaacatgttgtcaggaaggtttccacaagccatcttaaatctctctactcttgatgttctttaccttggttttaatcatctaagtggagatttaccatcaaatcttcttgactcgctacccagcatagaaatactttcattgggagggaacttcttccaagggcatatcccctgctctgtggtaaactcttccaacctaggtttactagacatttcatctaataattttactgggcttgtaccaagttccattggaaaacctaccaaactgtatcacctaaatcttcagtccaatcaacttcaagcacacagaaagcaggattgggactttatgaatggcttaaccaactgtactaggctacaaatgatctcgatagctaataaccgtctacaaggccatctaccaagttcattaggtaacctttcctctcaacttggaatgctacatttgggaggaaatcaaatatctggtgttttaccttcggacatagaaaacctctccagccttacttatttccggattgataccaatgaaattacaggtgtccttccagaatggcttggttctcttaaacacctacaagtattaggcttatttaacaacaacttcacggggtttattccaccgtccctttcaaatttgtctcagctgtgctttccacaacaatcttcgagatggacaacttcctgcggcaatgcaaaacaactttcaaagttgtcacttgcatcgaataagctatctggagatattcctaacactttgggtgattttgaaagcttggaatacattgacttatcctggaataatttcactgggatcatccctgcttccataggaaagataacaagtctagaggttctcaaattctcacacaataacttaactgggccaataccatcattgcttggtgacctacattttcttgagcaactggatttgtcattcaaccatcttaaaggtgaggttccgatgaaaggaatattccagaatgtgacagccttgagcattggtggaaatgagggactatgtggtggatcacgagagttacacttactcgcatgccctgtcatatctttggtctcatctaagcacaagaaatcaattttactaaaaatactaatcccagttgcctgcttggtatcacttgctatggtcatatctattttttttacttggagggggaaacggaagagagaatccctatcattaccttcatttggtacaaatttccccaatttttcatataataatctattcaaagcaactgaggggttctcatcatccaatttaatcggcaaaggaagatatagttatgtctatgtaggaaaactatttcaagacaacattgttgctgttaaagtcttcagtctagagacaaggggagcacacaagagcttcatggcagaatgtaatgccttgagaaatgtgcggcatcgcaatctacttcctatcctcactgcatgttctagtattgattctgaaggcaatgattttaaagctttagtctatgagttcatgtcacaaggggacttgcataaatttctatacacaaccagagatgatataaacttgtcaaatttgaatcacattacattggctcagagaataagtattgtggtggatgtatcagacgcattggagtatctacaccacaacaatcaatggactattgttcattgcgatctgaagcctagtaacattcttctagatgatgatatgattgctcatgttggagattttggccttgcaagttataaaaccaattcgtcaatgccatctctaggtgattcaaattcaacttcttcactcgcaataaagggaaccattggatatattgctccagaatgttcacatggtggtcaagtttcaactgcctcggatgtttacagctttggagttgttgtcttggaaatatttattcggagaaggccaactgacgacatgtttaaggatggattgagcattgcaaagtatgcggagatcaatttccctgataggatactagagattgttgatccccaacttcaactagagttggacggccaagaaactccaatggcagtcaaggagaaaggcctacactacttgcactctgtattaaacattggactctgttgcaccaagatgacaccgagtgaacgcatcagcatgcaggaggcagctgccaagctgcatggaatcagagatgcatatctcaggggaaactga

SEQ ID NO: 83506 - DNA, 2468 bp, Oryza sativa
  Clone ID: PAT_MRT4530_82831C.1
tgtgttttttttagctagggttgtagtttatgatattgaattgaatttatattacataacagtagctaattgccacggaatcaagtagcctacgttcttacaccagcttccatatcattctcctctcgtaaagtgtgccaccatcgcataccaccaattctagattggcgcaatgacagtaagaagacaacagtgatctcctcgaagcttagatatttgaggggcatgagaaactcaatgcctagagggacctcttccatgctgcttaggtttattagtcttaatctttcaaggctcaccatggcaccttgctgaatatccatcctctttagattaggcaagtctcttaaacgtagaaccttcagcttgggaaaccatctagtaaggaagaccagcttctctccgttgtaggctctggtgaaatgtagctctgttagatttaacaaccgagaaagggatggcaagggatcctcttttagttgggaccaaaataggcgcaacgagtacagatttcgtcccccggcatcttcttggaatagaggagactctgcacccaacatggtgtgtgccaatcgtccacttaaacgtagtttatgaaggcttggaggaagggggttcaagccatccaactggagaacatcatcctcatcacttgccgtgatacttaggtaggacaaacatttcatctgaagcagcgactcatagaggcgttcacagaggcttgccttcactttccataatctgagacctctcatctgcctgagctctcctaagcatctaacagactcatcctgagcttccagtgcttgtagggattgtaggcttgtcaagttctcaaggcccctggggatgcttacaccagtgcaccacctgaaaaggcgccgatgtcgatcagtctgtttctcagcaaacaagtgcctaagctttgtcagcttgacaatgcctctaggaagctccagtatgctagatctgaagaggtctagtgttaacaggttggttagcttctcgatagactttgggagaaacttcacatttgaaccacgaagacctaaatggcggagattgaatagatctccaatagcatctggaaccgtgctgatgggtagcccacttaactccagtattgacatatatctgcaattgtccactactagacatagtatgctggatgatgatatcatactattatccaatgtaatgactgatcgaagactatgcgcacaagaaatttcttgatcaatgtccttattaagtttgtgtactaccaatcggcgttcatctctatcctcatgttcccaacgtctattatcttcatcatatgcaacgccaaaacattctcttcggcacaagtcaaccgccaactcatgcatgatatcatgcatccggaatgattttatcctgccaaatgaattcctgtcaattagttgtagcatgttcctgttaaccaattcctgtagatacccttcagccacttcctccattgtgcttctacccctcttactgatgaatccctccgctatccaccaccgtattaatgcctttcttttgagaagatgatcctccggaaacaagctgcaatataggaaacaacttttcaactgtgttggaaggtaaatgtagctcaagtaaaggatattcctgacatgttccaggcttggattatttattaactcccagtcgagctggtcatgtattctcctcagttcctctttggtcttgtcacgcacaaagacaagcctgccaatagagacaattgccagaggaacccccttacacttgctaactatttgatctatcaagtgcaacagttctgcattgcactcatgatttgtctcccttggaaaagctgttctacagaagagttcccatgattccttctcacatagaggttctaatgttattctcctgtctgggaaagcaagttgagctacatcatcgatacgtgttgtcacaagtattctgctccctttgagattaggaacatgtgctccaaacaaatcattgattacttctggcgcccaaacatcatccaatacgatcaaacacttctggagctttaggaatctcttcagctcttcacgaaaacctccagtatccatgtcagtaatgttaccccaattagtctttttcacatttctggaaagttcagtgatcaaacattttagaacatccttgatgcagtaagattgagaaatcgagacccatgcatgacactgaaacttttctttctccctcatgtatgcatttgctgccaaggctgtttttccaagccctcccattccatgcagcgtaattactgaacgttccaacaaatcatctgccagccactcttcaagtgtttctctattttgattgaccccaacaagatcttcttcaccaagggagcgtgaaatgcttgctagatgttgggacctctcaacaatgtaatttgagctgtcattactaggattattaccatcacctaccat

SEQ ID NO: 83507 - DNA, 858 bp, Oryza sativa
  Clone ID: PAT_MRT4530_82832C.1
atggggatggaggcggagtgcgataggataaaggggccatggagccctgaggaggacgaggcgctgcggcggctggtggagcggcacggggcgaggaactggacggcgatcgggagggggatcccggggaggtggagcgccgcccgttcacggcggaggaggacgccgcgatactccgggcgcacgcccgcctcggcaaccgctggggccgccatcgcgcgcctcctccccggccgcaccgacaacgccgtcaagaaccactggaactcctccctcaagcgcaagctcgccaccgccacggacggcggcgagatcgaccggccgtgtaagcgcgtgagccccgggccggggagcccgacgggatcggagcgcagcgagctcagccacggcggctgcggaagcggaagcggcggcgggcaggtgttccgccccgtgccgcgccccggcggcttcgacgccatcagcgcggcggacgtcgtgcggccgccgcggcggcgggacgacaacgacgacgacggcgacgacgacccgctcacctcgctgtccctctccctctccctcccggggttccaccacgacagcgcgcggagccacttccaggagctcccctccccctcccgctccccttcgccgccgccgtcgccgccggcagcatctccatccgcatacccgttcaacgccgatctcgtctccgcgatgcaggagatgatccgcacggaagtccgcaactacatggccggcgtcgggctccgcgccggctgcggcccgggcgccgtggccgagtccttcatgccgcagctcgtcgacggcgtcatgcgcgccgccgccgagagggtcggcgtcgtgacccgccaataa

SEQ ID NO: 83508 - DNA, 1313 bp, Oryza sativa
  Clone ID: PAT_MRT4530_82833C.1
caccttttggctcctccactagtagcaactactcgttgtcgtcgtcgtcgtcgactcgtcgtggtagtacgagtcttcttcgcgtccgcgccatgagcagctcgaggaaggaggaggaggaggttgattcgatggggatggaggcggagtgcgataggataaaggggccatggagccctgaggaggacgaggcgctgcggcggctggtggagcggcacggggcgaggaactggacggcgatcgggagggggatcccggggaggtcggggaagtcgtgcaggctgcggtggtgcaaccagctgtcgccgcaggtggagcgccgcccgttcacggcggaggaggacgccgcgatactccgggcgcacgcccgcctcggcaaccgctgggccgccatcgcgcgcctcctccccggccgcaccgacaacgccgtcaagaaccactggaactcctccctcaagcgcaagctcgccaccgccacggacggcggcgagatcgaccggccgtgtaagcgcgtgagccccgggccggggagcccgacgggatcggagcgcagcgagctcagccacggcggctgcggaagcggaagcggcggcgggcaggtgttccgccccgtgccgcgccccggcggcttcgacgccatcagcgcggcggacgtcgtgcggccgccgcggcggcgggacgacaacgacgacgacggcgacgacgacccgctcacctcgctgtccctctccctctccctcccggggttccaccacgacagcgcgcggagccacttccaggagctcccctccccctcccgctccccttcgccgccgccgtcggccgccgcagcatcgccatccgcgtacccgttcaccgccgagttcgtctccgcgatgcaggagatgatccgcgccgaggtccgcaagtacatggcgagcgtcggcgtccgcgccgggtgcggccacgccgccggtgccgacctccacatgccgcagctggtggagggcgtcatgcgcgccgccgcggagcgcgtcgggaggatgcactgatcaaaaacctagcgtccattagaatctctactatcgtttcaactttttttttccttaaaaatttgtttccaaaactgctgtgaaaaccgaaacagcagtccgaaacggaagaaccaaaaaaaaatgcgaggagagatgggaaagaaatgtttcgagctacgaaaaaaaaccgaaaagctcggctacctatgtacaggaaatggaaatggaaatgcaaatgggggaagtgagtggtgaatcatgcaaaaaaaaaaaaaatcagaattcaccatttttgctaac

SEQ ID NO: 83509 - DNA, 552 bp, Oryza sativa
  Clone ID: PAT_MRT4530_82834C.1
gttttgtgtttttaattttttttttttttttttttttttttttttttttttttttttttttttttttttaaaaaaaaaaccccctcccaaaattttcccacctaccaaccaaccccaaattgtccccatgccccctcccaccattatttaccgcccttcccaaccaaaacctacctcccttcctcccaaaccgaaatccccccccctaaaaccccaggtaccgtttttttccctaaaatttttcaataaccccccaaattcccccaaaaacccccttaaaccttttttcaacaacccccttaaaaaaagacctcaatttaataataatcctttgccccctttaattgaattttgtaacctggttgttaaatccccccccattttaactcttttccctgcccaaattaaaggcaaatttttccccaacccaatccgggactttttaaaattttgccacctaaaccagaacaaaacccttgggccttggtttgtcccctgttttgacccctaaattttccccaacaaaatggaaaattagccctcccttgcctt

SEQ ID NO: 83510 - DNA, 1305 bp, Oryza sativa
  Clone ID: PAT_MRT4530_82835C.1
ctcgcgatctatacagaaaccgcagaaaccaacaccttttggctcctccactagtagcaactactcgttgtcgtcgtcgtcgtcgactcgtcgtggtagtagtagtcttcttcgcgtgacgccatgggaggaggaggaggagttgaggcggattgcgacaggatcagggggccgtggagccccgaggaggacgaggcgctgcggcggctggtggagcggcacggcgcgaggaactggacggcgatcgggcgggagatccccgggaggtcggggaagtcgtgccggctgcggtggtgcaaccagctctcgccgcaggtggagcggcggccgttcaccgccgaggaggacgccaccatcctccgcgcacacgcgcggctcgggaacaggtgggccgccatcgcgcgcctcctccagggccgcaccgacaacgccgtgaagaaccactggaacctgctccctcaagcgcaagctcgccgtcgccaccaccaccaccaccaccaccaccggcgccgccgccgcgccgggagtggtcgccgatgccgccgagctcgtcgagcggccgtgcaagcggttcatccccacgccggacagcccgtcggggtctggttccgggtcggaccgcagcgacctcatccacggcggggggttcgggcagattttccggccggtggcgaggaccggcgcgttcgagcccgtcgactgcgccatcagccggcggcagggaggaggatcccttcacctcgctctccctctcgctccctgggacggatcagcggttcaaccacgacagcgcccacagccacttccaagaactcccgtcctccccctcgccgccaccaccacctccccccgccgccgccgcctcgacgacacagtacccgttcaccccggagttcgccgccgcgatgcaggagatgatccgcgccgaggtgcacaagtacatggcgagcgtcggcgtccgcgccgggtgcggcgacgccggcggtgccgacctccacatgccgcagctggtggagggcgtcatgcgcgccgccgcggagcgcgtcgggaggatgcactgatcaaaaacctagcgtccattagaatctctactatcgtttcaactttttttttccttaaaaatttgtttccaaaactgctgtgaaaaccgaaacagcagtccgaaacggaagaaccaaaaaaaaatgcgaggagagatgggaaagaaatgtttcgagctacgaaaaaaaaccgaaaagctcggctacctatgtacaggaaatggaaatggaaatgcaaatgggggaagtgagtggtgaatcatgc

SEQ ID NO: 83511 - DNA, 363 bp, Oryza sativa
  Clone ID: PAT_MRT4530_82836C.1
atggacgcggaggtcggcgacggcgtgccgtcgtcctcgccggcgtcgacgacggaggtcgccgtgaaggcggtgccatggtggcggcggctgcctttgttgagcggctgtggcacggggaggaaggccgtgagggcggcgagcgtggcggcggccgtgctgatcgccgccgtcgtgctctcctactacgcccggggcgactacgacgagatgccgtcctctttattcaccactactactgccacacgagcgatccacggcctcatcggttcgtgcgctggtgttggtagcgtagccttcgcatcggcttcgcccgtcctccgtcgttttgcctcgtcggtcttgaacaacatgtcgatgtag

SEQ ID NO: 83512 - DNA, 253 bp, Oryza sativa
  Clone ID: PAT_MRT4530_82837C.1
caagccccaacctcaaggagcccggttaggggtgaaaacggtacggaaactttccggatttcgaacctattttcgaaaacggaatctgtcggtcggaatttttcggaaacggaaacgaattcgaaaatattttctcagaaacagaatcagaaatggtaagggaagtttccgtcggaactcggaatcagtcgaaaactttctggaaattttctcggaatttctggaaattttctcgaaattaccagaaattttg

SEQ ID NO: 83513 - DNA, 420 bp, Oryza sativa
  Clone ID: PAT_MRT4530_82838C.1
atgcgagaggagtggcggtggggtggccagatccagcctaggcttgccggatctggcctcgggcagcaacggtggcggctcgtcggcgaggacagtgcccggtcgccctcctcccgctcccctctcttcctccagccgtcgccgacagagctcatcgtcatcgtcgccgacgaacctcctcttcaccgcctctctccgagatctggcacgccgccaacccccagcgccacctccaccgccggtcctagtgccgccgccctctcgcgaggacaacgacaaggcgaggggtggaagaggaactctgggcgtgggagcgatggccaagggacactcaccctcgccaatgcgtctcccggctcggtgtctcagcaaaaaggtggtgaggaacgctccccagcgaaggaccacgcgcctagctaa

SEQ ID NO: 83514 - DNA, 1581 bp, Oryza sativa
  Clone ID: PAT_MRT4530_82839C.1
atggccgcctcctcctccaaccccacgcctctgctgctgccaccgccgccgccgcaagagcccgcgcctctgtcgccgccgccgccgctgcctacgccgaagccgatccccaccgtcgccgacaacttccgcagcctgctcaggtccggcgaggcgctcctccgcttcgccttccgcggcaactccggccaattgactcaccggcatccgcctccgcctcggccgccgccgcagcagcagcatccccaccaccacaaccgcccggctgagatcatgaagcggctgcagcgggagaagttcgccgacatgatcaagcacatggacgggcacgagcagatcgaccgcctcgtcgcgctgtacacgagcagcgccaaggggttccacctcccggagctccccgtccgggtgaaggtcgcactcgacgcggccggcgcgctgctcctcgtcgacggcgacgagctcgagcaggcgagggacaggctcgccaaggccaggaacacgacggggctcggctccaggttcgtgttcgagtcgagcacccgtggcggcaaggacaccgtcgccgcggagctcgccaccgggctcggggcggcggcggcggcggcggccggcgggaggccactggagctcacccggctgcagtactgcgcccacgtcagcgacctgctgtcgatgaccctcgtcccgtttggcgcccagtgcaacaacttcttgcacggttcgagcctgatccagagtatccagagcagagcgttgtccggcgggccgccgtcgtattcggagcgtcatgactgcggcgccggcgtgagcatcaagggatcaagattcagggcctccatagctgagctgatctttggttctccaggcgaacatggcggcggcggcggcggcggcaatggcgatcacgaggtgcccaaccggttgacgacgttcggcaaggtgagctacgagacggccgacgacatcaagctcagcttgtcggggctgtggcaggtccgctcgccggcgtcccggttcagcgacctcggcgcgctcgccgtgccgctgggcagcctgaagacgcggagagccatcgctcctcctccgtcgccgccggcgacgacgcatcctcctccgtcgccggacctgatggtgcaggtgccggcgcctcctgctcctcccacccccatgatgggtatagggtcgacggtggcggtgcagggctccgttgccgccgccgccgccgccgccacggcgccgtcgtcgcacacggtggccgtcatggtggactgcgacatgtacgacaccttgagagcagaaggctgggtcgagatggagacggcggcggcggcgactccggcgaggcggcgcgggccggtggcgcggtggggagtctgcgtgtccgactgcccggagcacgagctcgggtggggggtgcggatcggcggcacggcggagaggaacgcgcaccggccgcacgtggaagggttcctcagcttcgacctcggcaagggcggcagggtgcagccgggcctcgtcatcgccatggacggcgacaagcggacgccggcgctggtgctgaggtcgtcgtggctcatgtga

SEQ ID NO: 83515 - DNA, 158 bp, Oryza sativa
  Clone ID: PAT_MRT4530_8283C.1
acagaaagacaggcaatttcaagttccttttccctcaaacaagaccaaagcgtggagagaaaagagagggacaagcggagtgtcaaagactaagtcagcagagaaactcacgttggtagcaatctccacggacttgcaacgctcgccgcattcactca

SEQ ID NO: 83516 - DNA, 541 bp, Oryza sativa
  Clone ID: PAT_MRT4530_82840C.1
atggtggcgcgtggcggacaatacgacggcgacggctatggcggcggcatcagttggtctcgacgctggcgtcttccacttgtcccgtcattttccccttcgtggcggtgcctcatccattcctctcgacaccgctactcctgcgaccatgcggcggatagggtcctggagatccactgcagccacagcccttgcaacggcgtcgagacgactcctgcgactgcgacgatgactcctgcggctgcggctgcgactactcctgcgaccgcagcgataactcctgcagcgctggtgaggacacctgtgggggccacgcttccagaacgattgaggatctgcatctgcctgcggccgtgcggccgtgcggcggatagggtcgaccttcacctcgacttttttctcccgtgcagtgcagcggcgctagatgcaggagaagggaaagcgagagatatcgaggcgcgcacgctatttggaccacacgcgatagctccccatcgtacccctcagcaatcaacggccggatggagactggtgcctcatg

SEQ ID NO: 83517 - DNA, 469 bp, Oryza sativa
  unsure (1)..(469): unsure at all n locations
  Clone ID: PAT_MRT4530_82841C.1
tcccgggntgcnggantcnggcgaaccntccctattgggctccctatgcgaaacatcntatntgcacnttgntgntatcntaattatgaagcgtcntttggancgntcnnaatttnannttgggcnatcntgnattcctgggttatatntntnnnttgncncngtcnntananttcnattcctaacnnncnaccccnaattggggtttanancttttccntttcccttcccctttcntttccngaattancngtnccncnatttcccggggnggaatttgntggttgaaaaattcnctncctggaaaaanactatncaaaatcncncccccnttgaatttcnttatnggaaactaacgggggtatatgttgctgtntncttcnnaagtttcngcgaaccnacaaaaaaagngaaagctggcngnatatgttctgatctttccncttaaaattaaaaaatctatatcttt

SEQ ID NO: 83518 - DNA, 380 bp, Oryza sativa
  Clone ID: PAT_MRT4530_82842C.1
gcggtcggcgcggaggcggcgacgcgggggacggcgcggaggcggcctgcgcggcagtcggcgcggcagcgcgggggaccgcgcggcggcggtggtgggcggccggcgcggcggcgcgggaggccgcgcggcgatgccgggggccgcgcggaggcggcggctgcggtgggcggccgctcggcgaggcatggacgcggtccagggaatggaacaggatggcgcagcgcagcggcaggggcgtcgccaggcaggcaggcaggcaaggccatggcgaggagggcagcagcagcagccgcgcagtgctgtcactgctgtgcttgagagacccacacacacccgataaaagcgagcgcgaaagcgagcgggcgaggtggacgtaa

SEQ ID NO: 83519 - DNA, 2040 bp, Oryza sativa
  Clone ID: PAT_MRT4530_82843C.1
atgccccgccgcctcgcgaccacctactccggccgcatcgccgccgcgcggccatccccggcgggcccctccctcaccgtcaccgtcgccccgacccctcccccgacgccgctcgacccgcgcggctacccgctcccgcgccgccacctcgtctgcgccgccgcgcgcatcctccgctcccacgcctccccgtccccgctcctagacctcgccgactacctccgcgggctccgcctcaccctcaccgccgccgaggcctccgaggtcgtcaaggcgctctatggggacccgcccctcgcgctcgccttcttccgcttcgccgccgcctcgctcccgggcttccgccacgacgccttctcctacaaccgcatcctggcactcctcttccgcaccagggccggcccgtccgaggcgctgcgcctcgtcgccgacatggagcgggacggcgtcgccggcaacatctccacgatcaacctgctggttgggatgggcggcggcggcgtggagatggagaggtgccttgagctggccagcaagtgggggctcaggctcagtgggtacacctacaagtgcatcgtgcaggcgcatctgaggagcagggaggtgtccaaggggttccaggtgtatgaggaaatgcggaggaagggctacaagctggatatctttgcgtataacatgcttctcgacgcgcttgccaaggctggaatgaagattatgtttgataaccgagaatgggttttccacatgtacatgctggttgaccaagctttccaagtctttgaagatatgaaacaaaaacactgtgtaccggatgcatacacatatactatacttatcagaatgtctggaaaggctgggaggacctcaaaatttctctcattttttgatgaaatggtatcaaaaggatgtgttcttaacctgattgcgtttaatactattattgaggctcttggcaagaacaaaatggtggacaaggtaatttttgtactctccaaaatggtcgagaatgactgccaacccaatcaattcacatacagcattacactggatatcttggcaacagaagggcagctgcacagactgaatgaggttctagatatctgtagtagatttatgaacagatcaatatattcgtatttggtgaagtcactctgcaaatctggtcatgcaagtgaggcacataatgtattctgtcgcatgtggaactcccatgagaaaggggacagggatgcttttgtatcaatgcttgaggtgttatgtaatgcagagaaaacattagaggcgatcgacctgctacatatgatgcctgaaaaagggattgttacagatgttggcatgtacaatatggtcttttcagctcttggaaagctcaagcaggtctctttcattagcaatctctttgacaagatgaaaacaaatggaattattcctgatgtttttacctacaatattatgatttcaagttatggtagagttggcttagttgataaagcgtctgaactttttgaagtgatggaggctagcagttgtaagcctgatgttgtcacatacaattctttgataaactgtctaggaaaacatggtgatcttgatgaagcccatatgcttttcaaagagatgcaagagaaaggatatgatcctgatgtgtttacttatagcatattaatcgagtgctttggaaaatccaataaggttgagatggcatgcagcttattcgatgagatgatatcagagggatgcacccctaatattgtaacttacaacattttacttgattgtctggagagacgtggaaagacagaagaagctcataaactttatgaaactatgaagcaacaagggttaatccccgactcaataacttactcaatacttgagcgactggaaagtagatctcaacgaacagtaagaatacatgtaatgaatgcatccttcgtatcttttaaggttcatcatattacaagagaaaattctggtgtgatattgaagacatttccaaaagtgataatacgaaacttgacctacaaggttactacttga

SEQ ID NO: 83520 - DNA, 513 bp, Oryza sativa
  Clone ID: PAT_MRT4530_82844C.1
atggcgtcccacgcccactgcgcccccgccgccaacctctcgccgtccccgggcccgtgcctcccgctgcgcctgcgccgtcgcgaccgcgagctccctcgcccagctcgcgccgcgctccagcgccgtcacgccgtcggcattgtgcggacgaatcgccgccgcggcgccgtcgcctgcaggaggcggcgggtgcggcacgaggaggaggacgaggaggagtacgggcacaacgaggagatggcgcggttggagcggtacagcgagggcgcgcgcgaccaagcactcctcgtcaaggccagggtcgacgacgaggtggaggtcgtgctcgtcttcaagggattctcgtcgaggctgagcgggagaacggcggcggatccagcgatgagcgtgctgccggagagggcgatcatacagacggtggacgtggtgaggggcccgttcaatcccaccaacatcgagtacctggagaaggatcttccatgggacgacttcaagagccgcctccattag

SEQ ID NO: 83521 - DNA, 1252 bp, Oryza sativa
  Clone ID: PAT_MRT4530_82845C.1
atgcgctacctccccctccgctgtttccatcgtgctcagttcggcggcggtggcggtggcggcagcggtggaggtggaggtggcggtggcggtggcagactcgactcgaccgtgatcctctgctgcggcggcggcgacagcggcgatggcggtggtggactcgactcgactggttgggcggggagaagcggagagggggtacactttacccacacgacattactaacccggatcacccagcccgtagggatcagccacgtcgggagacctccaagctttcatgacaaggtatttccaaagccgacacaggcgtccgtcgatactcgcacagggtgcacgaatatcgagacgcaactagatggttacaaggggacatgggaggggctgaccggggtcggctcgacctcggccgagctggcgccgacgtggcgcctacgtggctaccacgcgggctggcgggaggaagacgaaggcgccggccgcgaatggacggcgggcggcggcggtttctccgggacgccttgcgacgatgaggggcgacggggcgtacaccgggatgacgagggagaatgagagggagcgagccaacggcttggattcgccggagggagtccgtcggcggcggattgcggcggcggcgcccggcggagggaaaagggggaaacggcgacgaggtcacgaggggccaattcccggcggcgagagcatctacgcggctacgggaatccgatgctagcgtcggattgggcggagctacgccgagcgaggccggcgacgagcgggtgctacggagctcgggcggcgacggcggccagcacacagcgagcgacggcaacggtcggggcggcgccggctagctacggggaggctactcgagctacggttcctccgacgcgcgcaacgacgaacggcgacagcgaaacagaggggcagcaacaatggagtggaggcgatgggaggagaagagagggagggcgcccggggccttaaagggcggcaatgtcggtttggaaaccgaggcggggcggtttggagtggagcggcgacacgggcgacaggcgtgggcaggcgctgacgacggcggcgaccaggcggtcggccactcggcacgcgcgcgcggcttgcaacgggaggcgcggcggatggagcggcgcggctcgggcacgcgcgctggctgcggggccgagcggcggcgcggctgcaggcggcagggcaggcgcggcagtgttagatagtatagggagagaggata

SEQ ID NO: 83522 - DNA, 758 bp, Oryza sativa
  Clone ID: PAT_MRT4530_82846C.1
atggttaatcgtgtgatgactgagaagcggcgagaagtccgtgggggtcgctggggagtccatgcctctggttgtagagggggtgattatgatccagcgtgcgcggccggcagccggcgagaaaggagcggcgcgcaggtgccggctggcaggagtagaggagccgcggcagtggggcagcagggcgagctcgagctcggcggtgcaagcgcgacggcgacaacagccatgagggggccaccgccgaagttgtggggtgaagaggccgagccgcacgcggggggaggtgtcgccggccatgctcggggggaggggtcgccgaccgcggccgcgcgtgcggggggaggcgtcggtgagctcggcgcgaggggggcgggagcgagctcgacggcggcagtggggcggcagggcaagctcgatagcgatagcagccatgtgggggccaccatcggagtggtggggcgaagagaaaggcggcgcacttcgttgggtggcagcgcgtcattcatgcgtcgccagccacgccggggggagaggtcgctgaccgcggcagcgcgtgcgggggaaggcatcggcgagatcggcacgggaggggtaggcgcttgctcgacggtggcagcagggcagctgggcgagctcgagctcggcggcacttgctcgacggcgcccgggaggtgggaggcggcgcaggacgcggaggccggagcagcaaactccacagccggcggcggcggtggcgagaggccgagggcctgcgg

SEQ ID NO: 83523 - DNA, 1027 bp, Oryza sativa
  Clone ID: PAT_MRT4530_82847C.1
tgtgcactttgaaagaaatagaagatggtatttcttttcgctttttccatgaggagttcacgctcacatggaagggcttaagtacacttcttagctttctcgattcctgtaagatcgatatccagaaaggaatttcagggttcgagaaaaataggttttgggaagatatttctagtgctccaatttgcaagaaacctagaacggatgatatccataatcctacacttaggctcatgcacaaatggattgctatgactttgtttcctagaggtgatctgagacccattaggggagatgaattaattatcatgtttgccatggttagaaaaatcaaaattgctcctgtgaaatgtatgataaggcaatggttagaaagtataaagttctctgctcctgttgagtgcacttctctgattacttggatagcaaaagggttaggggtcgttagcaaccaaattgcttttatctcagccgctcgtccgcgtattgatgaggcttatctagtgcaagggaatattttgaaacatggggcagatggatctttgatatactttttccccggttgaacaaatgaaatcccgttgccaaatgcggggtatcatttgtacaactgccatgaactaaccattcccctgcagaccatagaagaatatcgtgcaggcagaacatacagggagacgcgcaacatgacaaggaacgaacgagaaagttcatcatcctcaacacccgtgcagatgtatgaggcaggttgggcaccaactggggatgcacccgggtggacccaagctacacgccatagcaccggagtctcgacctagacaagcgctagtgaggaccggtggcatgcgcctcatgacatccaatgggaggacaatcaaccttccagatcaagagatgtgcctccatctccaagtgaatggcgctcaagttcctctcgttgggacttgggtgaaatcactaggagaatagacacccttgatatgcaaacaggggagatccagtacaacctcacggaacacatagctca

SEQ ID NO: 83524 - DNA, 212 bp, Oryza sativa
  Clone ID: PAT_MRT4530_82848C.1
aaaaggggttattttaaagttaataaaattggggaagcccaaatttaattacaccgtttttaaaaatttgtaaggcaaagagagcatacataagcataaaaattatgaccaaaaccctattttgaccaaacccaaaaaaagcaaagttaatggacaaggaaatttaaaaggggtaaataaattgtttaaagccaaggtttttggggttagcc

SEQ ID NO: 83525 - DNA, 1332 bp, Oryza sativa
  Clone ID: PAT_MRT4530_82849C.1
ctgggcccgacggcccaaaaggcggcccagaacgcgcgcgggcgggaaagagagagggagccggtggaccgggctcaccacgcgtggtcccgggtgggacccgcttgtcagcggctcggctcaccgtgcggagggagcacgcggcgcacgcgcgcgggcggggagggacgcggtgcacaggcgcggttcgcggtgaacgcggatgcggcgggcccacgcgcagcctcacggctcgcggtggaacgcgcgcacgggaggggctgaccggggtcggcccgtcccgtcctcggctgagctggcgccgacgtggcgcctacgtggctgccacgtgggctagcgggaggtagacgacgacgccggccggaacggacggcggacgacagcggcgaacggtggagcgaaccacggcgatacaggcgaaagcgagcacaccgggtggttgcacaggacgaggggagacgagccaacggctcggattcgccggagggagcttgacggcggcgaatcgcggcggcaacaaccggcggggagggaagagggaaacggcgacgaggccacgaggggtcgattcccggctgtgagagcatctatgcggctacgggaactcgatgctagcgtcggattggacggagctacgccgagcgaggctggcgacgtgcgggtgctacggagctcgagcggcgacggcggcgagcacacggcgagcgacggcaacgatggagcgaggaggaagaacggagtccccttccgcgtcctcgaacgcaccggttctcccggcgctcagcgaaggacggcggtggcgagacagagcacgggggcgacggcaatgggcggtcaagggcgcgagctggcgctcggcggtcgcggccaaagcggcgacagggaggatgacgccggcgaggaggaaaaaggggaaaaggagggggagaaaggggggcttgcccctttgccgattcgggaaaaaggaggaggtgagcgggggcgcgcggctgagggaggagggaggccctgcctccgtcccttggaggctagcgcgggagtggcggggccgatgcaattaccacgggaattacggggggcggttgggaacggaccggaaaactggcaaaggcgcgtgccaaaggttacgggggaggaaaacggcggtcgggcaccaaggaaccccccccggtttgaaacggaaggaggcccccgcaaaaaaaccggggaggtattagggaacgaaaggaaaattgttgggggggggttaagccaaaccccgggggggagggtttgggggataagccttcccctcccaggggggatagggaaaaaaaagatcccggcccccct

SEQ ID NO: 83526 - DNA, 456 bp, Oryza sativa
  Clone ID: PAT_MRT4530_8284C.1
atggagtcggagctgctgggtcgttgggcggcaagctcggcaacgatgacacaggtcccgccgccgcccaccgcggcgtcgacggagcagcctgaggccaccgagcaggcgacctcaacatcctacgggttcggcaacaccggcggcgccatgaccatcgccgcatccgctgctagctccttccttccacattcgctgggcgcagatcgagtctctgcaatatcaaggcttgaactagtgtggcacactgagcccttgtcgctgccgcgatgtagttgcacggtttccctcgttgtcgtcgccaccgccgctgcgtcccaccagcgcaaccacctctcgatcaggatcacgagcgacatgaacggccgcagacggcccagcgggaaggagaaggaagccaaccagcactaccgaacagtctctattttcaatagactacttgctactttatggtga

SEQ ID NO: 83527 - DNA, 1299 bp, Oryza sativa
  Clone ID: PAT_MRT4530_82850C.1
atgggccggccggcccaaggcggcccaaggcgcgcgcgcgcgggagggaggagagagagagccggtgaaccgggctcaccacgtgtggtcccgggtgggacccgcttgtcggtgacacggttcaccgtgcggagcgagcacgcggcgcacgcgcgcgggcgggggagggacgcggtgcacgcgcacgattcgcggtggatgcggatgcggcgggcccacgcgcagcctcacggctcgcggtggaacgcgcgcacggggaggggctgaccggggtcggctcgacccggccgagctggcgcctacgtggcgcctacgtggctgccacgcgggctggcgggaggaagacgaaggcgccggccgcgaatggaccgcgggcggcggcggtttctccgggacgccttgcgacgatgaggggcgacggggcgtacaccgggatgacgagggagaataagagcgagcgagccaacggcttggattcgccggagggagtccgtcggcggcggattgcggcggcggcgcccggcggagggaaaagggggaaacggcgacgaggtcacgaggggccaattcccggcgcgtcggattgggcggagctacgccgagcgaggccggcgacgagcgggtgctacggagctcgggcagcgacggcggtgagcacacggcgagcgacggcaacggtcggggcggcgccggctagctacggggaggctactcgtgctaccaccgaaggcggtcaaggcgcgagctggcgctcggcgctcacggccaaatcggcgacaggacggagggaggataacgccggcgggagaaaaaggggaaaaggagggagagaaaggggtttgcctccttgccgctttgggaaaaggaggagggaagcggggcgtcgcggcagagggaggaggggctctgcctccgtcccttggcggcttgcgcgcggagtggcggggccgaggcgatgacgacggcgatgacggcgggacggtttggagcggagcggcgacacgggcgacaggcgcgggctggcgcggcagagggtgacggcgacggcgaccaggcggtcggccaccacggcacgcgcgcgtgggatgcaatgggaggcgcggcggattgagcggcgcgggcggggagcggcagcgagggagcgaagaggagggctcggctcggcggctcacgcgcacgcgcgcgcggcgcgcgggcggagcggagggggagggggagagagagagagagcgagagagatagccgggaggaaattcggcccatcgaccctgggggagacaaaatagacttttgcggagg

SEQ ID NO: 83528 - DNA, 1459 bp, Oryza sativa
  Clone ID: PAT_MRT4530_82851C.1
tccaaggcggcccaagacggcccaacgcgcgcgcgcgcgggagggaggagagagagagccggtggaccgggctcaccacgcgtggtcccgggtgggacccgcttgtcggtgactcggttcaccgtgcagagcgagcacgcggcgcacgcgcgggatgcggcgggcccatgcgcagcctcacggcttgcggtggaacgcgcgcacgggaggggctgaccggggtcggcccgacccgatctcggccgagctggcgccgacgtggcgcctacgtggctgccacgcgggctggcgggaggtagacgacgacgccggccggaacggacggcggacgacagcggcgagcggcggagcgaaccacggcgataccagcgaaagcaagcacaccggacggctgcacaggacgaggggagacgagccaacggctcggattcgccggagggagcttgtcggcggcgaattgcggcggcggcaaccgatggcgggagaagggggaaacggcgacgaggtcacgaggggccgattcctggcagcgagagcatccacgcggctacgggaatccgtcccttacgccggattaggaggaaacgcatcgagggaggccggcgacgagaggcgcttccgagctcgggcggcgacggcggcgagcacacggcgagcgacggtaacgggcgcgagctggcgctcggcgctcgcgtccaaatcggcgacagggcggaggaaggatgacgccggcgggagaaaaaggggaaaaggagggagagaaagggggctcgccccttgcttctttgggaaaaggaggaggggagcgggggcgtcgcggcagagggtggagggggctctgcctccgtcccttggcagcttgcgcgcggagtggcgggggccgggcgatgacgacggcgatgacggcggggcggtttggagcggcgcgacgacacgggcgacaggcgcgggctggcgcggcagagggtgacggcggcggcgaccaggcggtcggccaccacggcacgcgcgcgcgggatgcaacgggaggcgcggcggattgagcggcgcggctcgggcacgcgcgctggctgcggggccgagcggctgcgcggctgcaggcggcagggcagcgggaccgggtgacgcggacggcgcggacggcgcggcacgggcggcaaccacgcaggcgcgcgcgcgaacgacgcgcggggagcggcaacgagggagcggagaggagggctcggctcggcgcgggcggctcacgcgcacgcgcgcgggcagagcggagggggagggtgcgctcggcgcggctcccgcgctcgcgcacgcagcgcgcgggcggagcggagcggagggagaggagggagagagagcgagagagaaagagagcgagcgccgggagggagggggagatgggccgagagaaattcagcccatcgaccccgggggaggcaaaatagacttttgcggagggatt

SEQ ID NO: 83529 - DNA, 2765 bp, Oryza sativa
  Clone ID: PAT_MRT4530_82852C.1
atgtacatgggcaacaacaacgggtactgtccacaaggaggtcaggggtggaaccaaccacgcccatattatcaaggaggtaacaataactgtaacttttctaaccagccctccttgaaggatctcgtttttgcgcaagctaaaactactgatgcattaagcaaaaagcttgctgctaatgaaaaggtcctagaaaacatcaatgtcaaactagatggctttgcttctgcttttcaaaatcagctgagctttaataaaatgatagagacccagttagctcaggttgcatccttagtccctgcaaatgaaactaggaggatcccggggcaacccgacccctcaggtgaaaatgttaaggtgatcacgacgaggggaggtaagtccctcgtgatccgccatatcctaaccctgcaggaaccaatgggatgtcaaaagaagcgtcatctaatgactcggctgacaaagaggttcagccagaaaagactctgccgcaggagtactacgacacacggttgctgccgtttcctcaacggcttaggaaaccgtcagtagacgagcaattcgctcgttttgttgaagtaatccagaagatccacatcaacgtgccgttgttggaggccatgcaagtgccaacatacgcccgttatctcaaggacatactcaacaacaagagaccgctcccaacaatggaggtggtcaagctgacggagcactgcagtaacctgatactccacaagctcccgaaaaagaagaaagatccggggtgtcctacgatcacctactcaatcgtggcacaacaattcgaccaggccttgtgcgacctgggagccagtgtcagcatcatgccaaaagatgtatccgtttccacatcaacgggaaggaggaaaagtttgagtttcaaccgaggacggaacagtgctctatggtcagaatgaaaatttcctagagaaggaaacaacgattcccaggaaccgttattggaagacgccggtaaaatgcccaataccggccaaaaagctagagcagccgactcagaaaaagccgccgtccgcaccaaaaccaaagaaagtgtggagggagaagcaaaagacgctcactccatcacctccggagatgggtagaaaatccgtgaactaaatcagaaggagtttgctctcaagttcattcaagctttgatagtttccctcaaattcaaatatttagttgcatatatacaagttgctttggtaaaactaaccggcggaatgaggaggcgactgtctcgtctgttcaaagggtctggctcttcactaagtcatcatgacgagtctagtactcgttcatcagccgatgtctcaatggaaggcgccgaagctccgcgacgactcctgaacgacaccgacctcgaccttgtcagtgatcaggagagacaagcctactacatgctgagcgaccgggagtatgctcacacacgagaatactcatcagagctgctgaaaaagataggtatggatgttgaatttcgttctatttggaaagctgttggttggcagagatttgctgtggtagatgagcccggttctcgtttgcttactttgcaattcctgtgcactttgaaagaaatagaagatggaattttctttcgctttttccataaggagtacacacttacatggaaaggcttaagtacacttcttggttttcacgattcctataagatcgatatgcagaaaggaatttctgggttcgagaaaaataggttttgggaacacatttctggtgctccaatttgcaagaaacataggacgaatgacattcataatcctacacttaggctcatgcacaaatggattgctatgactttgtttcctagaggtgatctgagacccattaggggagataaattgattatcatgtttgccatgaccatagaagaatctcgtgcaggtggaacatacagggagacgtgcaacatgacaagaaacgaactagaaagttcatcatcctcgacacccgtgcagatgtatgaggcaggttgggcaccaactggggatgcacccggatggacccaagctccacgccatagcatcggagtctcaacctgggcaagtgccagtgaggaccggtggcatgcgcctcatgatatccaatggggggggacaatcaacctcctaggtcaagtggtgtgcctccatctccaagtgaatggcgctcgagttcctctcgttgggacttgggtgaaatcactaggagaatggacacccttgatatgcagacaggggagatccagggttcaatccttatcaaggaccctgagcgaaagccaagcttggggggggggggagacatcgttccccctactaaggttgttgtaagatatgagatagtaaataagagttactatgatcctgatcctagttcgacttaaattccggatgttttgtttttcaaaatgataaatttgaagttcctcaattgatataaattcctaccagaaccaaaaaagtgccatcatgattaaaccatgaacttctcatgctctatgatcaagatcatacacccacatatatgcacatgctaaactcctacactgggagctaagcaatattccattccatttccatactaccccaaaataaattctctatgctttcatgtgctttcttctcctaaaaagaaaatcctttcggaaaaaaataaataagagggaaggagggaaaggcatggttatgaaaaaaaataagttatgctctcacaagcatgagcaaaaaaaaaaaaaaaaaaaa

SEQ ID NO: 83530 - DNA, 429 bp, Oryza sativa
  Clone ID: PAT_MRT4530_82853C.1
atggctaacaagactctccgcgagttcgctgctccctccgctgacaatatggccattgggccgcaggtcaacataggggacgtggatttcaacttgaaatccagcctcatcacgatggtgcaggctagcccgttttgtggcaagtctaatgaggataccaatgctcatttgcaacagttcctggagatctgtagcacgtacaacatcaagggcgttagtcccgacgccgtcaggctacgactgtttccattctcccttcttgggagagcgaagcagtggttatatgccaaccgtgctgctgtcaacacctgggacaaatgctctacggcattcctctcgaaattcttcccgatgggcaaaaccaatgcccttcgtggacggatttccagtttccagcagacaagagatgagtccattcctgaagcatga

SEQ ID NO: 83531 - DNA, 351 bp, Oryza sativa
  Clone ID: PAT_MRT4530_82854C.1
atgccgcactcacggcccaggcacggcccaacacgcctcgggccgtgccgggccggcccgaaggcacgatgggccatcggggaggcgagccaacggctcggattcgccggaggtcgctcgacggcggcggattgcggcggcggcaaccggcggcggaagaagagggaaacggcgacgagagcatctacggcggtgagagcatctacgcggcttcgggaactcgacgctagcgtcggattgggcggaactacgccgagcgaggccggcgacgagcgggtgctacggagctcgggcggcgacggcggcgagcacacggcgagcgaaggcaacggttggggcggcgccggctag

SEQ ID NO: 83532 - DNA, 164 bp, Oryza sativa
  Clone ID: PAT_MRT4530_82855C.1
ttttgaacctagcgcactccaccagccgcggccggccgattgagcagtggacgaatgagtgggaaccgacgactggggagaaccaactcatcttctagcgcctactctgggccgacgaccagagatggatgcaggacgcagttcaacagctgcggctagattct

SEQ ID NO: 83533 - DNA, 603 bp, Oryza sativa
  Clone ID: PAT_MRT4530_82856C.1
tcagcggctccaaagggagggaggtggcgcctggcaggtgggccccaccaggcggtagctcaaaggggaggcgagggaggcgccggccgggctcggctcggactcaaggccgaccggccgaccaaggtgaggcggcagcgaggcatggccaccgacggcggtgaccggcggtgcaagaagcggcggcgacggccgaaaggcggcggcgcatggccgaaggcgacggtggcggtcgaagacgacggcgcacgcgcggagggcggcggcgctcatgagagagagggaaggagggaggaaagggactcctcaccggacgagcggcggcgaccggagtggaggatggaagcgggggcgacggccgacgaacggacggcggacgggcggcggcaacacctaaagaaggggagggaggagttagggatggagaggacgaccgcgacgacccataatggccggccggagatggaaacaatggcgagctcaccggcggcgcgagggaatcggagctccggcggtgattcgcggcaacgaagcggcggtcgaggtgcgggcgggctcggtgagcgcgacggcggcgactgcgcggcgcggcggtggctatag

SEQ ID NO: 83534 - DNA, 502 bp, Oryza sativa
  Clone ID: PAT_MRT4530_82857C.1
aacctctgcagagggggtacactttacccacacgacattactaacccggatcacccagcctgcatttctaaagccgacacaggtttaccatatgccgacgagagggatcccagaccaacaacaggttaggtcccagaccatattgtgccaggaagcccaggggtcctccccgacaccaccccggcgaatccacttgtctctcggcatcaaggctcccctgattagctaattactcagccaggggtgtcccattccacccatgtggttgcactatcatatgctcggatgtaattccgaaggaatcggtccttaaaagcgaccgcacaagcatcccgcccagattttaagtttgaaggcgaccgtcgatactcacacagagtgcatgaataccgaggcgtgaccaggtggttacaaggaaacatggtggcttgccttgctcagagtcttcacggagcttcccgaatcttcgagatatccacgatcgaccgaaaatccgcaaccg

SEQ ID NO: 83535 - DNA, 955 bp, Oryza sativa
  Clone ID: PAT_MRT4530_82858C.1
ctatagccactgccgcgccgcgcagtcgccgccgtcgcgctcaccgagcccgcccgcacctcggccgccgcttcgttgccgcgaatcaccgccggagctccgattccttcgtgagctcaccattgtttccatctccggccggccattttgggtcgtcgcggtcgtcctctccatccctaactcctctcctccccttctttgggtgttgccgccgccctccgcgcgtgagccgtcgtcttcggccgccgccgtcgccttcggccatgcgccgccgcctttcggccgtcgccgccgcttcccgcaccgtcggtcaccgccgtcggtggccgtgcctcgccgccgcctcgccttggtcggccggtcggccttgaggccgagccgagcccggccggcgcctcccttgcctcccctttgagccaccgcctggtggggcccaccggtggcgagggtgggcgtgatggagttgggtcggccggggtgtccggttgtccagctgccggattcacgcggggtggtcgtcgtcgtcgcgcccgacctcgccgccaccgcgctggatccaccgcgcctgacctcgctgctgccgcttgccgccgtcgtcgtcgccgcggggaggtcgtcgtcgccgctgtcgacgggtggtaccgcgactacggtatttggatggtatagggatcgtcgataccaaggtatatgcgagattgaggtaaaagagatggagacatggatttttatacaggttcaggcaccttatctaacaggtaatagccctacatcctattggccggaaccggtgttgctctttatttatcaacacgtagtcaacgacagggtagtcttcctcctcgagcatgaactcgtcgagatcagagatagcgctagatccctctagccggcctccgtaggcaccggatgcggtatgtctaggctaatctctgatgtcgagatctggcggggt

SEQ ID NO: 83536 - DNA, 568 bp, Oryza sativa
  Clone ID: PAT_MRT4530_82859C.1
aacctctgcagagggggtacactttacccacacgacattactaacccggatcatccagcccgcatttcgaaagccgacacaggttcaccatatgccaacgagaggggtcccagaccaacaccagatcaggtcccataccatattgtgccaggaaacccgggggtcctccccgacaccaccccgttgaatccacatgtctcttggcatcatggctcccccgattagctagttactcagccaggggtgtcccattccacccatgtggtcgtacttgtcttatgttcggatgaaattccaaggaaacggtccttaagtgcaagagcgggaaactgtacacccgaatttaagtttgaggcgaccgtcgatactcgtacagagtgcacgattaccgaggcgcaactaaggggttaagggggacatggtggcttgccttgctcgagatcttgagcttgatcctcgaaatcctcgcactgcgggtcttcgggctccgaaactacacgcgaaacgggacaactcagcaaacggcgaaaataaagccctattattgacctctaagcgtgccattaga

SEQ ID NO: 83537 - DNA, 413 bp, Oryza sativa
  Clone ID: PAT_MRT4530_8285C.1
agacacctataatggggcgggatcagataccattaacctctttgatacaaccacgtatagtttgatgtttcggcggccttaaaaccattcacattttagacacatttacttgaagagggttcatatactctcttgtgttgcaaaaaatgactccggtttaaaagaatgcctccatgaatagggatcgactacgtggtgcatagcatgtgactgatacgttcaatcagcgggtgtttgtcttcccagtcgccgtcttatctggactcaacttgaacgaacgtatggttttaaccaccgtgttctttgccatataagattctggaacttttctgaccctgaaagccactttaagcgaacccctgattaggaccttgaaggattcacttgaacttgccttatcattcttttttaag

SEQ ID NO: 83538 - DNA, 375 bp, Oryza sativa
  Clone ID: PAT_MRT4530_82860C.1
atggagacggagtcgctactatccctcgtcagcaacatcaacgagcggcgacaacaggagaggaggggaagagatgggattgccgtcgttgttgcatcggccgcctcgggcgacgccgcgtgcaggaccaactttgctaggcggcagcctccgaacgaggtgatgtcgagaagcctgacaaaaagcattaaaaagttccccttttatcaggcacaggctgcatctactgttaaaatctccagtgcaggatccgcattatccccaaatgctgcaccaccaaactacgagctaaaagaaaaagaataatcaaggacttggagcttacagaacttttagcatcatgtacaagtaaaaagcttcagcagcatactgatc

SEQ ID NO: 83539 - DNA, 1070 bp, Oryza sativa
  Clone ID: PAT_MRT4530_82861C.1
gtgggccccaccaggcggtggctcaaaggggaggcgagggaggcgccggccgggctcggctcggcctcaaggccgaccggccgaccaaggcgaggcggcggcgaggcacggccaccgacggcggtgaccggcggtgcgggaagcggcggcgacggccgaaaggtggcggcgcatggccgaaggcgacggcggcggccgaagacgacggctcacgcgcggagggcggcggcaacacccaaagaaggggaggagaggagttagggatggagaggacgaccgcgacgacccaaaatggccggccggagatggaaacaatggtgagctcacgagggaatcggagctccggcgcggcgcgcgaccggagatgggcggcggtggcggagctcgggtgtgacagcgcgggtgcggtgcggaagggggcggacgtggccggggaggtggccgaaaccgccggcgacgtggggagcgacagggcgtgggcggcgtcgtggggaggacgcgggaacggcgtggcgtgggcgcgggaggagcggaggaggtggggcggcagcggcggttgccggcgtggggcggcagctggaggaaggggacgacctgacagcaaggagagggggaaacttcagggcgtgacacgcggcgacgacaatggcggcgggcggcagcggctaggtcaggcgaggcgaatccggtgcggtggcgagcggcgtccacgagctcgggcgccggctggagaggatcagcggttcacggcggccggagggcgggagggagaggagcggccgtgcccccgtgctggcgaagggggcggccgacgggagcaccgcgagggaggaggcgagctcgtcaaggcggccgacaggagaggagcgacggcgcgtggggaccaaccggagatgaggcagtgcgcgccaatccaccggagggagggagaggagcggtggcccacccgccggaaaagagcaatggcctcggcctcagcaaaggccggttatgttcctccctctgtctcacacggcccaccctggctgctgcgcgtctccgagcggcgcgatgggccgcaccacccgtag

SEQ ID NO: 83540 - DNA, 759 bp, Oryza sativa
  unsure (1)..(759): unsure at all n locations
  Clone ID: PAT_MRT4530_82862C.1
gtattgccacaggggtaaattcccgttatgcaacctcggaaactccactgaagtaatttattattggggcccaaaagtgaacaaacgggggtagccccggggcccacccccttccaattgcttnccacagccccacggacccacgngacaagggataccccactacagtgaatcgattgtctgccattgccactgttgtccctggacacccatagcccacggattgtcccacagaatcaccacgccacgggcgcccccgcacacaggagatgacccactctctggattattgggatttgtgagtagtgactgcatgtgcccccatccctgtggctgttgatactngtgtatgcgcgctatgggggatgtttggttttgggagttttgcaatggtnccttttggagctctgacttcagttttgctgtgagctggtgtacataaaggaaattgtagngatgtaagactgagtgtacgccacgtgccccccgtgtgtacttgtngtgtgccaaaaatgcccaagtgcaagatgtgtgtgggggcgtgctatgggaccttgngcttgtatcagtgtcagaggtttcagttacttacgtgtaccgctcggtgaaggagtttgaatgctgaggctatttataattggcantgactaggatgctgattttatgcgaaatacatataagaattggtatcaggaataactgtagtaatctggtttatatacaactattgatttgtcaggttaaaaaaaaaaaaaaaaa

SEQ ID NO: 83541 - DNA, 168 bp, Oryza sativa
  Clone ID: PAT_MRT4530_82863C.1
agaagtcagccctgttattgcttcccatttatattgactgttggtccgacaaagttggcacgtgcgcttacttatctcaaacaaacggattgaacctgcccatgcaccccggatcacccatccactgcacaacaaaagtcaccaaacacagcgcgaaacccaaagttg

SEQ ID NO: 83542 - DNA, 510 bp, Oryza sativa
  Clone ID: PAT_MRT4530_82864C.1
cttcgttgccctcttgtaaatagcattcagacagagaaggagaacaaccgaactctcccagtcaaaattccagatctagcatgtcaaaatcttttcctcaggtgtttcacaaggtttgattctttttaacctagataatgttgaaaatggaagtgtatcaattatcaaatgtcaggatatgatagatcacatgaactgtgtatattcacaagttcatgaagaactagctgttcagcacaatatctttttcgtatgaatactaaatcataagttaaatctggattgaagtgttgttttgcaagcaattggaggagtggattgtgatgtcttttgaataggcctactattcttgctgaatttaagaaatattgtgcatctgttctgtcttttacgactgaagaacaaacaatcactaaaaataaaacgataattttaattatttgtttcaagcatttttcaaaagatgtaaaaaccagaaaactggagcataaaacataactacattctagt

SEQ ID NO: 83543 - DNA, 279 bp, Oryza sativa
  Clone ID: PAT_MRT4530_82865C.1
gtacgaggaatcatccattctttcttgacatttgtgcgatatcttcacgaacgacgctggctatcaacacacaacccaagcgcgcccgttaattaattaagctagccgggggagcgaacaatgccacggacaatagaccgacacacacgcacaacacgaaagttattcggcgcccccgtggtgaacgttggtactactagccgccgtcaccgtcgccggcgctcacgccagcctgaggccgcgcctgagcgcggagttccagacggcgacgatccgggc

SEQ ID NO: 83544 - DNA, 116 bp, Oryza sativa
  Clone ID: PAT_MRT4530_82866C.1
atgttggcctatcttctggagagtcctagaggagcgtcggagttgtcggctgtgttcggagatcctggatgggaactatttccctccgcacggaaaacgaagcggtccattaacgc

SEQ ID NO: 83545 - DNA, 202 bp, Oryza sativa
  Clone ID: PAT_MRT4530_82867C.1
ccccactggacatcattgctgccagtacatgactggtggctagtcagtcgtacttgggaggggtgtcactaatggcgcggcttgaatcacccctatccttgcctatatttcacatgatgatgatacactcgccccaaaggttaacaaggtgatagataacattcacttagtgaactgttccatccgggcagatgctgtttag

SEQ ID NO: 83546 - DNA, 362 bp, Oryza sativa
  Clone ID: PAT_MRT4530_82868C.1
ggccccaaatttttttcatcatcatcacttaaattttgcccctatttttgccaattaagggaaaatcgggaaaatcattgcctaaaatgggggcccttgcttatgcttttacaggacaaattaaccaggtgccactaaccatttacaaaactttgggttgaacactttactttccacacaggggaaatggaaaaggaaaaaatcgggtaaaaaaaatgcaagcccacatttttaaaacaggaggcccctccttttttgggcctaaccaaaatattatagccgggtgagcccccatgctcaacggggaaagctttgaaagctttgtagggactgaccaagccaaatttcttatggcaaggggg

SEQ ID NO: 83547 - DNA, 285 bp, Oryza sativa
  Clone ID: PAT_MRT4530_82869C.1
attttcttctctttctcgctgcgattagagaattcaccttcttcttcctcctctcgcctcctacctcttgctgcagcgcacggcgccgcgccgtcatctcgagcttgtatccttggtcttcatcttctctcaccttcccttgagaagatttgctattactagcttaatatttctaggaaagaggagaagaggagaggagaggagagggttggaacgcaacgttaggtgggggcgtgctagggaagtaagaactagaggaagggaggcccaactgttctatccttc

SEQ ID NO: 83548 - DNA, 368 bp, Oryza sativa
  Clone ID: PAT_MRT4530_8286C.1
tataggcccagaacgcgtcatacaaacatttgagagccagtcatgggtgcactccaatcgcttagcactttcagagtatgttaaagctcttgtcaaggcagataggctggatgatagcaccttgctcaaaacactacggagaggtatggtctgttcaagaggagaggcagacagacatgataggtcttctgaattaaagagtgctgctcaagcgacaatagatggaactcttgagactgcaaacgcacccattcacatggtgacatcagacacaggccagtgtgaggatcagatctggcggacctttcgaaggcttgcactagctatccttgcaattgcagtcattggggctctcatggaggatagag

SEQ ID NO: 83549 - DNA, 743 bp, Oryza sativa
  Clone ID: PAT_MRT4530_82870C.1
gcacgaggaacgccacccgctcgcccgccaccgccgccgccctcgcctggatctacccggcccgccgtcccattcaccaccgagagccgtcgtcgtcgccccccaccgtcggcccacatctccaccgccaccgcgctcctcagtcgctccaaggcatcctcctcgcgtcgtcactcgccaccgcccgccgtcggtcctcccgccagcgccatccaccaccgtcggcgtcgtcggccctactccgcagccggcgacgcccccaagatctgcgccgtcgcaacctcggcccttctccaccaccgccgccgccctcctccaactccgccgcggctctcctccagcaccgccgtggacctcctccgccgctgtgttgtagtccaggtctacaaaagcgatggtgctatgttagcctaagtagctttctaaacttgaaccagcctggtgataaccctgataacatggaggttaatccatcggccactgcgcactctgggaatagtgtcacttcatcgggaagaagggctagaggtccaaccaggatgccctcgggcatgtacactatcacagcagtagatgaagatgggaatcctacatctccaaaatcggcactcaccccatattccaatgctataggtgtcattgctcgggatgacatccccatcaagtaccgacactggaagaaagctgatgtagatgaattggagtggacggtaccaaacagatataaggaccttgcttgggaa

SEQ ID NO: 83550 - DNA, 513 bp, Oryza sativa
  Clone ID: PAT_MRT4530_82871C.1
gttgttttctcctccccctcccgtttcggttcggtttcgtttccggctcgattgcgtttttttttcttcttcgtggggttggtgggaaagcatggcggcgccggatgttgagtaccgctgcttcggcggagggctcgtctgggccaccgacgaccgctccctcaaagccgacttgtgcaccttcggcgagatcctcgagtccaagatcatgggcgatcggtagacggcgaggacaagcggcttcgggttcgtgacgtgtctcaagcgaacatgccatgcgcgacgccgtcgacgtgatgaacggctaggagctcgacggacgggacatcaccgtttacgaggcccattcgggccgctccggaggcggaggcggaggcgggtaccgccaactcggcgggagcgtttgctaccgtggccgaggcgtttacagtggagagcggggtttaggctacagccagcgccgtgaaggcggctacggaccgggcggttggtacggcggcccccgaggggaag

SEQ ID NO: 83551 - DNA, 775 bp, Oryza sativa
  Clone ID: PAT_MRT4530_82872C.1
atggcaacccaggggaaacagtcggctgccaccgccaccaccactcacacggtttgtcaccaggcctatccaagctacaacaggagtgccaagatgccatcggtgccacagtggtggatgatcaacgatgaccgggccaccatgatgacgctagcaacaggtcaagctggctgtatttctagaacaatcttcgtggcttcgatggacgggcactacctttcccttgggtgtgaggagaatggtcaacatgaagtaccgcctgcccacttcgccgtctctgaccggagaaatcgtggggaaaaaatagcgagggccaagaaacagaagaacccgcggggagaaggcgagaggggggatcaggaattcaggatgcggctctccttccccctggtggccggcgccgtcgtgattggagtgatctctgggaatgttatatttgggccacctcttcagaagtactgggcagagaagcagcagcagcagcagcaagagggagcaaaagaggggcaaactggaacgacataattaaacacaagtgaagccagttttgctgattcaacttctgccaagcttacaagaagtcccaatatcagaacgctgaagctacaacattgtgaaaactattccattagtatgctctagctctagcctttgttagaacagtttcaggtagctgtatctgtatgccctagttgttgaaaggaacattgcaacatccacagatgaaaggaacattccaaaccatcattttgggcaaaaaaaaaaaaaaaaaaaa

SEQ ID NO: 83552 - DNA, 1641 bp, Oryza sativa
  Clone ID: PAT_MRT4530_82873C.1
ttaataattgcactctattatcaccaacaccgatgcgcctacaaccggctgactcgtcagtccgttaccctgcagggatagcggaggatgtgctaggtaaaatacgaagatttcttcatgcccgatgactttgtggtgttggatatggaaacgggaaaaaatacgccgctcatcttggggcgtccattccttagcaccgcaggagccaacattgacaatatccgagtggtcgaagtggagcctcccaagatggatagcttggtaaagttcatgtaaaatttcctggagaaggaaacaacaatgcccaggaaccgttattggaagacgccggaaggtgtggaaggaaaagccaaagacgcccactctatcacctccatagacgggtggaaaatccacgaactgaaatgaaaggaggggtccggctcttcgtcaagtcatcatgacgagtctagcgctcgttcatctgctaatgtctcgatggaggatgccgaagctccgcggcgtctcctgaacgacactgacctcgacctagtcgatgatcaggaaagaaaagcctactacatgctgagtgaccgggagtatgctcacacgcgagaatactctccagagctatttggaaagataggtatggatgttgattttcgtgctatttggaaagctgttggttggcagagatttgctgtggtagatgagcctggttctcatttgcttactttgcaatttctgtgcactctgaaagaaatagaagatggaattttctttcgctttttccataaacagtatacacttacatggaaaggattaagtatacttcttggttttcacgattcctataaaattgatctccagaaagtaatttctgggttcgagaaaaataggttttgtgaagatatttctggtgctccaatttgcaagaaacctaggacgaataatatccataatcctacacttagactcatgcacaaatggattgctatgactttgtttcctagagtgcaaggacatattctgaaacatggagtagatggatctttaatatactttttccttgattgtacaaatgaaattccgttgccaaatgtggggtatcatttgtacaactgtagtgaactaaccattcccctgcagaccatagaagaatctcgtgctggtagagcatacagggagacacgcaacatgggaaggaacaaacaagaaagttcatcatcctctacacccgtgcagatgtatgaggcaggttaggaaccaactggggatgcacccggatggacccagactccacaccatagcatcggggtctcaagctgggcaagtgccaatgaggaccgatggcatgcacctcatcacatacaatgggaggacaaccaaccccccagatcaagtggagtacctccatctacaagtgaatgtcgctcgagttcctctcgttgggacttgggtgaaatcactaggagaatggatacccttgatatgcagacaggagagatccagtacaacctcacggaacacatagcacagacgcaagaatggtaacaaactgctgatgctcagttcgccaacttcaccaacatgatgcagcaatagcatgatgaccttcaagcgtacttccgcttctaggggttcaatccttatcaaggacct

SEQ ID NO: 83553 - DNA, 1165 bp, Oryza sativa
  Clone ID: PAT_MRT4530_82874C.1
aacctctgcagagggggtacactttacccacacgacattactaacccgggtcacccagcccgcatttcgaaagccgacacaggtttgccatatgccgacgagaggggtcccagaccaacaacaggttaggtcccagaccatactgtgccaggaagcccaggggtcctccccgacaccaccccggcgaatccacatgtctctcggcatcaaggctcccctgataagctagttactcagccaggggtgtcccattccacccatgtggtcgtacttgtcttatgtttggatgaaattccaaggaaaacggtccttaagtgcgagagcgggaaaccgtacacccgattataagtttgaaggcgtccgtcgatactcgcacaggatgcacgaatatcaagacgcaactaggtggttacaaggggacatggtggcttgccttgctagagatctggagcttgatcctcgaaatcctcgcactgcgggtcttcgggctccggaacgcgcgcggtcccgggtgggacccgcttgttagcggctcggctcaccgtgcggagggagtttgcggcgtacgcgcgcgggcggggctgggacgcggtgcacgcgcgcggttcgcggaggaacggatgcggcaggcccacgcgcagcctcacggctcaccgcggaccacacgcacggggagaaacggagggagcggctggccgggtcggcttatccggtcgcggccgaggtggcgccgacgtggtgcctacgtggcagccacgcgggccggcgggaggtagacgacgacccggccgcgaatggatggcgggcgacagcggcgagcggcggagcgagccacggcgataccggcgaaagcgagcacaccgggtggctgcacaggacgaggggagacgagccaacggctcggattcgccggaggttgctcgacggcggcggattgcggcggcggcaaccggaggcgggggacgagggaaacggcgacgaggccacgaggggccgattcccggcggtgagagcatctacgcggcttcgggaactcgacgctagcgtcggattgggcggaactacgccgagcgaggccggcgacgagcgggtgctacggagctcgggcggcgacggcggcgagcacacggcgagcgatggcaacggtcggggcggcgccagctaa

SEQ ID NO: 83554 - DNA, 402 bp, Oryza sativa
  Clone ID: PAT_MRT4530_82875C.1
atggcgactgggaggacgtaccttgtgaaatcagcggcagtggtgggtgaccctcggggaggcgaagacgggacacagcagggtaagcgctgcagctccgatctgagggaaggtcgcttgcgctcgccggtgagcctctcctgcggtggcgctgcgcggcgcgcggttcctgagacctgcgagagcgtcgtggcgcgcgattacttcgtgcacaacgtcgctggtttgggatcggtgaggacgaagatggcggcgctaccttaccggagaaatggagacggaggagagcgcgccaccgccggggaagcagcagccgccgccgcgtccgccgctggcgtcgcttccgttgcgtcgtcgtcctcccgtcccgcctccaagtttcagaaacctgcgtgggtttag

SEQ ID NO: 83555 - DNA, 1191 bp, Oryza sativa
  Clone ID: PAT_MRT4530_82876C.1
atgacagaggaagtggtcaaagaggttatcatagtctcaactcccgaatcatctaaatcgacaagcggcgatttcccggtgaattctcttgaaaatgtggatgtcagcagtgtgccatctgacctgaagaggaaggagaagtcagtgccacattacctgagagcatccactggttcttgccatgacagctgcaaatttggggcacatcattcccctgaacccaagaagtactggcctgttcgtcgcaggcgacatcaggaccgtgccaatgccgggtgcggaaagcaaggccaggatgaaatccagacacaaaaaggcagatccagaaacaaggacctggagctgaagatttgtcttgtgaaagatggtaatgttcatgacaagcctgaattcatcgaggtgaagaagccgcctattgaaatggcatctgacaactctgaaacctcaccatgcgtgcaagatcagttgtcatcagctgaagaatccaaacgtgttgaggatggagctgatctgccatgtggtgatgataaattcttgatccctgatggcaatgctgcatgttttgtggatggagaatcatcagagggagctgtaagcattgagctggagatgccgttggccatccaggacagtgacgcgtctgacgatcatatcgcagatgccatttcgcctcctgaatgtgtgtacaaagctggtgaacagttacttgtggatgacatgtgtgatgatggatcaggaaatgagtgtgcaggttcagagaagaagagcactcagattgtgatggcctccgagaagcgtgaaaaatctgggcatggaactaaatcgaagagtttgtataatgtttcagtaaaaccgaaggtgaaagagacatcgactgcaacgcgaagcaatgcgtcaagccagaaaattgtaagaacattggatcggaaagcttcagttaattcagagaaacaaactgacagaaagatgacagtgatgaatgttgccaagaatgctcgtgtttggcaaaagaaggaagaagagaaaataagtccagtgaaactgtctcgttctataaacttgtcatccaagtcccttttgagcataaagatgagagcagtcaagaaagaaaaacctgcttccctagtgaagagcaacaagaaggtgtatggagcagaaaatgctgttgctgacgttaaggagaaaacctga

SEQ ID NO: 83556 - DNA, 1038 bp, Oryza sativa
  Clone ID: PAT_MRT4530_82877C.1
atgaggaggggcgctgtgacgagaggccgacggcgcgggagtaatctctccggcctcgggccggggaagaggaggaagacgagcgcccggagtccccttccgcgtcctcgctcgtgccggctcctccgacacgcgcaacgacgaacggcgacggcgaaacagaggggcggcaacaatggagtggaggtgatgggacaacgagagaagaagagagggagggcgcccggggctttaaagggcggcaatgtcggttttggaaaccgactttgggcggtcaaggcgcgagctggcgctcggcgctcgcgtccaaatcggcgacagggcggagggaggatgacgccggcgggaggaaaaaggggaaaaggagggagagaaagggggcttgcctccttgccactttgggaaaaggaggaggggagcgggggcgtcgcggcagagggaggagggctctgcctccgtcccttggcggcttgcgcgcggagtggcggggccgaggcgatgacgacggcgatgacggcggggcggtgtggagcggaacggcgacacgggcgacaggcgcgggcaggcgctgacgatggcggtgaccaggcggtcggccactcggcacgcgcgcgcggcttgcaacgggaggcgcggcggatggagtggcgcggctcgggcacgcgcgctggctgcggggccgagcggctgcaggcgcggcagggcagcggggccgggcggcgcagacgcgacgcgggcgacgaccacgcgggcgcgcacgcgaacgacgcgcggggagcggcagcgagggagcagaaaggagggctcggctcggcgcgggcggctcacgcgctcgcgcgcgggcagagcggaggggggagggaggcgctcggcgcggcggctcacgcacgcgcggacagagcggagggagcggaggaggggcgctcgcgcgtgcagcgcgcgggcggagcggagcggagcggagcggagcggaggaagaggagggagagagagcgagagagaaatagagcgagcgccgggagggagggggagatgggc

SEQ ID NO: 83557 - DNA, 2154 bp, Oryza sativa
  Clone ID: PAT_MRT4530_82878C.1
caccacctggccgaaggtcatggccttgctcatcacgcgggccctcacgtcatcctccaccttcgcgaacgtcagcaattccatcagcttgtcactgtccttgtttaagattgcaggcgtgtacgtgtcaggtgccccctggaacttagcctctgccacatacttgccatagtctgcccccttcgtgcctgcctgcagccttcagagctgcagaagcttgctcgctgtctcctcgatcacattgttcaacaatccctgctcgttcttcttcttgtccctgacatcctgatgcctcaggatgacaacttcaggtttcgaagagcctttctgagaacggctttctttcttgctaacttctacttttctcacttttggtgaagctgacttcaggtttttctccttaacgtcagcaacagcattttctgctccatacaccttcttgttgctcttcggttttactgaaacattatacaaactcttcgatttagttccatgcccagatttttcacgcttctcggaggccatcacaatctgagtgctcttcttctctgaacctgcacactcatttcctgatccatcatcacacatgtcatccacaagtaactgttcaccagctttgtacacacattcaggaggcgaaatggcatctgcgatatgatcgtcagacgcgtcactgtcctggatggccaacggcatctccagctcaatgcttacagctccctctgatgattctccatccacaaaacatgcagcattgccatcagggatcaagaatttatcatcaccacatggcagatcagctccatcctcaacacgtttggattcttcagctgatgacaactgatcttgcacgcatggtgaggtttcagagttgtcagatgccatttcaataggcggcttcttcacctcgatgaattcaggcttgtcatgaacattaccatctttcacaagacaaatcttcagctccaggtccttgtttctggatctgcctttttgtgtctggatttcatcctggccttgctttccgcacccggcattggcacggtcctgatgtcgcctgcgacgaacaggccagtacttcttgggttcaggggaatgatgtgccccaaatttgcagctgtcatggcaagaaccagtggatgctctcaggtaatgtggcactgacttctccttcctcttcaggtcagatggcacatgcacttgcacttccttggtcagtggcatgatccacttgtcatacagctccacggccagctccggctcgatcttgagcttaatttcgttctccagatcttcactcaccacctggccgaaggtcatggccttgctcatcacgcgggccctcacgtcatcctccaccttcgcgaacgtcagcaattccatcagcttgtcactgtcctgcagaattaacatgtcccagcatgcgctcgatccacagttaccgtcacttccttccttcacaagccttggcagaaggtcaccaaagtacacatcccagatccttttgtttatgttgatgttagcagcagctggatgcagaacattctcatactcaacagatggctccaccacctccagcaaattctcagggaagaaaggatgctcatccgggctcttgtacctccccattctagcatgcatcttctcggtctttttaaccatgaactcgaccagggagccattgaaccggacgatcctggaagcgttggggtcgtaggtgtccgggttgtagcagaactgtgacctctccagaaggccgaagatgatggtgtcctcatgcttcatcagcgtgctcctgatgctgccaatggtcaacacattgctcttgttgctctcttccacaccctctttgctctcttccacggcccctgacgacgacttgggcgccgccgccgccggagccaccaccggcagcagcggcgggttggcggccgcgacgaggggcttggcggaggcggccgcgggtggtcccagtggcagagacgccggggactggttcgccgccgccgccgccccagcggcggggagcgcgagtggggtggagcgggccgcggccttgtccaggggaagctccattggaggcggaggaggaggctggaggtggaagaagatggcaatggagtggtggcggtgagcttggcttgtggccgccat

SEQ ID NO: 83558 - DNA, 2247 bp, Oryza sativa
  Clone ID: PAT_MRT4530_82879C.1
atggaggatgagcacatggaagaggaagaggggctgacgtcatccaagggggggggcgccggcaagcggggcccgcatgtcagcggctcaaggcggccggtgcacgggaccaagggtccggatcggcccaagccgatcggacggtgcagggagcagccaccgggctcggcctcggcttcaagccggccggcaagcatggcgaacggcggcggcatgcggtcgccggcgacagcaaccggcggcgtgggaggcggctggaaaggaggagagggattaggggtggagaggacgcccgcaacgaccaaagtggccggccggggatggatgaaaaaggagagctcaccggtgagcgagggaaacggggcttcgggggtgattggcggcaaccaagcggtggctgaggagcggacggcacccgcgagcgcgacaacggtggcttcacggcgcggcagcggctctagcggcggtggcgcgcggccggagacggcggtgcgggagggggcggacgtggccgggaaggtggccgatttggccggcgacgtgggggtggagagagagagaatggggggggattcaaattcgaatcccgccccttgcgagcacgcgcgagggccgggagatgcgggggagagggcggcgacgtggggaggacgcgggagcggcgcggcgtgggcgcgggaggagcgaagaaggcggcggcgcggacggtttcggcggcggttgccgtcgtggggcgggcggctggaggaaggggacgacctgacagactggttacacaagatggagaagtatatgaggggatctagaatgactcttgaggagaaggttactttcatgccttttcagttgactggtcaggcggacatttggtgggatggagttgttgaagagtggaaccctgaccgtggtgctattacttgggaagtttttcttcagcagttcagagctaagtattatccagaatcatttagggacaagatgagtaatgagttaaacaatatccaacagggaagcaagactgttgatgagtatgaacgggagttcaacagtattgtacgctttgtgcctaacgtggcaagtgatgagcgtgagaaggctagaaagttttctcgagggctcattgcccgatatagagaagtgatgggaagaaacccacctactatatacctcaatgcagttgaggaggctcgagggatggaggttgagctccaaattactactgcacagaagaatcgttctggcaatgtcactggcgaggagatggtttttcaagggagcgctcctccgcattctattttcgtgatggcaaggttatttcctgggcagcgtgctgtaaagacagggttattatgggccttagccgagaaggcatccaagcctttattgattgaagatgttcctgtagtgcaagattatcctgatgtttttcctgcagaattgccagggatgccacctgagcatgatgtagagtttcgtattgatcttgttcctgaggagcatgagcgtcatctgaggatggtactagggaccctacgagaaaacaagttctatgctaaactgaagaagtgtgagttctggcttcctgaagtggctttcctagggcatgatttctcgattatcgctaaaccaatgacgatgctcacacataaggatgtgaagtttcaatggacggaccaatgtgagcatagtttccagcaattaaagcagagcctcacggctcgcggtggaacgcgcgcacggggagggactgaccggggtcggcccgtcccgacctcggctgagctggcgccgacgtggcgcctacgtggctgccacgtgggctggcgggaggtagacgacgacccggccgcgaatggacggcgggcggcggcggcgagcagcggagcgaaccacggcgatgcgggcaaaagcgagcacaccgggcggttgctcgagacgaggggagacgagccaacggctcagattcgccggaggaagcttgacggcggcgacaaccggcggggagggaagagggaaacgccgacgaggtcacgagggaccgattcccggcggcgagagcatctacgcggctacgggaatccgatgctagcgtcggattgggcggagctacgccgagcgaggctggcgacgtgcgggtgctacggagctcgagcggcgacggcggcgagcacacggcgagcgacggcaacggtcggggcggcgccggctaactacgaggagtctactcgagctactaccgaaagctag

SEQ ID NO: 83559 - DNA, 552 bp, Oryza sativa
  Clone ID: PAT_MRT4530_8287C.1
tcactaagggaatacctgggtttcgcaaaacccggggcgcgagcccgggcggagcggccgtcggtgcagatcttggtggtagtagcaaatattcaatgagaactttgacaggccgaacgaggacgaaaggttccatgatgaacaggcactatgcacatggagtacagccgatcctacagggacgggtgtaaccccgagcagacgagcgcgaccacgcagcgtgccccgaaacgggaactcgggttaacactttcccgacgccgggacctgtggcggttgacggcgaccgttaggaagatccggacaccgccggacgggggccatcgggaagacgtactcttttcatgcttaacggcccgccaacccctggacaacggttcagccggacggtagggtccacgcggccggaagacgcaccgcacgatcgcgcggatgtccggatgcgcccccggacggaccttgacaaatccgcgcggaccgacgtaccgtccacgcccggctcgtactcataacgcgcatcaggtctccaaggtgaacagactctggccaatg

SEQ ID NO: 83560 - DNA, 1160 bp, Oryza sativa
  Clone ID: PAT_MRT4530_82880C.1
gtcgacccacgatgccgggggacgtggcgacctcgccggcgccggcgccgccgtccgcgtcttcgcagcagagccaccacgccacctccgcccgcggcctgctctgccacgccgccgccggcgcctccgctggtgtggttgcggcgaccttcgtgtgcccgctcgatgtgatcaagacgaggtttcaggtgcacggctggcccaagctcgccaccggcacaattggaggtagtgtaataattggaagcttacaacagattgctcagagggaaggttttcggggaatgtatcgtggtttatctccaactattctggcactcttgcctaactgggcggtctattttactgtgtatgagcagcttaaaagcttgctttcttccaatgatagaagtcatcacctgtccttaggggcaaatgttattgctgcatcatgtgctggaggtgcaactactattgcaacaaatccactttgggttgtgaagacaagatttcagacccaagggatacgagctggggtgatcccgtacaaaggtacacttgctgctttgaagagaatagcacatgaagaaggcattcgtggactgtacagtggacttgtccctgccttggctggtatcagtcatgttgctattcagtttcctgcatatgagaagatcaaagcttatctggctgagcgagataatactacagtggaggcattaagttttggtgatgttgctgttgcttcatccctggcaaaagttgctgcgtcaaccttgacatatcctcatgaggttgttcgctcaaggttacaggagcagggagcacactccaaggcgagatatacaggtgtaatggactgcatcagaaagcatgcaatgaggaggtatatgggtttagggctgtggggacatggtgattttggtgggcatctcctgggtattgtttcgttcgacaaagactccgctttgtacaatgtacatgttggaatggtctatggctctatgctattactactatgtatcaactctgaatcaagctgctcttctaagggtttgtttcgcctcggacaaacacacccagcactgcgttactcgccatatatggttccgttgagaggtgtggtgtacggtgtaccattgccctacttagatttttttttgagaatgaaaattttataa

SEQ ID NO: 83561 - DNA, 2198 bp, Oryza sativa
  Clone ID: PAT_MRT4530_82881C.1
tttgtttagtttataatcactgtatattttctgtatttggtaaattattgcgcaaacacaaaaggtactggtcctgtatttcactaattaagcaccaagtcctatgactatgagaaaaacctcaaacatgcaaacttcaaagactccaaaatttacaggaagttcacaagctccaaaacgaaaacacacatcattcagctcagagctgcagctgtaactggagccaccttactttcttgaagcgagatcactgtctcgaaggcgccgacgagggccttcaccttgctcttcctcgtctcacaagcttgctcgctgtctcctcgatcacattgttcaacaatccctgctcgttcttcttcttgtccctgacatcctgatgcctcaggatgacaacttcaggtttcgaagagcctgaatcttttgacccggaagaggctgcactgtcactcttccttctccctctggtggattctttgctcctgttgctgtcttctacagtctttgcaggcctgaaccggagccgtctcggcgtgctgctcgactctgaattgctctgtaggttcagtacctttcctcgtcggaaagttagcttgcgaggcgactgcgctgggatggttgaggactttggctgccttgtgttttcagttcttggagtggcagaattttctttctgagaacggctttctttcttgctaacttctacttttctcacttttggtgaagctgacttcaggtttttctccttaacgtcagcaacagcattttctgctccatacaccttcttgttgctcttcactagggaagcaggtttttctttcttgactgctctcatctttatgctcaaaagggacttggatgacaagtttatagaacgagacagtttcactggacttattttctcttcttccttcttttgccaaacacgagcattcttggcaacattcatcactgtcatctttctgtcagtttgtttctctgaattaactgatggagatggagcatcatttgcaaccaaggacttcagctttgattgcctagtaggtttggaagattgatccatcacagtagctggtgatgtaactttgatctccttcacttttggtacattcgatgcgacggtagatctgaatttcttgtccctattgaacttggtggctctcactacctttgatccattggagctttcaattgttgtacctgaagctttccgatccaatgttcttacaattttctggcttgacgcattgcttcgcgttgcagtcgatgtctctttcaccttcggttttactgaaacattatacaaactcttcgatttagttccatgcccagatttttcacgcttctcggaggccatcacaatctgagtgctcttcttctctgaacctgcacactcatttcctgatccatcatcacacatgtcatccacaagtaactgttcaccagctttgtacacacattcaggaggcgaaatggcatctgcgatatgatcgtcagacgcgtcactgtcctggatggccaacggcatctccagctcaatgcttacagctccctctgatgattctccatccacaaaacatgcagcattgccatcagggatcaagaatttatcatcaccacatggcagatcagctccatcctcaacacgtttggattcttcagctgatgacaactgatcttgcacgcatggtgaggtttcagagttgtcagatgccatttcaataggcggcttcttcacctcgatgaattcaggcttgtcatgaacattaccatctttcacaagacaaatcttcagctccaggtccttgtttctggatctgcctttttgtgtctggatttcatcctggccttgctttccgcacccggcattggcacggtcctgatgtcgcctgcgacgaacaggccagtacttcttgggttcaggggaatgatgtgccccaaatttgcagctgtcatggcaagaaccagtggatgctctcaggtaatgtggcactgacttctccttcctcttcaggtcagatggcacactgctgacatccacattttcaagagaattcaccgggaaatcgccgcttgtcgatttagatgattcgggagttgagactatgataacctctttgaccacttcctctgtcatttaggagcccagatgcactgcaacttccccaccagcagttctagtcggcaaagtatggtaagag

SEQ ID NO: 83562 - DNA, 1131 bp, Oryza sativa
  Clone ID: PAT_MRT4530_82882C.1
cgtgaaagttcgagatgagagacaggagcacgccgtgacagtttgatgagagagattgtcttatgtttgaatgaaattccaaggaaacggtccttaagtgcaagagcgggaaaccgtacacccggtacgttccccggtccgcggttttggaacatcatttagttcgcaagcaccgacccaggtgtcgggttttccaagtcttttgtaaaacccaagttttacccaagttgttattcagattttaagtttggaggcgtccgtcgatactcgcacaggatgcacgaatatcgagacgcaagggaggggctgaccggggtcggcccgacccgatttcggccgagctggcgccgacgtggcgcctacgtggctgccacgtgggctggagggaggaagacgaaggcgccggccgcgaatggacggcgggcggcggcggtttctccggggcgccttgcgacgatgaggggcgacggggcgtacaccgggatgacgaggaagaatgagagggagcgagccaacggcttggattcgccggagggagtccgtcggcggcggatttcggcggcggtaaccggcggagagcaaaaggggaaaacggcgacgaggtcacgaggggccaattcccggcggtgagagtatctacgcggccacgggaattcgttgctagcgtcggattgagcggagctaccccgagcgaggccggcgacgagcgggtgctacggaacacgggcggcgacggcggcgagcacacggcaagcggcggcaacggtcggggcggtgccggctagctacggggaggctactcgagctacggctcctccgacacgcgcaacgacgaacggcgacggcgaaacagaggggcggcaacaatggagtggaggtgatgggacaacgagagaagaagagagggagggcgcccggggctttaaagggcggcaatgtcggttttggaaaccgaggcggggcggtgtggagcggaacggcgacacgggcgacaggcgcgggcaggcgctgacgatggcggtgaccaggcggtcggccactcggcacgcgcgcgcggcttgcaacgggaggcgcggcggatggagtggcgcggctcgggcacgcgcgctggctgcggggccgagcggctgc

SEQ ID NO: 83563 - DNA, 771 bp, Oryza sativa
  Clone ID: PAT_MRT4530_82883C.1
atccgcagacagatggacagactgaaagaacaaatcaagtgctagaagatatgtgaaggtcttgtgccttggatttcaccaaggattgggaaaggtgcctaccatatgccgaattttcatataacaacagttatcaggccagcttaaagatgtcaccaaatgaagcattgtttggtcgacgttgtcgaaccccactaatgtggtcaaaccggtgaacgagctgtatttgggcccgatataattaaggaggctgaggagaaagttcgactgattcgtgatcgtttaaaagtagcacaatctagacaaaaaagctatgcagatacaaggagaagagatttagagtttaatataggcgatcacgtatacttaaaagtgtccccgctgcgaggaaccaagaggttcaaggtcaaagggaaacttgcgccgagatatgtgggaccatttccaataattgccaggcgaggggaagtagcctatcagttagcactgccagaaaatatttccgatgtacaccctgtgtttcatgtgtcacagctaaaaaagtgtttgcgagtaccggaggagcaaaccccattgggagatattcatattagtagtgatctcacctacccggagcatccggtgaaagtattagatgaggctgagaagagaacccggaccaaagtttggcgcatgtataaagtataatggagtaatcacacagaagaggaggctacgtgggagagtcaagaatttctaaagactgaatacccacatctgtttaatgaccgg

SEQ ID NO: 83564 - DNA, 921 bp, Oryza sativa
  Clone ID: PAT_MRT4530_82884C.1
tcaatccagcctcttgaggaggtactgcacttgcacttccttggtcagtggcatgatccacttgtcatacagctccacggccagctccggctcgatcttgagcttaatttcgttctccagatcttcactcaccacctggccgaaggtcatggccttgctcatcacgcgggccctcacgtcatcctccaccttcgcgaacgtcagcaattccatcagcttgtcactgtcttgccatagtgaatcctcttggagagtgccgtcacttccttccttcacaagccttggcagaaggtcaccaaagtacacatcccagatccttttgtttatgttgatgttagcagcagctggatgcagaacattctcatactcaacagatggctccaccacctccagcaaattctcagggaagaaaggatgctcatccgggctcttgtacctccccatctgaaaggatgtcacaacattattctgtcctctagcatgcatcttctcggtctttttaaccatgaactcgaccagggagccattgaaccggacgatcctggaagcgttggggtcgtaggtgtccgggttgtagcagaactgtgacctctccagaaggccgaagatgatggtgtcctcatgcttcatcagcgtgctcctgatgctgccaatggtcaacacattgctcttgttgctctcggcctccccctctgtcctctcttccacggcccctgacgacgacttgggcgccgccgccgccggagccaccaccggcagcagcggcgggttggcggccgcgacgaggggcttggcggaggcggccgcgggtggtcccagtggcagagacgccggggactggttcgccgccgccgccgccccagcggcggggagcgcgagtggggtggagcgggccgcggccttgtccaggggaagctccat

SEQ ID NO: 83565 - DNA, 1262 bp, Oryza sativa
  Clone ID: PAT_MRT4530_82885C.1
gatacaggcgagagcgagcacaccaggtggttgcacaggacaaggggagacgagccaacggctcggattcgccggagggagtgcgtcggcggcggattgcggcggtggcaaccggcggcgagggaagggggaaacggcgacgaggtcacgaggggccaattcccggcggcgagagcatctacgtggctataggaatccattgctagcgtcggattgggcggagctatgccgagcaaggccggcgacgagcggtgcttccgagctcgggcggcgacggcggcgagcacacggcgagcgacggcaacggccagggcggcgccggctagctacggggaggctactcgtgctactacccgagtctaaggggaggagatggagcgaggagggagaacggggagatgctctaccgtgcgggcgggcgcagtgacgagaggccgacggcgcgggagtaatctctccggcctcgggccggggaagaggaaggagagggcgcgcccggagtccccttccgcgtccttgctcgtgccggctcctccgacacgcgcaacgacgaacggcgacggcgaacagagcacgggggcggcggcaatggcgcggaggcgaatgggagaggaagggaaagggggaggcttgggtttaaaggatggcaatgtcggtttgggaaccgacttagggcggtcaaggcgcgagctggcgctccggctggcggccaaaacggcgccaggaggtgacgccggcgaaagggaaaaaggaggaaaaagggggagagaaagggggctcgccccttgcttctttgggaaaaggaggaggggagcgggggcgtcgcagcatagggaggagggctctgcctccgtcccttggcggcttgcccgcggagtggcggggccgaggaaatgacgacggcgatggcggcgggacggtttggagcggcgcgacgacacgggcggcaggcgcgggcaggcgcggcagaggctgacggcggcggcgaccaggcggtcggccaccacggcacgcgcgcgcgggaagcaacgggcggcgcggcggtttgagcgacgcggctcgggcacgcgcgctggctgcggggccgagcggctgcaggcgcggcagggcagcggggccgggcggcgcagacggcgcaggagcgacgcgggcgacgaccacgcgggcgcgcgcgaacaacggcgcgcgggcagagcgagggaggggcactcggcgcggctctcgcgcgcacgcgcgcgcggcgcgcgggcggagcggagggg

SEQ ID NO: 83566 - DNA, 1728 bp, Oryza sativa
  Clone ID: PAT_MRT4530_82886C.1
atgggccggccggcccaaaaggcggcccaaagcgcgcgcgcgggcggggaggggagagagagccggtgggccgggtccatcccgcgtggtcccgggtgggacccgcttgtcggcgactcggctcaccatgcggagcgagcacgcggcgcgcgctagggttcggggagggagacgcggtgcacgcgcgcggttcgcggaggacgcagatgcggcgggcccacgcgcagcctcacggctcaccgcggaccatgcgcacgggggggaagacggagggggcggctggccgggtcagccgatccggtcgcggccgaggtggcgccgacgtggcgcctacgtggcagccacgcgggccggcgggaggtagacgacgacgccggccggaacggacggcggacgacagcggcgagcggcggagcgaaccacggcgatacaggcgaaagcgagcacaccgggtggttgcacgagacgaggggagacgagccaacagctcggattcaccggagggagtgcgtcggcggcggattgtggcggcggcaaccggcggggagggaagagggaaacggcgacgaggtcatgaggggccgattcccggcggcgagagcatctacgcggctacgggaatccatcccttgcgccggattaggaggaaacgcatcgagggaggccggcgacgagaggcgcttccgagctcgggcggcgacggcggcgagcacacggcgagcgacggcagcagtcggggtggcgccggctagctatggagaggctactcgagctactacccgacggggcgcagtgacgatgggctgacggcacgggagtgatctctccagcctcgggccggggaagaggaagaagagggcgcgcccggagtccccttcagcgtccttgctcgtgccggctcctccgacacgcgcgacggcgaatggcggcagcgaacagagcacgggaggcggcgacaatggagtggaggcgagagacgaaaacgagggagattggaggagggaggagcttgggtttataggggcgacaatcgcgcggagtggcggggtcgggttgatgacgacggtgatgacggcgggggcgatttgagcggcgtggcttgggcacgcgtgctggctcgcggggccgagcggctgcgcggcagggcagcggggctaggcggcgcagacggcgcaggcgcagcacgggcggcgaccacgcgggcgcgcgcacgcgaacaacggcgcacgggaagcggcagcgagggagcggagagggagggctcggctcggcgcggctcacgtgcacgcgcgcgcggcgcgcggacagagcggagaagagggagagagagagaacgagagagagagagagagccagggagggagggggagatgggccgagagaaattcggcccatcgaacccgagggaggcaaaatagacttttgcggagggatttgatttgggaaggatttggattcgggattgaacttgacgatagatcggggattcgagatcttatacttctgcaccatagttcccttacgggtttgcataaatgaactcaagaactggttgcgtgcttgctgcatcatcgcttcaaaatccttcttttgatcgggtgtcagcttgtctagagtgatgttcacgatgttgccttcattaacttcagataggcccaactgttgtatcttctcattaacaggaccggggctagccgaggacggcgatgctggcggcttgtcatccat

SEQ ID NO: 83567 - DNA, 1604 bp, Oryza sativa
  Clone ID: PAT_MRT4530_82887C.1
tgtgagacccacctgtcatactcctcccactcttcctctctctcttctctcactcttcctctctctcacgcgcacggcgaggcagggcggaggggcggcagcggcgaggcagggcggagggcaggcggcggcgaggcgagcgcggaggcggaggaagcgaggcggtagcgaggcagggcaaaagaaaagaaaagaaagagggaggggaattagacttccgtcgggcagctagggcgcggcccgagagaaaggggcggctcggccgagcttaatgggccggccggcccgagaaggcggcccaaggcgcgcgcgcgggcggggaggagagagggagccggtgggccgggtccatctcgcgtggtcccgagtgggacccgcttgtcggcggctcggctcaccggtttgggaaggggaggcgcggcgcacgcgcggttcacggaggacgcggtgcgcggcaggcccacgcgcagcctcacagctcaccgtggaccatgcgcacggggagggtggaatggagggagcggctgaccgggtcggccgatttggtcgtgccgaggtggcaccgacatggcgcctacatggctgccacgcgggccggctggaggaagacgaaggcgccggccgcgaatggacggcgggcggtggcggtttctccgggacgccgtgcgacgacgaggggcgacggggtgtacaccggaatgacgagggagaacgagagggagcaagccaacggcttggattcgccggagggagttcgtcggtggcggattgcggcggcggccaccggcggcgagagaagaggggaacgatggcgagacgactagggttcgattcccggcggactagagcatctacacgacctcgggattgcattccttgcgccggattaggaggaaacgcaccgagggtggccggcgacgagaggcgctaccgagctcgggcggcgacgacggcgagcacacagtgggcggcggcaaggcttggggcggcgccagggaagagggggaacgaggagggagcacggggagatgcactaccgtgcgggacggggcacagtgacgatgggccgacggcacggtagtgatctctccggcatcgggccagggaagcggaggaagacgatgcgcccgaagtccccttcacgcgtccttcgcacgcaccagctctcccggtgcttggcgatgaacggcggaggcgagatgggaaaaggaggaggggagcgggggcgacgcggcagagggaggaggggctctgcctccgtcccttggcagcttgcgcgcggagtggcgggggctgggcgatgacgacggcgatgacggcgggggcgatttggagcggagcggctcgggcacgcgtgctggctcgcggggccgagcggctgcgcggctgcaggcgcggcagggcagcggggccggatgatgcagacggcgcaggcgtggcacgggcggcgaccacgcgggaagcggcagcgagggagcggagagggagggctcggctcggcgcatttcacgcgcacgctcgctcggtgcacgggcatagcggataatatggagagagagagcgacagagatagacagagataccccggggagggagggggagat

SEQ ID NO: 83568 - DNA, 192 bp, Oryza sativa
  Clone ID: PAT_MRT4530_82888C.1
atgcgagacagcggcttcgtcacgctttttcgcgccacgatttttaaccatgccgtgttgtttttctcttcatttggcgacaacgctaaaatccggttgtttttcaccgtcaacttttcaaaccgagcaaattacatccttctcttattcatgcgccattaccaggcaaacgcaaaaatgatactgctgcgc

SEQ ID NO: 83569 - DNA, 1303 bp, Oryza sativa
  Clone ID: PAT_MRT4530_82889C.1
atgacctctaagcaaaagaaaaaaaaagagggagggaaaatagacttccctcgggcggctagggcgcggcccgagagaaagggcggctcggccgagcttaacgggccggccggcccaagaaggcggcccagagcggcccaagacgcgcgcgcgcgggagggaggagagagagagccggtggaccgggctcaccacgcgcggtcccgggtgggacccgcttgtcagcggctcggctcaccgtgcggagggagcacgcggcgcggcgctagggtgggggagggacgcggtgcatgcgcgcggttcgcggtggatgcggatgcggcgggcccacgcgcagcctcacgcctcgcggtggaacgcgcgcacggggaggggctgaccggggtcggctcgacccagtcttggctgagctggcgccgacgtggcgcctaagtggctgccacgcgggccggcgggaggtagacgacgacgccggcctgaacggacggcggacgacggcggcgagcggcggagcgaaccacggcgatacaggcaaaagcgagcacaccgggtggttgcacgtgacgaggggagacgagccaacggctcggattcgccggagggagcttgacggcggcgaatcgcggcggcggcaaccggcggcgggagaagggggaaacgacgacgaggtcacgaggggccgattcccggcggcgagagcatctacgtggctacgggaatccgatgctagcgtcgaattgggcggaactacgccgagcgaggccggcgacgacgcgcttccgagctcgggcggcgacggcggcgagcacacggcgagcgacggcaacggccagggcggcgccggctaactacggggaggctactcgcactaccgtgcgggacggggcgctgtgacgagaggccgacggcgcgggagtaatctctccggcctcgggccggggaagaggaagaagagggcgcggccgaagtcctcttccgcgtccttgctcgtgccggctcctccgacacgcgcaacgacgatcggcgacggcgaaacagagggcggcaatggcgcggaggcgaaaatgagagagtttggagggggagggcttgggcttaaatgggcggcaatcgcggagaggccagggccggaggcgatgacgacggcgatgacggcggggcggtgtggagcggagcggcgacacaagcgacaggcgcgacagaggctgacggcggcagcgaccaggcggtcggccaccacggcacgcgcgcgcgggaagcaatgggcggcgcggcgatttgagcggcgcggctcgggcacgcg

SEQ ID NO: 83570 - DNA, 1781 bp, Oryza sativa
  Clone ID: PAT_MRT4530_8288C.1
atgggcgagtactgcggcgctgctccggaggaggaccctgccatggccctcgtcacgccgctccccaccaccaccaccaccaccaccacggcggcggcggcggccatcaagcaaccccactactacggctgcttcgaccgctgctccaccaagcaggtcttcgacaacctccacggcaacatctcgctcgacccgttggctcgtgagtttgtggatacggaggagtttcagaggctgcgggatctaaaacaacttggccttacatatccggtcatctcgcgcgattctcgcaggaggtgatgggcgagtactgcggcgctgctccggaggaggaccctgccatggccctcgtcacgccgctcccgagaagagcttggcattgaccgtgttgatatgcaaactgtaaaacttgcaggccttttgcatgacattggacatggccccttcagtcatttgtttgaacatgagtttcttcctcgtgttgttcctggatcaacctggacccatgaaaatatgtctgcactgttgctggacagcattgtcgacaaacaccaaatagacattgaagctgatcatctcaaaattgttatggaaatgattgttgccagctctaagttcactgcaacagaaagcaggctatgaacaatcttcgactgtaccagggagaagagcttggcattgaccgtgtagatttgcaaactgtaaaacttgcaggcctttggcatgacattggacatggccccttcagtcatttgtttgaacatgagtttcttcctcgtgttgttcctggatcaacctgatcttcaccgcactgtctatacacatgcgaaagtcaaggctgttgaactgatgcttgtggatgcacttgttgaggctaacgaatacttgggaatagctttgcatgcacaagatccagcggacttctggaagttagatgacacgatcattaaaagcattgaaactgctcccaacgatgaactgaacaaagcaaaagggatcattcaacgtattcgccgaagagagctctataagttctgcaatgaatattctgttccaaaggacaagctggagcactttaagaatataaccgcacaagacatagtttgttcacagggcgacatatcagattctgacctgttacttttgttggtctgcatatctactatccccagcatcaagttctttaaggaattcttgttgagccaggattttggttgcgatgagaagttccccatcacagatgagcgggtcagccacctgctacctgcgtacaaccaggacagaattgtccgggtctacgccaagaagcacgagctggttgaagcggtgtcagaagccttcgagaacctacaactgaggatgtatggtgagaagacacaagttcatgacactcccaggaagaagcgcattagattccactaagggcactttaagaatataaccccacaagacatagtttgttcacagaaatcttccaaggtgctgctgaaggaagaagatgttgctgttagcaatgttaagattgatttgacccgtggaaaagataatccccttgaaaggtttttgatttataaacccacttttcagactcttatatttcttagggcgacatatcagattctgacctgttacttttgttggtctgcatatctactatccccagcatcaagttctttaaggattttggttgccgatgagaagttccccatcacagatggagcgggtcagccacctgctacctgcgtacaaccaggacagaattgtccggggtctacgccaag

SEQ ID NO: 83571 - DNA, 459 bp, Oryza sativa
  Clone ID: PAT_MRT4530_82890C.1
atgggcggcaatgtcggtttgggaaccgacttgcgcggtcaagggcgcgagctggcgctcggcggtcgcggccaaggcggcaacagggaggatgacgccggcgaggaggaaaaaggggaaaaggagggggagaaagggggcttgcccctttgccgattcgggaaaaaggaggaggtgagcgggggcgacgcggcagagggaggagggatgctgcctccgtcccttggcggcttgcgcgcggagtggcggggccgggcgatgacgacggcgatgacggcggggcggtttggagcggagcggcgacactggcgacaggcgcgtgcagaggctgacggcggcggcaaccgggcggcggcagggcagcgggaccgggcggcgctgacgcgacgcgacacgggcggcaaccacgcgggcgtgcgcgcgaacgagcgtggggagcggcagcgagggagccgagag

SEQ ID NO: 83572 - DNA, 433 bp, Oryza sativa
  Clone ID: PAT_MRT4530_82891C.1
tttagatgctgatgcacgacaagggggagggggaactgctgatccaaaagcaggtctgggacagtagggctcccagttctgtcactgcagagaagcagcaggatgctgctactgagaagccaaagctaccaaatggcctcaatggagagctgaaggctcctgccgagaacggaacatctgcaggctgtacctatgcagcgaaggtcgccacaaacacgcatcgactgagaagcctgaccttgtcaacgcgaccgtcaaagctagtttactggatcacatacctacacgttccctagctgggcatgaagaacatgactgccctgaagaactcaacaggcttgaggtcccaaggaactgatggcctagacaactctgtatctgtgagactggcagcacggccccaagatcctgctgactggctgatactggggag

SEQ ID NO: 83573 - DNA, 535 bp, Oryza sativa
  Clone ID: PAT_MRT4530_82892C.1
cgccaaccaatctcctcccccctcctttcctcctcctcccgaaccaccggaatccgacgcggcgccgccgcgccaccccgttccgccggctctcttcctcacctctcctccccaggagatcgtcaatctcctcggtcaggtgtttgatcgattgcctgtgggaagcatatgggcggttagattcgtgaagttgagaggaatcagaagacgggaattgtttgaggggactgaatttgatctggaaaatggggtggtttcgggctgcgtccggattggctcgggtggcgctgaggaggaacctggcgcgtgctccggcgaacccttttgccggtcctgcgccacggtacttccactccacccgcccccggcggttcgccgctcctgtgccccgcgccgtgccgctctcgcgcctcaccgacagcttccttgatggcaccagcagcgtgtaccttgaggagctccagagggcgtgggaggctgatcccacctctgtcgacgagtcctgggacaatttctttcggaactttgtcgggca

SEQ ID NO: 83574 - DNA, 360 bp, Oryza sativa
  Clone ID: PAT_MRT4530_82893C.1
cgcgccctttttttttttttgttttttactttagggggggttatgcaaacccaggacaggggttatacgccataaggcgatcccacgttatttttctacaacgccaagtcgaagagctacctctgacacattccacaggctaaaggctatgaggggctacaactacgggacacctttatctaaatgctgacaactcctaacaagctaatacactgtcttattcctgataaatggggtggccatgtgcccaggctatggaggacccacccttgaacgggatatcccgtctcatagccacgggctgctgatcatcaaccctaaaagtccaactagttacctgggactgatgggccaccaaac

SEQ ID NO: 83575 - DNA, 351 bp, Oryza sativa
  Clone ID: PAT_MRT4530_82894C.1
tgggttggaggcctaccggtcaccgttgccatacgccggccgtggctgccgcgggcgtcggagctcacgtgcacacggcgatgcggaggagaaagtactcatcaatcatgtaggagtaaccgccagttagtcatccaggccggagaggcgggcgacggcgcaactccgccactaaccactgggaaggagcgggagccggagccgggaggaacgtaccggagaggggccggcgcggtatcgccggtgtgggggaccggggtaggaagcgaaattgtcgaggtcagagggtggcggcagccaaaggggatgggagtttcagggcggccgctggtgcggtgctgtatgctgtga

SEQ ID NO: 83576 - DNA, 233 bp, Oryza sativa
  Clone ID: PAT_MRT4530_82895C.1
ggggaagggccaacaacctataggacccggaaattttgatgccccgtcacaattaaaaattgtttacccgcaggacccaattttgagcccccaatttttccccggggtactcccgaagggggtaatttttgaaactccttgggggcaacaaggcgaaaaaaaaaaaaaggtcttcccactttagggtcaacaattttttgggtttataaaaggggggggttcgggttaacccc

SEQ ID NO: 83577 - DNA, 962 bp, Oryza sativa
  Clone ID: PAT_MRT4530_82896C.1
gatgcacacatttgaggatgagtctggatcaatgccatcagtgtttggtgaactgataggtgctaggatcgtcagatgctggacaagaacttggctgcagtatacagcatgaatattccaaaatggtgcattcatgaaggttaaattggaaataacaaccctgtcagagtacatcagttcaagaagagggggcctggtataatttagtgtgtgattgtgaaaccagttccaccaaagttcaccttggccatcaatggtgccattagcaccagttattattacatcagtaagattggatccaaaaataagactccggtgtcttttaccagggagtctctctgccacgcccataagatggcagaggatcaataactggccagtcagatgaatcttgagatccgattattactgcatcggcgtcaagtgacacagtgagatgactgataagattaaaactcccagtcaaccaccttccagcaggcacaaagagctctgccccacccttatctgcaaatgagctgaggtaaaagattgcattcttaaacgctttcgtgttaagagtaacaccatcattaacagcaccaaactcagtaattgacacactgtgtggccgatgcacgcttgctgtcaagtcgttgcagtacatggcagatgaagtggcccattgagtcgcagcaaaaacagttgcaaaaaccaaaaggacttgaagtgcagatgcggatcggctcatcattttctctagcagcgagtgaagaaactgtcaagtcagttcttcctccctcaaatcgactcaccagcaggcaccacaccagaacaacagccaagatcgacgactctctacttctccgggctcgccttctcgggccgcgaacgcagcggcgtcgacggcgacggctatgccgatggcttcactcaacacactcactccccatcaccttctccggctccaagcggcagcaaag

SEQ ID NO: 83578 - DNA, 456 bp, Oryza sativa
  unsure (1)..(456): unsure at all n locations
  Clone ID: PAT_MRT4530_82897C.1
ggcgccctttttttttttttttgatgtaaatgggtgagggtattaagaaccgacagcatactgacggtatgggtaatacagagactagaaacaggatgatggggctggggacacaaacatattacatgggtggatgtaaacgaaaaggacctgatccaagatttagtctgggttacgcactttgacaacagatcacttcagatcaccaacccatttataacttctccaaattttatttctctttggaaccaacccccaccaccantctaataatcannnacccttattatcacccaaaccattgtattgatggtaaacgctaacccaagcttattgacacatgtacataacggaatggcatgggttaagagaactatttgtctcaagtacagaaaaccgtttttggggcccttanggtgcattagtaatcacacgcatccatttaatttttcttaa

SEQ ID NO: 83579 - DNA, 1580 bp, Oryza sativa
  Clone ID: PAT_MRT4530_82898C.1
aagattgatcatgtttatagaaaaatatagcatcatttaaaaaaaccctatatatatacccatttgaattaggtatatactcaatttcaacaatgttcccgctcttcccctcctcctccgccaccttcctccacaacatcctcatccgcgcctccgcctcctccgcgtccccgcgcctttccttcgccgccttctcctccctcctccggtgcgggctcgtccctgacaggttcaccttgccgcccctcctcggttgggtgggtaagctcccggccttcccgcgcacggacgcgcaggtgcaagcgcagaccgtccggcacgggttcttggcgaatgtcttcgtcgtcaacgcgctcctcgcgatctacgtgaagtgcggggagatggagagtgccaagagggtgttcgacgaaatgccacggaggaatggggtgtcctggagcaccatggtggggggctatgccgcggccggggagctggatgtggcaagggagatgttcgatcggatgccagctattgggaggaatgtcgtgacatggaactccatggtgacaggattcgcgcgccacgggctgctgccgttagcgaggaagatgttcgatgagatgccagtcaggaatctggtgtcatggaatgcaatgctccggggttattcagtgaacagcgacatggatggcgcgagggagttgttcgatgtcatgccagagaaggatgtggtttcctggacatgcatgatttcagggtatgctcaggctggacgctatcaggatacccttgagctgtttcgcgcaatgcagactgagagcaatgtacagccgaatgaggtgaccatggtgagtgtgctttcagcatgcgcaaatttaacagcactggaagaaggaagatgggtccatgccttcatcgacaagcacaagatggtgctcaacaacgagtacaatcttggtgctgctcttattgacatgtatgccaagtgcgggagaactgacattgctgtcaaaattttcaactccctggaccgaaagaacgtctcggcctggaacgcgctcatcaccaggttggcaatgaacggcaatgctcgggattccgtagacgcattcgaacagatgaagagaacgggtgaaaagccgaacgacataacgtttgtcggtgtgctcacagcttgttcccacggtgggctggtggatgaaggtcgacggtgcttccagagcatggcgtctacctgcggagtgcagccggaggtgaagcactatggttgcatggttgacatgttaggccgagcagggcttcttgaagaggcagaggagttgatccggagcatgccgatggcacccgatgtcatggttttcggcgctctactgggtgcctgtcgaatgcacaagagatttgatgtggctgaaagagttcagagtgagatccatagcctcaatctcaacgcccagcagtctggctgccatgttttgatttctgacatttatgctgctgctggtaaatggttcgatgttctggaggcgaggcaagttgtgcagaggtctggcatcaggaaatggacctggtgctcgaaggtggaattgaggcagaag

SEQ ID NO: 83580 - DNA, 1704 bp, Oryza sativa
  Clone ID: PAT_MRT4530_82899C.1
atggcgccgccgcctcacctcctcccgctcctcctcggccgcctcgtcgtctccggcgacctccgccggagccccgcccacctccgccgcatcgtcccgctcctcccttcccacccccacctcgccgccgccctgtgcgccgtccatttcccgctcttcccctcctcctccgccaccttcctccacaacatcctcatccgcgcctccgcctcctccgcgtccccgcgcctctccttcgccgccttctcctccctcctccggtgcgggctcgtccctgacaggttcaccttgccgcccctcctcggttcggcgggtaagctcccggccttcccgcgcacgggcgcgcaggtgcacgcgcaggccgtccggcgcgggttcttggcggatgtcttcgtcgtcaacgcgctcctcgcgatgtacggcgcgctccgggacgcggcgtcgatgcgggaggtgttcgggtcgtgcgccggggtcgcggacgtggtgtcgtggaacacggtgatcggtggctacgtgaagtgcggggagatggagagtgccaagagggtgttcgacgaaatgccacggaggaatggggtgtcctggagcaccatggtggggggctatgccgcggccggggagctggatgtggcaagggagatgttcgatcggatgccagctattgggaggaatgtcgtgacatggaactccatggtgacaggattcgcgcgccacgggctgctgccgttagcgaggaagatgttcgatgagatgccagtcaggaatctggtgtcatggaatgcaatgctccggggttattcagtgaacagcgacatggatggcgcgagggagttgttcgatgtcatgccagagaaggatgtggtttcctggacatgcatgatttcagggtatgctcaggctggacgctatcaggatacccttgagctgtttcgcgcaatgcagactgagagcaatgtacagccgaatgaggtgaccatggtgagtgtgctttcagcatgcgcaaatttaacagcactggaagaaggaagatgggtccatgccttcatcgacaagcacaaaatggtgctcaacaacgagtacaatcttggtgctgctcttattgacatgtatgccaagtgcgggagaactgacattgctgtcaaaattttcaactccctggaccgaaagaacgtctcggcctggaacgcgctcatcaccaggttggcaatgaacggcaatgctcgggattccgtagacgcattcgaacagatgaagagaacgggtgaaaagccgaacgacataacgtttgtcggtgtgctcacagcttgttcccacggtgggctggtggatgaaggtcgacggtgcttccagagcatggcgtctacctgcggagtgcagccggaggtgaagcactatggttgcatggttgacatgttaggccgagcagggcttcttgaagaggcagaggagttgatccggagcatgccgatggcacccgatgtcatggttttcggcgctctactgggtgcctgtcgaatgcacaagagatttgatgtggctgaaagagttcagagtgagatccatagcctcaatctcaacgcccagcagtctggctgccatgttttgatttctgacatttatgctgctgctggtaaatggttcgatgttctggaggcgaggcaagttgtgcagaggtctggcatcaggaaatggacacgatag

SEQ ID NO: 83581 - DNA, 297 bp, Oryza sativa
  unsure (1)..(297): unsure at all n locations
  Clone ID: PAT_MRT4530_8289C.1
tctgtgccttagtattgttcaagcgattgggcgggaggtacaactgcagcaatttagtggtgtctactttgatcagactcaagctcaagcccaaactctgttgaccttcaacttgccatccatgtgtggtntctaccctaactactattgtgctcccaggagcattgccnctgttgggggttgttgggctgnnttgtncatcttaatcgttcgtttgttcaacttaagtcttcatcttcatgtgtgtctgttgccacttagggtcctgtctctctccctcttttcctcttacctatt

SEQ ID NO: 83582 - DNA, 1293 bp, Oryza sativa
  Clone ID: PAT_MRT4530_828C.1
atgaagaagagcagagaaggtaacctgaagcatgtcaagggttcgctctgcctcgtcccgcctctacttctcgcggtgttcttctacctgcagttccagacgctgggcctcttctccccgatcttccggtgcggtggccagtccgccggcggcggcggcggcgacgactacgtcgaccgactgcgagcctcggccacgttcctcccgctgaaggacacgcgggagtgggccgagacgtggttcatcagcacgctcgacgacacgtcggagccggagggcgaggccaagaacatcgtcttcccgtccgcggcctccgccggccgcctcctctgcatgtcggcgccgtcacgccgtgacggcaccaggaacgcctacgcgctcgcgtggcgcgacgcgctcccgggcggcgcggagctcaggccgggcctcgcgtacgtgtccgagacggcgtacgaccacagcaacctgtggcacggcatctcggcgctcatcccgttcgcgtcgtggcacgcgaggagcgggtgcagggcgaggcccccgaggtggcccttgttccaccacggggaggtgaggctcgggataaccccgtggctgacgtcgttggccaaggcgaccaccggcgtgggaatggttgtcgagacgttcaacgcgtccaacgtccccgtgtgcttccaggaggcggtggtgttcaggccgatcatggccgggatgacccgggagctgcttctcgcggcgttcgacttcatgcggtgcaaggccagggcgcagtgcggcgtggtggcggacgtctccgaccccgactccgccgccgccgcagtcacgcgcgtcttcaagagcgagtgcgcgcgcgtcgccggctgcgcgctcaccacggcgcgctccgacaacctgaccttctgcgaccaggtgaagttgatgagcgggacggacgtgctgatctcgtcgcacggggcgcagatgacgaatctggtgttcatggacaggaacagcagcatcatggagttctaccccaaggggtggcgagagagggcgggaggcgggcagttcgtgtaccggtggggcgcggacaggtcggggatgcggcacgagggctcgtggtgggatccccacggcgagccgtgccccggctcgccggacatcctcagctgctacaagaaccgccagatcggccacgacgaggcctacttcgcgcagtgggcggccagggtgttcgcggcggccaaggagcgcaaggccggcggctcgccggcgtccacgcggcgacgagaagcgccgacgtgccagtgcagctaa

SEQ ID NO: 83583 - DNA, 247 bp, Oryza sativa
  Clone ID: PAT_MRT4530_82900C.1
gaacaaagagcatttggtataggtaaagaaaaggggtccagcacaacagatcgatcatcatggatgacaacactataacatagattaactgtgtaaaaaaaaaacactatggatcgacatctacttaggacatgttcatcgctacataccctacaggaccgccacggccacatatgtgttcgcataactggagttaaactatagtgtaccaaaaccaactaccgattgtgtatgccactggcacgtt

SEQ ID NO: 83584 - DNA, 445 bp, Oryza sativa
  unsure (1)..(445): unsure at all n locations
  Clone ID: PAT_MRT4530_82901C.1
ctttttaatttttaattttnatttttcgtcctcctttcggttcgtgctcgtgttcgtgcgttgatgcgcttgcnganagcgtataaatnctcgcggattttcggatttggagggattcttctccgcttcccccgccctcaaatcgcaccccggatttactcccccaattcctcgctctgctctgctgctggattagtgtttcttggcgggatttggtgagcnattgattcgattcgattggattcgattcgatttgatccgccggaggggagggggggagctcgccgcggagttcgtcgccatttcgatccgtacggcggcgtcggggtcggcgtcgtccttggatgattccgatcgatccaggggnaaggccgcaagattcgtcgggcggaagcggggatcgcggcgggaggggtgatccatgcgacggggaaaagcgcccggg

SEQ ID NO: 83585 - DNA, 1970 bp, Oryza sativa
  Clone ID: PAT_MRT4530_82902C.1
ccccggcgcccggtgtcggcaccacgctttaaccgtagctttgttcagtcttctactgctgctggccattctccctcccagtgtcacactctcaaagtctcctctcctccatcaggtgttacctcctgcagatcctgattggaatttggaccttctcctcctcctcctccaccacctcctccttcccagtctggtaaaatgtgcaggccataaagccctcgcaatcctagaacagttgcatttctaattcatgtatagtagggaaagaaatatatatattcctgctctgttctggtcttatcttttgctttgagccaaaaaggttagagcttttgtgttcttcccccacaaatatcccctagtgccttttgtttggccgtggtgtggaaaagcatatgcatgggggagcagctcaattcgcatactgctgttgccccccagcgtagctatccctttccatccctgcaagaacccttctttatagatctgtgcccttgctgttcatggaaccctgtgattgaggggtttcctcatttggtctctcactcgcggtgtaaacaaagtatatgctccaagtaagctgctacttttcactgcttctccgactcttggctgattttctagttcttaaaggatgagggaggaggagatgggggagtgcggcggcggcgagtacaggtgctgggaggagcttctgccggacgcgctggggctcgtcttccggaacctgccgctccgggaggtgctgacggtggtgccacgggtgtgcaagtcgtggagccgggtggtggccgggccgtactgctggcaggagatcgacatcgaggagtggcggcagcagcagggcaagcccgagcagctcgtccgcatggtggagatgctcgtcgcacgcagctgcggctcctgccgccgcatcagcgtctccggcctccccggcgacccgctcttctccttcatcggagaccatgcacgggcactgaggacgctggagattccacggagcgagatcagcgacgcggcggtggagagcgtggcgccgaggctgcccaacgtgacgttcctggacatcagcagctgcaccaagatcggggcgcgcgcgctggaggcgttcggcaagaactgcaagtcgctggtggggctccggcgggtgatgcacccgacggacgtcgccggcaaggcgtgccagcgcgacgaggcgcgcgccatcgcctgcaccatgccgaggctccggcacctggagatgggctacatggtgatcgcgacggatgcggtgctcgacatcctcgcgcggtgccgcgacctccggttcctcgacctccgcggctgctgggccgtcgacgacaagttcctgcaggagaggcacccggggctgagggtgctcggccccggcgtcgacgactgcttcgagaacagctacctggaggagtgctccgactactccgacgactcctccatctactcgtgggagctcatggaggacgacgacgacgactactacgccgtcgggagcgacgacgaggccatttgggacgacggccagggcctcgagaacctggaggtcaggttctacggcggcggcttcagcgagagctatgctggcttcgattggccaccatcaccatgaccatgagagcagctcagctcagctcagtccctgacctcactgtccttgctcttcctctcgagccgtgtacctaagcttgcagttgcagtctcgcagatgtgttgttgtactctgtgtgtgtgcgcgtgtgccagtgtgtcatcagcatcactagcttgcagtgcagatatgtgtgagtgaacttctacggctagttgttactactactacatccagatgtaaactttggtgtttacatgaagaagcaatgcaaatgcaatatgtggtgaaaaatcaaaaaaaaaaaaaaaaaaactcgagactagttctctctctctctctccctctgccgaattcctgcagcccg

SEQ ID NO: 83586 - DNA, 1164 bp, Oryza sativa
  Clone ID: PAT_MRT4530_82903C.1
atggctgctttcccccttccaaaaggcacaatcgaagcgattgacaggcgtcgaagaagtttcctgtggactggagaagagtcctaccatggttctaaatgcctcatagcctgggatcaagtctgtcgatctaagaagcaaggaggcctaggcataaagcacttgcagacacaaaacaccgccctcctcgtaaaaatgctacacaggcttttcacccagccctccccctgggcatcctggatctcgaaagaacatcaaaactacccacttggatcaattgacctcggcccgcactggcgatccctgatcgccttactgcctcttctacgcaaacatacaaagatgttaccaggtgatggccggcatataaacttctggcatgatgtttggctggatggacagttatccgctaaattccaagctctttatacccacactgtcaaactaaactgtttgctcagctcagtccttcatgaagatttcagatgcttctttgtccccagaatcactcctactgcccaacagcaaatgatgcaacttcagtacttgctgcaaaatgtcaccctctccactgagcctgatgaaatagtgtgcaatctcaagacaaagaatggtctcatctcctcctcggagctctaccggtctgaaatggcaacatttgaaacctggccgccttggtctgcaatttggagaagtgcagcccccccaagagtaaaattttttgcttggctgatgtccaagaatagattgccaaccagagttaacctacataagaagacaatcctccctactcctacatgtgaactatgcaatgccaacctagaagacacatatcatattttcttaagatgccccatggcagcagccttctggaatatgattcaaatcatccctgagataagctcgctatcagatctccacaacctggaactctcagggcccctaccgacatttctgagttctaccttttttctcctatgttgctggcggctttggaaccatcgcaatgaagtcgtctttcagaaccttccaccttccatcagtcggctgataaattcatgcctacaagatgcaaaactatgggctcaccggttcaatccttcgcagaagtccgtcctgccgctttggacctccattctctcatcccctcttacactgttgtaa

SEQ ID NO: 83587 - DNA, 209 bp, Oryza sativa
  Clone ID: PAT_MRT4530_82904C.1
tcgctcacttgccggtgtcgacacctggatctcatgagttctgtggcttagctcagatagaaatcacaaatggcgaagattaagaccgggatcaatggttttggcaggattttgagttatttttctcctcatctttttttttattattgtatatttttattttttttttctcactatttctttttcactttctattaaatacattgatt

SEQ ID NO: 83588 - DNA, 7880 bp, Oryza sativa
  Clone ID: PAT_MRT4530_82905C.1
atggttaatgtgggggtctcatttgtctctctgttgaatgccgttgcttggcattgtcagctcccgctggtgtcctatctttgggaaatagatgggaatggcatgctgctagcaggtgttgagcttgcgctcccatcggaagacatggccggccagattgttagcaagttcttttgggtctgcgcgtctactcaaacaagtgactcgcatgaaatgggcgcgcatcaggctgttaggttcttgcaggctaggtacggctttattgtccacgattacaatcttcagatgttactttcctaccggagaatagcagcgtctacagctcctctgttcggcggcgtaaatcctgtggtctctaggggaccaaatggttcgccaaatgctggaatagatgtggagcagtcggttcctgaacaagctctggcttctgatgttcatgtgcggtctcaggttgcctttgttgctggcacaggtcctttgacccagaattccataaccaccgctagcagaaagagaaccctactagatgtgccgcgccacactgctgcagcaaacagggaaaaacgacgcctcaagaggtctggttctcagccagaccacctgttgttaatgcttgcaaacaatgcagctttgtgcccagagcgatcatactatggtggcccttcgcatgagtgtccttattgtggtgccgttttttggtaccaggagagggtaaagagagatagtgctgtttctcagagaaggattgtctataatctctgctgtaggggtggtaagatcagcctgcctgaactaaaatacccaccggatatgttagcgaagcttctgaaatttgatggtgatgcacaatcaaagcgtttcttacgccaaattcgatcttacaactcgctttttgcattcacttcattaggggctgatgtagaaaagtcaattaacaatggaaccgcaccatatgtctttaaaattaacggcgttgtgcaccatcgtattggcagcctcttgcctcagcgtggtgcgaagcccaagtttgctcagctatacatatatgacaccgagaatgaaaccgctaaccgaattaacattttcgatagagaaaactcaaacgatgagcctgacccatcaattgttacaggacttggcgctatgctcgaccaacacaatgatctggtcaaatcgtttcgctatgctagagatcgtttaaacgagcatggtaatgagcagattgcacttagactgcttgggtgcaatgctaaagatgaagtccaatataacctgccaacgagtggtgagatcgcaggaataatagtgggcgacagctcaaacgatgcgtacacgtatgatgtggttgtccagtcttcggataataggctgagacaagtctctgctttgcatccttcctacatggctttgcaatatcctttgcttttcccctacggtgaacgagggttccacctcggtataaagtacactgatttcccgagtattgctggaacatcacggcgatacgtgacaatgcttgaatactatcgatatcgctttcattataggctaaacaaaccgaatccatatacatgttgtggccgtcttagtgactcgatatgtgtggatgcatactcaactgttgagggatcgaggctgaaatttatacatgaccaccaacctgagttacgttcagagtgtgttcaagggattgtcgatgccattgaccatggcctcgaatctggtgattctgttggcaaaaagtacgtcttgccatcaagtttcactggaggtcgtcgctacatggtccagaattaccaggacgcaatggctgtttgccgcgtgttcggttcgcccgacctattcgtgaccttcacgtgcaactccaaatggcaagagatatacgatgcccttgtgtttgaaccaggccaggtgccgagcgatcggtctgacatgattgtacgagtctttagcatgaaggtcgatgaattcatatccgatattaaggagggaaggaccttcggtcctgtgctggcagtgttgtataccgtggaattccaaaagcgtggtctcccgcacatacactgtattgtgtggcgtgcagcagctgacgccgaatttagtgctaccgctgtggacagtttaatttgtgctgaaattcctgatgtgtttagtgatcctttgggctatgccttagtcgatgagtttatgatccatggcccttgtggtgacaagaataaatcatgtgtctgtatgaaaaatgggcattgctccaagcatttccctaaaggcttccaagaagagacgaccatggatgagtttggctttactgtatataggcgtcgaaatgatggacgatatgtggttaagaatggaattaaacttgacaatcgatgggtcgttccatacaacatgaaattactgaaaaaataccaagcgcacattaacgttgaatcatgcaacaaatccaacatgataaaataccttttcaagtacataacaaagggtggtgatagaaccaaactatactttgaaacaactggcaacacaccaaacaagactgttgatggtactgttttgccaccaaatgagattgatgagtacatcaatgctaggttcctctcaacctgtgaagccttttggcgtgctttcgagtttgacatacactatagagttcctgctgtggaacggttgcctattcatcttccaaatatgaattttgttcagtacaaaaaaggaaccgacctaaaaaaattgcttgacagtcctgctgcaaaaaaaacaatgctaacagagtggttcgagtgtaataaaaagcatccaaatgcacgaacactgacctattgtgatttcccaaaacaatggacctgggacaatagcgcccgctgttggcgcccaaggacaccagtcgaaaaaattggtagaatttattatgtcagcccagccgctggagagctatactacctgcgcatgctgttgatgacagttaaaggcgcaaaaagctatgctgatgttcggacctttgaagggactgtttacccaacttttaggcaggcatgtgagtctagaggccttcttgagaatgataacgattggcatttgttgtttgatgaggcgatagtttctgcgtcgtccctgcagttaaggcaactatttgtgactgttgtaatgttctgctctgttggaaacgtccgatcattgtttgataagtattggttatactttactgatgacattcagcatcgccttagaacagcgctctcaaaccctgcttatgttgttccacatgataggttgctgtctcttttgattaaagaattacactctgcatttgcaaacagcggtggtaacatagatgactatgacctcccgcgatcaacgatacattcagatgatgaatttggaaatagaatggtcaacgaagaattggctcttgatactgctgccttggctgctcatgccagcctgatgataccacgactaaactctgaacaacaaaatttttttgacacaatagttagccgtgttagtgagtcgaggcctggatttttcttcgtgtatggccatggtggcactggcaaaacgtttttgtggaacgtgctcatttctaagataaggtctgagggaaatattgttcttgcagttgcttcctcaggagtcgcttcgcttcttctccctagagggcgcactgcccattctaggttcaaaataccgattgatatagatgaaaatagcatatgcagtataaaaagaggaacaatgcttgcagaacttattcagaaaacgtcccttattatatgggatgaagctcccatgacacatagacgatgctttgaggccttagaccgaacgttgcgagatttgctttcagaacataacccttcaaatagtgtgctgccatttggtgggaaatttgttgtcctaggtggtgatttcaggcagatattaccggttattaaaaaggggacacgcaattctatagttgacgcatctataacaaattcaccgctttggcaacatgttgtccttcttaaactcactgttaacatgaggctcttccagtccggtctttctgagggacgccgtcatgatcttgaacaatttgctcgatgggtcttagcgcttggggatggtatgctaccagtatcaaaaaggatcgatgagtctgaggcgacctggattgatatccctgatgatctactaattagagcttcggatgacaaaatatattcaatagtaaatgaggttttcccatgttatgtgcatagatacacagattcttcttacctagcatcgcgtgctattgtctgcccaaataactcaacagttgacgagataaatgactacatggttgctatgatacctggtgaaatgaaagagtaccttagttgtgacactatttcaaaaacatccgaacacatacctgacttcgacattttgtacccaactgaatttttaaactccatcaatgccaacaacttcccgacgcataggcttgcactgaaaaaaggcgcaacagtaatgttgctgcggaatctaaatcaatcccttggcttgtgcaatggaactagattgttggtcctttctctcgggcatcgtctcttagaatgtgtgatcttgactggatcaaacgttggcgaaagagcattcataccaagaattgtgctcagcactacgagttctaagtggccttttgtacttcaaagaaggcaattccctgtacgtgtgtgctatgccatgacaattaacaaaagccaaggacagacactttcaagggttggggtctaccttaaaaaagcagttttcacacatggccaattgtatgttgctgtatctagatcgacctctagagatggccttaggatccttattaaggacgacgatggcgcgtgtagttctaagactagaaacgtggtataccatgaggtgctggaggcagtcagattaatgctctgttatcgtgttcttgtgcaaaaatgtttctctatgttctcaggatcttttgctatggcctacagcatgctctctaagcttgagttaggtgctgacaacccacgcatctgtgttcgtgtttcaaggctatgggagttcgctaatccaaatgatgagacacaattgctccaccttggtttggttttgattgatcaggagggcactagcattgcagcacagatataccctccctgcgatctgcagttcagagaaatcatcactgaaggcaaagtgtactatcttgagtactaccgtgtgagggaatggagcaggcgatacaggccagtcaacaacagcctgtcaatttgttttacaaggtggactaaagttgaacaggttgcagatccggcagctgatttccctttgtacacttactcactcacaccatatggtggactccgtcagcgtgtcgataggaaagaagaattcacaggcgacatatctctatcaggcaactcagcttgcaaatggtacattaatgtgaacactcctgaggtcaactccttcaaagaaagcatacagggaaaatatgaacctatcaaaatgattgagctcccagctgttggagctgttcgtactggcgccgaacaaaagtcaattgcccagatcaaggacctcaacccttttatgtttaggaaaaatgaattcatggttactgtcgtcattaagaagatcgacacagaatcatcctggtggtaccctgcatgtgatacctgcaaaagaacagcaaaaccatatggaaagtcatacaggatcaaactcagcctcattgcaggagacgacacaggtgacactaagtttgtgctctttgggcgcacagcacaacgcattatcggtcgaccagtcgagatgctgatacagaacaaccctgctggcattgagttcataccaaaggaaattacagatcttcttgagaaggagtttacttggaatgttgccttcactgaaaacaccctgtcttccagcactgtttcgttccaagtgaatttgatcgttcgaggtcctgacaatccctgttcttcagccttgcaatccccatctgcatctcaggcatcgtctgcagtgccttctcaggctttatcaccagggctatcacatggtctctctattgggcagtgttcggcagcggctgatccatctattggatttgctgatccaacagctggaatagacagcccattagccgcttcaatcaagcacaagaaaccggagactgagtatcagtcaaaacctccagctgagcttcctcaggacgaagcagaggatgatgacaaccttccactaagccagatagttgctgacgatgctactaaacatagcacgtccaagtcctacaagaaaagggctaggccatctcccggtataggagctgctaagaagttgttcaaggataatggtgatggtgttgctgatggcagaatccctccatacagctgtttactgaaacaacaatgcgttccatgctcacggcatggcgcgtacaacgtatcacattgtgtcgtgctcatcctcttcttccaccacagctcagcactcctcgccgagtctcacagattgaatctgaagaactcctgctcgaggaagaacaactcttttcctaccatcgtttctacggggatgcagtttgattggagcgctgagctaggcgtggggcagccacaacgcccttcttcctatggaaccaatcgtccattactagcaacaaaattctctaggcgcaagcagatatcgcatatgctagctgacatcatatacacaagagctgttgttgttaaggtgtctggagctggaaatccgaccacaacaagaatatcagcgatgataagcgccgtctgcaggtgtcaaattgatgatttcgcattgctccctttccgcccaaagatgttcattgccatcttcatggatgccgatctgcaggaagaactgtctgaaagagctttcaaaaaggtatcgttcaccttcaaggcaactcgcctcacatttgagcctttcaagatgaatcttggtagcactgtaaatccactgtgccagcgggttatacttgcgctagaaggcgtgccaccagaatcatggaacaaagaagctatatcagagctcatggacagttgttgttttgtagaggagttgtatggagagcaccatatccaagaactctcaatttttaagttagctgcctggacaacagattgtgaccttatacccaaggtgataagctggaacattgagactaaagaaggtcgtcgaggatcagcaaacattagttggatgcacaatgcagctctgtcagttgtgctggttcatatagagaagctgttcgactacactgacgaagacagtgggagtgatagcgatggagaagttcttagggaatatgagcagcaaaggccccgtgtccctgttgtcaaaacatttagctgggtgcccttgaagattgatctaaacaacggaccagttgaaggcggtacaccagccatagctccacgccgtcttcctcttgaagttcgcaggcgttgtcgcctaccttaattacataaaacactgccctctgttatgtatgctttaaagcctaacattttcacctgcctctccatgcttatggatcatgcgaacagctgcttagtgttttctctacgtgttctgtcagtttttgttttcctaacaattagcctgctgagcaaggcctaaacttccagttcagctaaaatatgattcgtatattcctcttagcaatttactccttttacatcactgaatatgagctgataaggcgccgcgaagcgcgccgcaagttctagtctgcattagcgggcagcatgtctcctgcttgcttatgcctttatgtcaggctagtcaacgaagttgttgtttatgcctttgtggattgaatgattgattatccctgtgatact

SEQ ID NO: 83589 - DNA, 3888 bp, Oryza sativa
  Clone ID: PAT_MRT4530_82906C.1
atggttaatgtgggggtctcatttgtctctctgttgaatgccgttgcttggcattgtcagctcccgctggtgtcctatctttgggaaatagatgggaatggcatgctgctagcaggtgttgagcttgcgctcccatcggaagacatggccggccagattgctcctctgttcggcggcgtaaatcctgtggtctctaggggaccaaatggttcgccaaatgctggaatagatgtggagcagtcggttcctgaacaagctctggcttctgatgttcatgtgcggtctcaggttgcctttgttgctggcacaggaaagagaaccctactagatgtgccgcgccacactgctgcagcaaacagggaaaaacgacgcctcaagaggtctggttctcagccagaccacctgcgtggtgcgaagcccaagtttgctcagctatacatatatgacaccgagaatgaaaccgctaatcgaattaacattttcgatagagaaaactcaaacgatgagcctgacccatcaattgttacaagacttggcgctatgctcgaccaacacaatgatctggtcaaatcgtttcgctatgctagagatcgtttaaacgagcatggtaatgagcagattgcacttagactgcttgggtgcaatgctaaagatgaagtccaatataacctgccaacgagtggtgagatcgcaggaataatagtgggcgacagctcaaacgatgcgtacacgtatgatgtggttgtccagtcttcggataataggctgagacaagtctctgctttgcatccttcctacatggctttgcaatatcctttgtttttcccctacggtgaacgagggttccacctcggtataaagtacactgatttcccgagtattgctggaacatcacggcgatacgtgacaatgcttgaatactatcgatatcgctttcattataggctaaacaaaccgaatccatatacatgttgtggccgtcttagtgactccatatgtgtggatgcatactcaactgttgagggatcgaggctgaaatttatacatgaccaccaacctgagttacgttcagagtgtgttcaagggattgccgatgccattgaccatggcctcgaatctggtgattctgttggcaaaaagtacgtcttgccatcaagtttcactggaggtcgtcgctacatggtccagaattaccaggacgcaatggctgtttgccgcgtgttcggttcgcccgacctattcgtgaccttcacgtgcaactccaaatggcaagagatatacgatgcccttgtgtttgaaccaggccaggtgccgatggcctacagcatgctctctaagcttgagttatgtgctgacaacccacgcatctgtgttcgtgtttcaaggctatgggagttcgctaatccaaatgatgagacacaattgctccaccttggtttggttttgattgatcaggagggaaaatatgaacctatcaaaatgattgagctcccagctgttggagctgttcgtactggcgccgaacaaaagtcaattgcccagatcaaggacctcaacccttttatgtttaggaaaaatgaattcatggttactgtcgtcattaagaagatcgacacagaatcatcctggtggtaccctgcatgtgatagctgcaaaagaacagcaaaaccatatggaaagtcatacaggttcaaactcagcctcattgcaggagacgacacaggtgacactaagtttgtgctctttgggcgcacagcacaacgcattatcggtcgaccagtcgagatgctgatacagaacaaccctgctggcattgagttcataccaaaggaaattacagatcttcttgagaaggagtttacttggaatgttgccttcactgaaaacaccctgtcttccagcactgtttcgttccaagtgaatttgatcgttcgagcggctgatccatctattggatttgctgatccaatagctggaatagacagcccattagccgcttcaatcaagcacaagaaaccggagactgagtatcagtcaaaacctccagctgagcttcctcaggaagaagcagaggatgatgacaaccttccactaagccagatagttgctgacgatgctactaaacatagcacgtccaagtcctacaagaaaagggctaggccatctcccggtataggagctgctaagaagttgttcaagaataatggtgatggtgctgctgatggcaggagagtacaccgtcagctcatcctcttcttccaccacagctcagcactcctcgccgagtctcacagattgaatctgaagaactcctgctcgaggaagaacaactcttttcctaccatcgtttctacggccttctgtttcgacgtgattgcattgcctgatgcttcgtttgattggagcgctgagctaggcgtggggcagccacaacgcccttcttcctatggaaccaatcgtccattactagcaacaaaattctctaggcgcaaggagatatcgcatatgctagctgacatcatatacacaagagctgttgttgttaaggtgtctggagctggaaatccgaccacaacaagaatatcagcgatgataagcgccgtctgcaggtgtcaaattgatgatttcgcattgctccctttccgcccaaagatgttcattgccatcttcatggatgccgatctgcaggaagaactgtctgaaagagctttcaaaaaggtatcgttcaccttcaaggcaactcgcctcacatttgagcctttcaagatgaatcttggtagcactgtaaatccactgtgccagcgggttatacttgcgctagaaggcgtgccaccagaatcatggaacaaagaagctatatcagagctcatggacagttgttgttttgtagaggagttgtatggagagcaccatatccaagaactctcaatttttaagttagctgcctggacaacagattgtgaccttatacccaaggtgataagctggaacattgagactaaagaaggtcgtcgaggatcagcaaacattagttggatgcacaatgcaactctgtcagttgtgctggttcatatagagaagctgttcgactacactgacgaagacagtgggagtgatagcgatggagaagttcttagggaatatgagcagcaaaggccccgtgtccctgttgtcaaaacatttagctgggtgcccttgaagattgatctaaacaacggaccagttgaaggcggtacaccagccatagctccacgccgtcttcctcttgaacgagacggggggatccgcgccggcgcccggtcgtcaaggtggatccccagctggtgcggcggcgaatccccagctcctgcgcgcgccgtcggggacaggcggcggcggtgggagggcccgaccctctctcgttcacatctcggcgggggcggcacggggaaggaggaggtggcggcggcgccgacgccgaccggcacggggaaggaggaggcggcggcggcgcggggaggagggcccgaccctctctctcattcacatctcggcggcggtggcggcacggggaaggaggcggcggcggcgccgacgccgacgcggggagcgagcagaggaggcggcggcggcgccgacgccgacgccgggagcgagcaggaggacgcggcggcgtggggaggagggcccgaccctctctctcattcacatctcggcggcggcggcggcacggggaaggaggaggcggcggcggcgccgacgccgacgcggggagcgagcagaggaggcggcggtgggggcaccggcacgcggagagaagaacggcggctgggacggcgcgaggagggaggtcgtggcgttgcgccggagagaggcaccggcggcggcggcggcgccggcacgcgatga

SEQ ID NO: 83590 - DNA, 6335 bp, Oryza sativa
  Clone ID: PAT_MRT4530_82907C.1
atggttaatgtgggggtctcatttgtctctctgttgaatgccgttgcttggcattgtcagctcccgctggtgtcctatctttgggaaatagatgggaatggcatgctgctagcaggtgttgagcttgcgctcccatcggaagacatggccggccagattgttagcaagttcttttgggtctgcgcgtctactcaaacaagtgactcgcatgaaatgggcgcgcatcaggctgttaggttcttgcaggctaggtacggctttattgtccacgattacaatcttcagatgttactttcctaccggagaatagcagcgtctacagctcctctgttcggcggcgtaaatcctgtggtctctaggggaccaaatggttcgccaaatgctggaatagatgtggagcagtcggttcctgaacaagctctggcttctgatgttcatgtgcggtctcaggttgcctttgttgctggcacaggtcctttgacccagaattccataaccaccgctagcagaaagagaaccctactagatgtgccgcgccacactgctgcagcaaacagggaaaaacgacgcctcaagaggtctggttctcagccagaccacctgttgttaatgcttgcaaacaatgcagctttgtgcccagagcgatcatactatggtggcccttcgcatgagtgtccttattgtggtgccgttttttggtaccaggagagggtaaagagagatagtgctgtttctcagagaaggattgtctataatctctgctgtaggggtggtaagatcagcctgcctgaactaaaatacccaccggatatgttagcgaagcttctgaaatttgatggtgatgcacaatcaaagcgtttcttacgccaaattcgatcttacaactcgctttttgcattcacttcattaggggctgatgtagaaaagtcaattaacaatggaaccgcaccatatgtctttaaaattaacggcgttgtgcaccatcgtattggcagcctcttgcctcagcgtggtgcgaagcccaagtttgctcagctatacatatatgacaccgagaatgaaaccgctaaccgaattaacattttcgatagagaaaactcaaacgatgagcctgacccatcaattgttacaggacttggcgctatgctcgaccaacacaatgatctggtcaaatcgtttcgctatgctagagatcgtttaaacgagcatggtaatgagcagattgcacttagactgcttgggtgcaatgctaaagatgaagtccaatataacctgccaacgagtggtgagatcgcaggaataatagtgggcgacagctcaaacgatgcgtacacgtatgatgtggttgtccagtcttcggataataggctgagacaagtctctgctttgcatccttcctacatggctttgcaatatcctttgcttttcccctacggtgaacgagggttccacctcggtataaagtacactgatttcccgagtattgctggaacatcacggcgatacgtgacaatgcttgaatactatcgatatcgctttcattataggctaaacaaaccgaatccatatacatgttgtggccgtcttagtgactcgatatgtgtggatgcatactcaactgttgagggatcgaggctgaaatttatacatgaccaccaacctgagttacgttcagagtgtgttcaagggattgtcgatgccattgaccatggcctcgaatctggtgattctgttggcaaaaagtacgtcttgccatcaagtttcactggaggtcgtcgctacatggtccagaattaccaggacgcaatggctgtttgccgcgtgttcggttcgcccgacctattcgtgaccttcacgtgcaactccaaatggcaagagatatacgatgcccttgtgtttgaaccaggccaggtgccgagcgatcggtctgacatgattgtacgagtctttagcatgaaggtcgatgaattcatatccgatattaaggagggaaggaccttcggtcctgtgctggcagtgttgtataccgtggaattccaaaagcgtggtctcccgcacatacactgtattgtgtggcgtgcagcagctgacgccgaatttagtgctaccgctgtggacagtttaatttgtgctgaaattcctgatgtgtttagtgatcctttgggctatgccttagtcgatgagtttatgatccatggcccttgtggtgacaagaataaatcatgtgtctgtatgaaaaatgggcattgctccaagcatttccctaaaggcttccaagaagagacgaccatggatgagtttggctttactgtatataggcgtcgaaatgatggacgatatgtggttaagaatggaattaaacttgacaatcgatgggtcgttccatacaacatgaaattactgaaaaaataccaagcgcacattaacgttgaatcatgcaacaaatccaacatgataaaataccttttcaagtacataacaaagggtggtgatagaaccaaactatactttgaaacaactggcaacacaccaaacaagactgttgatggtactgttttgccaccaaatgagattgatgagtacatcaatgctaggttcctctcaacctgtgaagccttttggcgtgctttcgagtttgacatacactatagagttcctgctgtggaacggttgcctattcatcttccaaatatgaattttgttcagtacaaaaaaggaaccgacctaaaaaaattgcttgacagtcctgctgcaaaaaaaacaatgctaacagagtggttcgagtgtaataaaaagcatccaaatgcacgaacactgacctattgtgatttcccaaaacaatggacctgggacaatagcgcccgctgttggcgcccaaggacaccagtcgaaaaaattggtagaatttattatgtcagcccagccgctggagagctatactacctgcgcatgctgttgatgacagttaaaggcgcaaaaagctatgctgatgttcggacctttgaagggactgtttacccaacttttaggcaggcatgtgagtctagaggccttcttgagaatgataacgattggcatttgttgtttgatgaggcgatagtttctgcgtcgtccctgcagttaaggcaactatttgtgactgttgtaatgttctgctctgttggaaacgtccgatcattgtttgataagtattggttatactttactgatgacattcagcatcgccttagaacagcgctctcaaaccctgcttatgttgttccacatgataggttgctgtctcttttgattaaagaattacactctgcatttgcaaacagcggtggtaacatagatgactatgacctcccgcgatcaacgatacattcagatgatgaatttggaaatagaatggtcaacgaagaattggctcttgatactgctgccttggctgctcatgccagcctgatgataccacgactaaactctgaacaacaaaatttttttgacacaatagttagccgtgttagtgagtcgaggcctggatttttcttcgtgtatggccatggtggcactggcaaaacgtttttgtggaacgtgctcatttctaagataaggtctgagggaaatattgttcttgcagttgcttcctcaggagtcgcttcgcttcttctccctagagggcgcactgcccattctaggttcaaaataccgattgatatagatgaaaatagcatatgcagtataaaaagaggaacaatgcttgcagaacttattcagaaaacgtcccttattatatgggatgaagctcccatgacacatagacgatgctttgaggccttagaccgaacgttgcgagatttgctttcagaacataacccttcaaatagtgtgctgccatttggtgggaaatttgttgtcctaggtggtgatttcaggcagatattaccggttattaaaaaggggacacgcaattctatagttgacgcatctataacaaattcaccgctttggcaacatgttgtccttcttaaactcactgttaacatgaggctcttccagtccggtctttctgagggacgccgtcatgatcttgaacaatttgctcgatgggtcttagcgcttggggatggtatgctaccagtatcaaaaaggatcgatgagtctgaggcgacctggattgatatccctgatgatctactaattagagcttcggatgacaaaatatattcaatagtaaatgaggttttcccatgttatgtgcatagatacacagattcttcttacctagcatcgcgtgctattgtctgcccaaataactcaacagttgacgagataaatgactacatggttgctatgatacctggtgaaatgaaagagtaccttagttgtgacactatttcaaaaacatccgaacacatacctgacttcgacattttgtacccaactgaatttttaaactccatcaatgccaacaacttcccgacgcataggcttgcactgaaaaaaggcgcaacagtaatgttgctgcggaatctaaatcaatcccttggcttgtgcaatggaactagattgttggtcctttctctcgggcatcgtctcttagaatgtgtgatcttgactggatcaaacgttggcgaaagagcattcataccaagaattgtgctcagcactacgagttctaagtggccttttgtacttcaaagaaggcaattccctgtacgtgtgtgctatgccatgacaattaacaaaagccaaggacagacactttcaagggttggggtctaccttaaaaaagcagttttcacacatggccaattgtatgttgctgtatctagatcgacctctagagatggccttaggatccttattaaggacgacgatggcgcgtgtagttctaagactagaaacgtggtataccatgaggtgctggaggcagtcagattaatgctctgttatcgtgttcttgtgcaaaaatgtttctctatgttctcaggatcttttgctatggcctacagcatgctctctaagcttgagttaggtgctgacaacccacgcatctgtgttcgtgtttcaaggctatgggagttcgctaatccaaatgatgagacacaattgctccaccttggtttggttttgattgatcaggagggcactagcattgcagcacagatataccctccctgcgatctgcagttcagagaaatcatcactgaaggcaaagtgtactatcttgagtactaccgtgtgagggaatggagcaggcgatacaggccagtcaacaacagcctgtcaatttgttttacaaggtggactaaagttgaacaggttgcagatccggcagctgatttccctttgtacacttactcactcacaccatatggtggactccgtcagcgtgtcgataggaaagaagaattcacagatgtcattggcattattactgaggcgacatatctctatcagcaactcagcttgcaaatggacattaatgtgaacactcctgaggtcaactccttcaaagaaagcatacagggaaaatatgaacctatcaaaatgattgagctcccagctgttggagctgttcgtactggcgccgaacaaaagtcaattgcccagatcaaggacctcaacccttttatgtttaggaaaaatgaattcatggttactgtcgtcattaagaagatcgacacagaatcatcctggtggtaccctgcatgtgatacctgcaaaagaacagcaaaaccatatggaaagtcatacaggatcaaactcagcctcattgcaggagacgacacaggtgacactaagtttgtgctctttgggcgcacagcacaacgcattatcggtcgaccagtcgagatgctgatacagaacaaccctgctggcattgagttcataccaaaggaaattacagatcttcttgagaaggagtttacttggaatgttgccttcactgaaaacaccctgtcttccagcactgtttcgttccaagtgaatttgatcgttcgaggtcctgacaatccctgttcttcagccttgcaatccccatctgcatctcaggcatcgtctgcagtgccttctcaggctttatcaccagggctatcacatggtctctctattgggcagtgttcggcagcggctgatccatctattggatttgctgatccaacagctggaatagacagcccattagccgcttcaatcaagcacaagaaaccggagactgagtatcagtcaaaacctccagctgagcttcctcaggacgaagcagaggatgatgacaaccttccactaagccagatagttgctgacgatgctactaaacatagcacgtccaagtcctacaagaaaag

SEQ ID NO: 83591 - DNA, 1468 bp, Oryza sativa
  Clone ID: PAT_MRT4530_82908C.1
aacctctgcagagggggtacactttacccacacgacattactaactcggatcacccagcccgtatttccaaagccgacacaggtttaccatatgccgacgagaggggtcccagaccaacaacaggttaggtcctagaccatactgtgccaggaagcccaggggtcctccccgacaccaccccggcgaatccacatgtctctcggcatcaaggctcccctgataagctagttactcagccaggggtgtcccattccacccatgtgatcgtacttgtcttatgtttggatgaaattccaaggaaacggtccttaagtgcaagagcgggaaaccgtacacccggtacgttccccggtccgcggttttggaaatttcatttagttcacaagcaccgacccaggtgtcgggttttccaaatcttttgtaaaacccaagttttacccaagatgtttatcatattttaagtttgagggcgaccgtcgatactcgcacagagtgctcgagtatcgaggcgcaggggagggactgaccggggtcggctcgacccggtctaggctgagctggcgccgacgtggcgcctacgtggctgccacgcgggccggcgggaggtagacgacgacgctggccggaacgaacggcggtcgacagcggcgagcgacggagcgaaccacggcgatacgggcaaaagcgagcacaccgggcggttgcacgtgacgaggggagacgaaccaacggctcggatttgccgggggttgctcgacggcggcggcaaccggcggcgggagaagggggaaacggcgacgaggtcactaggggctaattcccggcggcgagagcatctatgcggttacgggaatccgatgctagcgtcggattgggcggaactacgccgagcgaggccggcgacgagcggcgcttccgagctcgggcggcgacggcggcgagcacacggcgagcgacggcaacggtcggggcggcgccggctaacttcggggaggctactcgagctacggctctcccggtgcttggcgatggacggcggaggcgagacagagcacgggagcggcggcaatggcgaggaggcgaatgggagaggaaggaagggagaggggggcttgggtttataggaggcgggaaggtcggtttgggagagaggaaccgacattgggcggtcaagccggcgagctggcgctccggctagcggccaaagcgacgacaggaggtgacaccggcgagaggggaaaaagggggaaaaaggggaaaaggagggagagaaagggggctcgccccttgcctctttgggaaaaggcggagggagcgggggcgacgcggcagggggaggaggggcgctgcctccgtcccttggcggcttgcgcgcggagtggcgggggccgggcgatgacgacagcgatgacggcgggcggattggatctgagccgcgacacgggcgacaggcgcggcaggcgctga

SEQ ID NO: 83592 - DNA, 273 bp, Oryza sativa
  Clone ID: PAT_MRT4530_82909C.1
atgaaagtgcttcgcgcgagactgcgggtgggtgtgggaactgtggcggcgttgtgcggatgggttcttttccgcctggtgcagacaggttcgtcgggggttatgcaagcttcagaggtggggggtacgattgtggaagatcgcgtggaggcaggggttggagatgtgatgcaaggatgcggggaattgggtggaaggacagtcgttaatgtggagtcaggtttgacgggcaggaaagctaactgcttgctggctggaagctgtatgagcgac

SEQ ID NO: 83593 - DNA, 1323 bp, Oryza sativa
  Clone ID: PAT_MRT4530_8290C.1
ttactcacgaacaaagcaatgacttaacagacctgaacgactaattctgtagctatatgacgtgttcagaagtttctttcgttgaccatggacagatacaccctgcatcttgtctccttctttggttatcttggatggaacacattccatgtgtttactcctaaattcagtaccacccttgacatagaacatctctgctcttggattcagagaacgtgctacggttagggacgcccatacatatcttgacattgtcacaaatgcctgataaaatggtgttcttggatggccgccattctcaacaaatgatctatgatccaaatttccgaagaatgaatcctccatactaggaggcaaaatggccagatacttttctcgacagaatctcccaaaacaagagtctggggccttcataagagcatcaaaaggatcactgaaactcattacataatcgaagacatccagcgaaaggtactcctctttgtgccccatcaacatcatacaagcaaagtaggcctcaacggcgtaattcttgtgagaccttttatcatagacaacagaattgtctattggggatgttaagttgccaagattccaccgagaaagtttcatccaacggacgacgagttttgcaaaatcatggatagactttgtcgaaagctcgaataattccataaacatatccgttgatactcccatcccaattgcaaaacttccttctttctgtaacgcactttgaccgatcttctcctccagttccatgttcttcctttccagttcatccaactccgctcgcaaacacacaatctcagagtctctcttgcacatgccagcttgcaactccacggccaacttttgttgctcctgaattctagagcccacatagcactggtacattggatttctccatttgttcatgttgacatacagatccttcaacccggcagtctcttgaagctccgatgtgaatcgctcatcagcgatcgtaatctcttcaggatcatatggcacaagagcttgctgaaggttcacgtaactcaatttgaggccagaaatcgcgtcgagaagcctctcaacaaacgcttcctcgcagcgagcagaggagcattcagagacgctctcatggtcggacacatgatgcgggtggactttcaggtgcgcgccgccgtcttcgctgctctctccggtggcgctgccgtcggccttgggcttttcgcggacggtcggcgcgacgccgacggagcgcaccttgcagatgtcggagatgcgcagcagcaggcaggaggagggcgtcctcctcaccttctccgtcgccgactccat

SEQ ID NO: 83594 - DNA, 1397 bp, Oryza sativa
  Clone ID: PAT_MRT4530_82910C.1
aaatttcaaataagatggacgattaaagttggacgcgaaaacttatggttgcacttaaaatgggatggagggactagaaagaaaaggttggatgcatgcttagagcaagtttaatactatgtcatttggattgttgcatgttgtgttctttagatgtctcagaaggtattctgtgacgtttcagaacgtatttcactagattattcggaatgttgcacgtggtgttatttgaatgcttcagaaggtatttttgtaatgtttcagtagatacttgtcttatgtttggatgaaattccaaggaaacggttcttaggtgcaagagcggaaaaccgtacacccggtacgttccccggtccgcggttttggaaattcatttagttcgcaagcaccgacccaggtgtcgggttttccaagtcttttgtaaaacccaagttttacccaagaaatttttcagattttaggtttgaaggcgtccgtcgatactcgcacagggtgcacgaatatcgagacgcaagggagggactgaccggggtcggcccgatccgatctcggccgagctggtgccgacgtggcgcctacgtggcgcctacgtggctgctacgcgggctggcgggaggaagacgaaggcgtcggccgcgaatggaaggcgggcggcggcggtttctccggggcgccttgcgacgatgaggggggacggggcatacaccgggatgacgaggaagaaagagagggagcgagccaacggcttggattcgccggagggagcccgtcggcagaggatttcggcggcggcaaccggcggagagcaaagggggaaacggcgacgaggtcacgaggggccaattcctggcggtgagagcatctacgcggctacgggaatccgttgctagcgtcggattgagcggagctacgccgagcgaggccggcgacgagcgggtgctacggagcacgggcggcgacggcggaaagcacactgcgagcggcggcaacggtcggggcggcgccggctagctacggggaggctactcgagctacggctctcccggcgcttggcggcgaacggcggaggcgagacagagctcggaaggcggtggcaacaatggagtggaggcgataggaggagaagagagggagggcgcccggggctttaagggcggcaatgtcggtttggaaaccgaggcggggcggtttggagcggcgcgacgacacgggcgacaggcgcgggctggcgcggcagagggtgacggcggcggcgaccaggcggtcggccaccacggcacgcgcgcgcgggatgcaacgggaggcgcagcggtttgagtggcgcggctcgggcacgcgcgctggctgcggggccgagcggctgcgcggaaaactttaagcattttttctcctaatcg

SEQ ID NO: 83595 - DNA, 1189 bp, Oryza sativa
  Clone ID: PAT_MRT4530_82911C.1
atggggtggtccggccgagctaattgggccgaccggcccaaggcggcccaagacgcgcgtgcgcgcgggagggaggagagagagagccggtggaccgggctcaccacgcgcggtcccgggtgggacccgcttgtcagcggctcggctcaccgtgcggagggagcacgcggcgcggcgctagggtggaggatggacgtggtgcacgcacgcggttcgcggaggacgcaggtgcggcgggcccacgcgcagcctcacggctcgcggtggaacgcgcgcacggggagggactgaccggggtcggcccgtcccgacctcggctgagctggcgccgacgtggcgcctacgtgccgggcggttgttcgtgatgaggggagatgagccaacggctcggattcgccggagggagcttgacggcggcgaatcgcggcggcgacaaccggcggggagggaagagggaaacggcgacgaggccacgaggggtcgattcccggcggtgagagcatctacgcggtttcgggaactcgatgctagcgtcggattggacggagctacgccgagcgaggctggcgacgtgcgggtgctacggagctcgagcggcgacggcggcgagcacacggcgagcgacggcaacggccgacggcgcgggagtaatctctccggcctcaggccggggaagagaaaggagagggcgcggccgaagtccccttccgcgtcctcgaacgcaccagttctcccggcgctcggcgaaggacggcagaggcgagacagagcacgggggcggcggcaatggcacggaggcgaatggaagaggaagggaaaggggaggctgggggaggatgacgccggcgaggaggaaaaaggggaaaaggagggggagaaagggggcttgcccctttgccgattcgggaaaaaggaggaggtgagcgggggcgacgcggcagagggaggagggatgctgcctccgtcccttggcggcttgcgcgcggagtggcggggccgggtgatgacgacggcgatgacggcggggcggtttggagcggagcggcgacacaggcgacaggcgcgtgcagaggctgacggcggcggcgaccgggcggcggcagggcagcgggaccgggtggcgcagacgcgacgcgacacgggcggcaaccacgcgggcgcgcgcgcgaacgagcgcggggagcggtag

SEQ ID NO: 83596 - DNA, 1421 bp, Oryza sativa
  Clone ID: PAT_MRT4530_82912C.1
atgggccggccgacccaagaaggtggcccagagcgcgcgcgcgggaggggaggagagagggagccggtggaccgggctcacctcgcgtggtcccgagtgggacccgcttgtcggtgacacggttcaccgtgcggaacgcgcacgcggcgcgcgctagggtttgggggtgggacgcggtgcacgcgcgcggttcgcggaggacgcggatgcggcgggcccacgtgcagcctcacggctcgcggtggaccgcgcgcacagggaggggctgaccggggtcggctcgacctggtcttggccgagctggcgccgacgtggcgcctacgtggctgccacgcgggccggcaggaggtagacgacgacgccggccggaatggacggcggacgacagcagcgagcggcggagcgaaccacggtgataccagcgaaagcgagcacaccgggtggctgcacaggacgaggggagacgagccaacggctcggattcgccggagggagcttgacggcggcgaattgcagcggcggcaaccggtggagagaaaaggggaaaacggcgatgaggtcacgaggggccgatttccggcggcgagagcatccacgcggctacgggaatccgtccctttcgccggattaggaggaaacgcatcgagggaggccggcgacgagaggcgcttccgagctcgggcggcgacggcggcgagcacacggtgagcgacggcaacggtcggggcggcgctggctagctacggggaggctactcgcactaccgtgcgggcgggcgcagtgacgagagccgacggcgcgaaacgtgatcgtttcggcctcgggccgaggaagaggaagaagagggcgcgcccggagtccccttccgcgtcctcgctcgtgccggctcctccgacacgcgcgacgacaaacggcgacggcgaacagggaaaaggaggaggggagcggaggcgacgcggcagagggaggaggggctctgcctccgtcccttggcagcttgcgcacggagtggcggggccgagtcgatgacgacggcgatgacggcggggcggtgtggagcggagcggcgacaaccacggcacgcgcgcgcgggaagcaacggcggcgcggcgatttgagcggcgtggctcgggcacgcgtgctgactcgcggcgcagacggcgcaggcgcggcacgggcggcgaccgtgcgggcgcgcgggaagcggcaacgagggagcggagagggagggctcggctcggcgcggctcacgcgcacgcgcgcgcggcgcgcggccagagcggagaagagggagagagagagcgagagagagagagagatagccggggagggaggggaagatgggccgagagagattcggcccatcgaacccgagggaggcaaaatagacttttgcggagggatcgatttgggaagggttg

SEQ ID NO: 83597 - DNA, 806 bp, Oryza sativa
  Clone ID: PAT_MRT4530_82913C.1
cctggaagaactcctcatcagcaggatccgcttcatcttcttcagcaactggggggggaattatttatatagagcaagggtgaagggggtacactttacccacacgacattactaacccggatcacccagcccgtgggggatcagccacgtcgggagacctccaagctttcatgacaaggcatttccaaagccgacacaggtttaccatatgccgacgagaggggtcccagaccaacaacagagtgcacgatttctgaggcgcaactgggtggttacaagggaacatggtataacaattaacaaaggaaggatcaaatacaacaaactaggggctgaccggggtcggcccgacccgatctcggccgagctggcgccgacgtggcgcctacgtggctgccacgcgggctggcgggaggtagacaacgacgccggccggaacggacggcggacgacagcgacgagcggcggagcgaaccacggcgatacaggcgaaagcgagcacaccgggtggttgctcaggacgaggggagacgagccaacggctcggattcgccggagggagcttgacggcggcgaattgcggcggcggcaaccggcggggagggaagagggaaaaggcgacgaggtcacgaggggccaattcccggcggtgagagcatctacgcggctacaggaatccgttgcttgcgttggattgggcggagctacgccgagcgaggccggcgacgagcgggtgctacggagcacgggcggcgacggcggcgagcacacggcgagcggcggcaacggtcggggcggcgccggc

SEQ ID NO: 83598 - DNA, 243 bp, Oryza sativa
  Clone ID: PAT_MRT4530_82914C.1
atggtgaccatggtagatggagttatgcacgctgagattaactgcaccaccatgcagttgcgccgaaggatagggagaaaaatctgcatgcgagtagatcacggcaacaactacatgtgggatgggtatgagtttatgcagccagaggagggcgggccggacgccggagggcggcgcggcggcgcggagggccgcacggtggcgcgacggcggccggggaggaggggaggcggcagcggctga

SEQ ID NO: 83599 - DNA, 897 bp, Oryza sativa
  Clone ID: PAT_MRT4530_82915C.1
tgctggtgtgttaactttgacaccctgttaatcgataccagtcccaggaaacagtgctggtatcacagggagacagaatatcacagcaacagaggtctctttattatagagtaggagtacagtcatgttgggctacggacagatcccgagctcacaactgcattacaaaaggaaagcggaagcccggacttggaccaatcatcacaggcgcgacttgggaactaggccgaaaccctaaaactcatcgtagccggcttgctcctggaagaactcctcatcagcaggatccgcttcatcttcgtcagcaactggggggggattatttatatagagcaaggttttacccaaattgttactcagattttaagtttgaaggcgaccgtcgatactcgcactgagtgcacgaatatcgaggcgcaactgggtggttacaaggggacatggctgagctggcgccgacgtggcgcctacgtggccgccacgcgggccggcgggaggtagacgacgatccggccgcgaatggacggcgggcggcggcggcgagcggcggagcgaaccacggtgatacgggcaaaagcgagcacaccgggcggttacacgagacgaggggagacgaaccaacggcttggatttgccgggggttgctcgacggcggcggattgcggcggcggcaaccggcggcgggagaagagggaaacggcaacgaggccacgagaggtcgattcccggcggtgagagcatctacgcggcttcgggaactcgacgctagcgtcggattgggcggaactacgccgagcgaggccggcgacgagcgggtgctacggagctcgggcggcgacggcggcgagcacacggcgagcgacggcaacgggagtggccggggccgggcgatgacga

SEQ ID NO: 83600 - DNA, 1041 bp, Oryza sativa
  Clone ID: PAT_MRT4530_82916C.1
cggatttgccagaggaagctcgacggcggcgaatcgcggtggcgtcaaccggtggggagggaagagggaaacagcggctaggccacgaggggtcgattcccggcggtgagagcatctacgcggtttcgggaactcgatgctagcgtcggattggacggaactacgccgagcgaggctggcgacgagcgggtgctacggagctcgagcggcgacggcggcgagcacgcggcgagcgacgacaacggtcggggggaggagatggagcgaggaggaagaacggagggaggcatcaccgagatgaggaggggcgctgtgacgagaggccgacggcgcgggagtaatctctccggcctcgggccggggaagaggaaggagagggcgcggccgaagtccccttccgcgtccttgctcgtgccgactcctccgacacgcgcaacaacgaacggcgacggcgaacagagcacgggggcggcagctatggcgaggaggcgaaaacgagggagattggaggggaaggagctggggtttaaaggggggtggcaatgtcggtttgggaaccgacttagggcggaggaggggagcgggggcgacgcggcagagggaggaggggcgctgcctccgtcccttggcggcttgcgcgcggagtggctgggccgggcggtgacgacagcgatgacggcgggcggtttggagcggcgcgacaacacgggcgacagacgcgtgcaaaggctgacggcggcggcgaccgggcggtcggccactcggcacgcgcgcgcggcttgcaacgggcggcgtccgcgcgggcgtgcgcacgcgaacacggcgcgcgggaagtggcagcgagggagcggagagggaggacttgtctcggcgcgggcggcttacgcaggcgcggcacagacaggagaggggaagggggcgctcggcgcgttcttcgcgcacgcgcgcgcggcgcgcgggcgaggcggagcggagctgagcggggggggggggggagcggagctctccgggggagaggagatggcccggggagagggggag

SEQ ID NO: 83601 - DNA, 186 bp, Oryza sativa
  Clone ID: PAT_MRT4530_82917C.1
atggcccgcgggggaggaaggccggccaactgcatggaaattggcctgtcgtcgcagcgggagcagctcgtgttgaccaacaactttgtcactcctgtgaccaaagagatggatgtggaggaggctgagaagtggttgagagagatgagaaaaaagataagaggggaggatgaaggaagaagatga

SEQ ID NO: 83602 - DNA, 2187 bp, Oryza sativa
  Clone ID: PAT_MRT4530_82918C.1
atgccgccgccgctgccgcattccccgcccccaccggctgccgcggatgcgctcggccagatcttgcaggctctgctcccggcgctgctcttggctgcggagtccgtgaaggcgctccacgcccggtggcgcgcggtccacggcacgctgctcgcgctccagacctctctcgccgcagcaccggactcggccgtctcccaccctctcttcgccgacctggtggcctcgctcctcccggcgctccgctccctgcaagcgctgtccgcgcgctgccaggacccgtcactccctggcggccgcctccgcctccagagcgacctcgacatcgctgcctcctcgctctctctgctcctccacgacctctcgctgctccttcgctcggggatcctctacgtcgatccgtcggcttcgtcccccaacgccattgtgctgcaggtgcccgcgccagccgcgtcccgggcggacaagtctctcttcatccgggacgccttcgcgaggctccagatcggggggctcgatctcaagctcaaggcgctcgcctcgctactggacttgcttgccaacgacatcgccgcggagtccgcgcacatcgttgccaccgacggggatgtcgccgcgctgctccgcctgctcgacgcgtcgtcccactccgcgctacgggaccgtgcggcggctaccgtggcccacctcgccacggcctgcgtggcttcgcggaaggttgtgttcgacgagggcggccttggcccgctccttcgcgtgctcgactccggctcagcgccagccacgcgggaacgcgccgtggcggccattgaagccatcaccgcggacgtcggcagcgcgtgggctgttgcggcatacggaggggtacccatcttgattaatgcgtgccgacctggctccgggtcccctgtggtacaggctctcgctgtagcggcgctcaagaatgtggcttccatcgaggatgtgcgctcagcactggttgaagagggtggactgccaattcttgttgatctgcttgcaagcggcactattgacgcacagaagggttctgctctctgcatatggtctctagcatccttgggagaccatgagatacaataccagattgtccaagcaggtgcattgctgccactactgcaggcgctgcacactgcttctggcctagatctccatgacactgtcttacgcgctatccacgcactcgcagtggtccctgctgctgctagaactctctgctcatcgccgctcttcttcgcgcaacttacagacctcatgtgccgtggtggtagcatcttgctgcagcagatggccgctgatatggttgctgaacttgcacctggcgtgagcgacgacaccaagcggtgcatggcaccgtgcatttgcatgctggttaagatgatggagacagctaagccagctactgtacaggagtcagctggccgtgccttgcttgctttgatgaccttgaagtttaaccggaaggaattggtcagggatgagaagagtgtgactaggttattgcacatgcttgatccgaggaatgaagagattgataaaaagtatccagtctcagttgttctagctctagccttgggtggtgggaatgggacacggaggcggcttgcggattctggcatttgccagcatttacagaagttggctgaggctgaggtgcctggtgcaaagaaggctttgcagaggatttctggcaatcgactcaagagcttactctctagaggatggaacaactagtcagtctgccatgttgggttgaagaaagcccaatgtggagtgcttataattatagaagaaccctcaagtatttaaattaggagtcgtcatcatacaagaccaccgagcaagagagcgaggagttctctgtttctctgcggcctaaaggtgggcagtagctggtatttgtagtatattgacaaaatagaagagcattggatgcagcattttaggaagtatccttgagcttctattttctttttgactattttccttctcttttctttgcctctcccttctcccgtgtaactgacttgtgaagttgctgcgtgtttgtgtgttgatttgaaatgaaggaaatgtttctcgtacgagattctcacaaaaaaaaaaaaaaaaaaaaaaaaaaaaaaaaaaaaaaaaaaaaaaaaaaaaaaaaaaactcgagggggggcc

SEQ ID NO: 83603 - DNA, 2136 bp, Oryza sativa
  Clone ID: PAT_MRT4530_82919C.1
atggccagcaagactcttcgcgagttcgctgctccctctgctaacaatgtggtcgtcgggccgcaagtcaacataggagatgtggatttcgacttgaagtccagcctcatcacgatggcgcaggctagcccgttctgtggcaagcctaatgaggatgccaacgctcatatgcaacaattcctggagatatgtagcacgtacaccatcaagggcgtcagtcctgatgccgtcagactgcgactgtttccgttctccctcctcaagagagcgaagcagtggttctatgccaaccgtgctgctatcaacacctgcgataaatgctctacgacattcctctcgaagttcttcccgatgggcaaaaccaacgcccttcgaggacgaatttctagtttccagcagacaagggacgagtccattccggaagcgtgggaacgactgcaggagtatgtggctgcctgtcctcatcatgggatggatgactggctgattctgcagaatttttacaatggactcaccccagtgtcccgcgatcaccaggacgcggcagctggaggagccttcttctctaaaacggttcaaggagccgttgaattaatagagaagatggtctccaatatgggttggagcaaggaacgattccaaacccatcagcgaggcatgcacatcgtcaaggagatggagttacttgttgccaagctggacctcctgatgaaacgcttggacgaccacgacaaaaggctacaaggcaccatcaaggccttggactcacacgtcacgtgtgaggtctgtggcggcacgggtcattctgggaatgattgcccgaaaacccgtgaggaggcgatgtacatgggcaacaacaacaacgggtatcgtccacaaggaggtcaggggtggaactcaacttcacttcatggcaacgccgatgtcaggcgtcatgccaaaagacgtttcgacaaactcaacttcacggcgttggcatcaacaccaatgtacctccaactggctgactcatcagtccgttacccgactaggatagcggaggatgtgccaatcaaaatacgggatttcctcatcccggttgatttcgtggaaccgttattggaggatgccggtaaaatcacccgtaccggccaagaaattagagcagccggctcagaagaagccgtcttccgcatcgaaatcaaagaaggtgtggaaggaaaagccaaagacacccgctccatcacctccggagacgggtggaaaatccatgaactgaaacgcaaggaggagttcacactcacatggaaaggcttgagtacacttcttggttttcacgattcctgcaaaatcgatctccagagaggaatttcggggttcgagaaaaataggttttgggaagacatttctggtgctccaatttgcaagaaacctagaacgaataatatccataatcctacacttaggctcgtgcacaaatggattgctatgactttgttttctagaagtgatctgagacccattaggggagatgaattaattatcatgtttgccatggttagaaaggtcaaaatttctcctgtgaaatgtatgataaggcaatggttagaaagtataatgttctctgctcctgttgagtgcacttctctgattactcggatagcaaaagagctaggggtcgttagcgaccaaattgcttttatctcagccgctcgtccgcatattgatgaggcttatctagtgcaagggcatattttgaaacaaggagcagatggatctttgatatactttttcccaagttgtacaaatgaaatcccattgccaaatgcggggtatcatttgtacaactgccatgaactaaccattcccctgcagaccatagaagaatctcgtgcaggtggaacatacagggagacgcgcaacatgacaaggaacgaacaagagagttcatcatcctcgacacctgtgcagatgtatgaggcaggatgggcaccaactggggatgctcctagatggacccaagctccacgccatagcattggagtctcaccctgggcaagcgccggcgaggaccggtggcacgccgcccccctccggctcccttccttccattctcccctaaaccctaggcacggcagcggagtttggtgccggtag

SEQ ID NO: 83604 - DNA, 632 bp, Oryza sativa
  Clone ID: PAT_MRT4530_8291C.1
ccatgttcaacgagccaaaccctaaaaaactaaaattccccaaactctgtcgccgtcgccatggaccgcgatgcgggcggcggcggcggcggcggcggcgaccctgctaccggaggaccagctgaattccctggcgaggccaagataaccctgcgacctgatttcctcctcttacaagcggcccccttacaagcagctgccagaaaatctaaaagatatgctattcagcaaagtattctctacaaagagcacaaaaggcaatctagacatcaactaagaggagcacagccatcaacctcccaaaaacctaggcatgcagaagctggaagtaagactcatgttcgtcaaagtgttctctattcagagcgtaaaaggcaacctagacatgaacgaggaggaacacaaccaccaaccttactgactgcgagtgagcatgattctacaactgtggagccatcaagacttaaggaagcttcaccatcactgtcagatgaactacgtgaacttgaggaataccgcaagacgcatacctttagcagctttgaagatgcgattcattatgttctttctgttcatcctcgtactttgtctgggcttccagtaactgaggatgaccaccatgatggtgaagc

SEQ ID NO: 83605 - DNA, 345 bp, Oryza sativa
  Clone ID: PAT_MRT4530_82920C.1
atgagtggatccgtgatgatgatgcagcggttggcgcgtcaagcggcacacgcggtcacccagcgtgccaggaatcagacggcggctacggctcgcggttaccaccacgccggcgtcgctgcagctggtggtaagaacgtgacgccggcggcggcggcggcgcggcgacatccggacgtggtagtgacgatagaggaagcagcaggtgcagggccgcggccatcgtcgacgtcgcaggaggacgcggcgaggaggcttcgttggctactctacgaggcttccttttggagaggttgctccgtttactttgctggtgtcgccgccgccagggtgatggctcgataa

SEQ ID NO: 83606 - DNA, 2037 bp, Oryza sativa
  Clone ID: PAT_MRT4530_82921C.1
atgactggtttcaacctgccggaaaatttcaaggaaaatccagaagctttcttccggagcgtcagaccgcgagtcgctgctccgcagaaaactctaccgacagagaaaccagccgtaccagcgccaccaattttcaagactatggctagcaagactctccgcgagttcgctgctccctctgctgacaatgtggccattgggccacagatcaacatgggagacatggatttcaatttgaagtccagactcatcacgatggcgcaggctagcccattctgtggcaagcctaatgaggatgccaatgctcatctgcaacagttcctggagatctgtagcataatttttataatggactcaccccgacgtcccgcgaccccgacgtcccgcgatcacctggatgcggcagctggaggagcattcttctttaaaacggttcaaggagtcgttgatctaacagagaagatggtctccaatatgggatggagcgaggaacgactccagacccgacagcgaggtatacacaccgtcaaggagacggagttacttgctgccaagctggacctacttatgaagcgattggacgaccacgagaaacgaccacaaggcaccgtcaaggccttggactcacacgttacgtgtgaagtctgcggcaacacgagtcattctaggaatgactgcccggaaactcgtgaggaggcgatgtacatgggcaacaacaacaacggcaaaaagcttgcggctaatgacaaggtcctagagaacaaaaatgtcaaattagatggctttgcttccgtttttcaaaatcagctgagctttaataaaatgatagaaacccagttagctgagttggcatctttagtccctgcaaatgaaattgggaggattccggggcaacccgactcctccattgaaaatgtcaaggcgatcacgacgaggagaggtaagtccactcgtgatccgccatatcctaaccctgcaggaactactgggatgtcaaaagaagcaccgtctagtgactcggctgacaaggaagttcagccagaaaagacagtgccgcaagagtacggcgacacacggttgctgccattccctcaacgaaggagaccgtcagtggacgagcaattcgctcgttttattgaagtaatccagaaaatccacatcaacgtgccgttgttggacgccatgcaagtgccaacatacgcccgttatctcaaggacatactcaacaacaagagaccgctcccaacaacggaggtagtcaagctgacgaaacaatgcagcaacgttatactccacaagctcccggaaaagaagaaagattcggggtgtcccacgatcacctactcgatcggggcacaacagttcgaccaggccttgtgcgaccttggagctagcgtcagcgtcatgccaaaagacgttttcgacaagctcaacttcacggtgttggcaccaacaccgatgcgcctacaactggctgactcgtcagtccgttacccggtagggatagcggaggatgtgccagtcaagatatgggatttcttcatcccagttgacttcatgaataaagtacgggccgaacccgcagaatattcaagaggtcgaagtggagccacccaagacggacagcctggtgaaattcatgcagaatttcctgaagaaggaaacaacgatgcccaggaaccgttattggaggacgccggtaaaaccaccaataccagccaagaagctagagcagccggctcagaagaagccgccctccgcaccaaaaccaaggaaggtgtggagggagaagccgaagacgcccgctccatcacctccggagacgggtggaaaaaccatgaactaaatcggaaggaggggtccagctcttcatcaagtcgtcatgacgagtctagtactcgttcatcagctgatgtctcgatggaagacaccgaagctccgcgacaactcctgaacaacaccgacctcgaccttgtcagtgatcgggagagacaggcctactacatgctgagtgaccgggagtatgctcatacgtaa

SEQ ID NO: 83607 - DNA, 582 bp, Oryza sativa
  Clone ID: PAT_MRT4530_82922C.1
atgggccgacggcacgggagtgatctcttcggcctcgggccggggaagaggaagaagagggcacgcccagagtccccttccgcgtccttgctcgtgccggctcctctgacacgcgcaacgatgaacggcgacggcaaacagagcacgggaggcggtggcaatggagtggaggcgagagacgaaaacgagggagattggaggagggaggagcttgggtttataggggcgacagtgtcggtttgggagaggggaaccgacattggacggtcaagccggcgagctggcgcccggctagcggccaacacgacgacaggaggtgacgccggcgagagggaaacgggaggaaaggaagggagaaagggagcttgtcccttgccactttgggaaaaggaggagggagcgggggtgacgtggcagagggaggaggggctctgcctccgtcccttggaagctagcgcgcggagtggcggggtcgggttgatgacgacggcgatgacggtggggcggtttggagcggggcgacgacacgggcggcaggcgcgggcaggcgtggcagaggctgacggcggcggcgaccaggcg

SEQ ID NO: 83608 - DNA, 123 bp, Oryza sativa
  Clone ID: PAT_MRT4530_82923C.1
atgtcgttcttgcactcgtcgccgctgcagtgcaagggccatgttggtgtcaatgctccgccacacaccgcgcttgggccgcaccacgccacgatgccataccctccacctcccatgtcgtga

SEQ ID NO: 83609 - DNA, 597 bp, Oryza sativa
  Clone ID: PAT_MRT4530_82924C.1
atggcgggagctcgcgccgccgtcatccccgtcgccgctccacctagaaccatcagcgtctccctcgctgcctccccctcatcctcacacccgcttcgtccggtggcctcctccggtgtgtcctgcagccagcgccgtctccccaccgccgccgccgctcgcaaccacccgccgccgagcgcctcccatggcgccgcttctaggctgtacgtgagcggtctgtcgttccgtacgaccgaggagagcctacggaacgcgttcgagaggtttggtcagctcactgaagttaatcttgtgatggaaagagtagcgaagcggccgagaggcttcgctttcctgtcttatgccagtgaggaggaatccaagaacgccatggaagggatgcaaggcaagttcctggatgggagagtgatctttgtggaggttgcaaggcaaaggaaagcagcccctcctgcagcacactgcttgaggatgtatttgactccgtccaagatccttccctctgtatacccttgtaatctacagcttcagaagtttggtgttgatgctgttgatctgaggctaccacctgtgggtttgaaaactgggtgcaagtaa

SEQ ID NO: 83610 - DNA, 442 bp, Oryza sativa
  unsure (1)..(442): unsure at all n locations
  Clone ID: PAT_MRT4530_82925C.1
tgtgtgtgcccaccttccccacccttgtgtaggcccacacccttgtatgagtgtggtttgttgtgccacagtgccactgccgactacaatacccccaggtgttaattgaaactccataggcaccccacttctgaaggaggcctaccgagaaagggtccacaagtaggcacactccggtgccacgtatctcttggactggagattttctcgatctgagggaatgcctgaagaaacccacgtggcttgtggtttccccacctggaggctgaagcccncccgctcncngtgcccatagtgatggttagtggctgatgttaaccttgaatagtgcactggctggtaatggttgccacagtagtaggctgtttacctttctaggccngtaattatatatgtttatgaagtactgtttgtnctccttgaaaaaaaaaaaaaaaaaaaa

SEQ ID NO: 83611 - DNA, 441 bp, Oryza sativa
  unsure (1)..(441): unsure at all n locations
  Clone ID: PAT_MRT4530_82926C.1
tatgacttcgcatgcactcgtgcgggagcttaaatcctctanatctnccnccctttttttttttttttttaaacactataacttanacagcattgtgattatccaaaatccacatcccctacatcaccacagantaaaaataatttctcattatcactcgaacatacaatttttcatataaaacacatacattctacaaaatttaaatgaaatactacaactaaatcaattctcttaacagtagaccaactagaacatgtaatgctaactacacaacacattctgccaccaaaaatttataacttttcctccaaatcctatattccaatcattttctccttaaaacccttcctctttcagatatcctccaccatgttttaatccttccacccaactttaatattatcaaatttcattatatccccaatttctaacacacac

SEQ ID NO: 83612 - DNA, 657 bp, Oryza sativa
  unsure (1)..(657): unsure at all n locations
  Clone ID: PAT_MRT4530_82927C.1
gacgcaaaggncaaaacaacaacgttggttnaggagcttgaggggaaggcgcccatggcagaggcgagattgaggcaaaaagaggaggagaatgctgaactgaaacggaagtttgagggttaccatgttaggtggctgcaacacgagattaggctcagctctctcaaggaaaccattgatgaacaaatgatttctctacaggtggctcaagaatgtgtagaaaagagatcacgtgaaatgttatcactatatgaccgccaagaatcctcggaatcctacgtgaagatgtctaaggaaacatcggcgaggttggcgcacagctctcgccattatgcgggcattgctcgtggtacatgcacggagttccgacaacagagccaagcactcgtggagtcaagggagccatggcagccaagcactcaaggtgggaattccattgatgacctcgagaagctcaagtcaaatttttgcatgtggaagaaggattacaaagctcgactacggaaagccatggccgctgagctagatttagagggaagacatcgaagcatatgctggatttaaccacataacgtataatcatatatatgtgtgtgctattgtttcttgtagtgataaaaactagtgtggttttacaaaacaaaaaaaaaaaaaaaa

SEQ ID NO: 83613 - DNA, 387 bp, Oryza sativa
  unsure (1)..(387): unsure at all n locations
  Clone ID: PAT_MRT4530_82928C.1
aanccattgaactgcccattggactgaanaatatgaccctcgaaaggataagcgtttcaatngatctgttaagttncctcacatcccccgccctaagatgaaggtgtgcatgcttggtatgcccagcatgttgaaaacgcagataaaatgggcctanactatatngatgtggangctctccagaagatgaacaaaaactagangctggttaagaagcttgcagacnaaatatcacgctttccttgcctctgangccancattaagcacattcctcgacttcttggacctggtcttaacaaggcangctaattccccacgttggtgactcaccacgaatcncttgagtccnaggtnttcgacactaagggctacagtgaantccaact

SEQ ID NO: 83614 - DNA, 1582 bp, Oryza sativa
  Clone ID: PAT_MRT4530_82929C.1
ggagagagagagagagaactagtctcgagttttttttttttttttttttttaccatgaactgttgcttgatttcgatgaaaactggcgatattactaacatgtgctacatcataaaaatgttatgccaacttcacctctggtcatagtgctcaatcatgtggaaaccatggataataggcctctagcatgcaagatgtctctctcagtagcacactgcttttacagttgcatgcatgtaatgcttgagacattgaagcattttctccacatctccgaacacatctatcgaccggttgacgagcatacttgaagtaatctggcgtcctgtggctgacgagctgccagtgacggctgacatgaacatgatgtattgatgtggcaaccggccgccatggatggcaggagacctgacctcagctgcaacatgccaaccttcatctgcttgtgtgggtcgctactgctcgctggggtagaaaaacggcgagcaacggtcggatataagtgctactgaaaccgtaccccttgttcattgagcaacttgagcaaacgcaggagctcgtcgttcgacagcttggagggcctcttgccggcgagctcacaggactccaacgcaccggtgatcttcgccttgaacacggcgacctcttcctcactgaagctgggtgctccgtcgtggccttcattgctgtcgccgtcgctcatgtcaccgtcgtcgtcgccaccgccaagtgcgatgagtctgctgccgccaccggcattggcattgccgtcgcagcgttcctccgcgcaccgggatctcctgaagagctccaagaccttcctcttctgcttgaagatcgcgccgagggtcttgttcttctggccgaagcacgaccgcgtgaaggccagccactcggcgaggtcgacgttgggctcgaccgccctcggccggatctcgacgagggaggagtccaccttgggcatgggcacgaagtccctcttgctcacgtccatgagcagcctcgcgtcggcgaccatccgcacgttcgccgccaggcggttgtactccgagtcccccggcgcggccacgagccgccgcgcgaactccttctgcagcagcagcgtcgccgcgcggaaccggtaggggccgaacagcagcttcgcgatgagcggcgaggagatcccgtaggggatgttggccacgcacacgtcgaactccgggaactcggcctccacggcatccgccctgatcaccgtgagcttgtgcgcgaggccgagggcgtcgacgcgggcggtgacggcgtcgaccatgcgcggatcgatctcgacggcggacacgcgggcggcgggggactcgaggaggcggacggtgaggttgccggtgcccgggccgacctcgaggacggcgtcgcccgggcgcagcgcggcgcggcggacgatggcgtcgaggacgcgcgggttggtgagcaggtgctgcccccgcggcttgtgcagccggaaccgcccgtcccacgcctccgccgccgctggcgagggggcggtggcggcggcggcgaggtgggccacgtcgcggctgcggatgctggagacggcccgcttcat

SEQ ID NO: 83615 - DNA, 944 bp, Oryza sativa
  Clone ID: PAT_MRT4530_8292C.1
ggcatggggttcttcaaaaaattaattactatagatcacgtttcttttgacaaggtgatgaatataagaaaaagtatagacttactatataggatattatatgccaacctaaggactagggtggtttgagggtccataatctagagattcaaaacaaatgtcttttgagcaagtggttgtataaattaataaatgaggatggtgtttggcaagacttattgaagagaaagtatctatataataagtccataacccaagttgataggaaacaaggtgactcccatttttggtcgggactcatgaaagtcaaaaatatttttttaagtatgggttcttggattgtgaataatggggaacaaataaggttttgggaagataaatggctaggaaacatagcctttaaagataaatatccttctttatatactattatcaggagaagttcttctgttgctagtgttatgggatctattccgcttaatgtttctttcaggagagctttagttggtcagaatctagcacattggcatcacttatatgcttctattgttcatatccagttgaataattcttctgattgttttatatggagttatcatcagaatggtcaattttcggttaggtcaatgtacttagcgttaattaataatggttacattgagaaaaataagtttgtttggaagcttaagataccactaaagatcaagatatgtggtacttgcttaaaggggttgtgttaaccaaagataacttggcaagacggaattggaatgacaacttgagttgttgtttctgcatgaaaaataagaccattcaacatttgtttatagaatgtgatgaggatggagagttcctgaatgttgcatgtcataggcttgagacgatggttgtacaactctttgccaattatggatgggagagggcggtaataaggtttttgggaa

SEQ ID NO: 83616 - DNA, 1101 bp, Oryza sativa
  Clone ID: PAT_MRT4530_82930C.1
gaaaaaatatcaaggatgatttttatttagctttgcacactcaactcgtagcctttcctttttttcctttcaaaaacacaggcacacaatctgcccatataaaacagagcagcaccggagtacactgaaaattcttcaagtgcaagactataatattagggaaccacggtatttcttgggggtgacattcaaaaaactatggtttttggataaagggtcccactcactatcatttgaaatgtatcaatgtctctcaccctatcgttccaaccttcatgtcaggccgccatccagaatgtcttaaaccaggaggtattaaggataaccaactcaggaaacgctgtcgctcctctggagcttctggatggcggcatacaacttcctcctcgacccaacggcgccgatgcccatgtccttgagatcttccaacgttagcagcgggagcacctcgtcgtctacctcgtggatctcgaacactggcgcgtaccgagagagcccaagtccatccagccacgccttcacgccaccataccccatggacccagggagccggccgttcgggagaccccaatccgccacgccgtccgactcgtcgccgctggcgtcgcggctccccgaaaccctagccctggcagcggcggcggcggccgagtcggactggtcggcatcatcatagtaatgctccgcttcttcctcgtatccgtcggtgccgggagcagccgggatccaggcggtgcgcggccggcgctgagcgggcttctggccgcggcggtgggcggcggcggaggagtggttgagggggtcaagggcgtcctccgggtgggcgcggcggggcgggcgggggtgggaggaggaggaggttttgtggtggcggcgctgcgggagcgggacgtcggcggcggcggcggagtggacgccgatgtcgccgaggcggacgctggggcggcggcggcgcttggagtacggcggcccggcggcggcctgcgctccggaggcttccgcggcggggtccccgagcggcgcggcggcagcggcagcggcggcggcggcggcggcgctgccgccgttggtgtcaggctccggcgggtggagatcggccat

SEQ ID NO: 83617 - DNA, 978 bp, Oryza sativa
  Clone ID: PAT_MRT4530_82931C.1
atggaggctattgtatcagcaattgctagtgactttgttaaccgattcatatccttcttgatgaagaagtgtgggagccaacaaaatcttgaaacaaagatggaaaggctgcagaatctcttgctcaaagttcacatgatcgtcgaggaggctgaggggcgatacatcaccaactccaagatgctacttcagttcaagaagattgtaaaggccatgtaccaaggctaccatgtcatggatattatcaagcataggaccctttgcggctcaagacatgaagaggagttcacagcagatacagatgatgagaattggaagaagttttatgcatcatgcacacatatgggaagaggaagcaagattatagttgtaagtaggattgagaggatatcaaggttcggaaccgtaaggccaattcatcttaacagtttgtcacatgaggagtatagctacctcttcaaggttctcgcatttggaagcactaacccagaggagcatcctcaaatggtgtctatagcaaatgagctgtcagtgttgctcggtggctcattcgtcgcagtgaatgtgtttgcggatatattcagaaagaatcatgttcacttatggctccatgtcttgaaaaaatacagaaaaatgattcggaaaaatttctcagagttcaaagaacaccccaagcttcttttggacaaagaacatcatatagatataaccaaacttgcatcgtcatcctctccacttcacctcatgcctcctaattgtgaagacaatcagtcaaagaggagcttaaccaaggtgatgttcagtgacttcatagctgactctgttgttataccaaaggagaactttgagttagtcacatgggaatcgcggatacccccttatagaaagtttgtcaacattgtttcaaactatgatgatgagatgaattttcatcatacagaagtacctcacaaaaagcgtcaaaaattagataaataa

SEQ ID NO: 83618 - DNA, 842 bp, Oryza sativa
  Clone ID: PAT_MRT4530_82932C.1
gcacgaggtgcagtaacgttagaagaatggcattatctgcgctcaacggtgctgcacacgataatttcttagccattatggtgcaagctgcaattgtcggaactgcatcggctgattgtatgaatgatggaagtacccctgtcaggctcgctgctgaacgatacgctatgcattcactccagatggcacaggtgacagaaaatgtacaggcacctataagtatatcacaggtttggatgctagacaactagctaaatatcccgaagagagtgatggtcaagatagtgtagataatgctagtggctgaagactgactcactcgtgtacttctatgcagattgctcacaagttctgagacgaggattagttaactcttgagaagacgataggagaagttcaactaacttgatgatatatggacgacatatagaatatactactctcacaatgcatgtgaatattattcaggaaatcacagtcgatgccatatctctatgcatgagcgcttcctcacgcactgtgatagaatataagagattatggacgttgcagccccacattaagacgctgttttctttcttactgcagagagaaagtgatacgtctagagtatatctcgtctccatagacatggattgtgccaatatgtgttcacaactccaatattgcaccattcactgaataaaagaataaatagaaatatatcttggcgcgccgtcatttcctgtgttctattcctcgatgtccatgaactgtcttgaaaccagatacactaactctgtgagccttctatgcttatgaagctcacccccctcactccctctatgatgctcttctcatcg

SEQ ID NO: 83619 - DNA, 702 bp, Oryza sativa
  Clone ID: PAT_MRT4530_82933C.1
atggaaaggctacataatctcttgctcaaagctcacatgattgtcgaggaggctgaggggcgatacatcaccaactccaagatgctacttcagttcaagaagattgtagagaccatgtaccaaggctaccatatcctagacatcatcaagcataggaccctttgcagctcaagacccgaagaggaggttagcaactccaatactctgtcaacccgtacatgttatgttgatccttttcatacttcacaaagctataccattagacatgatcagctgcaaagcacattggacagtttagaaacaattgtttccagtatgacagagtttgtcattcttcttggtggttgcgaacggatgtctcctaagccctatgacacatatctttactttgataacttcattgaaaacaatagggaaatggagtgtgaaactttcactgaaaggagggatttgtttgtgattgagttcacagcagatatagatgatgagaattggaagaagttttatgtgtcatgcacacatatgggaagaggaagcaagatcataattatcagtaggactgagaggatatcaaggtttggaacagtaaggccaattcatcttaacagtttgccacttgaggagtatagctacctcttcaaggttctcgcattcggaagcactaacccaaaggagcatccgcagttgttatccagcaaatga

SEQ ID NO: 83620 - DNA, 231 bp, Oryza sativa
  Clone ID: PAT_MRT4530_82934C.1
atgggtagcggccggactaaccgtcgggttaaccacggtctgaccgcccccctggaggttggcggtggtgctttggggaggggatccagagccgcagccggccaggtgggcccagcccaggttcggccgaacccgagccaggggtctcagccgttcaagctggggtttggcatggacgtcccagattactccctgatggcgattgcggggcaattcagacaattcacataa

SEQ ID NO: 83621 - DNA, 564 bp, Oryza sativa
  Clone ID: PAT_MRT4530_82935C.1
atgacagcgtccgtggcggcaaaggcggctgcagcagtaacaacgacgaatccggtggcgcgcaggcgtgcgggtggcgggaaggcacccgagcagcagatccggcgacagggaggagcacgcggcggtgaggatgcgcccaggcggcagatccagcgacggggaggagcgcaggcaattgatcaggcagtgggaaggcgcccggcggcacgtatggtgacgaggaggaccggaggagcgcgggcagtggatccggcggcgaggaggaacccaagcggcagatccagtggtggggaggagcacggatgggccagtggagcttgggcaacggggagtctcacggcggtgagcaggccagcggagttccaacgtggcttcggctacaggcgggcagcaacgagaagaaggaagaagatcgaagcggatttggtgtggaatcgagttgaatttggagtcaaactgcgcatcggctcgatatcatatcggctagaaaatagagtgatcaaatcaactgacacgcccttgacacactcgaggctagccttagacctggactggaattaa

SEQ ID NO: 83622 - DNA, 351 bp, Oryza sativa
  Clone ID: PAT_MRT4530_82936C.1
atgacgttcatagtccccccgccgcgtgcccgccgggtcgacgatgcggaggcggcggcggcgctgctgctcgaggagctctcgatccgcctgatggaagaaggcagcagcgccggcgggcatccacctccgacgagctgcagcgaccacgccttgcgctacttcatccggggatttacgactattgtcagcttagtaatggttgcctggctaatctatgcgagatatacgaccgacgattcagagcttcatgaccccgcaaagctgtcatttttaattgttctctctcttagtttggcggcattcggcttctgctctacttcagaaactgagctacagagactactagat

SEQ ID NO: 83623 - DNA, 511 bp, Oryza sativa
  Clone ID: PAT_MRT4530_82937C.1
atggagatccaatatgagtttaattcggacagggatccgaataggagtccaacgggccttggaggcccgagtgatggatcctatatattcgtgagaggtgtgaccggcggaggcattgcatcactgtgggagtacggcgaggagaacgcacgagaagaagaaggtcgagtcggtgcgatcgactacttcctctacatcgatgcgcgctacttcgcgagaattccttcgacttcttagcgcccttttccgctgcgcagcgcgtcgagtgctaactgtcttatccttgtgcaatctccgtctagctctcccctctcttccaggtgatctctaggccaacggccggtgaggagaggaccagcggccggtgagagaagaccaaggaggcagcatctcctgtctcccgggtgtggaataaggagggccaagacacacagatcatgcgcgcatgcgtggattacagctgcatgctccaccaccgcgccccaccatagcaccagcgcctcctctagcc

SEQ ID NO: 83624 - DNA, 1334 bp, Oryza sativa
  Clone ID: PAT_MRT4530_82938C.1
gtaagggcagagagaggcatggagatggaggcgcgaggtggcggcgggaggtggtacgcggggggcatgtccaccgccgacaacatcaagggcctcctgctcgccctctcctccagccttttcatcggcgccagcttcatcatcaagaagaagggcctcaagaaggccgcctcctcctcctccgctcttcgagccggggttggcggctattcttatttgtatgagcctctttggtgggttggcatgattacaatggttgttggggaagttgcaaactttgcagcttatgcatttgctccagctattttggtcactcctcttggtgctctcagcattatcatcagtgctatacttgcgcattttatgctgcgtaagaagctacacatatttggcattctcggatgcatcttatgtgttgtgggatccaccacaattgtccttcatgcccccgcggagcgtgagattgagtcagtaacggaagtgtgggatttggctactgaaccagccttcatgttctatgtttcagtagtacttgctatggtcgccatacttgtttgccgatttgtcccactttacgggcaaactcatgtcatggtgtatattggtgtttgctctcttgtaggctctatctcggttatgagtgtgaaagcacttggtatagctttgaagttgaccttttgtggaacgaatcaacttatatatccacagacatgggcttttaccctggttgtcctctcatgcattgtcacccaaatgaattacttgaacaaggcacttgacacctttaatacagcagttgtatcaccaatttattataccatgttcacatccttaaccatactggctagtgtcatcatgttcaaggactgggacaggcaaaatccaacacaaattgtgacagaggcgtgtggcttcgtaacaatcctttctggaacatttttgcttcataaaacgaaggacatggccgatggtattatgagggccttgggggttcgaggagagaagacgtcatcatttcgtttctccaaacaaacagacgaagaatgtgaaggcattcctcttagatcatcagaatcattccggtcaccaccttgatgtccgcttgttgataactaagctacatgttaggagggtatgtatatacatgcatactgtaggagctagtactcaaaagacgagtctcttttgggtacaactcatagagtatttggcttcaaaaaaaaaaactcagagtatttaggccctcacgtcacgtctcctgactcgtgtgttgtgttgtcacggtatatgcatatgcttcaagttaaaaggtactaaaaaaaaaaaaaaaaaaa

SEQ ID NO: 83625 - DNA, 444 bp, Oryza sativa
  Clone ID: PAT_MRT4530_82939C.1
atggccttttgtgcacgcgcgggctcacttccccttcccaagccgcaacctgggcttgggccggaaaaccgccgaaaccctagctcatttccctccctcccatctcacttcgccgccctcccctccgcgcccccgagcggcggcggcggtggcgccctccccccgagcagcggcagcgggggcgccccccagcagaagcggcggcggtggcgccctccccccgcgagcagcgatggcgtctcccccaccactggcggcgtggccgcgtcctcccctaccaccggcagcgcggcggcgttctcccccaccaccggcggcgcccgaggaggcgtcggcggcccgccggtgtcccagcggcggcggcgcccctcccctccgccggatccagcaggaggggagctgcggcggcggctcaacggcgacctcccctttgattttttttaa

SEQ ID NO: 83626 - DNA, 486 bp, Oryza sativa
  Clone ID: PAT_MRT4530_8293C.1
ctgcaggaattcggcacgaggctctactaaaatatgaagcatgttatatgttctatcatatttttggtgaatgaaccactagtaattttgggcctatgtattcacaaacgaaacaactctcctatgaggcctaacaatagaatgcttgctccttgtgaggagagagtcctcggtgaattactttgggacaggttacagttagctattcagccagtgtctcaaacccttaataaatgctaatgtttagggcaaatagcaattatcatcaaaactatgattcagatgagatccatcatcgcagcttgtcgccaagaccaccttgttcacttgtagctttttcatccttttccaataatagttgcagatttattcttcaccttgtccctctcatctgctaggtgattcaactcctgtagcagcagatctgtgcaatcctagttcacaaacaatacaaactgcaaaacaatccagatcatgcttgatgaa

SEQ ID NO: 83627 - DNA, 318 bp, Oryza sativa
  Clone ID: PAT_MRT4530_82940C.1
atggcctcaatttatgtacaagggttgcttaaagaaagtgacagccggcaaaaaggaaagggagaaggcttactctcccgacggggcttcttcggtattctaggaattgaaacgaatccctcccacctttatgtacaaggcttgcttaaagaaagtgatagtgcacaaaaaggaaagggaaaaggcttactctcccgacgtattagccatgcaaagaacttacatttgggcggtgcccaaggttcccaaacaatgcgcttgaaaggcttcgcctttgtgccctcaaattgcatcatgtacgccgacttagctgagtag

SEQ ID NO: 83628 - DNA, 1695 bp, Oryza sativa
  Clone ID: PAT_MRT4530_82941C.1
atgaccgtgggcacggctgttcgaacacccgtggggatcagccacgtcgggagacctccaagctttcatgacaaggcatttccaaagccgacacaggcttaccatatgccgacgagaggggttctagaccaacaacaggaatcggtccttaagtgcgggagcgggaaaaccgtacacccgattttaagtttgaaggcgaccgtcgatactcgcacagagtgcacgaatatcgaggcgcaactgggtggttacaaggggacatggctcaagatgttcaaaggtggcttgccttgctcgagatctggagcttgatcctcgtaatcctcgcactgcgggtcttcgggctccggaacacgcgcggtcccgggtgggacccgcttgtcagcggctcggctcaccgtgcggagggagcacgcggcgcacgcgcgcgggcgggggagggacgcggtgcacgcgcgcggtctgcggaggaacggatgcggcgggcccacgcgcagcctcatggctcgcagtggaacgcgcgcacgggaggggctgaccggggtcggcccttcccgtcctcggctgagctggcgacgacgtggcgcctgcgtggctgccacgtgggctggcgggaggtagacgacgacgccggccggaacggacggcggacaacagcggcgagcggcggagcgaaccacggcgatacgggcaatagcgagcacaccgggtggttgcacaggacgagaggagacgagccaacggctcggattcgccggagggagttcgtcggcggcggattgcggcggcgacaaccggcggcggaagaagggggaaacggcggtgaggtcacgaggggctaattcccggcggcgagagcatctacgcggctacgggaatccgatgctagcgtcggattgggcggagctacgccgagcgaggccggcgacgagcgggtgctacggagctcgagcggcggcggcggcgagcactcggcgagcgacggcaagggtcggggcggcaccggctagctacgggcgaaacggcgacaggagggagggagggatgacgccggctggaagtgaaaaaggggaaaaaggagggggggaaaggggcttgtccccttgcctcttcggggaaaaggaggagggagttggaggcgtcgcggcagagggaggagggagtgctctgcctccgtcccttggaggctagcgcgcgggctagcgcggcacagggtgacggcggcggcgaccaggcggtcggccactcggcacgcgcgcgcgggaaacaacgggagggcgcggcggatggagtggcgcggctcgggcacgcgcgctggctgcggggccgagcggctgcaggcgcggcagggcagcggggccgggcggcacagacggcgcagtcacgacgcgggcgacgaccacgcgggcgcgcgcgcgaacgacgcgcggggagcggcagcgggggagcggggagaagggctcggctcggcgcgggcggctcacgcgcacgcgcgcgggggcgcgtggtggagcggagggagagggggagagagagcgcgccggggaagaggaaaggaggggccggggcgagagggggagatgggccgagagaaattcggcccatcgaccccgggggaggcaaactagacttttgcggagggatttgatttggaaggatttggattcggaattgaactcgacgatagatcgggga

SEQ ID NO: 83629 - DNA, 714 bp, Oryza sativa
  Clone ID: PAT_MRT4530_82942C.1
atggccgacggggtagagctggggctgcatgaccgtggcgcgcgagccgagcaccgtaaacggcgaaacactcgccggcgtctcccatccctggatcccagcgacaccgactggttggaagtgcagtacatcaacagctatggcgtccttatggggtacatgacaatagccgtgaatgggcttggtttcctcgtggttacatggaccacggtcgtcctcctcggcggtttcgtctccatgctggggaagaaggacttttggtgtctcacggtaatcaccctctttcagggccgatattaccgaaatttcaaaccatgtgttacgtatgctgctcaaaccgtaccatccaacagggtgttcaatgtcatcatgaacaagcagttgagcaacactgggttctcctaccttgccatctgcagaagtagggcagagatcagtgcaggccccagtgcatacatcacggtgatgaagatccaagcagcgatgttgagcatcgtaatgtggcttctgttcgccatctacctctatggactgtacatctccgccgggatttctctgtggcggctaatcgagcgcgactacggcggcgacaatctgaagcaatcggcactggacgtcctgtacacgctagctctgctgcagggcgtgatcttcggttacagggagacgtttgcaatcgaaacacaagaactaagccaaccagaggaggggtga

SEQ ID NO: 83630 - DNA, 2432 bp, Oryza sativa
  Clone ID: PAT_MRT4530_82943C.1
atgcccgcctcctcctcctccccgtcccgctgtcaagctcgctctcggcctcagccgcaggcgcacaggggcgaggaggaggagcacgcccccgtcctagccgcaccaaacggtgcagccgcgaccacggcgaactgatccgggctcctgctgttcctggcggaggaggcccatggaagccacgtcctatccagcatcctcatacgcagcatgcggaggcttaccgagattccctactttttcgccaatctcctgtgcatgtgactgagaacctgtcttgctgcgtctagcctttttgcttctactcattctctcttgtgcacgcttttgttcgtgcggatgccgaaacgggacaaggggaatcaataaatcaatcgatagaaaatggagccgagaatgggaagaagagaatcaaaatcaatacttttatttttttttgtttcttgaagggaggggaggggggcgatcaaacacctaaccgcaagcttgatggtgcgagcagcgtcagaggcagatccaccgccaattcctccaaacacgcatggtggacatgccctcctcctcctcctcctcctcccctgtccctctctcaatctcaatctcaatctcactcccactctcagactcacaaggagaaggagaaggagaaggagaaggaggaggagcaggaggaggagaagccctccccctcccgtaacgcctcctccaagtacgacttcgtcaaggtcaaggtgtggcttggcgagaatgccgatcactactacgtcctctccaggttcctcctctgcaggatgctcaccgccaccaaaattcctaatcatgttggcattaagaaagcccttgaactcaagaaaatgcttgtcgacaacagcctccttgatgtttatcagggtgacttagatgctaacctattttatcttatagagaagcggagaaactcttctgattctgcatattctaaagagaaaaatcccagagctgaagacgaaggacataaggatttggacctacagaaaaacaacaccaccaagaaggacaaacctgctgctgaaccaatagtagtcccaattgtgttgaggatgtctgattttgatcacaaggcattgctagaggaatggacagccaccagggcttccagggataattgtcttcctcaggatcatcgaaagcttataaacaaccttaagcttattcaggactatctttgttcttttgagtcgcaggggttgaccgttgttgacatttcagcgaactcattccctcagacactagattggcttcacagctatcttcttcagtgcatcgaacgtggccttttggctgcatgttcagaaagtcccaagcaaggtgggagctaacggatacagatgagcgagagggaagcccgcattagtcttgcttaacatatactcactctgttccaaaataaaccaacattgtacggatgtgccacatcctaatacatcttggacacaagtactagtatgtgtcacatcgggtttattttgggacagagggagtatgtcacatatatgatgcttgtaaaattgtgcttttagtgggttgataatcaggaacttgtgcgttgccgccatccataaacgttggcagtggaaatgtaaccgagtagagaactccatagttcgataaaaaccttttagagctggaatagggaaagcggacctcgcccaggggaatccgctctgacggtgggctacctgaacttcccattgttcccgcgcgccgaaagcttataaacaaccttaagcttattcaggactatctttgttcttttgaatcacagggattgaccgttgttgacatttcagcgaactcattccctcagacactagattggcttcacagctatcttcttcagtgcatcgaacgtggccttttggctgcatgttcagaaagtcccaagcaaggtgggagctaacggatacggacgaagcccgcattagtgttgcttaagatatattggttggtaatcaggaacgttggcagtggtagagaactccatagttggataaaagctttttagaggtggatcggtaaaatgaaaagaaactcaaggccggtgaaataatgcgatcactcacatagacataagttttgtttttccccgagctcccagagataatagatactagtactgtagtacatctcgcagaattgagacgagtatgctcaattaattgagcgaaaagacgagtataaagaggtcaatctcgggtcatccaacatatcaacaaactcgatcagcaccttgtcaatctgtggtccacagcgtataaaaggtcggctccacagcttgtaacgtggattctgaaacatcattttatcatcatcatcatcaccctaaggatgagcacgtctcactactagaccctcctgcataaccctcattatctgatcctggataatttcct

SEQ ID NO: 83631 - DNA, 867 bp, Oryza sativa
  Clone ID: PAT_MRT4530_82944C.1
tgcacgcgcgcggtcgcggagaacgcggatgcggcgggcccacgtgcagcctcacggctcgcagtggaccgcgtgcacgggaaagggctgatcgggtcggctcgacccgatctcggccgagctggcgccgacgtggcgcctacgtggctgccacgcgggccggcgggaggtagacgacgacgccggccggaacggacggcggacgacagcggcgagcggcagagcgaaccacggcgatacaggcgaaagcgagcacaccgggtggttgcacaggacgagaggagacgagccaacggctcggattcgccggaggatgcccgacggcggcgaattgcggcagcggcatccggcggcggaagaagggggaaacggcgacgaggtcacgtggggccgattcccggcggcgagagcatctacgtggctacgggaatccgatgctagcgtcggattgggcggagctacgccgagtgaggccagcgatgagcggcgcttccgagctcgggcggcgacggcggcgagcacacggcgagcggcggcaacggtcggggcggcgccggctagctacggggaggctactcgtactaccgtgcggaacggggcgcagtgacgagagtccgacggcgcgggagtaatctctccggcctcgggccggggaagaggaaggagagggcgcgcccgaagtccccttccgcgtccttgctcgtgccggctcctccgacatgcgcaacgacgaacggcgacggcgaacagagcaccggaggcgaatgggagaggaaaggaaagggggaagctcgggtttataggatggcaatgtcggtttgggaaccgacttagggcggtccaaggagagggctagcgctcggcggt

SEQ ID NO: 83632 - DNA, 1941 bp, Oryza sativa
  Clone ID: PAT_MRT4530_82945C.1
atgaagatccaagcagcgatgttgagcatcgtaatgtggcttctgttcgccatctacctctatggactgtacatctccgccgggatttctctgtggcggctaatcgagcgcgactacggcggcgacaatctgaagcaatcggcactggacgtcctgtacacgctagctctcctgcagggcgtgatctttggttacagggagacgtttgcaaatttcaaaggcagtctggttgatgcagtgtcgctgcaatacgatgaacctgatcttggagttgccgttctgcagtatttgcaggaaatcagaagtggatgtgccaagaacccgtccttcgctgcggggaggaacctggtcacgttcgccgtcgacctgctggagtccaagtcaggtgacggctacgtccgcgggttggagatactgggagcgctgttgaggctgccgatcatggagacgtcggcgaactccggcgaccggaggcggcgtcgtgtgcagcttgggcagcttgtgctgatcagacagcagctaactgcatcggcatcgttcggtcacattgttcacaggctgctcgtgacgctggggccgagaagcccatacaacaggaggatccgggagtgtgctgcgacgatcgtgctccacgtcgccggcgagatcctggtggagcagttccgacgagggatccattgcatatcttccttgcttgacccatacgggcaatgttgcctgtcgcatgatcgccggcgaccagcctggctaccggaggcgtatggtcgaagcacggttctggagccgtacgagcgcgaatggttaatggagacatggaagagtagtagaggatgtgatcaagaacatgatcggcctgaccgtctttcgcctgagagtgatgagaaagatgatgatcactgcaaagacatgatgttccttggcatgttgatcctcggggccctcgccgtcgacgacgtcaaccgcacggccatggccaactcacgtggtctgattgcgaagctcattgcgcccgtcagcttggacctacttcacagcgtcggccatggcgcttggtccaagataatgtccaagtctctgcaagttatgaacctgctcgtggacgctcccggggaagctggcaccgacctgcgccatgaaatgttaggcaacaagaaagcaataagcgccatggaagctattctcgagtgtgaccaatgcggcgagaagctgcaaatgctagccatggagatcctcgctgcactggcgattgtggattcaggtaaggattgcgcaagcagggaagaattcgtccagatgctgctatgcgcgttcagtgattgtagcaggggtattggcgtcagagcggcggcagcagctgaagcactggtgatgctttcttccaaaatggaaggtagtgccatgatcatcatgaaagcaaacaataactctgttgataatctcgtaaaaattctcctagaccgtgacaacatcatattgttcagagtagctacagcagtaattctagagcgtctatgtgccaattacaccgaagacgatgaatgtctccagaacctgaagggagtgatgaccaaggcaatgccaaagctttgtgtgactatctgtgacaaattcacattttcatatcaagatctgaatcaacagttctatgcgacttgccatggagttgataaatttagcgtttggaggaagctcaaggagattgtagaaacaaacaatgaccctaaggtcgacagccttagaatagctcaacacaccactaagatggtcatatcaatgatgaaaaatgaaggcagctatgtggatgaagacttgcagagcttgatgcagtctctgtcacttgcttccaagaccatgtctgacatatcgacggctctatgtttctcaccagtggttattacagaggaaaggtatttcaagtcattcgtaatctgggctcattga

SEQ ID NO: 83633 - DNA, 1436 bp, Oryza sativa
  Clone ID: PAT_MRT4530_82946C.1
ttggggcggctcgaccgagcttaacgggccggccggcccaagacggcccaagcgcgcgcgcgcgcgggagggaggagagagagtccggtggaccgggctcaccacgcgcggtcccgggtgggacccgcttgtcagcggctcggctcaccgtgcagagggagtatgcggcgtacgcgcgtgggcggggctgggacgcgatccggtcgcggccgaggtggcgcctacgtggcagccacgcgggccggcgggaggtagacgacgacccggccgcgaatggacggcgggcgatagcggcgagcggcggggcgagccacggcgataccggcgaaggcgagcacaccgggtggctgcacaggacgaggggagacgagccaacggctcggattcgccggagggagtccgtcggtggcggattgcggcggtggcaaccggcggagaggaaagggggaaacggcgacgaggtcccgaggggctaattcccggcggtgagagcatcttcgcggcttcgggaactcgacgcttgcgtcggattgggcggaactacgccgagcgaggctggcgacgagcgggtgctacggagctcgggcggcgacggcggcgagcacacggcgagtgacggcaacggtcggggcggcgccggctaactacggggaggcttctcaagctactaccgaaagctagggggaggagatggagcgaggaggaagaacggagagaggcactaccgtgcggaggaggggcgctgtgacgagaggccgacggcgcgggagtaaacttctccggcctcgggccgacgaagaggaagaagaaggcgcgcccggagtccccttccgcggcgaaatagagggcggcaaaggcgcggaggcgaaaatgagggagggaagggaggaggagacggggcgacgcggcagagggaaaggagagctcggcctccgcctcttggcggcttgcgcgcggagtggcgggggccgggggatgacgacggcgatgacggtgggatggtttggagcggcgcgacgacacgggcgacaggcgcgggctggcgcggcagagggtgacggcggcggcgaccagacggtcggccactcggcttgcgcgcggcttgcaacgggcggcgtccgcgcgggcgcgcgcacgcgaacacggcgcgtgggaagcggttttgcgagcgggaagctcgcgcgaggggaggggcgctcggcgcgggcgactcctgcgcacgcgcgcgcggcgagcgggcggagcggaggggagcggagagagaggcgctcggcgcggctctcgcacacgcgagcagcgagcgggcgagactgagcggggggggaggagcgcgccggggggagagagagagagagggagagagagagagagatgggccgaggaagagagagatgggccgagcgagattcggcccatcgacctcgggggaggcaaaa

SEQ ID NO: 83634 - DNA, 513 bp, Oryza sativa
  Clone ID: PAT_MRT4530_82947C.1
atggcgcggagacgaatggaagaggagggggaggatgacgccggcggggaggaaaaggggaaaaggggcttgcccctttgtcgatttgggaaagaggaggaggggagcgggggcgacgcggcagagggagggggggcgctgcctccgtcccttggcggcttgcgcgcggagtggcgggggccgggcgatgacgacggcgatgacgacggcggtttggagcggagcggcgacattggcgacaggcgcgggcaggcgctgacgacggcggcgaccgagcggtcggccgcgcgcgtgggaaaacagcgggaggcgcggtggtttgaacggcgcggctcgggcgacaggcgcgggctggcgggaccgggcggcagcgcgggcgcgcgcgccacgacggaacgggcgctacactcctccgccgccatcaccttgctatcgcccctccaccttcccctcaacctttctgtaagcctccgtgaggtcaagccgccgtcctccttggctctgttgtgctag

SEQ ID NO: 83635 - DNA, 1203 bp, Oryza sativa
  Clone ID: PAT_MRT4530_82948C.1
gcgctgcctcggccggagcaggcgaggccgaccggcatggcactcctcgccgccgccgccgccgcccgccgcttctttcgcagcctccgccgcttcagctcctatgccgcgtctggaggagaagaagcaggaggagtgcccgcgggcgtggtggagcccgagtcccccgtccgcgcgccgccggacgagcagttcgctgcgtgggtcgcgcggctccggccgggcttcacggcgggggatctggccgaggcgatctcctccgagcgcgacccggacctcgcgctcgcgctcttccggtgggcggcgctccgcccggggttccgccacgcgcccgcgtcctacctcgcggcgctgaccgcggcctcctccggccgccgccccgccgccgcggagaacctcgtctacgacgtcctcgccggggcgtgcggccccgacctccggctcttcaacgcctgcctccgcttctgctgcgcccgccgccgcctcttcccgctcgccttcgacatgttcaacaagatgcggtcgctcccggcatccgccgcctgccgcccggacgtcgagacctacacgctcctcctcacctccgtcgtgcgccgcgtccgccgcccgccggcgtccatggtctacctccacgccgtccggtccctctcccgccagatgaaggcctccggcgtggtcccggacaccttcctcctcaacctaatcatcaaggcctatgcccggtgccttgaggtagacgatgcactcaaggtgttccgtgaaatgccgctatacggctgtgaggccaatgagttcacctatggctacattgtcaaggccatgttccagaagggcaggactgacaaaggaatggtgtactttcgggaggcgagggagaagggatttgtgccgactggtggcgtgtacatgacggccgtgtcagcgctagcgttggagtggagatttgaggaatcaagaaatgttcttatagatatgctggattgcaagaggaagccagatatgatcacctacaggacactgatggaggagatgtgcagggctgggcgcgcagaggatgcgttcgagctgctggaggagctgaaggagaggaagcgagggccgttagaccagaggatgtactcagaattgcttgatgggttgcactggatttctcaaccacatcaggatagggtttctccctgtgacaagcgttctgatgactga

SEQ ID NO: 83636 - DNA, 940 bp, Oryza sativa
  Clone ID: PAT_MRT4530_82949C.1
acgggccggccggcccaagacggcccaagcgcgcgcgcgcgggagggaggagagagagtccggtggaccgggctcaccacgcgcggtcccgggtgggacccgcttgtcagcggctcggctcaccgtgcggagggagcacgcggcgcacgcgcgcgggcggggaggaacgcggtgcacgcgcgcgctggcgccgacgtggcgcctacgtggcggccacgtgggctggcgggaggtagacgacgacccggccgcgaatggacggcgggcggcggcggcgagcgtcggagcgaaccacggtgatacgggcaagagcgagcacaccgggcggttgcacgggacgaggggagacgagccaacggctcggatttgccgggggttgctcgacggcggcggattgcggcggcggcaaccggcggcgggagaaggggaaaacggcgatgaagctacgaggggtcgattcccggcggtgagagcatctacgcggcttcgggaactcgacgctagcgtcggattgggcggaactacgccgagcgaggccggcgacgagcgggtgctacggagctcgggcggcgacggcggcgagcacacggcgagcgaaggcaacggaggagacggagcgaggagggagaacggagagagacatcaccgagaagaggaggggcgctgtgacgagaggccgacggcgcgggagtaatctctccggcctcgggccggggaagaggaaggagagggcgcggccgaagtccccttccgcgtccttgctcgtgccggctcttccgacacgcgcaacgacgaacggcgacggcgaacagaggggcggtaatggcgcggaggtgaatgggagaggaaaggaaaaaggggggggctggggtttatagggggcggcaatgtcggtttgagaaccgacttgcgcggtcaaggcgcgagctggcgctccggc

SEQ ID NO: 83637 - DNA, 156 bp, Oryza sativa
  Clone ID: PAT_MRT4530_8294C.1
atgccctctgctgccaccgccgtggtcctcgtccacctcggctacggtcctcatccaaggctgccgctgccgccatcgtctccgtcctcatccaccctagccgccgcgagcgctgccatcgtccaacgcatccgtgtgcagtcatcgtcgttctga

SEQ ID NO: 83638 - DNA, 1406 bp, Oryza sativa
  Clone ID: PAT_MRT4530_82950C.1
accgggcttaccacgcgcggtcccgggtgggacccgcttgtcggtgacacggctcaccgtgtggagcgagcacgcggcgtacgcgcgcgggcgggggagggacgcggtgcacgcgcgcggttcgcggaggaacggttgcggtgggcccacgcgcagcctcacggctcgtggtggaacgcgcgcacgggaggggctgaccggggtcggcccgacccgatctcggccgagctggcgccgacgtggcgtctacgtggcgcctacgtggctgccacgcgggccggcgggaggaagacgaaggcgccggccgcgaatggacggcgggcggcggcggtttctccggggcgccttgcgacgatgaggggcgacggggcgtacaccgggatgacgaggaagaaagagacggagcgagccaacggcttggattcgccggagggagtccgtcggcggcggatttcggcggcggcaaccggcggagagcaaaagggggaaacggcgacgaggtcacgaggggccaattcccggcggtgagaacatctacgcggctacgggaatccgttgctagcgtcggattgggcggagctacgccgagcgaggccggcgacgagcgggtgctacggagcacgggcggcgacggcggcgagcacactgcgagcggcggcaacggcgcgagctggcgctcggcgctcgcgtccaatcggcgacagggcggagggaggatgacgccggcgggaggaagaaggggaaaaggagggagagaaagggggctcgtccctttcttctttgggaaaaaggaggggagcgggggcgtcgcggcagagggaggagggctctgcctccgtcccttggcggcttgcgcgcgggctggcgcggcagagggtgacggcggcggcgaccagacggtcggccactcggcacgcgcgcgcggcttgcaacggggggcgcggcggatggagtggcgcggctcgggcacgcgcgctagctgcggggccaagcggctgcaggcgcggcagggcagcggggccgggcggcgcagacgcgacgcgggcgaggaccacgcgggcgcgcgcgcgaacgacgcgcggggagcggcagcgagggagcggaaaggaggggctcggctcggcgcgggcggctcgcgcgctcacgcgcgggcagagcgaagggggagggaggcgctcggcgcggcggctcacgcacgcgcggacagagcggagggagcggaggaggggcgctcggcgcggctcgcgcgctcacgcacgcagcgcgggcggagcggggcggagggagaggagggagagagagcgagagagaaagggagagagcgccgggagggagggggagatgggccgagagaaatccggcccatcgaccccaggggaggcaaaatagacttttgcggaggaatt

SEQ ID NO: 83639 - DNA, 1249 bp, Oryza sativa
  Clone ID: PAT_MRT4530_82951C.1
atggatgttgattttcgtgctatttggaaagctgttggttggcagagatttcttgtggtagatgagcctggttctcgtttggttactttgcaatttctgtgcactttgaaagaaatagaagatggaatttcttttcgctttttccataaagagtatacacttacatggaaaggattgagtacactttttggctttcacgattcttgtaaaatcgatctctagaaaggaatttctgggttcgagaaaaataggttttgggaaggtatttctggtgctccaatttgcaagaaacctaggacaaatgatatccataatcctatagttaggctcatgcacaagtggattgctctgagtttgtttcctagaggtgatcttagacccattaggggggatgaattaattatcatgtttgctatggttagaaaaatcaaaattgctcctgtgaaatgtatgataagggaatggttagaaagtataagattttctgctcctattgagtgcatttctctgattactaggatagcgaaagtgctaggggtcgttagtgaccaaatcgctttcatctcagcagctcgtccctgtattgatgagaactatctagtgcatgggcatattcttaaacatggagtagacggatctttgatatacttttaccccggttgtacaaatgaaatcccgttaccaaatgcggggtatcatttgtacaactgccgtgagctaaccattcccctgcagaccatagaagaatctcatgcaggtggagtatacagggacacacacaacatggcaaggaacgaacgagaaagttcatcatcctcaacacccgtgcagattatatgaggcaggttgggaaccaactggggatgcactcggatggacccaagctccacgccacaacatcggtgtctcaagctgggcaagtgccagtgaggaccggtggcatgcgcctcatgacatatagtggggggacaaccaacctcccagatcaagtggagtacctccatgtccaagtgaatggcgctcgagttcctctcgttgggacttgggtgaaatcactaggagaatggacacccttgatgtgcagacgggggagatccaatacaacctcacggaacacatagctcagacacaagaatgacaacagactactaatgctcaatttgccaacatcaacaacatgatgcagcaacaacacgatgaccttcaagcatatttccgctttcagggattcaatccttaccaaggaccc

SEQ ID NO: 83640 - DNA, 1941 bp, Oryza sativa
  Clone ID: PAT_MRT4530_82952C.1
ctaaaactcatcgtaaccggcttgctcctggaaaaactcctcatcagcaggatctgcttcatcttcatcagcaaactttacccacacgacattactaacccggatcacccagcccgtggggatcagccacgtcgggagacctccaagctttcatgacaaggcatttccaaagccgacacaggtttaccatacgccgacgagaggggtcccagaccaacaacaggaatcggtccttaagtgcgagagcgggaaaccgtacacccggtacgtttcccggtccgcggcgaccgtcgatactggcacagggtgcacgaatatcgaggcgcaactggatggttacaaggggacataaaaagaaaagaaaagagggagggattatagacttttcctcgggcggctaaggcgcggcccaagggaattggagcggaccggccgagttaaatgggtcggccggcccaaggcggcccaagtgcgcgcgcgcgggagggaagagagagagagcgccggtggaccgggctcaccatgcgcgatcccgggtgggacccgcttgtcagcggcttggctcaccgtgcggagggagtacgcggctcatgcgcgcgggcgggggagggacgcggtgcacgtgcgcggttcgcggtggatgcggatgcggcgggcccacgcgcagcctcacggctcgcggtggaacgcgcgcacggggagggactgaccggggtcggctcgacccggtctaggctgagctggcgccgacgtggcgcctacgtggctgccacgcgggccggcgggaggggagacgagccaacggctcggatttgccggaggaagcttgacggcggcgaatcgcggcggcgacaaccggcggggagggaagagggaaacggcggcgaggccacgaggggtcgattcccggcggtgagagcatctacgcggtttcgggaactcgatgctagcgtcggattggacggagctacgccgagcaaggctggtgacgtgtgagtgctacggagctcgagcggcgacggcggcgagcacgcggcgagcgacgacaacggtcggggggaggagatggagcgaggaggaagaacagagggaggcatcaccgagatgaggaggggcgctgtgacgagaggccgacggcgcgggagtaatctctccggcctcgggccggggaagaggaaggagagggcgcggccgaagtccccttccgcgtccttactcgtgccgactccttcgacacgcgcaacaacgaacggcgacggcgaacagagcacgggggcggcagctatggcgaggaggcgaaaacgagggagattggaggggaaggagctggggtttaaagggggcggcaatgtcggtttgggaaccgacttagggcggaggaggggagcgggggcgacgcggcagagggaggaggggcgctgcctccatcccttggcggcttgcgcgcggagtggcggggccgggcggtgacgacagcgatgacggcgggcggtttggagcggcgcgacgacacgggcgacagacgcgtgaagaggctaacggcggcggcgaccgggcggtcggccactcggcacgcgcgtgcggcttgcaacgggcggcgtccgcgcgggcgtgcgcacgcgaacacggcgcgcgggaagtggcagtgagggagcggagagggaggacttcgctcggcgcgggcggctcacgcgcacgcacgcgggcggagcggaggaggaggagcactcggcgcggctcttcgcgcacgcgcgcgcggcgcgcgggcgaggtggagcggagctgagcgggggggggagcggagcgcgccggggaggggagagggccgggatcaaatctcccccgagaggtgagaggtccgggggagagggggagatgggccgggaggaaatcggcccatcgacccccgggggaggcaaaatagacttttgtggaggaatt

SEQ ID NO: 83641 - DNA, 278 bp, Oryza sativa
  Clone ID: PAT_MRT4530_82953C.1
atcataaaacaaaatttttttaaaaagattttttttttcttttcccttttctaaacgaaacatttgggggcgaactggaaaaaaaccaaatacacatatggttgttcacagaacacaaggattacacgaccaatttgcaggaattaacaaaacccaacaaggggatcacaccttactaatagtacaagataataaaaattcccttacccatacaaagctaaattctaagtattattttggccacccacacgggaaaaaatacaggtggggggggctta

SEQ ID NO: 83642 - DNA, 1104 bp, Oryza sativa
  Clone ID: PAT_MRT4530_82954C.1
ctacgtggctgccacgcgggccggcgggaggtagacggcgacccggccgcgaatggacggcgggcggcggcggcgagcggcggagcgaaccacggcgatacgggcaacagcgagcacaccgggcggttgcacgtgacaaggggaggcgagccaacggctcggattcaccggagtttgctcgacggcagcgggttgcggcggcggcaaccggtggcgggagaagagggaaacggcgacgaggtcacgagaggtcgattcccggcggtgagagcatctacgcggcttcgggaactcgacgctagcgtcggattgggcggaattacgccgagcgaggccggcgacgagcgggtgcgtgcgggacggggcgcagtgacgagaggccgacggcgcgggagtgatctctccggcctcgggccgaggaagaggaagaagagggcgcgcccggagtccccttccgcgtccacgaacgcaccggctctcccggcgcttggcgatggacggcggaggcgaggcagagcacgggagcggcggcaacggtgaggaggcgaatgggagaggaaaggaaaggagggggaagacgggtttaaatgggcggcaatgtcggtttgagagaggggaaccgacatgggcggtcgaggagggagtggggcaactcggcagagggagaggggctctctgcctccgtcccttggaggctagcgcgcggagtggcgggggccgggcgatgacgacggcgatgacggtgggatggtttggagcggcgcgacgacactagtgacaggcgcggctggcgcggcagagggtgacggcggcggcgaccaggcggtcggccactcggcacgcgcgcgcgggaagcaacgggcggcgcggctgggcagcgggaccgggcgacgcggacggcgcagacgacgcggctcgggcgggaaaccacgcgggcgcgcggggccggctttgcgagcggggagctcgcgcaagagatgggggcgctcggcgcggctctcgcacgcgcgagcagcgaacggggggggggaacgcgccggggtggggagggagcgagagagagagagagagagagagagagagagagagagggggggagacgcc

SEQ ID NO: 83643 - DNA, 706 bp, Oryza sativa
  Clone ID: PAT_MRT4530_82955C.1
gcacgcggctccatctgcttcctaagcacatacaagcactactctccatacagcaagcagatacaaacagaaggatgaagctcagagtaaaaggcctcggcctccttcttctccttgtcttgcttgctctttgctccaccatcgacgtctgcgatgcaagaagaggcaagcattggcgacctaggagctcaccgagctcctctctgctaaggaacaagggcaaaggaaagaagggcagctccaaccggcagcatggaagcaaccggccgagcccgaagccgccactcagcccgccaccgagtcctggtaatggcaaaggataccagagcccataccagccaagcccaagtccaagcccgaatgcacctgtaagcccaagccctgtcaatgggagtggacatgcaagtcccaagtctccaactccaagctgtggaaaaggtaatcagccaccatcgcggccaacaccaacatcaccacagggcgcagtgtttaacgtggttgattttggagccaaaggcgatggcgtctccgatgataccaaggcctttgaagcagcatgggctgcagcgtgcaagcagggagcatctacagttgtcgtaccatcagaacttgagtttcttgttgggccaatctcattctctgggccttactgcaaaccaaatattctgttccagctggatggaacaattgtagccccaaccagtgc

SEQ ID NO: 83644 - DNA, 498 bp, Oryza sativa
  Clone ID: PAT_MRT4530_82956C.1
tctctggtgagataccacctgctctgggcaatctcaccaagctgcggtatcttgaccttgcgagcaacaagctatcaggatctattccttcatctctgggtcagttgtctagcttatctttgttcaacttaggccataacaacttaagtggattgatccccaattctatttggaacatctcctctctgacagtgctctctgtccaagtaaatatgctgagtggaacaataccgccaaatgcgttcgatagtctgcctcgtctccagagcatttcaatggataccaacaagtttgaaggctatatccctgcatcacttgctaatgcttccaatctgtcctttgttcaactcagtggtaactctttacgcggtattgttcctcccaagattggaaggttaagcaatatcaattggctgcagctttcgaacaatttgcttcaagctaaggagacgaaagattggaacttcatatcggcattgacaaattgctcccagttag

SEQ ID NO: 83645 - DNA, 650 bp, Oryza sativa
  Clone ID: PAT_MRT4530_82957C.1
aactacgtttaggaaggaagatgtaattttagttgtaaagccacattttattctttggtgtagatggatagaattgttcatgtttactatggtggtagagtgatgaaaccttacgttggtacacatgttgagtttaaggatatgtcattgaagaccatttcgtttcccacccacccaactctatataactaattaaggtcacgagtgaaagaagttcttgaatggatcgaggataaatgtggagattcgtttttataggaggtacgatgttgtaagggcataagtatatattaaatatgctaggtcagttggaatggtaaatttactttgatttggtaaaagagtcgcgcatccgcgcctgctccgccgccacctgcgccttggtctgctcctccgcgcgcctcaacgcatccagctcctcggggtctgcgacgacgacgtcgtcgccgccgccgccgccgtcttcgacggccgcgggggcggggtcggcgccgtcggcgtggagcgggtcgaagcggcggacgacggcgtcgacggtgggttgaccgaaggcgaagacgttgccggcggaggaccatgcacccgacaagggcatgttgacagtgatgatggtcgcactgcgaggacaaaaaaactttcagtaaaaggca

SEQ ID NO: 83646 - DNA, 371 bp, Oryza sativa
  Clone ID: PAT_MRT4530_82958C.1
cgaagcgtctggtaagaaagacaaaaagaaaaagaagaaaaagcatggtgatgaatgagggatacactggagaaagacaatcttgggtagcattgggttgaaaactcgctgttctgtaaaatggaacatgccgggtctgttccatgcctgttagccatagtataggcaccactgttgagacttgagacttgtttactagtggaactgtattgaagcacctagtagtactaaattttggaatagggaaacatgtcgtgcttgctcgttctatgtgaactgaaatttttggtccttttggccgggagggtcttgttcgtgcaatattgcaatggctgttaaggtctttcaggttcttacttccctacagtgaa

SEQ ID NO: 83647 - DNA, 2016 bp, Oryza sativa
  Clone ID: PAT_MRT4530_82959C.1
atggccggcaaacgtcgccggagcggcgccgctagagaccccctcgcggagcgcccctacagatacgaccacgaggatcgtatcgttcggaacagatcggcgctgctggatgccatcaacgggcactacgcggcggcgctggaccggctgccggtggaggagatgccggcgctgatcccgcgcctcctcaaggccggcctctgcgccggcttctcggatcccgtctccaacatcgtcgtcaacaccctctcctacaagcgcctcccggagcgcaagcccatggttcttggccgtcccgtcgacggcaagacagcggcgaggagacggcggagcgcgctctcccggatcgtcgccgacaccagcgacgtcacctggcactcgcccaaccacagccgcctccgcgacatgaggatgccgctgcggtcactcgaagcgctcgtcgccttcctcgtcgcctgcttcccctacctcccgacctgggaggcgctgcaatacctccgcctggccaacgccgacctcctcgccgccgcgcggctcgtcgaggaggatcgtaacaccaaggccttcatcctcgcgtcccggaccaccaagaccgcgctcagatgcgcgcagtcgcggcgtggcaacccaagcccagagcgttcgtcaacaggtcgttctccctcgccgctcggatggagcagatctccaggcctcgccggagttactgctccccaattcctccagaacaaggtcaagcagccaccattcgtgcgcacaaaatctctgaagaacatcgtcgtcgacaagatctatggactgtacctccaagttcttgccaagatgccgagggagttcttgcagcggcgctaccacaggggactcctcaaggctggccactgctatggccccttcatgaaccctgctcacaacatcgttctcaacaccgtttggtatgacacaatgtttcctgcagaggaagagtactctgaagtggccatgatctgctcaagaacccttgtttctactgcttgcagatctctccttggccttgttgcttatctccgcgcctgctttcctacggtctccagacagcaagccattcgatacctgctcttggcagaggtgaatctacagagagcaatcgaaatggcagggcaagaaggccacgccatgaaggacaagttcgacaggggcattggatttaaggccgcggccaccgctgcgcatcatccggatcgtgatgcgctggtgaatttttacctgtcagctttcttcgggccattgccactgaaagcttgtggtagctttgatgtgcagctgctctcgctgatgttatcacaagaaccatccacttctccccattgttcttttgagacagttccggtacttaccgagggtgcatccaggttattgtcgaacataaagcaagatttcgaggctgagcagaatttcatttgcagcaaggtgaatgctgcactgaagaaatacacacaacgaactaagggaccggaatatgatcttcatgttatctgcggcttgaatccatatgttatcaagtctggtgtttctcctctccattatggtgatagttcatgcaagatccggtacaaatccaagtattctcatgtcaactttttggcgagcccaagaggatcacattcttctgacacagtaattccaacactcttctttgctgagtgttgcaacgacaatgatataaccgatgaaccattgtgctggccaatcatgggacatcctggtcgttgtttccattgcgaatatgaaggtgtgaaggttgtgcatcctgaaagccagaaatatcacggccgtgacattgactttgaggaaatggcgtgtaaaagccattcaaatggtatcgtcaatgaagatttagtcagttctggcgagagtgtcacttattcagtaggcatatcacaagaggattgcatctactttgatttccgtagggatgtaaagtgcgcaaatttcttgaatgcccatgctaggatgcttgaacaaaggcattgcttttga

SEQ ID NO: 83648 - DNA, 291 bp, Oryza sativa
  unsure (1)..(291): unsure at all n locations
  Clone ID: PAT_MRT4530_8295C.1
ccaaacgtgttgtgtgtgtgtgtcgtccgtcggaagtgtgtgtggtcacgaggtcagtgtaacaccccgaagtgtcccaaaggtataagtgagtccagtcanagccgggttgtcgtgtagtgtcgatagaaccccgtgtgccgtgtgtgtggtgtgtagcgtgtgaagaaccgtcaagtcagtcggtggcgtcgtaggtatgtgaaagtcgtaagggtgtgtgtaaagtgtgaaccgtgaagtgtcagtatggagtcgcaacccagagtaagtgtgtcgtaccaggaaaaa

SEQ ID NO: 83649 - DNA, 706 bp, Oryza sativa
  Clone ID: PAT_MRT4530_82960C.1
ccggccgggaatccgtccggacccatccattccccgtcccgttgcctgccgcgcagcgagagacatcccgtcctcgtcggcgccgctcccctcccctcccaccgtctctcctcgcacgtccccctttcctcccgatcgcaccatctctccaccctcccccgctcccgtagtcccgtagctctcttccacggccccctcccgaccgtgccatctcccctaggtgccgctgttggtcgcggttcttgagagttgagacgcacgcgagctgttcgacgttctgcccagatggacgggaaccgtaagcgcaagaccgttgacagcgactagcatggtcctcctgtcaagaaggcctcgacgggcacgcccggtgactcctccttttcccagttcggcggagttgccgatggacggaacgtcacctggacggcaccgagcacgaccgctgtgccgatggagtctataggacggatggatcgttcggccacccccagtcgcctagacggcaaccgctccgcaggcgcgtccgggcccctgcgcatctgagaaccaatgcccctgctgggaaacagcaagcgctctgtgggcgcatccaggcccctgcgcatccaagcggagagcagcagtgaggaaggccgcgtcgggctggggacacctgcaccatcacaacatccgttgcctggtggcgcactcacccgtcgtgtggata

SEQ ID NO: 83650 - DNA, 407 bp, Oryza sativa
  Clone ID: PAT_MRT4530_82961C.1
cggacgcgtggggtttgttttatgcgattgaatgagctttgggttgacagcgtttagataacacaattcaaaaattttgttgcatatattttgctgcaattgatgtttcaacttccaatgagttccatcaatcatgtcacttgagagttaaatgcatgctcagtttaatatttctgttaaatttacatgccatgtctgctgtaactatggtattcttttggaaatttagtcaaggtaggatgacttcttgctggtatactatgttgaatgatctttaagtatttgagttataattgatggggcaaaatgtactgcatgtaaaactggtccagaaaactggtagttgttctcttactgcttggttagactcaaatagagctagatgattatctagtaaagaagagata

SEQ ID NO: 83651 - DNA, 417 bp, Oryza sativa
  Clone ID: PAT_MRT4530_82962C.1
atggcgagtaggacactcagaacaaaagctgcttcacaggagtacgaagaagaaagaaagaacaggggtgcactcgatcttggaagaaagaacaaggcgcgctggattttcctttgttatctacctcagatgcgcaggggcccggacgcgcctgcggagcggttgccgtctaggcgactgggggtggccgaacgatccatccgtcctatagactccatcggcacagcggtcgtgctcggtgccgtccaggtgacgttccgtccatcggcaactgaaatccaagaaaaagtcgaatcaccaacacccaacgagaagtcatcaacggatgttcttgggcactcacctccgccgaactgggaaaaggaggagtcaccgggcgtgcccgtcgaggccttcttgacaggaggaccatgctag

SEQ ID NO: 83652 - DNA, 185 bp, Oryza sativa
  Clone ID: PAT_MRT4530_82963C.1
ctgctgcccactctggacaaggacgatgtccgggactgcacgctgccacttgagcgcgtcgacggccttggggtcggcatgctcaatgagctctcctatgccgtgttgtggcggatggcagagaggcaggtccagctcggcttgtccattgttgtggattccccgctgtcacgccgcgctcacct

SEQ ID NO: 83653 - DNA, 132 bp, Oryza sativa
  Clone ID: PAT_MRT4530_82964C.1
atggagatggggatgcggcggatgcggagggtggatcggtgggcagagcggctcgcggttttgggcgtgtttaggaagcgacccgccgacttggctgtcaaccacgccgaagaattggtggctgttagctga

SEQ ID NO: 83654 - DNA, 444 bp, Oryza sativa
  Clone ID: PAT_MRT4530_82965C.1
agtcgggcgcgctcgctctcgcgcgctctctctgccccgcgcccgcccgcgcgcccgctcaggcgcccgcgctcgctgctcatcgcgctccctcgcacaccccctataactctcgccgcgggccgctcgccctccctccctcgccgctcggcggtctgcccccgctcgcgccctcgctcgctcgttgtcacccagcggcgcgcgctgtcctggcgcgccccctcgcacccctcctgcctcgctgacgttcaggcacacggatggagacggagagcgcgcgcgcgcgcgcgcgcgccggccaccctcggctctcgtagctcgtgcgcgcacgcgcgcaagcgggcgcgcgcgcgcgcgtctcacactctcagtcttcacgcgccacgcacgcccagacactcgcccggagcctcgccgcacgcgatgcacacacacagacagtga

SEQ ID NO: 83655 - DNA, 217 bp, Oryza sativa
  unsure (1)..(217): unsure at all n locations
  Clone ID: PAT_MRT4530_82966C.1
gccgccgggagcgagntntgaattcagcnccgatgaatattcagatttctgcctgtttctgtacncatggaaggttgaatgagcctacacactttgttactgcgatacgggcggacgttttttttttttaaccatgctatgaactggtaattcagatcatgtaatggattggntggtcaaaaaaaaaaaaaaaaaaaaaaaaaaaaaaaaaaaaaaa

SEQ ID NO: 83656 - DNA, 385 bp, Oryza sativa
  unsure (1)..(385): unsure at all n locations
  Clone ID: PAT_MRT4530_82967C.1
ggcacganctttctgctcccacaaaaaccccgacgcggcatggtatgacaagatggaggcctgcgtgacgccgctcccggaggtctcagacgccagcgaggtcgctggtggcgcgctgaagaaatggccgcagcggctcaccgccgtgccgcccaggatatctagaggtagcatcaagggcgtgacatcgaaagcgtttgtgcaggacaccgagctgtggaggaagcggattcagcactacaagggggtgatcaatcagttcgagcagaaaggacgataccgcaatgtgctcgacatgaacgccggcctcggcggtttcgccgcggcattggccagcgaccccttgtgggtcatgaacatggtccctaccgttggtaactcctcc

SEQ ID NO: 83657 - DNA, 3423 bp, Oryza sativa
  Clone ID: PAT_MRT4530_82968C.1
accgcgagacagcgagctgggccacccgtcctcagacacagcaggaaatgtcggcttctgcggcgcccacgcacatccgcttctcctccgccgcacctccatcggccgccgctctccggcggcctcgccgccggtgcgccacgcccgtccgatgctccctcgccgcagcgccgggtctccgggcgccgcctgagctcatcgactccatcctctccaaggtgaagggaactgaccgtggagttttgctgcccaaagatgggcatcaggaagttgctgatgtcgcactacagcttgccaagtactgcatagacgatcctgtcaagtctccactaatatttggagagtgggaggttgtgtactgctcagtaccgacatcaccgggagggctctaccggactcctctcggccgcctgatattcaaaaccgatgagatggctcaggtggtgcaagcgcctgatgttgtaaaaaacaaggtgtccttctctgtctttggtttcgatggtgcggtatctctgaaaggcaagctgaaatgtgctggatggtaagtggattcaggtcatattcgagccaccagaagtgaaggtaggctccctggggtttcagtatggtggcgagagcgaagttaagctggagatcacctatgtcgacgagaagatcaggctgggaaagggatcaagaggctcgctcttcgtcttcatgagacgatgatatgagggcatcaggaaatgtttgtaccatcatgtcctttgagaccacaagagggtagcaccatagcactgatgctacgacaatatgtttgtgtgtacaatactgtattctgttgtaaaattcagaggtcatgttggctagtagtgttcttcagacctccgaattagagattgtattgtcatttccaatcaaaatgacaaaatgtttgtagtttttgtgattaaacctaacacgaaacctgtcatatctgcttggagaaagcttgttatgtcagcaagtgtaccccatcgccaggttcagaaaggaatcaaacacttcgtaaacgataacgggctgctgaaatctgattcggccgacaggttcgcatggttcacggcatcagctttggtcgctctaccgatgttctacacctacaagatgctctcagctgctatatgttttctatttttagaaaagaatatagataaaaaagaattaggaaatatagataaaaaagaattaggaattaaggatgcgtacgggaggatgggttatattttttctaggattttctataaacgattaaacgagagtcggaagcattatacgtctcctatgagagattggttacctgcagagcctgtcagggaattgacggatcaagagagagcctcacaagttgttttcaaacagatcctatcaacacctcctgttaagtcgaagagatcaaaagttgctttcatgttcttaactcctggtacattgccatttgaaagattatgggagaaattttttgagggtcatgagggaagatataccatatatgttcatgcctcaagggagaaaccagaacatgccagtcccttatttattgatcgagacatacgcagtgaaaaggtggtatggggtaagatttccatggttgatgcagagagaaggttgttggcaaatgcactggaagacgttgacaatcagcattttgtgttactctctgacagctgtgtacctttgcacaattttgattatgtgtataactacctgataggaacaaatatcagttttattgattccttttatgatcctggaccacatggaaattttagatattctaaacatatgttacctgaagttagagagagtgacttcaggaagggttcacagtggttctcagtcaagcgtcagcatgcattgatgataattgcggacagtctttactatactaagttcaagcttcattgtaagcctgggatggaagatggtcgcaactgctatgctgacgagcattatttgccaacactattccatatgatagatccaaatggaattgccaactggtctgtgactcatgttgactggtctgaagggaagtggcatccgaaagcttatcgggcaaatgatgttacatacgagcttctgaagaatataacatcaattgacatgagctaccatatcaccagcgatagcaaggtgaagggaactgaccgtggagttttgctgcccaaagatgggcatcaggaagttgctgatgtcgcactacagcttgccaagtactgcatagacgatcctgtcaagtctccactaatatttggagagtgggaggttgtgtactgctcagtaccgacatcaccgggagggctctaccggactcctctcggccgcctgatattcaaaaccgatgagatggctcaggtggtgcaagcgcctgatgttgtaaaaaacaaggtgtccttctctgtctttggtttcgatggtgcggtatctctgaaaggcaagctgaatgtgctggatggtaagtggattcaggtcatattcgagccaccagaagtgaagactaatgagcatggttatggatttttggtgaaccctgcaatgaaattgctgctcctagtatatactgtatttgccagaaggtttcaacatttttgtaggcaactattggtaacggaacacttttggatctacgagcaccgtcagatctcaattaagaggtcaagattgttccaaacttccaagtgcatcagtatagcggatatgccgcctccggcctgcagtaacgtactctatggagacagaacctgtacagtcgaaaagtcgcctctcgagaaggaaaacgccttcttggaaaaaccgtcttgttcttctcctcatccacggcgagggggcgtcccctcgagctcgcgggtctctcgtctcctcgatggcggtgtcgccgtggagctgccgctgtgggacaagagatccaagtactcggcacaatcagtgagagcaatgcctatgcgtgtgctaacagttggaaagaagaggtctcgaggggcacagctcattgttgaagaatacaaggagaagcttggttactactgtgatattgaggacacacttatcaaatccaacccaaaactcacaagtgatgttaaggtgcaagtggaggcagaagacatggcaatgatgctgcagctcaagcctgaagacttcgtggttgtgctggatgaaaacgggaaggatgtcacgtctgagcaggtagctgatctggtcggggatgctgggaacacggggtcgtcaaggctcacattttgtattggtggaccgtatggttttgggctacaagtgcgagagcgtgcagatgcaacaattagactatcctcaatggttttgaatcatcaagttgccttgatagttctaatggagcagctctacagggcatggactataatcaaaggacagaagtatcaccactag

SEQ ID NO: 83658 - DNA, 230 bp, Oryza sativa
  Clone ID: PAT_MRT4530_82969C.1
gcgcctgattgctatacgctgatgtctgctatctgttcgatctcttctgttaatactaatgttatgctcgacttataaatatccaagttttataataaaacctgtagttttgcgattactgtgttgctaaatgtggaggtacgggatgcacctccttaaatctgtggttttggagaaatctcgccaaaatacctcgagttttgtgaaatttactctctatagacatagtg

SEQ ID NO: 83659 - DNA, 2619 bp, Oryza sativa
  Clone ID: PAT_MRT4530_8296C.1
atggagagtactactacaccaagagggaatgaaacaagtgaattaggagcaaatgatggtgaaagcagctcgaggaacagccaacccaacaacattgaagagactaatcccctcccagaggtcagtaatgatgatgcagtcctgatcataggacaagctattgaattgaaggatgaggggacgaggctattccagagaagggactatgaggaggcagccatcaaatttggcgaggcgataaagctccttccaaaggaacacaatgatatcgcctttctccactgcaacgctgctgcttgctacatgcacatgaatcctgaggaccttgatcatgcaattgaggagtgtaatctggcattggaggcatcaccaaagtatacgaaagcattactgaaaagagcacggtgtttcgaagcactggataagctggatctcgcttgcaaggatgtacagaaggtgctgagcttagaaccaagcaatgtaactgcattggagctatcagagagtatcaaggagctgatggaggagaaagacgttttgctggagaaacagattgtttcgcctgtggctgaggagcctaaggctattttagcaaaagataagatcaagaggaaggtatcccgcaaattcagaaactccatagttgaggaagaggtgtgggaaatgattcatgaagaggatatgcaagaggatgatgaggctgccgaggaagagaaatgcaatgggaacaaccatgtgcagaatgatgcaagacccgaagaaaacgacactgagcagatgcacataaaacaaaaccggagcagcgaagagaagtacagagaggagaccaggccgaagcaagggcagtgcagtcgaggagccagcaacgatgggaagacagtactgcagcattcttcactgaatatggaagagatgtgtgtcaacctgaagcatggtaaagagaagcatcagaagcatcttaaagagatacatgttagaggcagtcatgggcaggaaacccatccattctgtagtggtgtggacaaacgccaaaagcatattgatcagatacaaaccaatagtctcggcatgcaagaaaagcacacggacaagtttgaaaggtatgccaacggcagccgagaaaagcattttctagacaggcatattggtcgtggtgaggataagcaggaaaagcgatccacgctcaagccaacaatccatggtagagacaagcataagaatcacaaagatgttaacaagagggcaatgaagagcgtgaagtttgtttgtggagatgacatacggatcgttgtaattccagaacatataactctgatgcagctgatggacatagctcgctataagtacactcctcacttgaagtcaatccttcttaaatttatggacaaagagggtgacttggtgacaattacctcaactgaagaactgcgatgggttgaggaactagatccactaaagcctgtccgattgtatataaaggaggtaagtcctgatcgtgagatcactagggatcttgtcatgcccactacctcctacagtaagttagaaagaaatcacaattccatgtctgaatgtggaagttctaggcatggcggtgaaaagaattcttatacagatgactggatggtacaatttgcccgtctattcaagtatcatgttggttttgattctgatgcatatgtggatctacgtgacctcggtatgaggctgtactatgaagccatggaagaaaccatcacaagtgaagaagcccaggagatatttcaatccgcggaggcaaaatttcaggaaatggcagctttagcattgttcaattggggcaacgtccacatgtctcgtgcaaagaagcgattacttttatctgatgatgcttcacaggaatcaatacttctgcaggtcaaaaatgcatatgaatgggcatgcgctgagtatgtcaaagctgggaaaaagtttgaggaggcagtggacgtaaaaccagacttttatgaaggtctcattgcactcggacagcaacagtttgagcaagcaaagctttcatggcgttacgcagatgcatgcaagataggaatgggaaccgaagtccttgaactattcaaccatgctgaggacaatatggaaaaggggatcgaaatgtgggaaggaatagaatatctgcgtgtaaaaggactatctaaatccaaaaaggagaaagttttactggataaattgggtttgaatggacatttaaaggagttctcagcagatgaagcgtttgagcaagcttcaaatatgagatcacagctgaacatttcatggggtaccattctctatgagcgttcggtagtggaattcaagttaggattatccagctgggaggaaagtcttactgaagcaatcgaaaaatttaagactgggggagcatctctgcctgacatcagtgtgatgataaagaaccactgtgcaaatgagaaaacgcaggaaggattgagcttcaagattgacgagatagttcaagcatggaatgaaatgtatgacgctaagaagttaaaaaatggtggttcttctttccgtttagaacctttatttcgaagaaggccttcaaagctgcataatatattagagcacatacattacacttga

SEQ ID NO: 83660 - DNA, 328 bp, Oryza sativa
  unsure (1)..(328): unsure at all n locations
  Clone ID: PAT_MRT4530_82970C.1
cacagtatgggcactgatccgatggtgctcactccgtgtctcgccacgggtgcacgagtccgcacagcgnctgttcggtgtccaacgccgccgccgtccggcgaccgtgccttggtccgtcgctggagaccgtcgcctgacggccgccgagacgcttggtgnctgtagggtgcctaaccacaggatggcctagtttaattaagcttatttccttgatgaatattttgttgcttccaaatgttatgagtatgtacacttgcgtgtattttgtagcttattttttatttgcaaataaagttgaatatatgaaaaaaaaaaaaaaaaaaaa

SEQ ID NO: 83661 - DNA, 567 bp, Oryza sativa
  Clone ID: PAT_MRT4530_82971C.1
aacctctgcagagggggtacactttacccagacgacattactaacccgggtcacccagcccgcatttcgaaagccgacacaggattgccatatgccaacgagaggggtcccagaccaacaacaagtttggtcccagaccatactgtgccaggaagcccggggattctccccgacaccaccccgttgaatccacatgtctcttggcatcaaggctcccctgattagctatttactcagccaggggcgtcccattccacccatgtggtcgcactattgtatgcttggatgtaattccataggaatcggtccttagatgcgaccgcacaagtattccgcccagattttaagtttgaaggtgaccgtcgatactcgcacagagtgcatgaatatcgaggcacaactagatggttacaagggaacatgatataacaattaacaatggaaggatcagatgcaacaaattctcggctggacacagaaatcaggcccaagttggttagcaggccctgtcaagcccgtccgaactcctgcaaacctctgctggacacactccgcgaagccacgcat

SEQ ID NO: 83662 - DNA, 153 bp, Oryza sativa
  Clone ID: PAT_MRT4530_82972C.1
atgaaacactcaaacactcataaccgattcgagcagaaagtggaaattccatgcgacaagataaagtgcgatttcgacctcgtcactccttcgaaaggaaagggggacggcggttttcaaaaaccaaagctaaacgctcgaattcttttctga

SEQ ID NO: 83663 - DNA, 279 bp, Oryza sativa
  Clone ID: PAT_MRT4530_82973C.1
atgaggatagaaggagctaaaacatcgtcgcggagtcgtcgtcctccagctcaattccgtcatggcctcgagctcagcttgctccaacttgtggcctcacctgcggacgcttcctcgcccatgaagctcgagatcctcggtggcggcagactacaggagctcgagctcgaggccattttggcgagacctgccttgaacgtggcgcagtgctgtgtgtgctggtgcaacagccgcatacaagggcaacaagcctacaacgagcttgggagcaagctttga

SEQ ID NO: 83664 - DNA, 735 bp, Oryza sativa
  Clone ID: PAT_MRT4530_82974C.1
atgggagggaggagagagagagccagtggaccgggctcaccgcgcgtggtcccgagtgggacccgcttgtcggcggttcggttcaccgtgcggatcgagcacgcggcgcgcgcgcgcgggcggggctgggacgcggtgcacgcgcgcggttcgcggaggaacggatgcggcgggcccacgcgcagcctcacggctcgcggtggaacgcgcgcacggggaggggctgaccggggtcggctcgacccggtcttggccgagctggcgccgacgtggcgcctacgtggctgccacgcgggccagcgggaggtagacgacgacgccggccggaacggacggcggacgacagcggcgagcggcggagtgaaccacggcgatacaggcgaaagcgagcacaccgggtggttgcacgagacgaggggagacgagccaacggctcggattcgccggaggatgcccgacggcggcgatttgcggcggcggcaaccggcggagggagaagggggaaacggcgacgaggtcacgaggggccgattcccggcggcgagagcatctacgcggctacgggaatccgatgctagcgttggattgggcggagctgcgccgagcgaggccggcgacgagcggcgcttccgagctcgggcggcgacggcggcgagcacacggcgagcggcggcaacggtcggggtggcgccggctagctatggggaggctactcgtgctactacccgagtctaa

SEQ ID NO: 83665 - DNA, 351 bp, Oryza sativa
  Clone ID: PAT_MRT4530_82975C.1
atggcccagagtgtaacgaagatacagcacagaaaattccgtctgaaaatgcagagcccagacgagctctcgcaagttgtacttcgttccatgggcgggcaggagacgcaggacaattctacgtacgctggaagaaagtctcccgagtgtgcgaggcacagttatgatgacaggtttagccgggtgattgtcgatcgcacacatgatcagtatccaaaaacacgcgaatcggtgcaggcagaaaatcgtgggctggctagctctatggacaggaggcagaacaccgagacggagcagcgattctgtggcgccgcgatggctggcaggagagaagtgaggaatcgtgcatga

SEQ ID NO: 83666 - DNA, 1421 bp, Oryza sativa
  Clone ID: PAT_MRT4530_82976C.1
atggagcggtccggccaagctaaacgggccggccggcccaaggcggcccaaactcgcgcgcgcgcgggagggaggagagagagagccggtggaccgggctcaccacgcgcggtcccgggtgggacccgcttgtcagcggctcggctcaccgtgcggagggagcacgcgacgcacgcgcgcgggcggggaagggacgcggctgagctggcgccgacgtggcgcctacgtggctgccacgcgggccggcgggaggtagacgacgacccggccgcgaatggacggggggcggcggcggcgagcggcggagcgaaccacggcgatacgggcaacagcgagcacaccgggcggttgcacgtgacaaggagaggcgagccaacggctcggattcgccggaggttgctcgacggcggcggattgcggcggcggcaaccggcggcgggagaagagggaaacggcgacgaggtcacgagaggtcgattcccggcggtgagagcatctacgcggcttcgggaactcgacgctagcgtcggattgggcggaactacgccgagcgaggccggcgacgagcgggtgctacggagctcaggcggcgacggcggcgagcacacggcgagcgacggcaacgaggaagaagagggcgcgcccggagtccccttccgcgtccacgaacgcaccggctctcccagcgcttggcgatggacggcggaggcgaggtagagcacgggagcggcggcaacgggtggtcaagccggcgagctggcgctccggctagcgtccaaagcggcgacaggaggtgacgccggcgagagggagaaaaagaggaaaaggagggagagaaaggggctcgcccctttgccgattcgggaaaaggaggaaggagcggggcgactcggcagagggagaggggctctctgcctccgccccttggaggctagcgcgcggagtggcgggggccaagcaatgacgacggcaatgacggtgggatggtttggagcggcgcgacaacacgggcggcaggcgcgggctggcgcggcagagggtgacggcggcggcgaccaggcggtcggccactcggcacgcgcgcgcgggaagcaacgggcggcgtggctgggcagcgggaccgggcgacgcggacggcgcagacgacgtggctcgggcgggaaaccacgcgggcgcgcgcgcgagcaacggcgcgcggggccggctttgcgagcggggagctcgcgcgagaggagggggcgctcggcgtggctctcgcacgcgcgagcagcgagcgggggggagggaaaaacgcgccggggtggggagggagcgagagagagagagagagagagagagggagggaggcgcccgggagagagggggccgggaaagagatgggccgagcggaatttggcccatcgaacccgggggaggcaaac

SEQ ID NO: 83667 - DNA, 747 bp, Oryza sativa
  Clone ID: PAT_MRT4530_82977C.1
cgggggaagtcaagcatgtatcagaaagttcttgtttggctgcgaacagaaaggaagactcttcgcagaaatcccagaaagatcttatgcgtagttctgaccgcggattccacttgtaatcaagccttacagggaaaggatgaaaggtttcatgtactttctaaagaaactacggttgctattcctgcgatacctctcacgctgtacatgcctataatgaagaatccaactggagattctgcaggttgttggccgctcctattgaagcagttccaatttcataccgtcctgcagaacccatccaacaaccacagggaagttttcctaattcagggcccactacccggttttctacctaaactgtacaaacgaggaaaaggtccaaactcgctggtgcatgctactgctcttgcttgtggtgctcgtgtcgtgcctcctgaggaggctgcctcgctgatcaaggctattgagtccaagatcagatctggaggagccacaatagcaaaattgccttcaagcagcttgacacctctaattcctgaggtcgcctctatgtcatcttctagtgaagatgatgaggaaaatgcccccagtgagccactgatggcgagtgttgaacacaactgccatgatcagagctctgaggaaatgaagttggaggctgatccaccatcagagttggaaactgaagctgagaattgttctgcgcagccagaaaatgaaaacaacggtcctactcattgctga

SEQ ID NO: 83668 - DNA, 2076 bp, Oryza sativa
  Clone ID: PAT_MRT4530_82978C.1
atgactggtttcaacttggcggaaaacttcaaagaaaatccagaagctttcttccggagcatcaggccgcgattcattgctccgcagaaaactctactgacaaaaaatccagccgtaccagcgccacagactttcaagactatggctgacaagaccctccgcgaattcgctgctccctctactggcaatgtggccattgggccgcagatcaacatgggagacgttgatttcgacttgaagtctagcctcatcatgatggcgcaagcttgcccattctgtggcgagcctaacgaggatgccaatgctcatctacagcagttcctagagatctgtatcacgtacactataaagggtataaagggtgtcagtccagacgccgtcaggctgcggctgttcctgttcttccttctcgggaaaacgaagcaatggttttatgccaaccgtgctgttgtcaacatctgggacaaatgctctacggcattcctctcgaagttctttccgatgggcaaaaccaatgcccttggtggaaggatttctagtttccagctgacaagggttgagtccattcctgaagcatgggaacgacttcaggagtatgtggccgtctgtcctcatcatgggatggacggctggctgattctgcagaatttctataatggactcactccaatgtcccgtgaccacctggacgcggcagctgaaggatcgttcttctctaaggtggttcgaggagccgttgatttaatagagaagatggtctccaatatgggttggagcgaggaacgactccaaacccatcagcgaggtatgtgcttcgtcaaggaaacggaactactcgctgccaagctggacctcctcatgaaacgactggacgaccacgacaaacggccacaaggcaccatcaaggccttggactcacacgtcacgtgtgaggtctgtggcggcacgggtcactctgggaacgactgcctagaaactcgtgaggatgcgatgtacatgggcaacaacaacaacgggaatcgtccacgaggagtccctgcaactgaaactgggaggattccggagcagaccgactcctccattgaaaatgtcatggcgatcacgacgagaggaggaactaatcgggttgccagagaagcgccatcgagtaactcggctgacaaagaggttcagccagaaaaggccgtgccgcaggaatactgcgacacacgattgctgccgtttcatcaacggagtaggaaaccgtcagtggacgagcagttcgctcgctttgttgaagtaatccagaagattcacatcaacgtgccgttggatgctatgcaagtggttaagctgacggagcagtgcagcaacgtcatactccacaagctcctagaaaagaagaaggatccggggtgtcctacgatcacctgctcgatcggggcacagcagtttgaccaagtcctgtgtgatctcggagctagtgtcagcgtcatgccaaagaacgtctttgacaagctcaacttcacggtgttggcaccaacaccgatgcgcctacaactggctgactcgttagtccgttacccgacggggattgcggaggatatgctagtcaagatatgggatttcttcatcccggttgacttcgtggtgctggatatggacaatggaaaagagacgccgctcatcctggggcgtccgttccttagcaccgcaggagccaacattgacgtggaaacgagaagtatccgtttccatatcaacgggaagaaggaaaagtttcagtttcagccaaggactgaacaatgctccatggtcagaataaagtacgggccaaatccgcagaatattcaagtggtcgaagtggagccacccaagatggatagcctggtaaagttcatgcagaatttcctggaaaaggaaacaacgatgcccacgaaccgttattggaagatactggtaaaattaagtacactggccaagaagctagagcagtcgaagccgtcttccacaccaaaaccaaagaaggtgtggaaagaaaagtcaaagacgcctactccattacctccggagacaggtggaaaatcagtgcactga

SEQ ID NO: 83669 - DNA, 2663 bp, Oryza sativa
  Clone ID: PAT_MRT4530_82979C.1
tcagcaatgagtaggaccgttgttttcattttctggctgcgcagaacaattctcagcttcagtttccaactctgatggtggatcagcctccaacttcatttcctcagagctctgatcatggcagttgtgttcaacactcgccatcagtggctcactgtggtcattttcctcatcatcttcactagaagatgacatagaggcgacctcaggaattagaggtgtcaagctgcttgaaggcaattttgctattgtggctcctccagatctgatcttggactcaatagccttgatcagcgaggcagcctcctcaggaggcacgacacgagcaccacaagcaagagcagtagcatgcaccagcgagtttggaccttttcctcgtttgtacagtttaggtagaaaaccgggtagtggccctgaattaggaaaacttccgtgtggttgttggatgggttctgcaggacggtatgaaattggaactgcttcaataggagcggccaacaacctgtattggccatctgcattccaggaaaatgggaagatgtcaggagagcattctaacggcaggtagcaatcaatcaagatccatatcttatctgcagaatctccagttggattcttcattataggcatgtacagcgtgagaggtatcgcaggaatagcaaccgtagtttctttagaaagtacatgaaacctttcatcctttccctgggatttctgcgaagagtcttcctttctgttcgcagccaaacaagaactttctgatacatgcttgacttcccccgcatttatagttaaatcacatgagagtggaatattgtcagcacaattcgagcttgaatgagtcaaaaggttggttggtattagcacaagactgggactgggctcttgcaaaaacttgagctgtggtgtcattgttttctgtttgtcatcatttgaacattgcgaagcactcatagtttccatttgcataacttcatgtttactctgtgacattgtcgggtgactccttttgacttcagaaaccttctctgcagcctctttcaaggcattcattgccacatggtaaatttcttctgtaactgacccttcttttgcaaattttatggcttcctgacatagatggttgtaaaggacagttagtgaatctgtagaattacattgaattcctgtgctacatccttcagcctttacttcattaggatcattactcgttgcagcaaaatcaataacttctctagaagaatcatttgatgtaatagggactgctctagaagataacaaagaatggttatgctccttctcaaatttagaaaccatccattttccagagttcatccttttcactacaatcatagctttgcatccaactcttgttatcattctagggcgcttcgttgttttgcctccatctgtaatatcttttctggctcgaacctcacggaagccttccttggaacacacgatctggcgtgaaatgattgaattatcacgtcttgaacggcagtacctgctaatacgtgcacggaaaccattaaccctcgcatagttaatatagaataatttagcagcttcttcagattcaaattccataccctcgactggctcatcaatagggtccacctcaatagaatgtggattttccattagatcacaatcatgatgttctccagcatgaggttttcttggtggaaccggtccatgattatggatttttatgaatttggtaacaacccatttgtcaggcccaaactttttaatcattaacatggccttgcaaccaactctagttcctacccttgcttgctgtttctggtccacatggaggttttcacaatcacgagtttcatgaaacccctcttttgagcagacaatacgacgagaaattattgaattatcacgtctagaacgagtgtacctgctgattcgaattctaaaacctgcatgtcttgcatatttgctgtagaaatccctcgcagcatcttcagactcaaattccattccttcataaggcgttaattcagtatcagcttcatgtccaattagcttttgagcttcaggatcatgcatggctgaagtctccatgtcagtaatgactctgggaagttctattgaagaatcccttggctcattgtcttgatttggttcaccaactgaactggttaccacaccttccatgactcctatccacgttacagcacaaatgcaacaacacccaagagaatcaattacccatcaagtcactaagctcaaagttagcaaagacttcagaaaccatcctgattgcagacttgttcctgtgaagaacttaggagaactggaagagtaggattccaatactcccaatcccccaaacggccacagaataacgccgaggagagagccagccaaacagtcaatagctcgaacagttgcaccgcaaccaactacgccacaggtgcgtgggagcggtcaaatcgcatacaaactcaacgaccagacccacatcgaccggcgccaagacgaagacgaagaagaagaaccgcccctgcagcaattcgtcgccggagaatcgccgccgcggccgttcatcgtgagagggattaccgggtgggattagtgggggggcggacgcgtgggttgggagaagagagagaagcaacctgcagcccggggatccactagtt

SEQ ID NO: 83670 - DNA, 2007 bp, Oryza sativa
  Clone ID: PAT_MRT4530_8297C.1
atgcgtgaaaagaccatacctgctcaacttcttgaaactataggggctaataatgaaaagataaagaagcaacaaagcaaagcaactgtcaagactcttcttcacaaagcttcaggctttgtgtttcagctcggtgacaccaaccacaagatgggatcactcaagatgactggaaaagctccctgtgcagcactgccagagtcctcatgtgcctacctgcttcaagaactgaagatgatatgggatgaagttgggcaagaagaaaatgaaagagagagaatacttcaagagatagagcaggaatgccaggaagtttataggagaaaacctgagaaaatgacaggtacgctaaaggagcagctgaattccatcacaccagccctgcaagaaatgcagatgagaaaagaagccagactgaagcagttcagagaggttcaaactgagatacaaagaattgcctctgaaatagcaggacgccctgagaatgaagccatcacagtgaatcaagaagatctgtcactaaagaaactcgaggagcaccaaagtgaactgcaaaggcttaaaagagaaaagagtgatcgcctgtgcaaagttgaagagtacaaggttctcattcacaactacgcaaagattatggggatggatccctcaaagatcctctctaatgtccacacaagcttgttagatggcgcaaatgatcaacaaacaaaaaacatcagtgatgacattcttaacaagctcaacaccatggtccagcaacttaaagaagagaagaaccagagaatggacaagctccatagccttgggaaagcattgacaaaattatggaatattctggatactaacatggaagagcgcaggccatatggtgaaattaagatatattcaatgacttcaggaagcagtatgctaggcccaggaagcctcacactcgagacaattcagaagatcgaatctgaagttcagcgactagaccatctaaaggcaagcaaaatgaaagagctcttcatgataaagcaaaccgagataaaggaaatttgcaagaagtcacacatggatatgccttaccagacagagatgaacaaaataatggatgtgataatgtcaggggatgtggaccatgatgatctactaaagacaatggatgaatatatatacaaagtaaaagaggaggcaacaagtcgtaaagaaataatggacaaggttgaaaaatggatggcttcatgtgatgaagagagatggctagaagaatacagcagggatgagagaaggtattcgataagcagaggagcacataagcatttgaagcgtgcagagcgtgctagaatcattgtgaacaaaatcccaggcctggtagaactcttaatggcaaagacagagatctgggaacaagagagggaaaaggtctttctactacgacgagcttcccctattggccatgctgaaagactacatgctaacactgaaggaaaaggaagaggaaaaatacaggcaatgggagaataaaaaggtacagactcaacttgcaaggaggcatgagaattcatttatattaagacccaacacaagctgcagtcgtccatcaagcagaggcttcaataccagccctggctcaagtactatttggagcagcagacttcctactatggttcaacaacctagtgcagataattcctcagctgaaaaagatgtgcatataagaaaagttaggaacagaagtatgcagcgcgcgctaggaaataacagaagcatctcaatctcttatgaagataaaacaccaagtctctccgcaataaaacaaggcgtttcaccaatttgattttttttccaagttcttatttggtccattagatgtctacggtaagttatgtctggtgtgtgaagatagcaccattgttcgaagcttaaaaatgaatagcagtagacactagacaatgtgtgcattgataccataaccatgtaattattgccttaatgccttgtcaaaaaaaaaaaaaaaagggcggc

SEQ ID NO: 83671 - DNA, 756 bp, Oryza sativa
  Clone ID: PAT_MRT4530_82980C.1
atggggcggtccggccgagctaaatgggccggccggcccaaggcggcccaagcgcgcgcgcgggggaggggaggagagagagggccggtggaccgggctcaccacgcgtggtcccggggagcacgcggcgcggcgctagggtgggggagggacgcggtgcacgcgcgcggttcgcggtggatgcggatgcggcgggcccacgcgcagcctcacggctcgcggtggaacgcgcgcacgggagggactgaccgggatcggcccgatccgatctcggccgagctggcgccgacgtggcgcctacgtggccgctacgcgggccggcgggaggtagacgacgacgccggccggaacggacggcggacgacagcggcgagcggcggagtgaaccacggcgataccggcgaaagcgagtacaccgggtggttgctcaggacgaggggagacgagccaacggctcggattcgccggagggagtccgtcggctgcggattgcggcggcggcaaccggcggagagaaaaggggaaaacggcgacgaggtcacgaggggccaattcccggcggcgagagcacctacgcggctatgggaatccgttgctagcgtcggattgggcggagctacgccgagcgaggccggcgacgagcggcgcttccgagctcgggcggcgacggcggcgagcacacggcgagcggcggcaacggccggggcggcgccggctagctacggggaggctactcgtgctactaccgaaaactaa

SEQ ID NO: 83672 - DNA, 568 bp, Oryza sativa
  Clone ID: PAT_MRT4530_82981C.1
aacctctgcagagggggtacactttacccacacggcattactaacccggatcatccagcccgcatttcgaaagccgacacaggttcaccatatgccaacgagaggggtcccagaccaacaacaggttaggtcccagaccatactgtgccaggaaacccgggggttctccccgacaccaccccattgaatccacatgtctcttggcatcatggctcccccgtttagctagttactcagccaggggtgtcccattccacccatgtggtcgcacttgtcttatgttcggatgaaattccaaggaaacggtccttaagtgcaagagcggaaaaccgtacacctgattttaagtttgaggcgaccgtcaatactcgtgcagagtgcacgattaccgaggcgcaactaggtggttacaagggaacatggtggcttgcctcgctcgagatcttgagcttgatcctcgaaatcttcgcactgtgggtcttcgggctccgaaactacacgcgaaacggaacaactcacaaacggcgaaaataaagccctattattgacctctaagcgtgccattaga

SEQ ID NO: 83673 - DNA, 186 bp, Oryza sativa
  Clone ID: PAT_MRT4530_82982C.1
atgaagctcaataaaggcaattgcaagccagcggctctgtgtgtgtgtgtgtgtgtctcggtttccgtcttctgcctccataacaagaacgtcttctcgccaagttacgtggtgaaggcagccgcggtgtcggcacgcccggggcccgggctgccttcgatcccagggtgtgaccttaagtcctga

SEQ ID NO: 83674 - DNA, 2388 bp, Oryza sativa
  Clone ID: PAT_MRT4530_82983C.1
atgtacatgggcaacaacaacaacgggaatcgtccacgaggaggttaagggtggaactagacacacccatactattaaggaggaaacaacaacggtaacttctctaaccaaccctccttaaaggatctcatttttgcgcaagctaaaaccactgatgctttaagcaaaaagctagctgccaatgacaagatcctagagaacatcaatgttaagctagatggcttcgcttctacttttcaaaaccagctgagcttcattaaaatgataaaaacccagctagcttaattggcttctttagtccctgcaactgaaactgggaggattccggagcagaccgactcctccattgaaaatgtcatggcgatcacgacgagaggaggtaagtccactcgtgatccgccatatcctaaccctgcaggaactaatcgggttgccagagaagcgccatcgagtaactcggctgacaaagaggttcagccagaaaaggccgtgccgcaggaatactgcgacacacgattgctgccgtttcatcaacggagtaggaaaccgtcagtggacgagcagttcgctcgctttgttgaagtaatccagaagattcacatcaacgtgccgttggatgctatgcaagtgctaacatatgcccgttatcttaaggatatcctcaacaacaagagaccgcatccaacaatgtaggtggttaagctgacggagcagtgcagcaacgtcatactccacaagctcctagaaaagaagaaggatccggggtgtcctacgatcacctgctcgatcggggcacagcagtttgaccaagtcctgtgtgatctcggagctagtgtcagcgtcatgccaaagaacgtctttgacaagctcaacttcacgaaggaaaagtttcagtttcagccaaggactgaacaatgctccatggtcagaataaaaatttcctggaaaaggaaacaacgatgcccacgaaccgttattggaagatactggtaaaattaagtacactggccaagaagctagagcagtcgaagccgtcttccacaccaaaaccaaagaaggtgtggaaagaaaagtcaaagacgcctactccattacctccggagacaggtggaaaatcagtgcactgaactgaaaggagttttctctcaagttcattcaagctttgattgtttccctcaaattcaaatacttagctgcatatatacatgttgctttggtgaaactaaccggcgtaatgaggaggcggctgcctcgtctattcaagtggtccggctcttcgtcaagtcaatcatgatgagtctagcgcttgttcatcagctgatgtcacgatggaagatgccgaagctccgcgatgtctcctgaacgacgccgaccttgaccttgtcgacaatcaggaaagacaagcctactacatgctaagcgaccgggagcatgctcacacgcgagaatactctccggagctgctgaaaaagataggaatggatgttgattttcgtgctatttggaaagctgttggttggcagagatttcttgtggtagatgagcctggttctcgtttggttactttgcaatttctgtgcactttgaaagaaatagaagatggaatttcttttcgctttttccataaagagtatacacttacatggaaaggattgagtacactttttggctttcacgattcttgtaaaatcgatctctagaaaggaatttctgggttcgagaaaaataggttttgggaaggtatttctggtgctccaatttgcaagaaacctaggacaaatgatatccataatcctatagttaggctcatgcacaagtggattgctctgagtttgtttcctagaggtgatcttagacccattaggggggatgaattaattatcatgtttgctatgaccatagaagaatctcatgcaggtggagtatacagggacacacacaacatggcaaggaacgaacgagaaagttcatcatcctcaacacccgtgcagattatatgaggcaggttgggaaccaactggggatgcactcggatggacccaagctccacgccacaacatcggtgtctcaagctgggcaagtgccagtgaggaccggtggcatgcgcctcatgacatatagtggggggacaaccaacctcccagatcaagtggagtacctccatgtccaagtgaatggcgctcgagttcctctcgttgggacttgggtgaaatcactaggagaatggacacccttgatgtgcagacgggggagatccaggattcaatccttaccaaggaccctgagcgaaagccaagcttggggggagacatctctctccccactgaggtaacttgtatcacattgcatatttccctttccaattgcatatttgctttccaattgcat

SEQ ID NO: 83675 - DNA, 813 bp, Oryza sativa
  Clone ID: PAT_MRT4530_82984C.1
atgccaccgccgtcgcattttccatccatcgccgtcactcctgtgtgggacccacacgtcagctccatcctctctcttctcccttccccatctctctccggcaaacagcagcagcatgtggtcgacgaacagcagcagcaggtggccggcaacagcaccgatcgagctccgacgcccttcacagttgtctgcaccaaagactcgtgctccgcagctctttgcccaacaccaaaaattaaatcccaccaccgccaagaaatccaggtccaatctcttatttgctttgatgatttgcaatcacgtggatgttctttgctgatcgtacgatcgttggcccttctgttcgagttggcccacgacgacgatagccaccacgccgatgacaaccacgacgatgacgagggcggcgctgcaagaaagcagcagctgctgcgcgccggcgagccagctgcagatggactacaccatggaccagctctggaacgacatcgcagcggcggaagccgacacaagctacgacgcgacggcggtggtgatggcctcgccgccatcgccggtctgggaattccgtggcggcgttcgtggccctcgccgccgtcattggccggctgctgctgccgccgccgccgccggtcacctgctgctgttgttcgccggagagagatggggaagggagaagagaggggatggaggaagaggatggagctgacgtgtgggtcccacattagagtgacggcgatggatgaaaaatgcgacggcagtggcatgggtccaatttcaaaaagttccagtggcactcagcagatttcgtaa

SEQ ID NO: 83676 - DNA, 660 bp, Oryza sativa
  Clone ID: PAT_MRT4530_82985C.1
atggaaatcagacttttcctcgggcggctagggcgcggcccaagggagtttgcggcgtacgcgcgcgggcggggctgggacgcggtgcacgcgcgcggttcgcggaggaacggatgcggcgggcccacgcgcagcctcacggctcaccgcggaccatgcgcacgggggaaaaaacggagggagcggctggccgggtcggctgatccggtcgcggccgaggtggcgccgacgtggcgcctacgtggcagccacgcgggccggcgggaggtagacgacgacgccggccggaacggacggcggacgacagcggcgagcggcggagcgaaccacggtgatacgggcaacagcgagcacaccgggcggttgcacgtgacaaggggaggcgagccaacggctcggattcgccggaggttgctcgacggcggcggattgcggcggcggcaaccggcggcgggagaagagggaaacggcgacgaggtcacgagaggtcgattcccggcggtgagagcatctacgcggcttcgggaactcgacgctagcgtcggattgggcggaactacgccgagcgaggccggcgatgggcgggtgctacggagctcgggcggcgacgacggcgagcacacggcgagcgacgacaacggtcggggcggcgccggctaa

SEQ ID NO: 83677 - DNA, 1419 bp, Oryza sativa
  Clone ID: PAT_MRT4530_82986C.1
atgccgcgaatcgctgctctgcaaaaaactctaccgacagagaaaccagccataccagcgccaccgaccttcaagactatggctaacaagactctccgcgagttcgctgctccctctactgacaatgtggccattgggccgcagatcaacatggaagacgtggatttcgacttgaagtctagcctcatcacgatggcgcaggctagcccgttctgtggcaagcctaatgaggatgccgatgctcatctgcaacaattcctagagatatgtagcacgtacaccatcaagggcgtcagtcccgacgccgtcaggctgcgactgtttctgttctccctcctcgggagagctaagcagtggttctatgccaaccgtgctgctatcaacacctgggataaatgctctacggcattcctctcgaagttcttcccgatgggcaaaaccaacgcccttcgtggacgaatttctagtttccagcagacaagagacgagtctattccggaagcatgggaacgactgcaggagtacgtggccgcctgtcctcttcatgggatggacaactggctgattctgctgaatttctataatggactcaccctgatgtcccgcgatcacctggacacggcagctggaggagcattcttctctaaaactgttcaaggagctgttgatcttatagagaagatggtctcaaatatgggttggagcgaggaacgactccagacccatcagcaaggcatgcacatcgtcaaggagacggaactgcttgctgccaagctggacctcctcataaagcggctggatgaccacgagaaacagccacaaggcaccgtcaaggccttggactatcacatcacgtgtgaggtctgcagcaacacgagccattctaggaatgactgcccggaaacccgtgaggaggcgatgtacatgggcaacaacaacaacgggtatcgtccacaaggaggtcagcggtggaaccaaccacgcccatattatcaaggaggtaacaataacggtaacttctctaaccaatcctccttgaaggatcttgtttttgcgcaagctaaaaccactgacgcgctaagcaaaaagcttgctgccaatgataacatcctagagaacataaatgtcaagctagatggctttgcttccacattccaaaaccaactcagcttcaataaaatgatagaaacccacttagctcagttggcatctttagtccctgcaaatgaatctaggagggttctggggcaacccgactcctctgttgaaaatgttagggtgatcataacgaggggaggtaagtccactcgtgatccgccatatcctaaccctgcaggaactgatgggatatcaaaagaagcaccatctattgactcggctgacaaggaagttcagccagaaaagacagtgccgcagtag

SEQ ID NO: 83678 - DNA, 440 bp, Oryza sativa
  Clone ID: PAT_MRT4530_82987C.1
gtaaagttgcacgagatagatcagtttgcttgatcgcgtggaatcacgacataccgaagatgctggacaagctgcggcacgaccgcggcggccggtgctcgaccggagaccggcctggagaagctccgcaggccgctacaaccctgcccgcttgtcatcaacagagatggcgacggcgatgctagcggcgcggcgtacaagcggacgcatgtcgatgccgacgacccggacgacacaggggacagccgcttatttctgtctccgacgacaacggtgacgacgacgctggggcgcaaccacgtgtggaggagcgcgttccacccggggagcaatctcttcacctagagcctggtgggcatcctcttcgaccggacgctacctgactgcaccaccgtctacgactggctgtacagcgacgagaccacgagctgccatcgctg

SEQ ID NO: 83679 - DNA, 2244 bp, Oryza sativa
  Clone ID: PAT_MRT4530_82988C.1
ctaccaagaaggccaacgccagtccatagactggaagatcttctcggccaacggcgacattgaccttgccagatggtctatctccgccggagtcctccgagaacgagcaaaaccctcatgaagatatttgaggtccaggcgcgggcgatgatcttgtaggcaagccaacacgtgccctccggcatatcggctcgatcgacgacactcctgcttcaaggcctcgtcgatacgcttgccgattccatcgagttgggcacaggccccattaagccacgagatgtactcggccgccgactcctcgggatctccgcagactattcgaagctccctgcatactctggccatggatgtgcagcaactcttcaagtacgagttaaaccacacctcacgacctcggagcgtttccacagcctgctctttcttcacggccagcatggttttctcgagctccgccacttcaaacttcgtcttccagtattggatatgacgatcttggctagcaagggcaccctcgagatctgaggaagtcgtcgccatccctccctttatatcaaggggttgacccacatggtcaggcgagacgtgtggttcaaactcgagtaccggaattattgccagtgactcgggctgcccgcgttgctggacatcctcgtcatcagcatcttcttcaaaaagggggagaacagactcccccagatcaccgacttcttccatcacctccttacgcgtgtcgctggccgccccctggtccaagatctcgcgcagattgagttcaggacgcaacagccctacacacgcgaggacatgacacgccccggtgtagatcccgttcgacgtctcctccgtgatcctggccgcatgcttggaggggatttcccccatcgccgtcgccagttccgcgagagaggaggtcagcgaaaactcatcgggattcaccgggatcgtggacttgacgccgcattccccggcgagctggtgaaggccagtgtaggtgaccctcaacgagccccggatctcggataggttgttcccgagttccgacattcggtcctcgagccccttccgttgtcgctcgttgccggccaccaactccctcatcttcgtaaggtcttcacgggcttcagtcaactcgcgcaccagtctgttagcacgcgcgttcgccgtcgccgcttccgacctcgcctccgcaatctcgcgaccgatgccgcgagcaccagcttcgaggaggcgccccatctcgacttggagctcctcacgaggtgaggactgcacagacgagaatttccttggctttgtcggaacattgccaccgctagtggtggcagcatcagacacctccttgacgaccttcactttcagagatgacgccacctgatggtccgcgagcggtccgatgatgtcagtcaaaggaagggcgttgatggcttcatcacgttccgccgcccccttttcacaaaggggcacaaggatgtcactcgccgtggtcgggccactgatcatcacttggccgacgcggcgctccacggtttcgccgctcagacctattaatcgagaaccaaccgcagtgtagtggccggtcagaccgtccacggctcggtcagaccgccgtcggctcggtctgaccggttgcggctctggcggctctctcatcatttttactttcatatccaaatgagaagcgtcctctggcccggaatagttataagctggatgggccgaccctctagccgccgttctccccccccggtcgttcgccgtcggccaccgccccgcgccgctgccgcgtgtgcgccgctgccgcatgtgcgccgcgccgtcgcgcgccatggtcgccgggccggtttgcgccgtgcccgcgcgcaccggccgcgagctcccgccgctgtccgatctacccttgggtagatcggggccatcggttcggccgccgcgtggcgcgccgctcctccccggtccgtggacccgatccgccgtggaccgccctccccgagccgctgaccggtggggcccgcatgtcggcgccgcgccccgccctgatgacgtcagccttttcccaaccccagagttcgagttcgggtcagatgaagggttctccgaggagtaggcttcgtccgtgccgtcgaggatgcctgtggagtggtgttcccgcccggctggtcctggacggggatttttaatgcacattctgcttgaaattccattcgggaatttctgggcgtgacacacggccaggaagagcgccat

SEQ ID NO: 83680 - DNA, 2558 bp, Oryza sativa
  Clone ID: PAT_MRT4530_82989C.1
atggaggccctgaggttcgtccgcggcatcagccccgccgcctccgcggctccgcagccgccaccgcctccggtggcgcagcggcaccaccagcagcagccgtcgcggggcgttctgcacgcgccgctgctccggctatggccgctcggtggcggcggcggcggcggaggaggaggaggaggaggaggaggaggggagagggtcggtgcggtcggtggtgcggttcgcggcgaggaggcgaggagccagcgcgcggcggaggcagaggcggacgagcggaagcaggggaactgggtgctgcagatgctgcgggtgcagccacagtgggcggaggcggcggacgccgaagccgcgggagtcaccggagccgctcgagaaggcggccaggaagcgctcacggcgggccgcgacggcgacgagtgctgcgcctcgtgcggtggaggtgacgacgaaggatgctgcggcgtcgaggaggacgacgagagcgacggcaaggtgttcgaccgcgcgaccttctcgaggctcctcaggaaagtgtcgctcggggaggccaaggagttctccaagatgtcctacctctgcaacatcgcctacatgatccccaagatcacgtggggtcttcctgaaggatttgatggattagtgccaggtctgcttaatgcaattatactcttggagctatctgtgcctgagttgtatttgtctattgttgtctttcaattggttgcttcacttgagctgctgcttctggcatatggatacttatttggtgtgccaaaattgctgcggaggtacaatttgcggtttgtgacttcatcagtacaagagaaagccaaaactggtgttgatcagaagcaggagctgaagactgaggaaggtgaatcttcagatcaagaatctgaagttgtagagaaccctgagccagggagcaataagaagaaagaaagtgggttgggggtaaaccccttcggcgcataccatgtcatgtcgtctgctgcctcttatttacattcacgggctatgggcgtcgttccctttggttccaggaatgatggcaagaacgatccaaccatcatggccattgtaaacggtgagagtggtgaaggtttaaccatggatgaagcttcatttgtggccactacaaattcagttacctccatggttgctgccaaggaagaaacaagacaagctgttgcagatgatctgaactcttcaagatcttgtccttgcgaatggttcatttgtgatgatgatcaaggcagcacaagatactttgtggttcagggctcggagtcaatcgcttcttggcaggccaacctcctatttgaaccagttaaatttgagggactcgatgtgctcgttcataggggaatatatgaagcagccaagggaatgtatcaccaaatgttgccatatgtcaaatctcacttgagaagttctggtaaatctgcaacgttacgcttcactggtcattctcttggtggtagtctggctttgcttgtgaatctaatgctactgatgagaggagcagcacctgcttcgtcgttgttgcctgtaataacatttggtgcaccatgcatcatgtgtggcggtgaccacttgcttcgtaaacttggattgccaaggaatcatgttcagtcagtcacgatgcatcgagatattgttcctcgagtcttttcgtgcaactaccctgaccatgttgctaatattctgaaactagccaatgggaatttccgcagtcacccatgcctcacaaatcagaagctcttgtacgccccaatgggcgagatgttcatcctgcaacctgacaagaggctatccccgcaccacgacctcctcccgccggacagcggcatctaccacctgagcgactcgtcgtcgtcgtcgggcacctccctgcggcggctccggtccgccatgtccaccttcttcaactcgccgcacccgctcgagatcctcaaggacaagagcgcctacggccccaagggcgccgtgtaccgcgaccacgacgtgaactcctacctccgctccgtccgggccgtggtgcgcaaggaggtgcggcggcaccgggagacgcggcgggggcggtggcggcggctcctcctgtggtggccgctcggcgcgcacggcgcgctggccggcgccggcgtgctcctggacgccgccgtggagggcgggagggagacggcgaggcaggcgcgggcgcacgcccggctgctcgtcgtcctgctggtgccggcgaagctgctcgtgatcggagccttcctggtcgtcagattgatgtgattcgcggacgtggttagatcccatccatccgttcattcattttgttggtttacacaccacactgctgcagtgctgctgtatgctactgcagcaatgattctttcttcccagagtggaatgccatacaagtgtcacacccagatgctgattttctgttttgacactaaaaaaagaaggacctcagatagatgaagatcaatgtcaattaattagactctaaactatattagaaatttattaattggactcgaaaaaaaaaaaaaaaaccccat

SEQ ID NO: 83681 - DNA, 642 bp, Oryza sativa
  unsure (1)..(642): unsure at all n locations
  Clone ID: PAT_MRT4530_8298C.1
ccacgcgtccgcacgcctctatcaatcaagaaacaagcaagattattctagccaactagctagcttgcgaatggcttccttgtcctccttaatgctcgtcacggcagtggccgcattgttggtcattggctcatctggcactgaggtcaccttcaagatcggtgagtcctctaccacctctacactggaactcatcaccaatgtcgccatatctgaggtggagatcaaggagaagggtggcagcgactggagggggctcaaggagtcatcggctaacacctggaaaatcaaaagtgatgcaccgctcaagggccccttatccgtccgcttccttgtcaagaacggtggctatcgcatcgtcgacgatgtaatccccgaaacctttaaggccggctccgtctacaagagtggcatccaggtccagtaatggacatgcatgtccttgcattaggtcacatggaaattattagcctctaaataattatctattcaaaagagagaccgagtctgcatgtgaacacgtcaatagttaaatttctattgttattttgtgacaacagactattgacaaaatgaagcataccatgtgcccttcccacatattggggtggagctatatgtgcacacgattttgaataaaan

SEQ ID NO: 83682 - DNA, 489 bp, Oryza sativa
  Clone ID: PAT_MRT4530_82990C.1
atgccgccgccaccgccaccgccttcttctcatcagatcatgagcgcctcgcccgtgccgcaccgcgtcccctcgccggcgccgatcgacgacgaggaggacaaggcgaagcgcaagaagaccgaggtggaggtggagggggacgacgagggggcgaagcacagcaagacggggctgatccagcgcaggttcaaggtgtcgcaggagatgctggacgatctgatggcgcacccgctgaagcccttcgtcggcgtctgcctcgacgacgtgcccgagggcgagcagcgggacaggctcgccgccgacatggaggcggtcaggaaggtccacgccgagctcatgcacgtggtcgcgcagtacaaggccaccggtgaggcctacatggtggtggaggcgccggaagacgacgacgacctcgcccaagtcgacgacgtccaggcgaccctggagatggcggaccgcatgttgcggcagctgctcgagcagtga

SEQ ID NO: 83683 - DNA, 814 bp, Oryza sativa
  Clone ID: PAT_MRT4530_82991C.1
atggagcgaggaggaagaacggagggaggcattaccgagacgaggtggggcgcagagacgagaggccgacggcgcgggagtaatctctccggcctcgggccggggaagaggaggaagacaagcgcccggagtccccttccgcgtccacgaatgcactggctctcccggtgcttggcgatgaacggcggaggcgagacagagcacgggaggtggcggcaatggcgcggacgagaaacggggaggattgggggggggggaaagaggaagggagggcgcctaggtttaaagggcggcaatgtcggtttggaaaccgactttgggcggtcaaggcgcgagctggcgctcggcgctcgcggccaaatcagcgacagggcggagggaggatgacgccggcgggaggaaaaggggaaaaggagggagagaaagggggctcgccccctgcttctttgggaaaaggaggaggggaccgggggcgtcgcggcagagggaggaggggctctgcctccgtcccttggcggcttgcgcgcggagtggcggggccgaggggctgacggcggcggcgaccgggcggtcggccaccacggcacgcgcgcgcgggttgcaacgggaggcgcggcggtttgagcggcgcggctcgggcacgcgcgcatggcttgcggcacataacatggctgcgcagtcatgtaggcacggcagggcagtcaggggccgggtgactgcggacggcgcaggcgccggcacggtgcggcaaaccatctgcgggcgcgcgagcaacgcctcgcgggcacgattccgcgggtggggagctcgctag

SEQ ID NO: 83684 - DNA, 558 bp, Oryza sativa
  Clone ID: PAT_MRT4530_82992C.1
atgggggaaatccctccaagcatgcggccaggattgcggaggagacgtcaaacggaatctacaccggggcgtgtcatgtcctcgcgtgtagatattgatgacgaggatatccagcagcgcgggcagcccgagtcactggcagtaattccggtactcgagtttgaaccacacgtctcgcctgaccatgtggatcaaccccttgatatagagggaaggatggcaacgacttcctcagatctcgagggtgcccttgctagccaagatcgtcgtatccaatactggaagacgaagtttgaagtggcggagctcgagagaaccatgctggccgtgaagaaagagcaggttgtggaaacgctccgaggccgtgaggtatggtttaacttgtacttgaagagttgctacacatccatggccagagtatgcagggagcttcgagtagtccgcggagatcccgaggagtcggcagccgggtacatctcgtggcttaatggggcctgtgcccaactcaatggaatcggcaagcgtatcgacgaggccttgaaacaggagtgtcgttga

SEQ ID NO: 83685 - DNA, 443 bp, Oryza sativa
  unsure (1)..(443): unsure at all n locations
  Clone ID: PAT_MRT4530_82993C.1
tgtcgtgctncggcttgggcaccctcgttctcgccgcgctcgctctcttctatcaaatcggcgcatgatggagtacgcgtacgtgatccgcgccatggcagcagttcaccagtgcgcgcatgtcgaacacttagtctcggctagtaagtggaggggacgagtcacgacgacgacggcgctctgtgatctgaaggaggcatgcgatgcatttcaagatatcaaatcgatacaaaaggggggaaaagaaacctaaattgaacccaagaaanaaggggttagtactgtgatggcaggaatataatgttaatgtactctctcacggtcatcaactgtgatgcttgtaaataaataatcgagacatgttcattcggaagttattaattaatgttgtagaaactaatttggtggattagggaggagaaaaaaaaaaaaaaaaaaaaaaa

SEQ ID NO: 83686 - DNA, 1908 bp, Oryza sativa
  Clone ID: PAT_MRT4530_82994C.1
ccctcctcgtaaggtggagtcgtacaaacagcggcggaggcgcacaagagagacccgtcgcgtcgaaccgagatttcttcgaacaaaagaaaaagaaaagcgaaaaaaaataaaaaaaaaacaagcgccagacaaattcgtctccctcgttggaagtggagccccgggggcggaagcttttcctcctcctctcctctcctctctaccctaggcgcgatctgctcgtccgcctcggcgatccacagggaaggagcagcatgctccacaaagacgcactacagaagactaaagagagctttttcataccaaagaagtacaacaaaagatttgctcctcattttctgaatcctgggactctctagcctgtagaagaagaaaggcaggaatttcagcgcaagagaacagatcacaatatttacccacggcactgtctcgcgcaatatggcaatgaaaaatgttgtccgtttctttttcgtgttaatacatgtgagcagttgtttgggtcgatcagggaaaatgttttctcctggctttgttatggttactgagtcattaccgagctggccaattgtgagtgcaggaatatctgtgaccgcttcacttgttttatccttgtttctaatatttgagcatctctgcgcataccatcaacctgaggagcaaaagttcttgattggtctcattctgatggttccagtatatgctgttcaatcattcttctcattactgaactcaaatgttgcatttatatgtgaactgatgcgggactgttatgaggcattcgccatgtattgctttgagagatatctcatagcatgtttaggtggggaggaaagtacaatcagattcatggagggtcgatttcaattcagtgagagttctcctctgctagatgttgattatgattatggtattgtgaagcatcctttcccattaaactggtttatgagaaattggtaccttggtcctgatttttaccatgctgtgaaggttgggattgtgcaatatatgatactgaagcctatttgtgccatcttggcaatttttatgcaacttattgggatctatggggaaggaaaatttgcatggagatacgggtacccatatttggccattgtcctaaatttcagccagacatgggcattatactgtctaatacaattttatactgctaccaaggagaagttggaacctattaagcccctgtctaagtttctaaccttcaaatccattgtatttttgacatggtggcaaggtattgctgttgcatttcttttttcaactgggctttttaaaggacatttggcgcaaagatttcaaacacgtatccaggattacatcatatgccttgagatgggggtggctgcagtggttcatttgaaagtatttccagctaaaccttacagacgtggggagagaagtgttagcaatgttgctgtgatgtctgattatgcatctctgggagcttcagatcctgaagaagaacgagagattgacaatgtagcaatcatgcaagctgctcgtcctgattccagggaccggcgattgagtttccctcagagtgttcgcgatgtcgttttaggaagtggtgaaattatggttgatgatgtcaaatatacagtttcccacgtcgtggagcctgtggagcggagtttttccaagataaaccggacacttcatcaaatctccgaaaacgtcaagcagcttgagaagcaaaagagaaaggctaaggatgatagtgatgttccccttgaaccattttcagaggaattcgcagaagctcatgacaatgttttcggaggtagtgttagcgacagtggattagctaggaaaaagtacaagaacaccaaaagggcaccgtcgtctctgaaaccgttcgagttcagattaggtagatggttccagtag

SEQ ID NO: 83687 - DNA, 1875 bp, Oryza sativa
  Clone ID: PAT_MRT4530_82995C.1
atggcggctgaaggcaatgcacgagcaagtgggaacaatggcggctctcagggcagtggtagcacgagcaagtggcgggagcaagcggcggtaccagcggagtcaatgacggcggggggcttagcaggcgacagagtcggcaacgcaaccacggcaggtctgagcggcgaaaacgtggagcgccgcgtcggccaagtgatgatcagcggcccgactacggcgagtgacatccctgtgcccctttgtgaaaagggggcagcggaacgtgatgaagccatcaacgcccttcctttgactgatatcatcggaccgctcgcggaccatcaggtggcgtcatctttgaaagtgaaggccgtcaaggaggtatctgatgctgccaccactagtggtggcaatgttccgataaagccgaggaaattctcgtctgcctcggatgcatctcccccacctccacgacgacaacgcattgtgacgattggcgagaaggaggcgcgagcaaaggctgcgcgagccaagtccggaagagcttctagtgcgtcgccccttgtggcctcgacggatgtcatgcccgcagccgggagctgggaggcgacgcctagtggcccagtcagcgaccccgcggcaggtcgtgatctgccagctgcagtcctcacctgggaggagctccaagtcgagatggggcgcctcctcgaagccggtgctcgcggcattggctgcgagattgcggaggcgagacttgtgcgcgagttggctaaagcccgtgaagacctcacgaagatgagggagttggcgaccggcaacgagcgacaacggaaggggctcgaggaccgaatgtcagaactcgggaacaacctatctgagatccggggctcgttgagggtcacctacaccggccttcaccagctcgccggggtatgcggcgtcacgtccacgatcccggcgaatcccgatgagttttcgctgacctcctctctcgcggaactggcgacggcaatgggggaaatcccctccaagcatgcagctaggattgcggaggagacgtcaaacggaatctacaccggggcgtgtcatgtcctcgcgtgtgtaaggctgtcgcgtcctgaacttgatctgcgcgagatcttggaccagggggcggccagcgacacgcgtaaggaggtgatggaagaaatcggtgatctgggagagtctgttctccccctttttgaagaagatactgatgacgaggatgtccagcagcgtgggcagcccgagtcactggcagtaattccggtattcgagttcgaaccacacgtctcgcctgaccatgtggatcaaccccttgatatagagggaaggatggcgacgacttcctcagatatcgagggtgcccttgctagccaagatcgtcgtatccaatactggaagacgaagtttgaagtggcggagctcgagagaaccatgctggccgtgacgaaagagcaggctgtggaaacgctccgaggccgtgaggtatggtttaactcgtacttgaagatttgctgcacatccatggccagagtatgcaaggagcttcaagtagtccgcggagatcccgaggagtcagcggccgggtacatctcgtggcttaatggggcctgtgcccaactcgatggaatcgacaagcgtatcgacgaggccttgaagcaggagtgtcgtcgatcgagccggtatgccggggggcacgtgttggcttgcctacgagattatcgcccgcacctggagctcgaacaccttcgtgagtgttttgctcgttctcggaggacttcggcggagatagaccatctggcaaggtcaatgtcgccgttggccgaaaagatcttccagtctatggactggcgttggccctcttggtag

SEQ ID NO: 83688 - DNA, 1050 bp, Oryza sativa
  Clone ID: PAT_MRT4530_82996C.1
agcaactttggtaaaaatcttgaaactaacattaagtaaacatatgggcctatattgttgaattttaatggcctcaacgcacttagtggcgacgatcaaaccggggtttgtgtaccagtcggaccggacaaatattcgctgacctcctctctcgcggaactggcgacagtgatgggggaaatcccctccaagcatgcggccaggatcgcggaggagacgtcgaacgggatctacaccggggcatgtcatgtcctcgtgtgtgtaagactgtcgcgtcctgaactcgatctgcgcgagatcttggaccagggggcggccagcgacacgcgtaaggaggtgatagaagaagtcggtaatctgggggagtctgttctccccctttttgaagaagatgctgatgacgaggatgtccagcagcgcgggcagcccgagttactggcaataattccggtactcgagtttgaaccacacgtctcgcctgaccatgtggatcaaccccttgatacggaggtagggatggagacgacttcctcagatctcgagggtgcccttgctagccaagatcgtcgtatccaatactagaagacaaagtttgaagtggcagaactcgagagaaccatgctggccgtgaagaaagagcaggctgtggaaacgctccgaggtcgtgaggtgtggtttaactcgtacttgaagagttgctgcacatccatggtcagagtatgcagggaacttcgagtagtccatggagatcccgaggattcagcggccgggtgcatctcgtggctgaacggggcctgtgcccaacttgatggcatcgacaagcgtatcgacgaggccttgaagcaggagtgtcgtcgatcgagtcgatatgctggagggcacgtgttggcttgcctacgagatcatcgcccgcgcctggacctcgaatttctccgtgagggttttgctcgttctcggagaacttcggcggagatagaccatctggcgaggtcgatgtcgccgttggccgagaagatcttccagtctatggactggcgttggccttcttgg

SEQ ID NO: 83689 - DNA, 1024 bp, Oryza sativa
  unsure (1)..(1024): unsure at all n locations
  Clone ID: PAT_MRT4530_82997C.1
actagtggatccccgggctgcaggtgtgtgtaatgtgatcatttttgtctacttaaaggaagtccaggttcattattccaaattcattctagaactacagaccaatgtttctgaaagtagtttcaaatttaagcttcttaatggcccctagggtgatggaggtcacggctgaggcactcactcgggaggaggtttgctggttatattgagtgatgaccctggactctgctgccgaggtcgctgcaatgattggctctaccgctgaggccaagaggcatccactctgccgcccaggccgctacactgcccctgtatgatgggctgcgttgccttgctgacgaccacaatgttcccattctcttatttatgaatcacccccctcaaggccaattcttccacccccccccccccagaccacagattgatagcaccaccattaactatgctgagactgtgagcatgcacagctctgaagccttttgtgtgacaaggatcaggagttcaggatgcaagtccaccatatggattgaatttggtggccgtgtaatttctgtgtcctgcaaaggacgttgctggtttctttacggctgctatgttgctaccttttcagagaaggtattgcaatctatattcgcaaggctttatcagttcataggcggtgctattgcgtctcttatttctctaccatgagtgaatagaggatatggctactgttgattggaaatagaagatgaagctttgaagatctgttctctatgaacagntaaaattctgtaaacagtgcttgtggtgcatcattctaaaaagaaaggaaacgaatgtttttgtnacttgcaagaatcaaactggagaaggaaaaacagaagaaagatggaacaactgcaaatctgtgcactactacgactatatatggatttgttgtgttttttttgtgatgtatgttgtaattgatattgtgaaatatttatcgactgtttgtataagaaatcaataatacatgtgcaaaaaaaaanaaaaaaaaaaa

SEQ ID NO: 83690 - DNA, 480 bp, Oryza sativa
  Clone ID: PAT_MRT4530_82998C.1
ttctccggcggcgaggatctggctttgatggttgcttgacaaggatgaaatggcctcccgttcaaagttatctggtattcagaggcaggtattggcattgtacagaggattcctgcggacagcaaggctcaagtctccagaggagcgccacagaattgagtctgttgtctcagcagagttccgtgagaatgcaagaaacattgatcggaagaactttgtgtacattgaatacttgctgagaagagggaagaaacagcttgagcagctcaaggaccctgatattactggactatcaacccttgaaattaataagcaactttctggagttcgttcatttggctatgtgaattctagatggatttccttggcacctaattttattatgaatcagacatatgattcatgtatggaaaatttttgatgacatcaagagtaatagagccagagttcgctgtgtgggcgtgcatgtgcctgagaatg

SEQ ID NO: 83691 - DNA, 447 bp, Oryza sativa
  Clone ID: PAT_MRT4530_82999C.1
gttctagtttgagttaactgatggcttaatatgtgtatttacctttcaaaatccccttgccttcttattctgagcaaaagtgggaaatgaccagttaaatttggtccttacctctcactagtctgtctggaacgctggacatagtatagaacctttatgttttattcaaattgaagaccaattctacctccaacaatatatgaaactgttattaatagatgctagtactatatcctgctatgaagggctgtaaaatgaaatcacaattcgggtatgctaagttatgcacatcatcgatttggtctcaggtgggacgtcttaagctagaccaaacccaaatactgtctagctactcagcgaacatgtggaataacatgatgcattgcacattacttatgatcttgatcaatttcacttaccgctgtttatactttatataacagaaga

SEQ ID NO: 83692 - DNA, 423 bp, Oryza sativa
  Clone ID: PAT_MRT4530_8299C.1
atggaggtcgcgctcggcgggctcgtcgtcgctcgcccggcgatgaagcgcttaagacggagccccaggccctcagcagctgcagttgcgcgcgcaccgcgcctcgcagtccgccgacggcgagtgctgaaacggcaggagctccttgttagccagctccacgagctgcctccgcacctcccagtacagcccgccgacctcgccgctcgtgcagccgccgccgccgacggcgcataccgagccgtccgtcgtgttggccaggcactcgcaccaggcgccactctggatttggagggcatggggatgccggtgacgaaagatggtgcggctggcgacagcggctccccgggaggcgccgtgctgctcaccggtaacgtcatcgtctgggccggcacgtcggtcctcttcctctacgccggctaa

SEQ ID NO: 83693 - DNA, 879 bp, Oryza sativa
  Clone ID: PAT_MRT4530_829C.1
agcgcctccaccgatctcgaattctctcgatccaggcaaggagggaggaggatggcgaggggcgagaacaacaccggcgcgcacggcagcggcaacgtgcctcctcccgccaccgccgcgtccacggcggcggggacggcggccgcgtccgggaagcagcaggcgcggggggcgggggcggaggggcagtcggtggtgcggcggctgcagtcggagctgatggcgctgatgatgggcggcgacccgggcgtgtccgcgttcccggagggggacaacatcttcagctgggtgggcaccatcgccgggtccgccgcgacggcgtacgagggcacctcctaccgcctctccctcgccttccccggcgagtacccgtacaagccgcccaaggtgaggttcgaaaccccctgcttccacccaaacgtggacgcccacggcaacatctgcctcgacatcctccaggacaagtggtcctccgcctacgacgtccgcaccatcctcctctccatccagagcctcctcggcgagcccaacaacgactcccccctcaacacccaggccgccgccctctggcctaaccaggacgagttcaggaagatggtcgagaagctctacaagcccaccgcgtagaagttggtggcgccttcgcccggcgatctgatctggccttctcaccttgaatcgatgatgattcgaatgcgattgttgtgcgagtcggattggaactgttcgatctgtaatttttttttgttggttgtttgaatgattcatttgtttcgatgtaaaaaaaataacaaacgacaagatgtggtcatactggaatttataaattagaaacaaattcaaacgaatcaaaccccaaaaaaaaaaaaaaaacaaggg

SEQ ID NO: 83694 - DNA, 1938 bp, Oryza sativa
  Clone ID: PAT_MRT4530_82C.1
caatgtacatcgctgtcagtataatcctcatctgcattgatgctgcatccggattctcactctgcccctgcgaaaaaaaggcatatcttgtctttagtcatgtctagttataaacactaaactaaaacctgggaaaattgcaaccagaaagcatagaagattgaatcgagaagaaaaaccacaatgaatctgaacaacgtggggaaaaaaggcctgatcaccgatcatgcaaacatgaaaaaacaaaaacgaaaaaaagagaaagggaatagatcagattggcatggcagcaccaaagacactattcctttcatgggggatgcagacttcaatcacgcagacgagttcggggttgttgatggtgtcgcttgtgaaggaacgcagatggcgccggccctcctcctcctttgcccgcaccaacaacttatgcaaatccaatccaaatgttgctactacacctcctcagcgtcctccacgggcggcggacgagggcagcgggcgtgggcgatggtggcgatctggaggccgcctgcggacaaaggcggaacggcggccgccgacgaggacgaaggatgttggctcctccgtatagctcgccaacgtggagcagatcggcagcggtggaagggaagccggtggagaccatgggcggaagaaaggcaggcgcccttcgtcgtggagcttgcctccagatccaggcggcgtgatggcctctccccggttcctactaccaggagtagttactccctccttttaacgggtcaggaagctctatggcaagaatacaggcagaaagtttctgcttgggtaactgaatcccgttctcttataggaagctccctggcaagaatacaggcagaaagtttctgctcgggtagaaacaggaacgggaaaggaagcataaaattcatcctcaggatcaaggacttgttcgttgatgaatcccatgagttgttcttgaaccgccatgataaattccttgtgtgtgaggcctccaagtcgaagagtaaaaagacccagtggaatctgcaatgcagctctataaaatgcaacattgagaccatctggccctggggaggcatctctttacatttgcttcagaatttccaggatgtcattttcagaagggatttcagggggaggaaaaattacatcattgtcattttgatccttagaaggagtggcatcatctgtattggagctttgaaagagattttcaaaccaccaattttcaaacatgaaagatcttttaggcctcctgttcttcggattgagaatggcaatgatgggagcatgatcaccatacaacatgggcaagtgataaacagtggtatttggataattaaaacaccattccacatttgcaagacatctgtccaacctttccaaaaccagatccttaccctgttgcttattggaccaagtggtccatcagaggcatttttggatatggaggaatccaacaaaaattcaattgtggaaaaattcaggcaacatttttcttctcctcaattcaagaacattcaagaacagcagaagcagcaagagagaggaagtgggaccagccagtcattaatgcccaagctagattggaaaaaagcgagtgagaaagctttgactttagctggctgcagcactgttcaagggcccccaagtcaagctgttcacactaccacagcaagcaaacaatgtgagaaaaaagacaaagaacctaatatgcaaagtacaccagaagttggtaccgaagagatgttggtacatggaagtacagtgaaaaagaagctggtttctagtactatagaggatcatgtcagctgcaactcaaagaatgtcaatactgttggtaaggtgcatcagatggaaccaatccagtctgttcctttggttcaccgagtttcacctagtgcaagtgcccatcagaacagatttttgacttag

SEQ ID NO: 83695 - DNA, 745 bp, Oryza sativa
  Clone ID: PAT_MRT4530_83000C.1
ctccgccttccccttcgacggcgcggcggcgaggcgcagcagcggagcggctccggcggcgaggatctgaggcatttggggcactgcgtctttgattacagcaacaataacatcaccaatacatcaggatcagaatttggaggctgccaaataggcacttacatatctttgcaagctttgatggttgcttgacaaggatgaaatggcctcccgttcaaagttatctggtattcagaggcaggtattggcattgtacagaggattcctgcggacagcaaggctcaagtctccagaggagcgccacagaattgagtctgttgtctcagcagagttccgtgagaatgcaagaaacattgatcggaagaactttgtgtacattgaatacttgctgagaagagggaagaaacagcttgagcagctcaaggaccctgatattactggactatcaacccttgaaattaataaggcttcttctttgcactagcaaagtgtaaaccatgtgtttggtgtttgcacaaggaggaaatgaaataggaatgtatttcttttgatggtatgcaaggaacataatgatcatcatgtatcaaaactctttatgcagcaactttctggagttcgttcatttggctatgtgaattctagatggatttccttggcacctaattttattatgaatcagacatatgattcatgtatggaaaattttttatgacatcaagagtaatagagccagagttcgctgtgg

SEQ ID NO: 83696 - DNA, 172 bp, Oryza sativa
  Clone ID: PAT_MRT4530_83001C.1
atgccggagcttggcgcgacgtcgaagcagctcgaccaagacaatgtggagaagaagctagagcaagacaaagataatatgatggatgatatgcgagcaaaggagttgctcaaccatgctctgctcatcaaggaacgacgagtttcaggccgtccggaaacaactcatacat

SEQ ID NO: 83697 - DNA, 5082 bp, Oryza sativa
  Clone ID: PAT_MRT4530_83002C.1
atggaggtggcgccggagacgctcgacaccctgtcggggtggttcgcgcagtcgctctccccggacgccgccgcgcgccgcgccgccgagcagagcatcgagtcggccaagtgctcgccggggttcgggctcgcgctcctcggcctcgcctcctccccgcgccacgacccgcagtcgcggctcgccgcctccgtccagttcaagaacctcctccgccgccgctggcccaagccctcccccgacggcggcggcgacgacgacgccgaccacctcccgccctccgactgcgccatcatcaaggcgaacctcctccagctcctcctcaccgcgccgcccctcatccaggcgcagctctccgaggccctcgccgccgccgcggcctccgacttccctgccaggtgggagtcgctcctcccttccatcgtctcctccctcggcaccgccctctccgccggggacatcccggcgaccaactccctcctcgccgccgcggcctccctcttctcccgcttccgcaatgccttcgacagcaacaccatccgcctcgacctcaagtactgcctcgagaacttcgccgctgccctactcgaggtcttcctctccacctcccgccgccttcaggctgccgcacccacggtcaccccgcctgaatcccgcccggtgtttgagtgccttcgcctatgctgcgagatcttctattcgctcaactccatcgacctgcccgagttcttcgaggaccacatgcgtgagtggatgacggagttccgtgcgttcctcaccacctcctacccgccagcgatagaggcagacggcgccccggatgcgctccgcgccgccgtgtgtgacaacttgcagctgtacatggagaagtatgaagaggagttcaggggatatctgaaggagttcgttgaggcggtctggggcctcctcatggcaccatctgtctcaccatcccgcgggcagcttgcggtgaccgcaataagatttttgacaacggttgctgagagcgtgcaccacgcgctgtttgggagccctgatgcaatgaagcagatatgcgatagtgttgtaattcctaacctgcggttacgggatgatgatgaggagctgtttgaggggaactgggtggaatatgttaggcgtgatgccgaggggagtgatgcggatacactgaggcgggctgcatgccggttgctgcgggggcttgcggcaaactaccgggagcaggtggctgcacttgtgtcagcacaggtccagcagatgttggctgcatatgcagctgatcggacgaacaactggaaagagaaggatgctgcaatataccttgttatttctcttatgcagaagcctggtgccacaggaggtgggacaccggtggttgatatggagagcttctttacatctgtgatcgtgcctgagctgcaggcccctgattgggaatctgaaccaatgctgaaggcaactgtgctgaggttcttgaaggaattcaaggatcaaatccccaaagccactgcactggcactgcttccaagtgtaataaggttcctgatacacgagtcaaatgttgtccattcatatgctgcgacctttattgagaaccttctgatcatcaaggatatggtaccagtaccaagtgcaaatgtgattaccagggctccacgctatgttgctgctgatatcaacccatatgcccagccgattgttcagaacctgtccaaggcactaagttttcctgaatcatatgagaacccctatctgatgaagtgcctgatgagagtgcttgggattgctaatattgctgggcaaattgttcatgagattactgctcgccttgtgggtattcttatggaagtgtgcaataaccccaagaaccctgattttaaccattacttgtttgaagccctggcagcagtgattggtcgggctggtgagcaggacccagcactacttcctgtgtttgaggcaagcctcttcccggtgcttcagaggatattggttgaggacatctcagagttctggccatatgctttccagatatttgcacaacttgtcaatttgagccgaccacctctctcgcagaactacatgcagctgtttggtgtcctgctcagtaatgctacctgggaccgtccaccgtgtgtccctgccttggttcggttgctgagagcattccttcggaaaattccaaatgagcttaaccaagagggcaggctaccgaatatcttagtgatattccgcagtctcctttcgcggagcagtactgaagattctgccttctacatgcttaacacacttgtggaaaatgtgagttttgacatcatgaatcctcacataaatgagatatggagtgctttgtttactcgactacagacaaggcaggcagtgaagtttgtgaattctcttgtggtcttcatgtccttggtggtggttaaatatggaccaggtgttcttgtcagttctgtcgatgcaattcagccaaatattttcatgacaatccttcagcgcttttggattcccaatcttaaattcatcaaagggactgttgaagttaagctgacatcagttgcatcaacgaagttgatctgtgaatctgcactgctgttggatggtgcagcagcccaaacttggggcaaattgcttgacagtattgttgcattgctgtccagaacggatcaagatggggcacaacaagatcagaatgatggtgctgatgcagatagtcagaggacatcaggttattctgtctcatttgtacgtcttcaatatgctggaaagagtgaagatgatctgttgaaagagggagatttggtcctatcattgagcagaacgtggatcctgcaaacaaaggcgctcttattcaactttgtgcagcttacaataccaacattgtctagtttctctaaacctcctctgaatgtttcaggagccaatggctttgctgtaaggcatttgcattgtttccatggggttttgtcaaaggatgtctcaggggagtctatcggtcggtcggtctatcgggtcaagctggtcttcggtttcatccttgcaatatttctggcatgtgtaggcaacattgaagaccaaaaagaaagcaagaatcatatggataccgagagcatccaggatggtgatgacatcctgctgtcaggtggagacgacgacaggaatggagggagtatcgcggagattcagacaacggtggacctcggggtcgcatttggctcggagaagctgctgaatttggagatgctgctgatggagatcgcccatcgcgcaactgagatcgagcccctcgtgctggatgcagagtcgatatcggccgagtcggttcagagggtttctgaattcgacctcttgcattgtatcctagattcagaggtcaaggagttggagaaattagttgattccattgaagtggatatcgggaatggtggaaagatgatggcttctgatgaagatccggtgagtgaggtgaacagcaagctccgagatgcagccgtgtctttgaaccagatgcaggaccttatttctgctattagaagacaatcggcaaactttgtgaatgtcatagacccttctcaggacaactctggaactagtgaagatggtggatacgaaaatggtcatggttcatctcgctcagccatgcctgccgaggaacaaagaaatactctgcagctgttaaatcagtcaatagcaagtgaactggatctcggaaagaagttacatgattcggagtccgttgtggaagagctcaagcttaagctgcatcatgtagaacatgaatcgtatttcttggaggaatctgttgaagcgatctctgaaagaatgtttgcagctgaaaatgcatctgaattgtttcttggagcgtcaaaggaacttatcggtaaagttaatacaatacagttccacctaagtgcatcaattcgtcgggaaggtgaccttaaatcaaagttagagcaaagcttgacagaatcgaatggttctaatagcactctagagaagatgaaacaagacagtgaaaaggaagtgatgccgactcaagcccaaccggactctgagttcttgactttgcaggataaaattcagcaactagaggaatggctgagggaatctaagtctggattgccattgacaattgcatcaacaggagaaaatgaagtcggcgaagatgagatgagcacattcgaaaatattgttaatgatattaaagatgctgttttcagagcagaaagtagaacacagaatgctgaagcaaagtgcaaacaactttctcacgctaatatacaactcgatgaggagctaaaatccctcaaaagtcaggggtcagatagggctggcttactggaggagaagcttaaggagtcagaaactcagttactgcatgcaaaagcatcgattgaggctattgtcgaacggcacagtatatttaagtcttcaatgtctgatatggagcaggtgattgatgatctaaaggaaaaatatttgaaagctgaaaccagagctgagaatgctgaatcaaaatgtacattgctgacagacactaacttagagcttagtgaagagttgtcatttctgagaggtcgagtagacactttagagaattcactgtgcaaagccaaccaactgaagatgtccgcagcaaaagatattggcattaaaactaaaactatcactgacttagttgcaaaacttgcattggaaagagagtgccttcatttacagattgttacactgacgaagaagaacaggatgttggctcaaaagtgcaaagaaaatattactgaagttacactactaaacaacaaaattgctgccagtgaaggtgaactcaagactactaaagtaatggaggaaatggtctcagattcttcacctacacaaaccaaggtgaagagagttgctgacactcttggagaggaggaagatgagattactgctccaccagaggataattccggtgcctgcagcacacctaacacgtcttgctggttgctgttctcgtctgcctaccgtaccaatgaggtgaccatgtcctatgatctattaacgcagcttgtaggaccagatagaaagcaggaatag

SEQ ID NO: 83698 - DNA, 1080 bp, Oryza sativa
  Clone ID: PAT_MRT4530_83003C.1
atgcggctcggcggcggcggcggcggtggcggtttcatgctcgggtgcggctgcagggatgccaaggctgtggcagtggcggtgtccgccacgtcgccgtgttccgccgccacggagacgtccacggccaccacggcgacctggcgcagggcccggacgcacccgtcggcgtcggcgtcggcgtcgacgggcacgctgaccgtgccgtccgcctcgtcgtccttcctgtgggacgatgccgacgctgaggccgacggcgaagaggtcgacttcaagcgggagagctctgcgaccacgccgagcttctccggccttctgcggcagctgaacgagctcgagcagagcgtcatgacgtgggggtggaagagccctcgccgcggtaatcacttctcgccaccgccgccgcctcctccgccaccgccgttacctttacggccagtcgtcctgcaccgagctgtggacgccggcgggaagcgcagcaacaaagaagacgatgccaagttctcttcgccaccgccgtcttcccattgcccgacgacccagctgcaccggaaggtgaagagcgttgaccaacgaaacagagaagatgatgaagcccacttcgcgccaccggcacctccgccattgcccttgccgccgcagcagctgcggaacgtgaagggcgtggacaaaggcggcagcaaagaagacagcaagcactgtccgccaccaccgcaggcgccgaagcaccggaaaacgaagagctgcgacaacaacgacggcttcaccgccggaaagctcgacgggagcttggcggtggtgaaacagtccgaggacccacgcggcgacttccggcggtcgatgctgaacatgatcgtggagaaccgcatcgtgaccggcgacgagctccgggagctgctccaccgcttcctcgagctgaacgcgccgcaccaccacgacgccatcctccgggccttcgccgagatctgggacgaggtgttcgccgggccggacgagccccgtcacggtcccccgaggccgccgccccggcagagaacgccacctcgccgccggcaccctctaccggcttggcgcctgtag

SEQ ID NO: 83699 - DNA, 3050 bp, Oryza sativa
  Clone ID: PAT_MRT4530_83004C.1
atggaggtggcgccggagacgctcgacaccctgtcggggtggttcgcgcagtcgctctccccggacgccgccgcgcgccgcgccgccgagcagagcatcgagtcggccaagtgctcgccggggttcgggctcgcgctcctcggcctcgcctcctccccgcgccacgacccgcagtcgcggctcgccgcctccgtccagttcaagaacctcctccgccgccgctggcccaagccctcccccgacggcggcggcgacgacgacgccgaccacctcccgccctccgactgggccatcatcaaggcgaacctcctccagctcctcctcaccgcgccgcccctcatccaggcgcagctctccgaggccctcgccgccgccgcggcctccgacttccctgccaggtgggagtcgctcctcccttccatcgtctcctccctcggcaccgccctctccgccggggacatcccggcgaccaactccctcctcgccgccgcggcctccctcttctcccgcttccgcaatgccttcgacagcaacaccatccgcctcgacctcaagtactgcctcgagaacttcgccgctgccctactcgaggtcttcctctccacctcccgccgccttcaggctgccgcacccacggtcaccccgcctgaatcccgcccggtgtttgagtgccttcgcctatgctgcgagatcttctattcgctcaactccatcgacctgcccgagttcttcgaggaccacatgcgtgagtggatgacggagttccgtgcgttcctcaccacctcctacccgccagcgatagaggcagacggcgccccggatgcgctccgcgccgccgtgtgtgacaacttgcagctgtacatggagaagtatgaagaggagttcaggggatatctgaaggagttcgttgaggcggtctggggcctcctcatggcaccatctgtctcaccatcccgcgggcagcttgcggtgaccgcaataagatttttgacaacggttgctgagagcgtgcaccacgcgctgtttgggagccctgatgcaatgaagcagatatgcgatagtgttgtaattcctaacctgcggttacgggatgatgatgaggagctgtttgaggggaactgggtggaatatgttaggcgtgatgccgaggggagtgatgcggatacactgaggcgggctgcatgccggttgctgcgggggcttgcggcaaactaccgggagcaggtggctgcacttgtgtcagcacaggtccagcagatgttggctgcatatgcagctgatcggacgaacaactggaaagagaaggatgctgcaatataccttgttatttctcttatgcagaagcctggtgccacaggaggtgggacaccggtggttgatatggagagcttctttacatctgtgatcgtgcctgagctgcaggcccctgattgggaatctgaaccaatgctgaaggcaactgtgctgaggttcttgaaggaattcaaggatcaaatccccaaagccactgcactggcactgcttccaagtgtaataaggttcctgatacacgagtcaaatgttgtccattcatatgctgcgacctttattgagaaccttctgatcatcaaggatatggtaccagtaccaagtgcaaatgtgattaccagggctccacgctatgttgctgctgatatcaacccatatgcccagccgattgttcagaacctgtccaaggcactaagttttcctgaatcatatgagaacccctatctgatgaagtgcctgatgagagtgcttgggattgctaatattgctgggcaaattgttcatgagattactgctcgccttgtgggtattcttatggaagtgtgcaataaccccaagaaccctgattttaaccattacttgtttgaagccctggcagcagtgattggtcgggctggtgagcaggacccagcactacttcctgtgtttgaggcaagcctcttcccggtgcttcagaggatattggttgaggacatctcagagttctggccatatgctttccagatatttgcacaacttacaaggcaggcagtgaagtttgtgaattctcttgtggtcttcatgtccttggtggtggttaaatatggaccaggtgttcttgtcagttctgtcgatgcaattcagccaaatattttcatgacaatccttcagcgcttttggattcccaatcttaaattcatcaaagggactgttgaagttaagctgacatcagttgcatcaacgaagttgatctgtgaatctgcactgctgttggatggtgcagcagcccaaacttggggcaaattgcttgacagtattgttgcattgctgtccagaacggatcaagatggggcacaacaagatcagaatgatggtgctgatgcagatagtcagaggacatcaggttattctgtctcatttgtacgtcttcaatatgctggaaagagtgaagatgatctgttgaaagaggtaaatgatccaaagcagtttctggtcacctccttggctactctttctgcgcaatctccagggagatttggtcctatcattgagcagaacgtggatcctgcaaacaaaggcgctcttattcaactttgtgcagcttacaataccaacattgtctaggagccaatggctttgctgtaaggcatttgcattgtttccatggggttttgtcaaaggatgtctcaggggagtctatcggtcggtcggtctatcgggtcaagctggtcttcggtttcatccttgcaatatttctggcatgtgtaggttggtcttgggagaggaaggatgtcgaaatcatatagtggtggaaaaacatgaacattgtggtggaggatgtctctttgattggaatttggaattttcttttttggtgtggaagaggtttgtttcccccggaaaacatgaacattgtggaggataccccgagaatattgccagcgtaggcatgtgccatcctggtggaactttgctgtaatttttttgcccttgttggctgaatgccttgctctggcgtaggaaatggtatatggcgtgggagt

SEQ ID NO: 83700 - DNA, 1685 bp, Oryza sativa
  Clone ID: PAT_MRT4530_83005C.1
ccacgcgtccgcgcaaatttcctcgaccctcgatccccccccttctccctctctctctctctctctctctctcccggtgatcgcgacgccaacccgcgctcgcgccgggcaacattgaagaccaaaaagaaagcaagaatcatatggataccgagagcatccaggatggtgatgacatcctgctgtcaggtggagacgacgacaggaatggagggagtatcgcggagattcagacaacggtggacctcggggtcgcatttggctcggagaagctgctgaatttggagatgctgctgatggagatcgcccatcgcgcaactgagatcgagcccctcgtgctggatgcagagtcgatatcggccgagtcggttcagagggtttctgaattcgacctcttgcattgtatcctagattcagaggtcaaggagttggagaaattagttgattccattgaagtggatatcgggaatggtggaaagatgatggcttctgatgaagatccggtgagtgaggtgaacagcaagctccgagatgcagccgtgtctttgaaccagatgcaggaccttatttctgctattagaagacaatcggcaaactttgtgaatgtcatagacccttctcaggacaactctggaactagtgaagatggtggatacgaaaatggtcatggttcatctcgctcagccatgcctgccgaggaacaaagaaatactctgcagctgttaaatcagtcaatagcaagtgaactggatctcggaaagaagttacatgattcggagtccgttgtggaagagctcaagcttaagctgcatcatgtagaacatgaatcgtatttcttggaggaatctgttgaagcgatctctgaaagaatgtttgcagctgaaaatgcatctgaattgtttcttggagcgtcaaaggaacttatcggtaaagttaatacaatacagttccacctaagtgcatcaattcgtcgggaaggtgaccttaaatcaaagttagagcaaagcttgacagaatcgaatggttctaatagcactctagagaagatgaaacaagacagtgaaaaggaagtgatgccgactcaagcccaaccggactctgagttcttgactttgcaggataaaattcagcaactagaggaatggctgagggaatctaagtctggattgccattgacaattgcatcaacaggagaaaatgaagtcggcgaagatgagatgagcacattcgaaaatattgttaatgatataaagatgctgttttcagagcagaaagggtcagatagggctggcttactggaggagaagcttaaggagtcagaaactcagttactgcatgcaaaagcatcgattgaggctattgtcgaacggcacagtatatttaagtcttcaatgtctgatatggagcaggtgattgatgatctaaaggaaaaatatttgaaagctgaaaccagagctgagaatgctgaatcaaaatgtacattgctgacagacactaacttagagcttagtgaagagttgtcatttctgagaggtcgagtagacactttagagaattcactgtgcaaagccaaccaactgaagatgtccgcagcaaaagatattggcattaaaactaaaactatcactgacttagttgcaaaacttgcattggaaagagagtgccttcatttacagcctttttaa

SEQ ID NO: 83701 - DNA, 2516 bp, Oryza sativa
  Clone ID: PAT_MRT4530_83006C.1
gcaccgccctctccgccggggacatcccggcgaccaactccctcctcgccgccgcggcctccctcttctcccgcttccgcaatgccttcgacagcaacaccatccgcctcgacctcaagtactgcctcgagaacttcgccgctgccctactcgaggtcttcctctccacctcccgccgccttcaggctgccgcacccacggtcaccccgcctgaatcccgcccggtgtttgagtgccttcgcctatgctgcgagatcttctattcgctcaactccatcgacctgcccgagttcttcgaggaccacatgcgtgagtggatgacggagttccgtgcgttcctcaccacctcctacccgccagcgatagaggcagacggcgccccggatgcgctccgcgccgccgtgtgtgacaacttgcagctgtacatggagaagtatgaagaggagttcaggggatatctgaaggagttcgttgaggcggtctggggcctcctcatggcaccatctgtctcaccatcccgcgggcagcttgcggtgaccgcaataagatttttgacaacggttgctgagagcgtgcaccacgcgctgtttgggagccctgatgcaatgaagcagatatgcgatagtgttgtaattcctaacctgcggttacgggatgatgatgaggagctgtttgaggggaactgggtggaatatgttaggcgtgatgccgaggggagtgatgcggatacactgaggcgggctgcatgccggttgctgcgggggcttgcggcaaactaccgggagcaggtggctgcacttgtgtcagcacaggtccagcagatgttggctgcatatgcagctgatcggacgaacaactggaaagagaaggatgctgcaatataccttgttatttctcttatgcagaagcctggtgccacaggaggtgggacaccggtggttgatatggagagcttctttacatctgtgatcgtgcctgagctgcaggcccctgattgggaatctgaaccaatgctgaaggcaactgtgctgaggttcttgaaggaattcaaggatcaaatccccaaagccactgcactggcactgcttccaagtgtaataaggttcctgatacacgagtcaaatgttgtccattcatatgctgcgacctttattgagaaccttctgatcatcaaggatatggtaccagtaccaagtgcaaatgtgattaccagggctccacgctatgttgctgctgatatcaacccatatgcccagccgattgttcagaacctgtccaaggcactaagttttcctgaatcatatgagaacccctatctgatgaagtgcctgatgagagtgcttgggattgctaatattgctgggcaaattgttcatgagattactgctcgccttgtgggtattcttatggaagtgtgcaataaccccaagaaccctgattttaaccattacttgtttgaagccctggcagcagtgattggtcgggctggtgagcaggacccagcactacttcctgtgtttgaggcaagcctcttcccggtgcttcagaggatattggttgaggacatctcagagttctggccatatgctttccagatatttgcacaacttgtcaatttgagccgaccacctctctcgcagaactacatgcagctgtttggtgtcctgctcagtaatgctacctgggaccgtccaccgtgtgtccctgccttggttcggttgctgagagcattctttcggaaaattccaaatgagcttaaccaagagggcaggctaccgaatatcttagtgatattccgcagtctcctttcgcggagcagtactgaagattctgccttctacatgcttaacacacttgtggaaaatgtgagttttgacatcatgaatcctcacataaatgagatatggagtgctttgtttactcgactacagacaaggcaggcagtgaagtttgtgaattctcttgtggtcttcatgtccttggtggtggttaaatatggaccaggtgttcttgtcagttctgtcgatgcaattcagccaaatattttcatgacaatccttcagcgcttttggattcccaatcttaaattcatcaaagggactgttgaagttaagctgacatcagttgcatcaacgaagttgatctgtgaatctgcactgctgttggatggtgcagcagcccaaacttggggcaaattgcttgacagtattgttgcattgctgtccagaacggatcaagatggggcacaacaagatcagaatgatggtgctgatgcagatagtcagaggacatcaggttattctgtctcatttgtacgtcttcaatatgctggaaagagtgaagatgatctgttgaaagaggtaaatgatccaaagcagtttctggtcacctccttggctactctttctgcgcaatctccagggagatttggtcctatcattgagcagaacgtggatcctgcaaacaaaggcgctcttattcaactttgtgcagcttacaataccaacattgtctag

SEQ ID NO: 83702 - DNA, 544 bp, Oryza sativa
  Clone ID: PAT_MRT4530_83007C.1
aaattttataaactcaattttgttgccattcaagcacccagacctctgatctagatttggaagaccaagtgtgcaatgaaaataaaagtctttgcttggttattcttctgggacaggttgaatacaagagatatgttggataggagacactgtgccaaagatgacgacgatctatcatgtgtactgtgcaacactaaccaaagggaaaccagagatcatctcttctttaactgtccatttagcactacttgttggcaatttctgggaatttcatggaatgctaatcttgaattttaccaaaggatagctcttacaaaatggtagttcaatcagcctggttttctggaaatcttctttatggctgcctggcacatctggaaacaacgaaatgggctcatcttcaggaatttccagccgaccttccattcttgagagaccgaccttccattcttggaagtctctctttacaaatgaaattcttctgcatctctgcagaatgaaggatcccctgaagcaatctaatgttaattggttacaatcttta

SEQ ID NO: 83703 - DNA, 1308 bp, Oryza sativa
  Clone ID: PAT_MRT4530_83008C.1
atgggtgaccacggcgaggtcgtcgacgtcgtcgtctgtgagatggaaaatcaggccgtgtcggagatgcatgtcgttatggatttggaaggcacgaccaagaggataccgccgatgcagacgccgagggcgcggctgctgcgcagctgcggcgagtccatcctggccatggcgcgcggggcgtaccggcgcgtggaggcgatgcggtgcccggtggggtgcgtggccaggggcgcctcccgcgcggcggccccggtgctgagcccgctgcggctgaggtgcctctcggcgctcgccttcgcggacaggcagctcctcgtcgtccaggacgtcgccgcggtgctcttcccggccgccgagcgcgtcctcggcaggggcgccgacgacctcgtcctcctcgtcgagtccctgcccgccaggctcgacggcgcgatcgacgccctcgaggccctcctcgccggcgccgcggggctgttcgttctccccaagcgttgccgccgctaccgagcccacgaggacgatgacgacggcgtcggcggcgccgtctttagggacatctggtgcgacgagaaggaagccgcgtcgttgcaccgatcagcaatggaggaagaggcgcggaggcattccgacgacgatgggctcggaaggaactcgagagcttggaggtcgtcacggcggacgacggcggcggtggcggtggcaacaccgtgcatggcgacaaggctcccgtcgacggcgaaggagaggcggcgactccggcgaaacgcgccgacgcatcaggtggccaagaatgcggcgtggtccacgtggaggatgtacagcgggtggagacgccagctgcagagatcacggatgccatgaaggacagcacggagatcgtgaaggatgaggaccaggagagaggaggcagcgagagggaagaagaggaggccgtcgccatggcccgcacggcggagagcagggaggaagcattgctgggtctcttcgatacagcatggcagcaggggaacctccttaccggcgggagcggcgggacggcgggcccgtcccggcccaaggttagaacaggacttactggcagtagcagatggtgaaatttgtggtggcaatggcggcaacggacaaatttctcggctaaatccttttcaagcggagaaacagcccatctcacaaatcacaatcctgcatcgccatcctagctcaacagaaaaaaaacagcgccagccgaccgacgctagtgatagtcctacagatgagcaccctacaaatcacgcgctgtccctggagcggaagccggtgagcccgtga

SEQ ID NO: 83704 - DNA, 1309 bp, Oryza sativa
  Clone ID: PAT_MRT4530_83009C.1
gtggatccccgggctgaggaatcggcacgaggcctcctgctacggacactttcttccatttcttcttccctctcctccgcggcccgcgccgctccggccacctcgccgccggtcaaagcgcgcctcgtcggagcccaaatcggagcgcgaccctaacggaggcttcgcttcagatgcgccgccaccgccggccacgcgccgccgcagcacgccgcagatgagccccgacgcgacgggcgaggccggcggcggcggaggcggaggcggggacctgttcgccgccaacctcaagggctcgctcctcgccgtcgcctcctccgccttcatcggggtcagcttcatcgtcaagaagaaggggctcctccgcgccggcgccgcgggctcccgagcaggtgttggaggatatgggtacctcttggagccgctctggtgggtcgggatggtcactatgcttgttggggagattgccaacttcattgcttacatgtttgcacctgctgtcctcgtcacgccgctaggagcactcagcataattgtgagtgctgttctggcacattttacactgaatgagaagttacagcgggtgggcgtgctgggatgtgttctttgtattgttgggtcgacggtgatcatcctccatgctccccaagagaggaccccaagctcagtggatgagatttggcacttggcgatacaacctgacttcctttgctatgctaccgctgcagtagcagtatctctgttcctgatgatatattgtgctccacggtatgggcagatgaacataatggtgtatgttggaatttgctcagtgattggatcattgacggtaatgagcattaaggctgtgggcattgccattaagcttacaattgagggcataaaccaggctggctactttcagacgtggctgtttgcagtgatttcaattacatgcatagctgtccagttagtttacctgaacaaggcgctggatactttcaatgcagcagttgtttcacccatctattatgccatgttcacaaccctcactattttagcaagtgcgataatgttcaaggactggtctgggcagagtgcaagcaaaattgcatccgagatttgcggatttctgacagttcttgctggtactcttgtgctacactctactagagaacctgatcaaactctttcggcagacctgtatgcacctcttcctccaaagatatactggcacatccaaggaaacggggatataggtaaacaaaaagaggacgactcacttccctgtgacattataactgtcatgcgtcaagactactttgtctag

SEQ ID NO: 83705 - DNA, 4432 bp, Oryza sativa
  Clone ID: PAT_MRT4530_8300C.1
atgaagcggcagaggtcgtacggagatgacatggacgacgaccggaggaggttctacgaccgaggacccccgccgccgccgccggcttcgcggcggcggccgggggactacgacggcgatgggttcgaccgccggaaggggttcggcggcggcggcggcggtggcggtggtttctacgaccaccggtacagggagtccccatctccgcgagggtacggcggggaccgggcgatgcaccggtccgagagcttctcaggcttccggcgggagttccccaaggggttccgctcggagcgcgaccggtctcggcgggacggtggcggcagctcggcgtggaggcggcagagcggcgggtggagggattcggaaggtttggacgggtacagggcggcgcccaggcggtccggggcgtcgccgccgacgccgccactgcggttgcccagtgagtctagcaggaggtttgatggtgcgagggtggagaagtccaggaagcagagctttggcatcagcgagatggaggaaggggaggttgcgccagatcccgagaccaaggcccgcgctgctgcggtggatcaccggaagcagatcgagttttctgggcatgccaaggagaaaggaccggagcgcggtgaggtgaaaaaagtggaatccggtgtgagaggggatttaggagctcatggtaaaggagtggctggttcatctgctgctcgcaatgcagggagggaagaagggaagatcaaggatagtatgattgcagaagcaggaacggtaactcatacaaggcatgaaaaatccacctcagatgccgcagtatcaacggggagaggacatgaggtgcaagggcaagatgaggctgccaatgctctcaatcaagttggacagtgcgtttcatccagtggaagtcacaaggtgccacaggaggaaacgatgatacgggatgaggctgccaacgttgttgatgcgattgggcagagcacttcgtctgatatccagcaggaagctgtttgtgagaaggcggctgtacgagatgaaactgctaatgctgctgaggaagctgggcagagaacttcatctagtgtacatgaggaggctattcatgaacaggcaactatacggaatgaaactgctagtgatgttgatgaagctgggcagagcacttcatctaacatccggaaggatgctattcagcaaaaggcgactatacgagatgaaactaccaatgctgttgatgaagctgggaatggcacttcatctagcaaccaggaggcggctattcaggaaaaggtgcctgtacaagatgaaacaaccaacgctgttgatgaatctgggctgggcacttcatccagcatacatcaaggacttcaggaggaagcgatggcattagatgaagctgttgatgctgctgatgtggttaggaaggtcagtttgtgcggtatgcatcaagaagctcttctggggaaaacgagagatcaaactgccaatgatgttgacagggttgaatgtagtacttcatctggtcttctgcaggtgacaccacaggaaggaatggcatcaatagatggaactgccaatgctgttgagccagagaagattgattctgatatgttgaaggaaacgattgaaggagagctggtgctagatggaactgctgatgtggtgggagagggaaattcacctagcactgtaaaggaagcaatgcatggaaaaataactgcagaagacggttgtcccagtagtgctcttgaaatagctaaaaagtgcaagcagtcggctattacagaggaactggtacatgaaaaggtggcgacctctccaagccaaggggccccagaaatgaaaaaaaatgaaaaaggtactatatccagcaagaagatgagtgaatcatttgaacctgatgcgtctcaacatgtggaagaggcactcccgagggatggccgtgaaaatatagttgcattaagtgatactgaagtcccagaacaagaggcagctgctgagaacaaaactatcgagaaggaagtaaaaggtttttgtttggaagcaaactcagtaggtgctaatgtgttccttcaaccaagcaaggaatgtaatggggataggaaggaagagggtacagctttaaatttaattatggggaaacctagtgctgaagataaaggaaagggtatagcatttgatgtccttagtaaagaagaagacataggggtaggaagttcagtaggaagatcatttgacttagcactgcaacctgacattgaccgaacagaggtgctaaaatctagtgggactgtttctgtaaagcaggaagatgacacacctaagatagggaggcttgacctttcacttagcttatcaggttgtttacagaatcctgaattcaaatgctcagttcccagatctgaatctctagaccttgcaacatgctcccaaatgttgccatcatcatcgttccgcacaaattcagaagggttcacaggttctgtatcattgaccaattctcaaacatttgttcacaatcctagttgctcacttacccaacagtcattagacaactatgagcattcagtcggcagtaaacctttatttaagggtgttgataagttgagcgacagcacaagatggcaagctcagttgtcgaatgaatctactaagaagagggaacctaccgcagttcttcagaatacagtaaaatatggtaatctgccagacaagacctttcttggtgtgaatgtgcagaacaatgggatttccaaggacattcacaggcgcgcagggatctcaggtgttttgtcgccaactcatagtcgggattctcatgattcaggatttgaacaaagtagacatagaaggcagctcacaagagagagaagcagcagcagtcttacaaggggtgagcggcaggatgggcaacaacttgtccttaatggtgctggtgtcatcgaaaggattatttccaagatagtatcagaacctttgcatcatacaggaaggatgcttgacgagatgacaagcaattctgtaacatacttgagggaggccatttctgatatcatagctgatgcggataaaagagggcaggtggtagcattgcaggaggcacttaaaaaaaggtctgacttgaatagtgaaatgctgcaaaggtgtccacgcgtattgctggagatactcgttgctataagaactggtcttccagattttatgaagaaaagtaatagcattggtacatgtgatttggttgacatttttctgtatttgaaatgccgcaatctctcatgcaagagcattctaccagtagatgattgtgattgtaaagtttgccaacggaagactggtttctgtagttcttgcatgtgcattgtctgctcaaattttgacatggcatctaatacatgtagttgggttggttgtgacgtatgtcttcactggtgccatactgattgtggcctgcgccactctcttattcggaaggggggaagtggctcgagggcatatagtactaatgagctgcagtttcattgcgctgcttgtgggcatccatcagagatgtttggttttgtgaaggaagtcttccgaacatgtgctatgcaatggaggatggagactctggttagggagcttcagtacgtagaaagaattttttcttcaagtgatgatgcaaggggaaagagagtcagggactttgtaaaacagatgataattaaactggaaaacagggcctatcatcctgaagtagtgaaatatatcatggcgttcttttctgatgacaattctaacgctggtagtggtacatcagtaccactgaagggcattccatgcaacattgctgaaagaatagatgggattcctagttcaagtcgaaaggcaccatcatggctaccatcggtgaccctggagggagttccatttttagaaaaacaaggagtaatttcaaccaccgggagcccattaacgcttagaaaatttggcggaactgacttccagacagttgataataagcctactgttgatgaactggatgccctaatcaggttaaagcaggctgaagcaaatatgtaccagcaacgtgccaatgatgcacgcaaagaagctgagactctgaaacacgtcaccatggttaaacatgcacaaatagaggaacattatgctactcaaataggtgaactccacataaatgagttacaagagcaacgcaaaagaaagattgaagaactgcaagtcattgaaaggacacaccatcgatttctcagcatgaaaacaaggatggaaggtagtattagggaattattgttgaagatggaagcaacaaaacaaaattttagcacatgagccaagataacagctctgggttgaagataccaggatttactcaacttgcctaatgaaggttccatgtgattgagggcagtcttatcatcggtgcgtgccttactacata

SEQ ID NO: 83706 - DNA, 733 bp, Oryza sativa
  unsure (1)..(733): unsure at all n locations
  Clone ID: PAT_MRT4530_83010C.1
ccggccgggccgagagccccaaacccccaaacctacacaccgatcaaaacggaaacgcgcgccgcaccatctgtctcgccatgggtctcgtcgtttccgccgccgcctcatgtggtcgcctccgccgcagccgcagccgctcgccgcccccggctgtcctggatccctcccagtccccgttgtccttggagcgggaggccgagccggagctgatccgcgtcttccgctgcttcgacaccgacggcgacggcctcatctcggccgcggagatgagggagttctacgggtgctcggtggacgaggccgaggagatggtcgccgccgcggacagggacggggacgggttcgtcagcatcgaggagctccgcgcggtgatggagggcgggggattggacgcgctgcgcgccgcgttcgacgagtacgacgaggacgggaacggtgtgatcacggcggaggagctgcgccgcgcgctgcgtaggctgaacctcgacgggatggatctgacggctgagcagtgcgcggagatcgtcgcggccgtggacagcgacggcgacggggtcatctccttcgacgagttcaaggccatgatgagcaagcaggcgtgatccacccgaccggccatcgtctcgtcactcgccgcgcatcgtcgtatgtacctactactactgaacttangccccagntgttaatcaggattcgctttaggatttcgcattctaattgcttcgatcta

SEQ ID NO: 83707 - DNA, 603 bp, Oryza sativa
  unsure (1)..(603): unsure at all n locations
  Clone ID: PAT_MRT4530_83011C.1
ctgtcttattttgcgtccattatgaattcagaatgggatcagaagagatgcaatggctactcaaaacccagcataactatcatcaaatccgtggcctaaaaggctatgcgccgaattcagtgtagagtgtcagcttatagctgggagggcaaatgctcctcagaatatttcttttcctcttttgatatattgtgtagtttttgcatttgcacaaaagttagagataagaatggaacttacctagagctgttaacgagttgagacagggtttaggcgaaatttaagatagtgtattttagagaaaacatttgccctaactgttcttggggttgttcaagcctctattaagatcagacccagattagaaaccactataggcaaatgattctcgcacctgttgcctgtgctgtttgatgcctgtgcatgcttctgctgccaatcaatgcaatttctggaattgaagatgagtgttgtttcacatgcatgcacatgtaaaatgatgggactggattcaaaagcacagaaattatatgtatttgtactcaagcttataagcacctccaattgaaacccnctgcgaattctgtaaaaaaaaaaaaaaaa

SEQ ID NO: 83708 - DNA, 568 bp, Oryza sativa
  unsure (1)..(568): unsure at all n locations
  Clone ID: PAT_MRT4530_83012C.1
tggatggcaattccgtgactactatatacgtcnatgacgtatgcgtatnacgtgaccgncatggtgagttgtatgtataacacgtacacgtactctggtgacatttacagtattgtactagtagggcttggctgttgcgtagcctgtctgtatgatggatcatcgtacacctcaagttgtacgtgtctggttcagatgcgtgatcgcgattagtgatgatgatatntgggtatattatatatgataccgtgattattgacggtgatgtgatagaagggaagtctgacaggtgacaataatgacggtgaacgctggtgggtaggcgaatgtagcccccattttgcccttgcctagattactgattnactatatagagagggttgcaatgatatatgacatgtgatgatggtacgtgacttaggaggtggtgattttgtgacgtacactagattggtaatactgtgacatgtgtggtgacgccgtgacgtcgagggtattttgcctcacgtaggcgtttgagaaaaaaaaagaaaaaatttaaaagatttaaaaaaaaaaaaaaaaaaaa

SEQ ID NO: 83709 - DNA, 3148 bp, Oryza sativa
  Clone ID: PAT_MRT4530_83013C.1
atggctaagggaggtagagctttcatccaaagtaatttaggtaaatactgctccccgaatcattccttgccatttgaaagggaacgacaacgtcggggccaatctcatgtctgagtcttttacattcgcttatctaagtgataaggtagtaaccccgatgaacaaattcttcaaacatccaaacggaaatatcattgaagaatttgggattgtgcaagatgtgcctgtctgctttgaagacagggaggcgatcttggattaccacgtctttgaaattcgagattttgacatcctaatcgggctaccctttgagcaacttctcataaacacaccccgattagacagcctcaaaataactctgggaggaaatgaattttcagttccattttcccggacaaggattgccttgaccgaccctctcccagaaattgagtcagcggacgaggttacagcagttccccctcatgagtctctcgaggcccttctggaagatgaagtctccgacttcatcaaggaagaagcagaccccggtgagactctcgatctgccaatcatggaaccaccacctcaacctccgcttgagcttaaacctctaccttaaggcctacgctatactttcctacacaatgatagagaagctcctatcataatcagtgacaagctctccgaagacgagactcaatgtcttctaacagtgttggaaaagcatcgttctgttgttggctattcccttcatgatctcagagggattaatcacgcactttgcactcctcgtatccctattgaccccgagagtactccctatagggaacctcaacaatggctcaataatacgatgcgagaggttgtaaagaaagaggtcttgaaactcctgcacgccgggattatttatcccgtaccatacagcgagtgggttagcccagttcaggttgtgccaaagaagggaggaatgacggtcgttgcaaatgctcaaaatgaacatatcccgcaacgaaccgtaaccggatggagaatgtgcattgactacaaggctacgaaaaaggatcatttcccgctatccttcattgacgaaatgttggaacagctggcaaatcattccttcttctgtttcctcgctgggtattctaggtatcatcaaattccaatccatccggaggaccaaagtaagactgcgttcacatgtccgtacggcacctatgcatatcgtaggatgtccttcgaactgtgcaacgctcttgcatctttccaaaggtgtatgatgtctattttctcggacatgatcaaggacattatggaagtcttcatggatgactatgtctatggaaagaccttcggtcattgtctgcagaatttagacaaagtcttataacgatgccaagagaaggacctgtttagatcttacttagtgggagctaaagtaatagtctatactgatcatgctgctctgaaatatctgctcactaagaaagatgccaaaccacgtctcttaagatggattttgctgctccaagaatttgacttaaagattaaggataaaaagggagtagaaaattccgtagcagatcatttgtctaggctgcagatcactgacacgcatgaatagccgataaatgacttcttgagagatgatatgctgatgacggttcgcgactccaacccatggtttgccaacatagtgaattacatggtatccaagtacataccaccaggagagaatcaacggaagctgaagtatgaaagtcgctgtcatatatgggatgagccatacttatatcgggtctgctccgatgacttactacgaagatgtgtgccaactgatgaaggacttaagatcatagagtgatgccatgcctcaccctattgtggccattatggtgcattccacacccaggccaagttttggcaaagtggtttcttctggccgacaatgtacgaagactcaaaagaattcgtcagaagatgcacaagctgccagaggcaaggaggaatcactgctcgtgatgcaatgcaccttacatacaatttgcaagtcgagatatttgatgtttggggtatagactttatgggacctttccttaagtcccgtaactgcgagtacatcctggtggcagtcgactatgtctcgatggtcataagtgacggagggtctcacttcattgataaaaccttccgacacctcttacgagagatgggagccaaacacaatgtggccactccttaccatccgcagacctgcggtcaagcagaaatattgaacaaacagatcaagaatattctgcagaagacggtcaacaaaatggcaacaagatggaaggatagattgccggacgcactgtgggcataccggacagcatacaagacaccaattggaatgttccgctatcacatagtctacgggaagtcttgccgactacctgtagaactcgagcacagagcatactgggccatcaggaactggaacatggacttttatggagcaggagaatggagaaaaatgtaaattgctgaacttgaagagtggagagagaaggcttaccacaacgcaaagatatacaaagaaaggacaaagtgctggcatgataaaaggataaaaattaagaaattcaagccaggagacaaagtactaatgttcaactccagggttaagcttttcggccatagaaaattgcgcagtaaatgggaaggaccgttcgacgtcatcgacacctcttcgcacggggcaatcacactccgcaacgactcaggaaatatatttaaggtgcgacgcctttttcaagatgatcagaaggccgctctgcctcccgccgagcactatgtgggtaccctgttcactaaggcaggggatgaggtgctccacaagtatgtcacacccaccgctactccatccactccaaaggaggagcggttttgcattatgggagtgcgaactcccagcggtgggtatggcaagggtttgctccggcctttgacagcaacggagaaggagggggcagcagaatctcgtatccctccacctatgaaggtgaagcgtcacttgacacgtctattatctgtatatctccaccatggtatagtactagagcagaaattcagaagacaattggttcaagcataagtaaaagataaaatttccaactaatgaaattct

SEQ ID NO: 83710 - DNA, 424 bp, Oryza sativa
  Clone ID: PAT_MRT4530_83014C.1
gtggtctgcagtgcatggacagtgtttacaaggtagccctatactcctatattcatcacaacatagtagatagtacaaacgagccacatcaccgtctgtttccgccatggcagcgtgactccgcccgacggctggaggaggcgaggtcaggcctgccctcaatcgacgctccacgccaccgcagcccgcagccccatcggcgccatcgctgcgtcgctccatcgccatcccgacctcgaagttgaaccggcttcgagtccctcgtgctgccactgatcccagggctcgctcaaccctgcaagccatcgatcctgcctgcgaacaagataagagtgcttctcgatcccgttcctgtacgaggaggcatacgggggcatgctaatgcgacagtgttcgaggggggtcttgggccgggatccgttgc

SEQ ID NO: 83711 - DNA, 645 bp, Oryza sativa
  Clone ID: PAT_MRT4530_83015C.1
atgcaggaacagccgataaatgacttcttgagagatgatatgctgatgacggttcgcgactccaacccgtggtatgccaacatagtgaactacatggtatccaagtacatacctctaggggaaaatcatcagcatatcatcaacataccgttcgatgtcatcgacacctcttcgcacagggcaatcacactccgcgacgactcaggggatgaggtgctccacaagtacaccacacccaccgctactccatccactccaaaggaggagcgattctgcatcatgggagtgcgaattcccagcggtaggtatggcaaaggtttactccggcctttgacggcatcggagaatgagggggcaacagaatcccgtagccctccacctatgaaggtgaagcatcacttgacgccccctccaatcgtgagggctcccagcaaaatccaagaggatgaagtaaaatcgccggagccctcggtccataagctcaccgctcaagtgaagaaactccgcaaggagaacatagagcttagggatcgcaacacggagctaggggtagaactcgctgagattagaaataatgttggtacccttagccgcagtttgtgcgctaaaatcaagcgtgcattcatagagatggaaggagaataa

SEQ ID NO: 83712 - DNA, 417 bp, Oryza sativa
  Clone ID: PAT_MRT4530_83016C.1
atgaactggcagagtctgcacaatctacttttttgtcacgaaaacagacaaaatggcaactacgacagccagaggaaaaaaaaagggttaataaaaaagctactagatgaagtttccaagccccacattttgtacaggaaatgcatttatttgtctccgaggccaaaccttgagtccattcacagaaagatcttgaaagaggagtttagagtactaaagcatccaccaccacgcccttcaatacaatgcattacctatgccaactacttatcatacttttgggcaaacaataataacacccaagaaactctcggaatcaagaagggaagtgtgaatgaatgggttagatgccacaacaatgatctaccatacaccgaagacaccacgactagcattatcatcgtaatgttacattaa

SEQ ID NO: 83713 - DNA, 244 bp, Oryza sativa
  Clone ID: PAT_MRT4530_83017C.1
agtgcacaagggtgtgaaagctcttgcaagggttcaagataatgcaatggagtgccaaaaccttacccttgctgctggggatgtagtagccggtcagaccgtccaccgctcggtcagaccgccatcggctcggtctgaccggttgcgactctggcggctctgtatcgccaccaaaaaccagaccaatgcaacagaccagtggggccggtcagaccggccttatcacgccagtcagaccggctaa

SEQ ID NO: 83714 - DNA, 276 bp, Oryza sativa
  Clone ID: PAT_MRT4530_83018C.1
agggagatttctcacggcggtggcggtggtggtggtgggtgcggtgtgaaggacatcggccacggcctcgacaccgggaccgccggcttcttctgctgcggcggcggcggaggcggaggaggagccactggtgcggacctaacgggcggcatggatggagcctcagctgaacaaatttcgttcgaaacaaagctgctgtttaagccaaaaaggagagaagctctcagatctaccggagaagctgagtttgaggcaggaagaggaaaggaatggtga

SEQ ID NO: 83715 - DNA, 186 bp, Oryza sativa
  unsure (1)..(186): unsure at all n locations
  Clone ID: PAT_MRT4530_83019C.1
ggggantcnttataagcgaaaaaccccaaaatgttagcttaaaatgaatcaaattccctggttctgcttgcttcttttgagtctngaataaacacagaacctaccaaagttacttttatattttgtgtttcctaaccatttgatanaagaaatgttgcctctgggggcgtttaaatgtatattaca

SEQ ID NO: 83716 - DNA, 421 bp, Oryza sativa
  Clone ID: PAT_MRT4530_8301C.1
atggtgtccttctacctcgactccaccttcctgcctctcctcgccaccaccatggccagcccactccacgcctgcctcctcctcgccctcctcttcctcgcgctcgccttcttccaccccggcggcgtcgcgtgggcgctgtcgtcgtccggcggccacggcgccgccgccatccctggcccgcggggagtcctgctcgcgttcgccggcccgaacccgcaccgcgcgctggccagcctcgccgcgtcgacgcgcggggccacgcgcctcatggcgttctccgtcgggctcacccagttcgtggtggcgagccacccggacacggcgcgggagatcctcgccggcgccgcgttcgccgaccgccccgtgaaygaggcgccgcggagtcatgttcaccgcgcatggggttgcccgcacggcg

SEQ ID NO: 83717 - DNA, 301 bp, Oryza sativa
  Clone ID: PAT_MRT4530_83020C.1
ttagctgaggatggagggaaatagataagtagctgacagtggaccatcgtgagctaagtcagatccagatggggcgacggcttgggtggcgctgggggccgcatgcgtgttggcagcggtggactgcggccgtcccccctccccttctcgtccatatccggtgatggcggcggcgatggagaagactggcgcgaaggccgggcggagttgtggcgacggcggcggtggtggtggcgacaacggcggtggccccctctctccaccgtcgctcgagaggaatgacctggcctctccactttag

SEQ ID NO: 83718 - DNA, 633 bp, Oryza sativa
  Clone ID: PAT_MRT4530_83021C.1
atgtcatcaaaggagaccagcgcctacaggtgggccccacatgtcagtggcacaagggaggcggcccaccatggaccgggatcaccgaggtggtccaccgccgacccatatcagcctaagccgaccaggcggccacgtggtggcgtggccgaggcacgacgacgcccgagactggcctggccgaccatggtgcagcggcggcgcggggccaccggtggccacagccgacggcgccaaacggcggtgagcggccggaagacagtggcactcacgggtgacaacggctcaccatatgaggcggcggccggcaaggaagggggaggggagaatgagaggagggaggaggggccgagggagcgggatgccatggggaatgtggtagagggcgattggagccggcggagcggtggccgaggggctgcgcggtacagcagagctgatggaggtggtgcgcggcttgaggtggtaagggacggcggcaagaggcgactagaggcggcaggcggtggtggagctcggatcggcggtggaagcggcgctccggtggtggtagagaagaaaagagcggtggccggggtgcggcaaggcgcggtgaagccaatggtggtggtggcacagcgcagcggtggctag

SEQ ID NO: 83719 - DNA, 420 bp, Oryza sativa
  Clone ID: PAT_MRT4530_83022C.1
ttttatttgtgtggagtacgtacgttgcaacgagggtgaatttggacggtggagctgcgtaccctaggtggtatcttgatgacaatgtaatttctttttgcaacttcgatcgatcttttgcgagcgagcatggtgttatcttgttgacgacgtccacctgcaaaagatcgacgtacgtagcagccgtgcactcatctcatcttaattaatgggtccgttaagttggtacgtgttaagttagttggttcataaattctaagcaattcgtggggtttgaaatttggatggcgatgacaaaggcaaaaggcaatatgtatatcaatagagaaaggtcgacagatgggtggtggatattaataaacctatagctaggtatcttatactctgtccggacataattaattgacattttcaaacaac

SEQ ID NO: 83720 - DNA, 831 bp, Oryza sativa
  Clone ID: PAT_MRT4530_83023C.1
atgtcctccgcgccgtcgttgagaaagaggagctcgtcctcaccggccatctccatgtcctccacaagcagctcaccgtcttcctcctcgtcctcctccatggatggcgtccggagcagtgctgtctgggaaaggccagacgacgagatggccggcgggtcctccaacatcttcccctccctcaacctcgccacctccgtcgatggtgacggcgacgaccgagggaatccccagcctcctccaacaacggctgatgaccgtggaggaggaatccttcaaccgatgacggcgatgaccgtggaggaggaatccccagcctcatccgtcggtggcatcctcgatactgccaccgacgccgctgctccccaagcactagccgccgccccccgtccccgcagcagcagtcgcagccgcctgctccagtggcaacctactgatgacgacgacgggcttcgcctcctcttccggagcaggcctcctcacctcctcatccacctgccattcctcacggcggcgacctcgacagcagctgcggtcgcggctgccttgacgacgaacaccatatgtggctgcgtaggtcgaagtggaggaggaggcggtggcgacggtgctgcgcggcgaggtggtcgaggaagtcgtggtgatggcgcgggtgaagggggaggaggggggaaccatcttccatggctgcaaccgcgaggcccgctcgtcgctcaccgtcggcgagacgctgtccgcgcgcctccctggcgaccgactcacactcctctgtcgcttctctcgtggctccccgacggcctggacacaacggcacactgcctctcccagtag

SEQ ID NO: 83721 - DNA, 359 bp, Oryza sativa
  Clone ID: PAT_MRT4530_83024C.1
cgtcgcaggggcagggcaggctcagaatagcctaagaatacaaccgacgacgcgcacgaggaaacaccaacaacaacagcagcagcggaaccaacggtctaacacccaacaccacaggcgacggctggaaaccaggacgaaaccctattcttcacttcacttcatcttcaacttcacagggggtacactttacccacacggcattactaacccggatcacccagcccgttcagaacggccacgtatggagaccttgaggctttcatgacaaggcaattcgaaagccgacacaggtttaccatatgccaacgagaggggtcccagaccaacacccggttagagggtttcggcctagttcc

SEQ ID NO: 83722 - DNA, 998 bp, Oryza sativa
  Clone ID: PAT_MRT4530_83025C.1
ctgatctctcctagactctagtagccttagctagctacaaatggtgatggccatggagaagaagaggtttccaacgctggcccaggtggccaagatggcgtccctcctcctcctcttcctcctcctccccttggtgccttcctccctcaggcagccctacctctacctcctcttcaacgccctcgtcgtcgccctcggcgtcgaggccggcttcctcgccgccatctccagcggcccgcgcgacgacaagctgctgcccaagccggccgccgccgccgcagctctgaggctgagccacagcaatagaccaggtgaagtcgacgtcgctgcggcggcgaccaacggtcgtcatcaccatgtcaacggtagtagcagtagcagcgctgtaattgtggccgcttcaccatccttgacaccgaaggcggcggcgttagaggctgcagccggcagcagggacgtcgtcgtcatcgccggcggtgccatgccggcggcagcggcggccaagaagtccaagaagatgaggaggtgcccgtcgagggcgagcctcttcttcatcgggggcggggacggcgaggacgtcgtcgtccacgaggaggaggaagggtgctggacgaagggcggcggcgggggcggcggcgagcagatgatgagcaagcaagagctgttcaccaaggcggaggcgttcatcggcaacttctacaagcagctcaagatgcagagggaggagtcgtggaagaagttgcaggatctgtaccaccaccaccaccaccactacaagaccacggccttgtagctttgctagggctctcatcagttggtcacaactccaagtctgatcatactccaagtatatagtacacaactgatcaaaaggcatgcatgcatgatgcatgtgccttaccgatcataacttaattaattctacatctagtatatatatagggagaacatatatgtcatgcagatgtttgcatttgttggtaggggggaaaaaaaaa

SEQ ID NO: 83723 - DNA, 306 bp, Oryza sativa
  Clone ID: PAT_MRT4530_83026C.1
atggctcgcccgagggggaaatcggcagtgcggcgtctgatcagcctgagacctgaggggaaaacaaccgagtatacctcgctaccgtttgagggttggggagtcggggaatcggcgctgatgcagcctctttcgccggatctagccgccgccgcagtcggccggacgccgccgccccccgcgccgaacgccgaacgccgccctcccgcgccggtcccccctgacgccgcctcctccctcgccgggctccgcgcagccggacgccgccttccttcccctgcgccgcccgatgagcagagagggtag

SEQ ID NO: 83724 - DNA, 459 bp, Oryza sativa
  unsure (1)..(459): unsure at all n locations
  Clone ID: PAT_MRT4530_83027C.1
ccgtcttaagggcccggtaancaacattttctgcaacncctggctgtgcttgaggtgtcgacgttatccgtgagtagtactgacaacggcaggtccatggcctcagtgcagagccaggatgctgctgatggtggtctgggcgaaatattcccactgtcaaatgctttcttttactctttaagacatcgtccaacgtgaatatactagtatgtcttaggcattgttgactaaatcgaaggaaaatagaactacattggcgctctctatctgagcaggggattgaggaatactttttgttggttttctgagctggagcacttcacaaacagcagtctaggtattcttcatgccacagtatctacaagtgtagatttacaaatagaatgtgaccaaaatagttttgagtgaaaaatcaaaccgttatacctctctaaaaaaaaaaaaaaaaaaaaaaaaaaa

SEQ ID NO: 83725 - DNA, 372 bp, Oryza sativa
  Clone ID: PAT_MRT4530_83028C.1
gcatccggctgaggaggcaagcggcggcggcgcggcgctacgggccgacggccgacggcgacactgcgacagggagctgcggtggtcggtgggggctctgcagccggcggggcaggcgggcgcgcggccgctctgggaggcaggcggcgtgggcgcgctgcggtgcggccgcactgggcattggcgcggcggccgcgggaggcaggcagccagcgcagcagggcagccggcaacaggcagtgaggcaggcagggcagcagcaggtctacatcactacatcctccccttcatcgtcatcctcctcagcagtgagcctcgcgtggcatatggattggaaatccacccggacagtgatgatttctttgatgcgag

SEQ ID NO: 83726 - DNA, 1755 bp, Oryza sativa
  Clone ID: PAT_MRT4530_83029C.1
gaattcatcaattcagagttcagagcagagtgtccctgcttctgtgcagaggagagagatcgagctatagagctagcctggctgctgccatgccgaccggacgacgcctctccatgatcctcctcctcctccttctcggcttggcttccggcgacaagattctcttccaggggttcaactgggagtcgtggaggcagagcggagggtggtacaacctgctgatggggaaggtcgacgacatcgtcgccgccggcgtcacgcacgtctggctgccgccgccgtcgcactccgtctccacgcaagatgcaatacaaaggtaaggtacatgcctgggcggctgtacgacttggatgcgtctaggtacggcacgtcgatggagttgaagtcgttgatcagcgcgctccacggcaagggcattcaggcgatcgctgacgtggtgatcaaccaccgctgcgccgactacaaggacagccgcggcatctactgcatctttgagggcggcacacctgacggccgcctcgactggggcccccacatgatctgccgcgatgatacccagttctccgacggcacaggcaacctcgacaccggcgccgacttcgccgctgcccccgacattgaccacctcaatggtgtcgtccagcgggagctcaccgactggctcctctggctcaagtctgacgaggttggcttcgatgcgtggcggctcgacttcgcaagggggtactcgccggaggtggccaaggtgtacattgaggggacaacgccggtggggttggcggtggcggagctgtgggactcgatggcgtacggcggagacgggaagccggagtacaatcaggacgcacaccggcaggcgttggtggactgggtggacagggtgggtgggacggcgtcggcggggatggtgttcgacttcacgacgaaggggatcatgaacacggcggtggagggggagctgtggcggctgatcgaccagcaggggaaggcaccgggggtgatcgggtggtggccggcaaaggctgtcaccttcgtcgacaaccacgacactggctcgacgcaacagatgtggccattcccctccgacaaggtcatgcagggctacgcctacatcctcacccatcccggcaacccatgcatcttctacgaccatttcttcgattgggggttaaaggagcagatcgcggcgctggtggcggtgaggcagcggaacggcgtgacggcgacgagctcgctcaagatcatgctgcacgacgccgacgcctacgtcgccgagatcgacggcaaggtggtgatgaagatcggctcccgctacgacgtctccagcctcatcccgcccggcttccacctccggccatggccgtacgccgtctgggagaaaacgccgccgccgccgccgccgccgccgatcatcgcacctcttccagcgcatcgctctgattgattagcgatatgatgcttttgtgccacctcttatgttttacttctgctgtatatggaacaggctcttctaccttcaaaggtacgtactttcgtcactgatatgtgggaccgataaaccatgggtctaagccatgatgactttgaagatataggatttcaatccctgtatatagataagtacatttgtaatatacatacgcatgattagtgacatatatatacactgcattgccttggctgtgatcgaccgtcggtattggctggagatgtaaaccatttatattatcttaagagaaaaatatatacacagtt

SEQ ID NO: 83727 - DNA, 836 bp, Oryza sativa
  Clone ID: PAT_MRT4530_8302C.1
atgatctccgggatctcctctaccttttctccgttggaatcttcggctaaaacgttttggaaagctctagcgccgtgtgccctaacgccgccgtcgccgccgtcgctccagccgtgcgccgccgccgttccagacgtcgccgtcactcgggaaggtcgtcgtcatggtcgccaagtcgtcgccgtcctcgtccgccgcttcgtcaccgtcggaaaccgccggagcatcgtcgccgtcgtcaagccgcagtccgccgccgttccttcgtcgtcgccgtcgccgtccgttggtcttccgccgctcccttggtcgccggtgcgctacgatgggacagccgttgaggtagggccgagaagcgtgccctacatcggtgtcgccattgtcgcggagtgcggctgcggcggcgttcgggtcaacgatgatggcggtgctccggcggtcttcggcggaaacagagggcgggacgaggacggcgacgacttggcgatcccgacggcggccttcccgaccgacgacgacgaccggagtggcggcggcgcacggctggactcccttcggcggcggcggagcacgggctctagtgcaatggaagccactgggatgcagctgacgcactcatcttccttttctccccacctccgccgctcccggacttgcattagagcgtcgccgtgcatgtcgcctcgctttgacgccaacctcgccaaatctgccccgctgccgcggcatcgcttccttccatggcagcctcgatgagccatcgggctgtaatttgcggatgccgaggaacccatccgcccacccattttggcccacacgaagagctgctccaccat

SEQ ID NO: 83728 - DNA, 1443 bp, Oryza sativa
  Clone ID: PAT_MRT4530_83030C.1
atggcgaccggacgacgcctctccatgatcctcctcctcctccttctcggcttggcttccggcgacaagattctcttccaggggttcaactgggagtcgtggaggcagagcggagggtggtacaacctgctgatggggaaggtcgacgacatcgtcgccgccggcgtcacgcacgtctggctgccgccgccgtcgcactccgtctccacgcaagatgcaatacaaagcatactttatccgttccacttcgggtattcaaaatacatactaactcagggtctatttggcataactctagcttcagaagctccagcttcagggtacatgcctgggcggctgtacgacttggatgcgtctaggtacggcacgtcgatggagttgaagtcgttgatcagcgcgctccacggcaagggcattcaggcgatcgctgacgtggtgatcaaccaccgctgcgccgactacaaggacagccgcggcatctactgcatctttgagggcggcacacctgacggccgcctcgactggggcccccacatgatctgccgcgatgatacccagttctccgacggcacaggcaacctcgacaccggcgccgacttcgccgctgcccccgacattgaccacctcaatggtgtcgtccagcgggagctcaccgactggctcctctggctcaagtctgacgaggttggcttcgatgcgtggcggctcgacttcgcaagggggtactcgccggaggtggccaaggtgtacattgaggggacaacgccggtggggttggcggtggcggagctgtgggactcgatggcgtacggcggagacgggaagccggagtacaatcaggacgcacaccggcaggcgttggtggactgggtggacagggtgggtgggacggcgtcggcggggatggtgttcgacttcacgacgaaggggatcatgaacacggcggtggagggggagctgtggcggctgatcgaccagcaggggaaggcaccgggggtgatcgggtggtggccggcaaaggctgtcaccttcgtcgacaaccacgacactggctcgacgcaacagatgtggccattcccctccgacaaggtcatgcagggctacgcctacatcctcacccatcccggcaacccatgcatcttctacgaccatttcttcgattgggggttaaaggagcagatcgcggcgctggtggcggtgaggcagcggaacggcgtgacggcgacgagctcgctcaagatcatgctgcacgacgccgacgcctacgtcgccgagatcgacggcaaggtggtgatgaagatcggctcccgctacgacgtctccagcctcatcccgcccggcttccacctcgccgcccacggcaacggctacgccgtctgggagaaaatcgccgccgccgccgccgccgccgatcatcgcacctcttccagcgcatcgctctga

SEQ ID NO: 83729 - DNA, 393 bp, Oryza sativa
  Clone ID: PAT_MRT4530_83031C.1
ctagggcgttcagaaggaggtattgatccccatacaaacttagggagaatcatcacttttacttctttcgtccaatgcagttttttgccccttccttctaaattcctttctcttcttcttgacttctatgatctccacctcctctacctaaatcccatctccattgccttctaagcatcttcactcatctatgtgagatgtaccttggggtacaaccttttctagatttgtttaggtatttctatgaggctaggtggatggaatcgtccagagtttatggatgcaacggtctccgcctccgggatgggatgaagggagaatacatccccttcaaatgcatgttctcgaggaagaagtggagaaataaatggttcttcctccatgttgacgata

SEQ ID NO: 83730 - DNA, 375 bp, Oryza sativa
  Clone ID: PAT_MRT4530_83032C.1
gaggattaacactaagacccaatgtttgtaaccggagctatgcatatgttacataaactattggctaacctaacaacatattttgccatgatataccaattttgcctagcgcaatagggagatcatgggacacggaatgcatgtcgcgtcacgaacggcttaattaaaaaacgaactgcaaactgcctactcataaatcaaggcggcacaaatgatcaaattaaacaagaccaggttaaacattgattactgtcaccataagcgcttagcacgcacccacactcatcgctgctccggcgctggcaggcaatgaactatgcatgacctatcaccttctgcactttcagacttgggatatacaactgaatgattcac

SEQ ID NO: 83731 - DNA, 1164 bp, Oryza sativa
  Clone ID: PAT_MRT4530_83033C.1
atgcctaaggagatttcaatgccggaggtgtctgaggatatttcagtgccggaggtgcctaaggagattttagtgccggttgtgcctgaggagatttcagtgccggaggtgcccatggagatttcagtgccacaatcagatgtgcaacttctggcaacagtcagtacagatattgaagttataccaggtttagaatgggacggtacagagccagaaatctttgaagaccctaatcatgtgaaagacctcgaggtggaagaacccccggtcaatgacaaggccactgacaagtctgaagtgtctagagtgcttaggagccacaactccaagtccaaagatgatcaaaaggagaagttcatggtatccgccttcagagggggcaaggaacatgccaagctcagagaagatgaccccaagaaggccgctgaactagccgggaaaaaaaatactttgcaactgatgactacctggaaaaataccaacataggaaagcaatatggccggattttgcacttgaggacacataccgtgaggctagcaccagggtcagcgcagctgaaggacaagactcctgaagagatagctgaatacaagaagggcttgcacaagcagaaaatgattactgtcgcacacgatcattacatctgtttaatcaactacccgaagcatggaattgtgacagtcttggatcctctcaattaccgtcatgagtcatacaaagaatttctaacaatcttaaaatatgcgtacaactactacaagttcaagggtggagaacatattcgaacaagggagaagctgctagtacatacatattggccgtgtcacaagcaacctagaagcactgccctctgtgggtattacgcgtgcgaattcctcagggttaatgggaggtacacggttaacgcaaaggatttgccaagaatagaacatcgaacaagctttgacgatacagacatcgcaaatatccagcgcgatctttgccacttcatccaccatgagtgctatcatgtggacggaaagttcttcgacccagagggcggccgttctctattttcgcaggcggcccgtctagctccattccgcctgggaaaattaacttcaaatgcggacctccagcccgccagtgaactttgggctgcaggtggaccggccaagggttaa

SEQ ID NO: 83732 - DNA, 4171 bp, Oryza sativa
  Clone ID: PAT_MRT4530_83034C.1
atggatctgaccaaggacggcaacttccgcgtcgcccagggcggcctgcaggcgctctccgccgccgcggtgctcgccggcgaccacttcaagatccacctcaacgccctcgtgcccgccgccgtcgagcggctgggcgacggcaagcagcccgtccgagacgccgccaggcagctgcttgtcaccctcatggaggtttcatcaccgacaatcattgttgaaagagctggaagttatgcatggactcacaagagctggagggtgcgggaagaatttgtacgcactgttgcaacagctgttggcctctttgcttctacagagctccctctacagcgagtgttgctttcacctgtcctgcaattgctgaacgatttgaatcaaagtgttagagacgctgcaatctcatgtattgaggagatgtatagaaacatgggatctcaattccatgaagagttgcagcgccataatctgccttcttacatgctgaaggacataaattcaagattggataaaatagaaccaaaggctcgctcatctgatggtgctagaatgcaatataaggttattgaaagatctagatcattggcagatgccacatgtactcaaggtgactcagatattaccgaaaaaccagtggaacccataagagtacattcagagaaagaattacttagggagatggagaagattgcatctgcccttgatccagaaaaggactggtctatacgtattgccgcaatgcaaaggattgaagccttggtatatggaggtgcaattgattatccatcatttcttacgctcctgaagcagctagttcctcccttatctgctcagctgtctgaccgacggtctagcatagtaaaacaggtacttttcaagcttgttgtgataactgtgcttgttattgctgaatccgccgacaactgcataaaaactatcctgcggaactgcaaggtttcacgtattcttccacttatagctgacacggcaaagaatgatcgcagcgctatccttcgtgctagatgtagtgagtatgccatcctaatattggaatattgggcagatgctcctgaaatacagcgtgcatctgatatatacgaagatctaataaaatgctgtgtggctgatgcaatgagtgaggtccgtgcaactgcaagatcttgctataggatgttcaccaagacatggcctgagcgctcacgtcggctttttatgtcatttgatcctgcagtacaaaggataataaatgatgaagacgggggcctgcagaaacggtatccttctccatcattgcgtgagaagggtgtccaactttctcatgcttcatctcatgcaagtggtacacatttagccggatacagcacttcagctattgttgcgatggacaagagtgcagctatttcttctgaatcatctctttcgtcaagaagtcttctgtcgcagtcaaagaaaataggtagaactgctgaaagaagcatagagagcgttctcagttcaagtaaacaaaaggtttctgccattgaaagtttattgaagggtaattccatattgctggattcatccctgccaagcattaataacacaagaaatggtggttcacgcttggtagatacagtgaaccctcatgtggccaataaagagaggtcaaggtcaccatatttgagtagtctgtcgtctgaatcaatatcaggatcgtcactgccttatgcgagaagctcttctgggaggtctccatatggtagcactatggaagagagtaatgatacatggtcaaccaggcggatgccacaaatgcagatggacagacactatcttgatatgacctatagggatgccagccacagaaatttacacaatcaccaagttccacacttccagaggcctcttaggaagcaagtggcatcaaggacatctgcaagttcgagacacagttttgatgatggccatatctcatctaatgacatgtcgcgatacacagatggtccaacttctataagcgatgcactctctgggggtcttagtgcaagttcagactgggtagctagagttacagcctttaattttattcagacactactgcaccaaggacagaaaggcattcaagaagttatgcagaattttgaaaaggtcatgaagttatttttccgttatttggatgatcctcatcacaaagttgcacaggcagctttctctacacttgcagatattattccagcttgcaagaagcaatttgagagctatgttgaaagaattttaccgtatgtattttcaagacttattgatccaaaggaattagttaggcaaccatgttcatcaaccttggaagttgttggccgcacatatcccattgacacattgctacctgctctagtacgttcactggatgaacaaaggtctccaaaagcaaaactggctgttcttgagtttgctaataagtcattcagcaggtacaaagtagactcagaaggttatagtaacagtggctttcttaagctatggctttcaaagctagcacctttaatacatgaaaagaatgcaaagttgaaggaaacttccatttctggaatcatagcagtttattctcattttgactcaacagcggttctaaattttattttaaatttgtctattgaagaacaaaaccttgtgaggcgagcactgaagcaatatactcctcgtatcgaggtcgatctggtaaattacttgcagagcaaaaaagaacgttcacgtcccaaatcttatgaccaagttgattttggaaattcttctgaagatggttatgcactgacaccaaagagtagttatgcatttgggcggttttctgctagttcccttgataatgcatcagggaagaagatgaatatggttcatggatcaatattccttgatatttctactggccgaacatcctctgatgtcagcattgataatgttaagcaatgtttcaaacctgaagctgaagttcttgcaacaagtagggaatcaaagaacattgctcgcacagttgtagaagctgcacgttcatggacagactatcctggaaaatcagatgctaccattgatgatgaaaattctactggtactcctcgtctggagtttggtcgtcttgctgtttctgatggacgtggtgctgttatttcaacttctgtggaagacgctcaagagggaaatccacttgtggagcttagttctgtgaagattaccccacacaccagtaatggccctagcatcccacaacttattcatcagataagcaatgtcagtgaagttactagtctagacaagcgggaggcattacaacagttggttacagcttccaccaataatgacaactctatatggactaagtatttcaatcaaattttaacaaccatccttgaggtgttggatgactcggattcttctatcagggagctttctctatcgttagttgctgagatgctccacaaccagaaagatcctatggaagaatccattgagattgtccttgaaaagctcctacatgtgaccaaggatgtcgtggcgaaggtttcaaatgaagcaaaccagtgcttaaatgtcgtgttggcaaaatatgatccttttagatgccttgctgttattgtacctttgttggttagtgatgatgaaaagatgcttgtcgtgtgtaccaactgtttgacaaagcttgttggacgcctatcagaggaggaattaatgactcaactgccttcatttttaccagcactttttgatgctttcaataaccagagtccagatgttcgcaagactgttgtattctgcttggtggatatctacattatgcttgggaaagcatttgtaccatatctagaggggcttaatagcacgcagctgcgcctagtaacaatctatgcaaacaggatatcacaggcaaggtctggtgcaccgattgatgctaaccactagatcatattgttttgtgtatcatatgggtatctctttggatgagctggtttcattcattcgatctgtatataacagacagatgccgttcatgtattgagcagttggcttttcgtgtgtgtatgtattccttttatttttgtttccttttccccttgtgtgcagaggcattgagttatgcgttaacttgtactaccatcacactgtacaaagataacaggatgtagctgactgttttcccttgttt

SEQ ID NO: 83733 - DNA, 1552 bp, Oryza sativa
  Clone ID: PAT_MRT4530_83035C.1
cgggctgcaggtttggatcgggacatccgcgcccttgctttgcttggcctagggtttccgatcgcgagggccgcattccggcgggaggaggaggaggagatggcgacgtcccgcaagctggcccgcgtcgacatcgccgagctgaagcagcggctggtgaagcggctggggcggcagcgcgccgggcagtacttcgcgcacctcaccaggctgctgaatctgaagctcaccaaggtggagttcgacaagctctgctacgccaccatcgggagggaaaacatcgctctgcacaacgccctgattagggggatcatcagcaatgcgctgtccggggtgcccccgcccagccgccaggcggtgacggggcagtccgggacgaccacggctcccagcgggcagtgcgtcggcatcgcgctacagagcgcccgaaatgtaggggccgtggtggattcgggcgatggggactttgcgagggaacgggcggttgccggcaaggtgttgtcggtggaggatggggaggaggtggagcaggttaggtctgctccatgtgtgcagagccgaagcccgataactgccccattggggatttcgactacgccaacctatggtgcaaggacatggaggttggatgatccaatggtgtcgtgttacgattcccaccatctgctggacactggttctctgttcaagggtttgcagcgtcggttggagagtgatggcattggagtgtcggtgcagggtgttgaagttttaaatcgtggattagatgagtttttgcggaggttgattaaaccatgcatggaattgtccaggtcaaggtccagcggtagaagagttaccaaaggcaatgctatgtttgcagctaggatgaatggcttgcaacaagccaatcatggtcattgtacaacactacaagattttgctgtcgctatggaatctgatccacatttgcttgggaccaattggcctacacagcttgaaaagatacaggcaacgtcgtttggtgaatgagcccgattgccctgtttttgataaaccttcaaaaagaggcgtggtctgttgaaaaatactgtcactgaagtaaatggagctatggagcaccagatgcaaatctcagggctgcttcactcatgagcaagcaaagctgaaacaagtgaccaattggagctgtgatggacagatgtcatgagttcttccttgagaattgatggcagttggtataaacgagagaatcgatagtgctggttgatgtcgtgggacaaattgagcaacttgtcgataaacacttataggcttggcatgtaacacatggcattctgatagtgcttctagggtttctccgtgatgttgtaatagagcatagttttccttgtttcagattgagttgctatatttttttgcagtgaccataagagtgatatattttcattgctcctgtacattgtattcagattatggcaactattgcttgtaatcagggtgcaagtttttagcctattgaataaatatataaacttcttttggtcttcaatgtccaaaaaaaaaaaaaaaa

SEQ ID NO: 83734 - DNA, 552 bp, Oryza sativa
  Clone ID: PAT_MRT4530_83036C.1
gggtcgttttttttttttttttttttttttttttttttgtttttttttttttttttttttccccaaaaccgccccctttacccgaggaaacccaatcaaccccgaaaaaaaaaaggcacaaaagaccgacaaacaacgcctgcaacaacggaggcgggggggggccaaaaaggggcaccggttcactgacgctgggcccccccgccctcgaggacaaactcttttatttagccccaggtaacgcgtacccacacacacctacgggggggaggactaccactccaggtaactcaactaatcactcgttacacgcacacgtacgaacaactccggcgagtccccggggggggggggccgcgcggcccatgcatgtactccagggggtacgaagacggggagccagccttcccggggaggcactcactcgggggccttttgggcctccggttcccggacgggggccgcctcctccaccttaacctcctgggggggcggcgccggcgccgcctccttctccttaacctcctgggccaccggggccggcgggtcggc

SEQ ID NO: 83735 - DNA, 157 bp, Oryza sativa
  Clone ID: PAT_MRT4530_83037C.1
actgctacacctattttatcaacggttgcatgcggcggtcttatgggctaggccttcttttacatcgactacaacagctctcttccataccgaggattcctacccgtacctgatggatgaaggcacctgtcgccgatgtagtatttattgggactac

SEQ ID NO: 83736 - DNA, 178 bp, Oryza sativa
  Clone ID: PAT_MRT4530_83038C.1
atggcgaacaccaaccctaatcctcaccgtttcctatgtgctgatcacgtggttcatcaaggaggagtcatgaggattccccgcgttgatctcatagctgctacaaagctcccaaaacaccataaacagaagatggtcagatggggagatttacgtggagatagcaagacggcaggag

SEQ ID NO: 83737 - DNA, 1375 bp, Oryza sativa
  Clone ID: PAT_MRT4530_83039C.1
tcaccggagcatggcgcgacggtcttcggccaagggggagcacaccggagtgaagaggggcacgagaggaggcgagccagtggctcggattcgccggaggaagatcgacgacggcggattgcggcgacgcacgccggcggtgagaaaaaagggggaaacggcggaggggcgacaaggattcaactcaaggtggtgggagtatctctgggagtcggggattctgtttccggcgccggatagggtggaggagcaccgaggagggctagcgtcgacggcggcctctaggagcggtgagggaggagcggtgttggcgacgcggagggagtcgcggcgaggtggtcgcgacggcggggcggcgcggaaccgagagggcgcggccgagaaaaggagggaggcagcgaggccgaaaggatgatgagtgtgtgcacacgctcttggccacggcagtgcggcaccgagcttgacgaggccgacgccgaggctcacgcggccattggcacaacgcggcagcgaggaggcagtcgcggaggggcgggggcgagcagctggcggccggcaacaatggcgcgggtggttcgagcgaggtgaagacgaaacgagaggggagggcgcgggctttataggcgaggaggagaggtcggtttggaggagggaaaccgacattggcggtcaagggagctcggctggtgttcacgggcggctgcggcggtttcgtgggcagcgcgaaggcagcgacggtgtggatgcgttgggcggcgaaggcggtggatcgaacggcggaaaatcgaaccgcgggagcgggaggattagcgcgggctggcgcagtcaaggtgggggcggcgagctggcgctggcatctgcgtctctgcctccaagcgctagcggccaaggagtggaggcgtggcgtcgttgcttgggagggaaaaagagaaaggaggacggtgggaagggggggctttaccatgccggtttgggaaaaaggaggtgggagagggagtgctctgcctctgggatttggatggacgcgggtggagcggcttgggcacgcgctgcagagcttgcggcaggcagcggggccgagcggcagcacgacgcaggcgctaacggcggcggcgaccgggcggttgcgcggcgcaggcgcggcagggctgacggcggcaacgaccggccgggtttagggatgtatcaagggaaactcaaggagaagtcatggaaaagattcaaaaggaatacttgggtatttgttctcgggaacatagggtggagtcaaggaaaggattcgaggcgggatttgaataattctggattcgtagaagtatttggcgaggattcaaaggaaggatttgaatttcggaatttgattttggagacttaa

SEQ ID NO: 83738 - DNA, 1392 bp, Oryza sativa
  Clone ID: PAT_MRT4530_8303C.1
tttttttacttgccgtacaatttttttactcattaagcgttcacatgaccagacgagtaattttttaactcgggacaaatgggatggaaaaagcctttgcacgtggtggtagcagtaaaagcggtccaggaggatgcgtctctcgtgcagtgtgcacggcgaggacgggaggtgggcgcgggcagtcggcgaggacagagcagggaccggtggtcggcgtgggcggcgcagacggcggcgcggacgtcagtgctcaggacatcggcgtggaggcggaggcggcggaggagcatggcggcggtgaggtgaggacggcgacgcgcgggggcggagccagttgtgggtggcggagggggcccgaggacgacggtggccggcgacggaggcggaggccgaccgggcgagcggggacacgcggtgggcggtgtgctcctcctcggcggtggcgcgcggggacgcgcggtgggacaccgccgccaccgcgggctcctcctcctcgtcgtaggcgcgcggtctcctcccctccccgaccgccgaatctggcggctgactagtggctaccggagacgggccttggcggcgacgcggtggagggcgctggcggctaccgcaggcgacgcggcggcgggcgccggcggtggaggacccccggacagccgagatcgaacggaccatgaccgggccacggcagacggccacgatgacgtcagcggtgacgtcacctccggcggcggctcgggcggctcgggcgtgcatgctcgccggcgaacgacggcgcgaggacacgaacggagggcaccagcacgtagagagcgacgcggcgaactcaccgatgaccaaagaaaaggcggcggagtccttcggcttgacgacgacggcgatgctccggcggtcttcagcgacggcgaaggggcggacgaggacggcgacgcgacggcgaccacgatggcgaccttcccgagcgacggcgacgactgcggcacaaggtctcacgaggctagggctctaccggcgacgagagacgaaggcgatggtggcgacggaggttggaaggctgcggcgaaggcccacggcgaccggcgacgagaaggaaagttaaggctcggaggaaagagaccgatccgtatcgaactcgaatccacggatttccaaagcgatttagatgatgattccaaaagagaaaaggtagaggagatctcgggaaacatttcccctcaattgatttcaccggagaaggaaaggcgcggtgggacccacctgtcagcgacagcgaggctcgcgcgggcggctgcggctgcggactgggccgacttgggccggggagagagagataaggttttgggccgactttcggcccaaagccaaaagagacttttgaaaacctttttcaat

SEQ ID NO: 83739 - DNA, 505 bp, Oryza sativa
  Clone ID: PAT_MRT4530_83040C.1
agcctttaggatttctacgtacggataattgatgccactgctgggaggagccacactgtttcaagcatctgaaatctctccagtgacaatcgaccaagcgaatatcagtcattatgaaatcaaggggattcgtcagactcaattttggacctctaggtgaaagccagttgcaccgcatgtaggtatctgatttatagtaatgtgtgtgtctaaagtctagatatcatgtggtgatgggtcagtaacatcgtggaagctcattgcctcactccacagatggttttgtaggttttcaccctgtatggtgtatatagaagttaatactgaataccttctgatcagtgattacggtatgtttagttcgtaatcggtgagggttgatacatttttgcctgcagcctgtatagaaatgatgtttctcttagttgtatactacacatacatcatattgtaagaattcacagcttcgaagtaagttattatttccttaaaaaaaaaaaaaaaa

SEQ ID NO: 83740 - DNA, 1045 bp, Oryza sativa
  Clone ID: PAT_MRT4530_83041C.1
ccggatcacccagtccgtgagatcagccatgtcgggagaccctaaggttttcatgacaaggcatttcgaaagccgacacagggttgccatatgccaacgagaggggtcccagaccgacaacaggttaggtcccagaccatattgtaatagtaccattagatagatcacaattttacagaattactggaagtggaacggggtcaatcggatgagcggttgagaagatatggattttcgaagtttattggattttctaacttgcggggtcccgagtggggcccgcttgtcagtggcgcggctcaccgtggaagcggtgcatgcggcgcgcgggctctccgtggaccgcgcgcactgagagagagaggagggagcggacccgccttgactcggtcttcaccgaggtggcgctgacgtggcgcctccgtggcggcgcgacggtcttcggccaagggggagcacaccggagtgaagaggggcacgagaggaggcgagccagtggctcggattcgccggaggaagatcgacgacggcggattgcggcgacgcacgccggcggtgagaaaaaagggggaaacggcggaggggcgacaaggattcaactcaaggtggtgggagtatctctgggagtcggggattctgtttccggcgccggatagggtggaggagcaccgaggagggctagcgtcgacggcggcctctaggagctgacggtaatggcggcgaggccatgccaggcgacggcattgctatggaatggtttggggaggccctagggagttcaaggacggtgttggctagggtggtcgacgagctggggcccgacgacggcgcgcgactgtgtgccgcggctgaaaaagcgcaacggcgaggcgcgcggcgcattgtgcggcaggaggaggaatacggtggggagctcaccggtgagggaggagcggtgttggcgacgcggagggagtcgcggcgaggtggtcgcgacggcggggcggcgcggaaccgagagggcgcggccgagaaaaggagggaggcagcgaggccgaaaggatga

SEQ ID NO: 83741 - DNA, 243 bp, Oryza sativa
  Clone ID: PAT_MRT4530_83042C.1
gtgaaacatgttgaagtagtaccattcatcatatatgtgatatgttatatgtgtgtcgatgcatgtcggggcggcaggttgaaaaggtctgaaggacgtgcccggcgggccaagtctaaagtcttatgtacaactgtgccacgtcacacgatatgtatggtctcgtgtatatatatgtgtagaattaattataaatataaaggaggcaaagtattacattcgagtaagtacataaaagatata

SEQ ID NO: 83742 - DNA, 549 bp, Oryza sativa
  Clone ID: PAT_MRT4530_83043C.1
atggcgagcgccgcggcgtcggcgtcggcgtcggcggcgcaggagctcgaccgggagcagtacctgcaggagctgatccggggctccatgctggacccgccgtcgtcgtcgtcgtcccgcgcgggccgcgtgcggccgctcaccgacgacgagatcgggcggttctactgcgaggtctgcatggagtggaagctggtgttcgaccggttccgcgtctccgacggctgcccccacgcgttctgcgtcgcctgcgtcgtcggccacatcgaggcccgcgtcgcggcggggagcgtgcccgtgccgtgcctcctggcgggcgggggcggctgctccggcggcggcgtcatgcacccggagcgctgcaagaagctgctcgacatcgactgcgaggagccgtgggacgaccgccatggcggcggcggcggcggcgacggcggcgcacggtgcgcgctgacccagctcgccaaggggcgcgagtggcggcgctgccccagctgccgcgccatgatcgacaagatcgatgggtgcaagcgcatgacatgcaggtaa

SEQ ID NO: 83743 - DNA, 603 bp, Oryza sativa
  Clone ID: PAT_MRT4530_83044C.1
atggccacgctccccccccccccctcctcctcctccatctccgcccctcgtctcaccccacccatggcgccgcatgccgcgagcaggatgctgctgtcgctggcccgggacggcgcggggcgacggtggctccgcatccgcggtggggattcgaggccaatctcggttcacaggtttgtgacggattgtgattattctggttgtgaaatttctggtgatgaggactccggtcgcgggttgctgctccattggagttcgaaacatgatagaagcaacaacgattgtgatactaatggaggcgcatttgaagttggttccatgggacaatcctttttttatgttgatagtcggtactggattataaagggcaaggtgaggtttgaggcgaagggggcatctgtgagaccagaggaggagctcgttgatgcagcactgtcggagacagcgatcgaattcgtccgtgttgttgaaggctttgttgttttggcatttccaaatgttccaagtgatcgcaaggagaattgtgtgccaaatccgttgaattttgaacatgcagcgtgtaatatccctgaagacaagctaagagaatggagttccagttag

SEQ ID NO: 83744 - DNA, 919 bp, Oryza sativa
  Clone ID: PAT_MRT4530_83045C.1
gctgaccggtcgctgcttgacccggtcaagctgggccggcgggccagggtggcggccacgttggcacgggagagagagaggagaggagccgggccggagatcggacggctcacggcgcgcggcggaatccggcgaacggtggcaatccggagcgagcggcgggcaccggaagcgagagggggtcacggaggttccatccaccggctcggatatgggagagaggcgcgacggaggccggcgacggcggccgtgcggcggcgggatgggtggcatggcgcggggcgaggaggaaaggtcggtttgaaggagggaaaccgacattggcggtcaagggagctcggctggtgttcacgggcggcagcggcggtttcgtgggcaaagcgaaggcggcgacggtgtggatgcgttgggcggcgaagacggtggatcgagcggcggaaaatcgaaccgcgggagcgggaggattagcgcgggctggcgcggtcaagcgctagcggccaaggagcggaggcatggcgtcgttgcttgggagggaaaaagagaagggaggacggtggaaaggggggactttaccatgccggtttgggaaaaaggaggtgggagagggagtgctctgccttcgggatttggatggacgcgggtggagcggcttgggcacgcgctgcagagcttgcggcaggcagcggggccgagcggcagcatgacgcaggcgctaacggcggcggcgaccgggcggttgcgcggcgcaggcgcggcagggctgaccaaaggcggtggcgagttttgggcggcgacggcgggaagcggcgtcggcgcgagagagacgagagcgagagagacagagagagcgagcgacggctctctctctctctcggctcgcatgcgtgcaacgcacgtgcgaggggggggagatgatggg

SEQ ID NO: 83745 - DNA, 1373 bp, Oryza sativa
  Clone ID: PAT_MRT4530_83046C.1
acttcctcgggtggctcgggtgcgactcgagaggacaggcacgactcggccgaactaatgggccggccggcccggagaggcggcccaagggggcgcggggagagtgagggagagggagggccggtgggccgagtccaccttgcggggtcccgagtggggcccgcttgtcagtggcgcggctcaccggttcgggtaggagtggcgcacggattggtgcaccgggtggaccgaaggatggcaggcccacgcgcagccgttaggctctccgtggaccgcgcgcactgagagagagaggagggagcggacccgccttgactcggtcttcaccgaggtggcgctgacgtggcgcctccgtggcatgccacgcaggccggcgagaggaggaagaaagaggccggccgagatggacggcgggcggcgggggtctcaccggagcatggcgcgacggtcttcggccaagggggagcacaccggagtgaagaggggcacgagaggaggcgagccagtggctcggattcgccggaggaagatcgacgacggcggattgcggcgacgcacgccggcggtgagaaaaaagggggaaacggcggaggggcgacaaggattcaactcaaggtggtgggagtatctctgggagtcggggattctgtttccggcgccggatagggtggaggagcaccgaggagggctagcgtcgacggcggcctctaggagctgacggtaatggcggcgaggccatgccaggcgacggcattgctatggaatggtttggggaggccctagggaggagtcgcggcgaggtggtcgcgacggcggggcggcgcggaaccgagagggcgcggccgagaaaaggagggaggcagcgaggccgaacagcgctccgggtgcatgacgccgccgccggagcagccgcccccgcccgccaggaggcacggcacgggcacgctccccgccgcgacgcgggcctcgatgtggccgacgacgcaggcgacgcagaacgcgtgggggcagccgtcggagacgcggaaccggtcgaacaccagcttccactccatgcagacctcgcagtagaaccgcccgatctcgtcgtcggtgagcggccgcacgcggcccgcgcgggacgacgacgacgacggcgggtccagcatggagccccggatcagctcctgcaggtactgctcccgactcgaggcagtacttgtggtcgcaggggaggccgcggaagaggtcgagcatcggcaaggtgtcgaagcagatgccgcagtcgaacgtcgggaggtcgccgtcggcgagggggagcaccctcggccgcctcgtcgacgggccggcctcgtcggggtcgaggtcggatgggcggaggccccacttcttgt

SEQ ID NO: 83746 - DNA, 156 bp, Oryza sativa
  Clone ID: PAT_MRT4530_83047C.1
atggcgacggtggccggagttgtagacgatggaggccgttctccttcctcgatacgtcattcttcgggatttttgaggggaaatagagaggacttcgcgaagctgatagattactcacaaaaattaggagaaaatgggctctttgaaaaagtttga

SEQ ID NO: 83747 - DNA, 318 bp, Oryza sativa
  Clone ID: PAT_MRT4530_83048C.1
atgtcgagcagcttcttgcagcgctccgggtgcatgacgccgccgccggagcagccgcccccgcccgccaggaggcacggcacgggcacgctccccgccgcgacgcgggcctcgatgtggccgacgacgcaggcgacgcagaacgcgtgggggcagccgtcggagacgcggaaccgcatggagccccggatcagctcctgcaggtactgctcccggtcgagctcctgcgccgccgacgccgacgccgacgccgcggcgctcgccatgggagggggacgacgcgtacttggcgctaattcttcggcgagaaggaactag

SEQ ID NO: 83748 - DNA, 513 bp, Oryza sativa
  Clone ID: PAT_MRT4530_83049C.1
atggaggagggtgacggcggaggagcgagggcggtagggatagggccgacaggcggtggccgcgtggagaaagaggcctccccgcctcctccctccccgtgcgcgctcgccgttggactccccactcccctcgccggccgtcccgctcgcgactgggagggcaaggtggaggaggtcaccgtcggtccaaagggaggagacggaatcggtgtacctcaacctgcgcgtcgccgccgtctccaacttcacctcctggatcgtcgagacgaagatgcggccgcgcaaatctggcagctcagcgacgtctgccggtctccatcatgggaggaggcaggaggaggacccaacgccaacgagggcagtggtgggagatggcggggcggtggccgtcatcgggcgacgtcacctcggcttgttgaggaggagacgatcatggttcttgacgacgaggtcagcaagggagatcgggaagccggtctgcacgggggagggctggtgcgggaaggtggatag

SEQ ID NO: 83749 - DNA, 593 bp, Oryza sativa
  unsure (1)..(593): unsure at all n locations
  Clone ID: PAT_MRT4530_8304C.1
ggcacgaggcggcacgagggtatatagattttatggtggtatttttgccatcaaatattttttgattagttggccttgaactgtctgaacaatttattagttctgcaatctttctgtgttaaagatgggtcatcccaattctcatttgctatcccatattctcaaccaactgttacacctctttggctttatgaatcaaatttaatcaaccttactgattgtcctagtgtaactttatgtgggaaactgttggtatatttgttacaaagtttatctggtgtgacatatttcgtacctaattcaactggatagtatccaatatttgaaagcctcaatgatttgttcattagatgaggatttgtgcggagatctagggattgcataatgggaaatcgaggttgggatttcttctatatgcaacagttctatnggttgtctgaggtatggtaataaactgggtgctgctctggtagctaaaaatcatccatatttgttgacctgatgtactgtgacttattacatcagaatcagagcctgggcctaagaattgctttgggacactggagctagagcattaaggattgatgctatgg

SEQ ID NO: 83750 - DNA, 735 bp, Oryza sativa
  Clone ID: PAT_MRT4530_83050C.1
ttacctgcatgtcatgcgcttgcacccatcgatcttgtcgatcatggcgcggcagctggggcagcgccgccactcgcgccccttggcgagctgggtcagcgcgcaccgtgcgccgccgtcgccgccgccgccgccgccatggcggtcgtcccacggctcctcgcactgcaggcagaacgcgcgggaacaggtcgggcaggacgccttggacgccgcggcgcgcaggggcagggccgcggccgccgcctcgccctcgagcgccgccatctcgccgcagtcgcggtaggggcaccgcgcgcgcgcggggccgacggcgcgctcgcagagcgcgacgcaccaccggtcgaacacgtcgatgtcgagcagcttcttgcagcgctccgggtgcatgacgccgccgccggagcagccgcccccgcccgccaggaggcacggcacgggcacgctccccgccgcgacgcgggcctcgatgtggccgacgacgcaggcgacgcagaacgcgtgggggcagccgtcggagacgcggaaccggtcgaacaccagcttccactccatgcagacctcgcagtagaaccgcccgatctcgtcgtcggtgagcggccgcacgcggcccgcgcgggacgacgacgacgacggcgggtccagcatggagccccggatcagctcctgcaggtactgctcccggtcgagctcctgcgccgccgacgccgacgccgacgccgcggcgctcgccat

SEQ ID NO: 83751 - DNA, 240 bp, Oryza sativa
  Clone ID: PAT_MRT4530_83051C.1
atgcccagaggggggcgatctgatgccatcgccggtggcagcaagaagcaggacgactgcgagtatgagaaggatgcggtggtgacctcgggccggcggcagcgcgcgtctttgattgtgcttcacatgatccccggcacggatcacatggattcaatgacgggccccctgcgtgagcgtgacgcgcccggccgcctcctgcatatgccccctgccgctgccgggttcgcaggcgactag

SEQ ID NO: 83752 - DNA, 948 bp, Oryza sativa
  Clone ID: PAT_MRT4530_83052C.1
atgggacggacgagaggaagtgagccaccggatcggattcgccggaaagaggccagaggcggcggattgcggcgacgcacgctggcggcgagaaaaaggggaaacggcggaggggcgacaaggattaaattcaaggtggtgggagtatctccggggttcaaggagttcatctccggcgtcggatggggcagagcgacgccgtggagatctggcgacgagcggcggcctccgggagcgagcggcgatggtgacaagcctatggcgggtgacggcattgctagggaacggtttggggagaccctagggagctcaaggacggtgtcggtgagggtggtcgatgagctggggcccgacgacggcgcgcgactgcgcgcggcggctgaaacagagcaacggcgaggcgcgcggcgcattgtgcggcaggaggaggaatacggtgggggagctcaccggcgagggaggagcggcgttggcgacgcagagggagtcgtgacgaggcgtgcggcaccgagcttgacgaggccgacgccgaggctcacgcggccattggcacagcgcggcagcgaggaggcagtcgcggggcgagcagctagcggctggcaacaatggcgcgggtggttcgagcgaggcgaagacgaaacgagaggggagggcgcgggctttataggcgaggaggagaggtcggtttggaggagggaaaccgacattggtggtcaagcttcttcggctggcgcggcgcttgcggtcaaggagcggcaggtggtgacagcggctgtggtcggggaaaaaggcaaaaaggggagggaaaagagcttggctcccttgccactttgggaggaaggagaaagagagaacgagggagaggagcacgagctctgtctcttggttttggaaggatgcggcatgggggcatcggggccgagcgatgacagcggcgatgacggctaa

SEQ ID NO: 83753 - DNA, 2647 bp, Oryza sativa
  Clone ID: PAT_MRT4530_83053C.1
atggcagaggcggtcctccttgctctcacgaagatcagtgatgctttagcagatgaaatcactaaagaattgattgtgaaactgtctgaaaaggttaataatctgaaggatctggatgaaaagattgagcaaatgaggaagcaattgacaaccatgaacaacgttatattgcagatgggcatgatatacctcaccgatgaagtcgtcaagggttggattggtgaggtgaggaaggtggcgtaccgtgttgaggacgtcatggacaaatacttgaattactccatgcaaatggcggaagaatggttccttaaaaaatacttcatcaaaggatcacattatgttttggttttcactcaaattgctgatgaggtagtcaagatagaaaaggaaatcaaacaagttatagaactcaaggatcagtggttgcatccatcccagcttgtttctgacccactcactgagatgggaagacagaggtcccgggacagcttcccagaacttgtgaaagatgaagatcttgtggggattgaagacagtaggagactgctgactgaatggctgtacgctgacgagctggacagtaaggtgataacagtgtcaggtatgggcggactggggaaaaccaccctggtcacaaatgtgtatgaacgtgaaaagatcaacttctctgctcatgcatggatggttgtgtctcaaacctacactgtggatgctctattaaggaagctgcttaggaaagttggttacacagaaccaccactgtcatgtaacattgacaaaatggatgtgcatgatttgaaagaggaaataaagcgaatgcttaaaggtaaaaaatgcttgatcgtacctgatgatgtctgggaccaagaagcatactttcaaatacgtgatgcattccagaatgaccaaggaagtcgcgtaataatcacaatgcggaagaatcatgtggcagctcttgcttcctcaacatgtcaccttgatctccagccattgagtgacattcatagctttgatctattctgcagaatggcattttataacattaaggaccatgagtgtcccacagaactcatgaaatttgccaaatctatagttgagcggtgtcagggccttccactagcaattgcgtcaataggctgcctcttgtcttcaaggtcacggtcacattatgtttggaatcaatcatacaatcaacttagaagtgagttgtcaaagaacaatcatgtccgagcaattttaaatatgagctaccatgacctgtcaggagacctaagaaactgctttttgtactgtagcctattcccggaagactacccgctctcccgtgagagccttgtgcgtctgtggattgcagaaggctttgtcctgaagaaagaaaacaacacaccagaggcagtagcagagggaaatctcatggaattgatatgcaggaatatgcttcaggttacaaagtatgatgagctcggcagggtgaatacttgtagaatgcatgacattatgcgagacctggccttttctgctgctaaagaggagaagtttggctctgcaaatgattttggcacaatggtagagattgataaggatgttcgtcgtttgtcatcttaccgatggaaagacggtactgcacccagacttaatcttccacgccttcgaactctagtatcacttgaagcaatttcatcttccccagacatgttgtcctcaattttgtatggatcaagctatcttactgttcttgagcttcaagattcagaaatcactcaagtgccagcaactatagggaatttatgtaacttgcgttatattggcttgcgacgcaccaaggtgaaatcactcccgggctctgttgaaaagttatcaaacctccaaacgctagacatcaggcaaacgcatatagagagtctaccacaaggaatcactaaaataaaaaagctaaggcacttgttagctgatagatatgctgatgaaaagcactcagagttccggtttttcataggaatgcaagcacctaaagatatgtccaaccttaaagaactacaaactcttgagaccatggaagcgagcaaagacttggccaagcagctgaaggaactaatacaactacaaagtgaacgactctgctttgaggcattcaagcccatctccactcaattacacaggttaattatcagagggaaatgggccactggaacaatggactgcccaatatttcgtacccatggcacatgtgtcaaatatttagctctaagttggtgtgatcttggggatgatccattaaggatgcttgcattattgcacttgccaaatctcacacatctgagactgagcaacatgcataatgcaaaaaagttggttctatatgcagaaaactttttccgcctgaagtcccttgttttgaaggacatgccacatgtcaaccagataaatattataggtggctctctgtcatgcattgaagctttgtacatcttggcactgccaaacctggacaaagtcccactgggcattgaatccattctctccctgaagaaactatggctgctgggcttgcacatggactttaggaagcaatggaacaatagtggaatgcaccagaagatgcagcatattccagaggtatgtatttatgtaaactgtgtctgttgct

SEQ ID NO: 83754 - DNA, 1467 bp, Oryza sativa
  Clone ID: PAT_MRT4530_83054C.1
ctagcacagttgcagaccactagttccagatgatccagctgagagctccaaggctattctggcagacaactctatcgaggtttgttcatagactaaaaacagtggtgcaatacgtaagcaaggaacattttgtctgtggcaaacacatttgtagtggtaagcactattcatggggtcatttgcatccactgggacctgctcggcagtacacttgaatcgacaccctctgcactcgttgtatgtgcatattggagcagtcgaaccaatcaacattctccttgcatatttgggcagcctctccttgtttagaaccttgacatcatatgaaattgaaacatttaaatacataggttttatcatgtcaacctgagatgctgccatggtgcccttgattgcaacgagcatgactgaagagcaggaaacagaagaggaagaagaggggcaaggagcttgtggtagatgtggggcaagcattggccataacccttcttcaaacaaatggatagagaatgggaggatggtggtgtgccgcctgttacacgacggcatgggctgcactgcctgtgagaagttactgaattttatggtcgagttcacgcgttgaagcctgtagggacttgccttctttccctttttttttttttctgcaagatcaaaacaagccaaaagttttattatgagatcacgattaaggtagacacacagcaatgacgtacaagagaatcacaagattgatacatagagacaggcagactgcgccatgcatatatgcaagagcaacacgagcacatgtcagctagcctggcgacattcagaacgtgaactactcaaaacaacagaacaaaataagatccagctgacgcgacgatggcctgacataacacggccactactagcaatcgatcgatcacatacttagcccccccctaattaaccaaccaacaatacttatttaaccactagaaacacactagtgatcatcgatcatcgatcatctagctagctagagtgtgattttgcagctggctagctagagtgatcatctcgatcacctaatgtaaattacttgcagctggaggaggccccggggacgccgcacttggacgggatctgcgtggcgcggtcggcgtcgatgttctccaggttgcggagcatgtccctgcggtcgcagaggcactggaagtcggcgttcgccaccgccttgcagcactccttcgtcggcgccttctccgcgctccccaccgtgcagtacgaccggcacagcgccacggccgaccggtcgacgccgcacatcgacagcccggccgcgccgcccgccgccgccgccaccaccaccaacgccaccagcaccaccgcgcttactttaccggccatcgtcgtcgtcgtcgtcggagatcggatcgatcagagactatacgctagcttagctaagtgcgtcgtgggggttcgtcgtgtggacgcgtgggc

SEQ ID NO: 83755 - DNA, 828 bp, Oryza sativa
  Clone ID: PAT_MRT4530_83055C.1
ggtccggaactgcagtttccggcccaacccacccgtttcgttcgaacgaaaatacgccccaaaatggaaaacgggagattataacgaacctgcgccgttgttcctccttccacggagcaccgcctgcttcgccaaatccaccgccgcggcgcgcggactcctcctccgcctcggcgtgccggcacctggatcttttttccgcatgcaccgcgctggcggagtcgacctcgcgcccgtccaggtggtggtgtgtgccgtgtagaggaggaggaggaagcgagggcgtcggacttgtgcgtgcgcatgtccagggggtccaggggcaggacgacattcgacgcggtcgccgacgagacaactcagggacagatggagtagtagttggaggtccaatattatagcctaggacacgaacaaatgcagaaaatggaggtgttgatgctaatgatcctcgaaatatgcccttagctggtgaagaaaatgttccaggtgttaataatgtacagctacaaaagaaggtacacaagaagacagcaaagactaaccagcgagcaggcaaccataaaaagggctagcagaggtgctgtaaaaaaaatcaagaacctacaagaaccataaaagagatgatttgttttgtttttgggacctcaatacacctacaagaaccttagttacatctaaattatgtaattattgctatgtacttgaactcttatgtaatagctatttgagctgatggataactgctatataggaatactgctacttgatgggtgaacaatagttacatgatgatatgtcagaatgcatttgtgaacaatagttatg

SEQ ID NO: 83756 - DNA, 278 bp, Oryza sativa
  unsure (1)..(278): unsure at all n locations
  Clone ID: PAT_MRT4530_83056C.1
cccaancaacatgctgaaattctataccacaacctgacaacctctttgggtagggtgtacaaattacacatgaacattacacatcattccatttcaattgccagaaatcgataataatccatcccagacaatgaaaagtcatatcacgtggttaagaaaagcaaacaaataaacaataaactctcttcaacgctcgaaacttcaaaattctcattacaaacgatctaaattaacaatgaataactctccctaaaatttttccaaccaagtgcacttac

SEQ ID NO: 83757 - DNA, 1345 bp, Oryza sativa
  Clone ID: PAT_MRT4530_83057C.1
gcacgaggccccgcttacttcccgcttaccccccagtgctccctgagcttgctcacacacgttccgaaaaacaccggaggaatattccccacctcgcctctctccagccaccgacatggccgccgccgccgccgccgccgcttccgcctcctcctcgtcgtcgtcctcctcctcggccgaatccgtccccctccccaccacgactctccccatcgacaaggcggcggctgtaggcggcggtggcgaccgggcggtggattgcggggtgtgcgcgatttgcctggataagatcgccctgcaggagacggccctcgtcaagggatgcgaccacgcctactgtgtgacgtgcattctgaggtgggcgtcctacaaacagacgcctcaatgcccacagtgcaaacatccgtttgatttcctcagcgtgcaccgctctctcgatggctgtattcatgactacatgttcgaggaaagcgtttgccttctcctgagggccacttggtttgaacctctgatcgtagaggctcacgaagaggctctggatgaagaagagttataccacatctatcaatatgatgatggcgttgaagatgaccttgacgaggaagcttattacatgagcaggtctccgagcattcgaattggcaacaggaggtggggtgacaatggatatgtcagaggaggcaggaaagaggcaaggccagtgagtcgccagtccttgaatgacactgatgctggtccatccaggactcccaagaagaaagatgtatcagcatcgggatcaggttctgtgtctaaggaagttgcaggaagacgagcaaaacgagctctgaagcgtgaagctgctgataaggcagctgcagaaaagcacttgaagcacctccagaggttgggcctcaggaaggcacccgaagcaacagctgaagcaactccagaggttgaacctcagctgaacgagtgattttcaccaacttctgtagataatggtgctgtgaagaaaactgcagcccttgggtcacccgaataatcttccattgtgaaggactggagcgtggccttgtatcgttggcaaacttgccgatttgtacagtactttagtttcacaaattactcgtagcattgaactgcacatcagtctgcaccagatgcggcgatgcaatgcggtttacctcaatctgataatactttcagttaccgggattcctttgcatgatgcagaggaccctgaactaggagaatgtcagttgctagctttgctagtattttgtgctgcaatgtatcagtttagatagaatgttgcatgtgactatcctccgataaatgaaatgaggaaactggtttttttgcc

SEQ ID NO: 83758 - DNA, 323 bp, Oryza sativa
  Clone ID: PAT_MRT4530_83058C.1
tgttttcctcaccgagctaaccacgggacatacgtagccgtggtacttctacgcttaacaaatcacaacagactgacatacacctaagagacactattgttcttgatggtacatctgacagatcgagccgaggttgtgctgagctgagctatcgcagagacagggggatgaacattttgaaccaggcgatcaagcctggtggtcactcggcgttctcgggggcaagggagaccggacagctggtgcgggcgtaagtgcgttatgacggactggagactgaaaagagcacggacgctcgccgtgggcggtcgcacgccgggcag

SEQ ID NO: 83759 - DNA, 1302 bp, Oryza sativa
  Clone ID: PAT_MRT4530_83059C.1
atgccggcctcccccaaggaggcgcagagccgcgccggcgccggcgtccgcatgatctcctcggaggagctccgcgcgcacgcgtcgagggacgacctgtggatctccatctccggggacgtgtacgacgtcacggcgtgggtgccccaccacccgggcggggacatcccgctcctgacgctggcggggcaggacgccaccgacgcgttctgccgctaccacccgccgtgggggcgcccgctcctgggaagctctccttcggggggctgttcgagcgggtggggcccacccccgaaggtgcaggtcgccgggatgctgctcctcctatgcgccgcgctatactgcgtcctcgcctgcgcgagcgcgtgggcgcacctcctcgccggcgggctcatcgggttcatctggatccagtccgggtggatggggcacgactcggggcaccaccggatcacggggcacgccgcgctcgaccgcctcctccaggtgctctccggcaactgcctcaccggcctcagcatcgcgtggtggaagtgcaaccacaacacccaccacattgcctgcaacagcctcgaccacgacccggacctccagcacatgccgctcttcgccgtctcctccaagctgttcggcctctggtcctacttctaccagcgcaccctggtgttcgacgccgcgtccaagttcttgatcagctaccagcactggacattctacccggtcatgtgcttcgccaggataaacctccttattcagtcggccgtcttcttgctgtcgagcaggaaggtgccacagagggggctggagatcgcgggcgtcgccgcgttctgggtttggtacccaatggtggtgtcctgcttgcccaattggtgggagagggtggcgttcgtggtcgcgagcttcgtgattaccgggattcagcatgttcagttctgcctgaaccacttctcctcggaggtgtatgtcgggccgccaaaggggaatgactggttcgagaagcagacggcgggcacgctcgacattcagtgctcgccatggatggattggttccacggtggcctgcagttccaaatcgagcaccatctgtttcctcgcctcccgcggtgccaccttaggaaggtttcgccatttgttcgtgacctttgcaagaagcatgggctgccttatgccgccgcctcgttctggcaggctaatgtgttgacatggaagacattgagggctgctgcattgcaggccaggaaagccactagtggtgctgcgccaaagaatttggtttgggaagctgtgaacactcatggatga

SEQ ID NO: 83760 - DNA, 717 bp, Oryza sativa
  Clone ID: PAT_MRT4530_8305C.1
gactcgtcgtcttcctccggccaccgccgcccgaaccctagccgagccgcgccgtcgtctccttccaaattcggccgcgcctttccttctccggtgaaatcaattgaggggaaatgtttcccgagatctcctctaccttttcccttttggaatcatcctctaaatcgctttggaaatccgtggattcgagttcgattcggatcggtctctttcctccgagccttaactttccttcgccatcgccggtcgccgtgggccttcgccgcagccttccaacccctttaaaaggatccccaagcccgccgctgcccgtcgccaccctcgccttcgtctctcgtcgccggtagagtcttagcctcgtgagacctcgtgccgccgtcgacgccgccgctccagccgtgcgccgccgtcgctccagtcgtcgccgtcgctcggggagaccgccgtcgtggtcgccgtcgcgtcgccgtcctcgtccgccccttcgccatcgctgaaaaccgccggagcatcgccgtcgtcgtcaagccgaaggtcgccgccgtatcaacctcgtcgccgtcaccgtccgttgatcttccaccgctactttggtcactgattccgacgttctcggagagtccgaatttgcaggaaaagaatttgaggaattccaaggccagcaaggcaagtcacacagatcccaaacaaccctttgagcatgttgatcccgtttaa

SEQ ID NO: 83761 - DNA, 1944 bp, Oryza sativa
  Clone ID: PAT_MRT4530_83060C.1
ctcaactttggcgagaaaccagcgaggcaccaccctcctctttaagatccgatctcctcccctcctactcctcctcctcctcacgttcccccatctccgaatcccgccgccgccgccgccgccgccgaccatgcctccggcgatcccgacggccacaatgccggcctcccccaaggaggcgcagagccgcgccggcgccggcgtccgcatgatctcctcggaggagctccgcgcgcacgcgtcgagggacgacctgtggatctccatctccggggacgtgtacgacgtcacggcgtgggtgccccaccacccgggcggcgacatcccgctcctgacgctggcggggcaggacgccaccgacgcgttcgccgcctaccacccgccgtcggcgcgcccgctcctggggaggttcctcgtgggccggctcgaggactacacggtctcgccggcgtccgccgacttccgccgcctcctcgcgcagctctcctccgcggggctgttcgagcgggtggggcccaccccgaaggtgcaggtcgccgggatgctgctcctcctctgcgccgcgctctactgcgtcctcgcctgcgcgagcgcgtgggcgcacctcctcgccggcgggctcatcgggttcatctggatccagtccgggtggatggggcacgactcggggcaccaccggatcacggggcacgccgcgctcgaccgcctcctccaggtgctctccggcaactgcctcaccggcctcagcatcgcgtggtggaagtgcaaccacaacacccaccacattgcctgcaacagcctcgaccacgacccggacctccagcacatgccgctcttcgccgtctcctccaagctgttcggcctctggtcctacttctaccagcgcaccctggtgttcgacgccgcgtccaagttcttgatcagctaccagcactggacattctacccggtcatgtgcttcgccaggataaacctccttattcagtcggccgtcttcttgctgtcgagcaggaaggtgccacagagggggctggagatcgcgggcgtcgccgcgttctgggtttggtacccaatggtggtgtcctgcttgcccaattggtgggagagggtggcgttcgtggtcgcgagcttcgtgattaccgggattcagcatgttcagttctgcctgaaccacttctcctcggaggtgtatgtcgggccgccaaaggggaatgactggttcgagaagcagacggcgggcacgctcgacattcagtgctcgccatggatggattggttccacggtggcctgcagttccaaatcgagcaccatctgtttcctcgcctcccgcggtgccaccttaggaaggtttcgccatttgttcgtgacctttgcaagaagcatgggctgccttatgccgccgcctcgttctggcaggctaatgtgttgacatggaagacattgagggctgctgcattgcaggccaggaaagccactagtggtgctgcgccaaagaatttggtttgggaagctgtgaacactcatggatgaattggagcctgaggcaactgcttgtgtgcatgcaatcacctcaatgcttcttaattgtgtagggagattgatctttttacctttacccgttggagttggatcggatttttcgtgttggcaagtgtcttgtctttgcagctgaagagtgggtttatgcttcaattgtctacctgttcttcatgtattagattgtccgattcttcgcattatcacagtaactatatctatagtacttgcattatattatgaacttgtggcttcaagtaaaatccatttcattttgcttgcaaaaaaaaactgcagaccgttgaagttgatgaaattgtaagcttaataaatggttggtcaatcttttctggtaaaaaaaaaaaaaaaaaaaaaaaaaaaactcgagactagttctctcctcgtgc

SEQ ID NO: 83762 - DNA, 1060 bp, Oryza sativa
  Clone ID: PAT_MRT4530_83061C.1
atggtcccccgcggcgcggcgctcgggaggggccgcggggtcgacgagcaccctcgggacggggaccctgtgggggacgggttccccggcgagcgagaaggagaggaggaggagcgagtcgtcgaggcggaggtcggcggcggagagctctgggcggaagaggtgcagcacattgcgaccccgaccgcaacccaattaggcgcggccgcgatgaacgacgacgtggtggctgagatcctcttgcggttgccggcgaagagcgtcctccggtgccgcgccgtctgccggagctggcgccgcatcaccaccgccgactacttcgtcgccgcccactcccgccgccggccgctgcagctcctcggctacacggggcccaacgacgagtcgctgcgcgacgacgaattcttggtcacctccgccccggtcaccgccgtcccagccgtctacgacgggacgacacggagtgccggcgatttctgcggcgcaacgtgcgcctgtgaacgccgagaccatgctcatctgcaacccggcgacacggcagctcgtcaatctgccgccggtgagcactggcggcgtcgtcgtcgaccggaacgacctccggctccactcttccgccttctacttccaccggccgtccggcgagtaccgcgtgctgtgctaccggaagggcaccaactacatcctctccaccggctccggcgaggcgcggcggctcggccccgtccccgaccagcaacgcaggacttgctccttctccgccgtgaccgtcggcaagacggtcggcgagagcgtgtactgggaccgccgtgaggtcgacgatcggagccggataatggcgttcgacacggtgtcggagaggttccgggcggtcgcgccgccgccggtggagcatgccgacgaaggcccgctgctggacatgcatggacggcacgctcgccgtggcggcgatgccggcggagccgtacctggacgtgtgggccagagacggcggcggcggcgagagatggggcttggtgtacgacaccaaggagaagaggatgctcagctgctctcatcgtag

SEQ ID NO: 83763 - DNA, 172 bp, Oryza sativa
  Clone ID: PAT_MRT4530_83062C.1
gggacgggtggcaatcgacctgcgttactgggtggcaatcgttactgcgtgtctgcgcctctgcggctgcggccagcacttatctgcgccagctcctccatttttcccgcggctgatcactgcggccccgcagctcagcgtcatggaggaccttcgacacttcgtggtctag

SEQ ID NO: 83764 - DNA, 219 bp, Oryza sativa
  Clone ID: PAT_MRT4530_83063C.1
atggcgaagcttgcaatgtgcttcttcatctgcgccgtcttcctcctagtcgttaccacgccgggcctgccgcgcctcgccggcagcgtcccgctcggccggcgctggctacaggactccgctgtcgttgtcagcggcggcaggctgacgccggcgatcaccgcggcgtacaacgggacgaagaggcttagcccagcgaatctccgcgtgcatgtgtga

SEQ ID NO: 83765 - DNA, 162 bp, Oryza sativa
  Clone ID: PAT_MRT4530_83064C.1
cggcacgaggggcaaattaatctctagcacatttatacaatttcggcagatggacttcaataaggattacaatattaaggtgtagaattgactttttgcatagttacatatataatgtatcctatatatcgagatacccaaattatgaactgttttttgtgt

SEQ ID NO: 83766 - DNA, 465 bp, Oryza sativa
  Clone ID: PAT_MRT4530_83065C.1
ggcaagcgtttcatcgtgcgggtggggacggaaggcgccgctcggtcccctcggaaagatttagattaagattaagataagataaaattttcaaggacgacggaagtaaattgaatcggattattttttttgttttaatgttttttcgcctttttttcgttattacttgttacggacaacggaaacgctttcaattttgtaagtagaggaaacgctttcaattttgtaagtaagtagaggaaacgctttcaattttgtaagtaagtagatatagagatagagaagatagagatatatagtatcgtgtcacatataatatgataggattcgatttttttccgcgtcacatataatttctttattttggaatcagacagatttgttttttattttttcgtcccttttttaccgcgtccacagaattcgattcatttttttgcccggttttttcacccgatttttccc

SEQ ID NO: 83767 - DNA, 1508 bp, Oryza sativa
  Clone ID: PAT_MRT4530_83066C.1
ggcaaaaactcactctttcattcagagattggtattttcagacataaggccttattttgtgttaaacaccgggggacccaaaatttgtaggtatggccatgcatacttgggaacggggcaaatgccagcactgctacatgctagccgaggcgaaaattattgcaggtcgtctgccgagacgggaggtatgaactgaaccccagccgcgatgcctccaggtcaaactccagcaggttgtcctccatcatgtgcccaccgatcacaaccgacgtctgcggctccgtgccggcgtccaccacgccgaggcagagcgcgcctcccttggtggccaccatcgagttcgccccgaacacaacccacgaggcacccgtgctttgcagcaccagctcgatggtcggcacggccggccccacgcgcgtgctccccaccttcctcccgtcgtagcacagcttgaacggctccactgccggtgctcgcgggatcgcggccatctccttcgcgaacgcgtcggtcaccgcctggtggatggatctctccagcacggtgtagggggacaccgtgcttagcttggtgccgcccactcctttcttgtcgatggccagcagcgtcgcgtttaccggcacggtgtggccgttaaccttgatgcccgtcaagccgatgaagtaatcggttgacttttctctccagacgcggcctttcagttggatggtcgtctcgccgatgaagtacttggtcgtcttgtccttcctgccgtacggcgccgtgctcaccgggttgacgagcagcggggtgtagatgagagacttggagaggtccacccctggctggaacgtgtagggcgcgtcgccgaagacaacgacgccggccgcggaggccggggggaggcagagcgcgaacttgcgggagaagccgaaggtgtcggcgagctgcgttgggagcgcgaagcgggcgcggctgagggacaccatgccggtggcgccgtcggcgagtccttgggtcaagaacgtgtggccgcaggtgaacaagaacgccggcgcggtggcgagcggccccggcgcggggcggaaggtggtgggcagcgacagcacgtcggtgatgatgttgccggcggtgctgacgctcgtggcggtgttcttcgggaactcgctgcaggtgtcgttgaggcagcctgcggataccgcgtcgaggcaggtgatggcgcagccggcgttcttcaggaggcggcagggcttggcaccgcaccgcacgccggcgtacgacgaggacacgtacccggcgtcgcagtccacccagagcatggtgcccgcgaggtccagcacggccttcacgggcacctgcggcgtccgctgccggaacatcgtcacgtactgctgcgtcgcgtcgtccttgctcaccggcagcaccacggagctcggcccgccgcctgccgccgcgcggcacggcgagaccgagacgaacagcaggaggagagcgccggaagccacagcaagaggaggcaagcgtgccat

SEQ ID NO: 83768 - DNA, 1403 bp, Oryza sativa
  Clone ID: PAT_MRT4530_83067C.1
atggcccattgttctgctgcctgctccctgctgctgcagcactgttcaggccttcaagagtttgcagtcctgcagatatatttaactgaatgcatgtgcaagaagaagaagaagaagagcaagatggggaaggcgggtaggtggctcagaagcttcctgaccggcggcaagaaggacaggaagggcaaggacggcggccagccgccggcgccgccgtcgccggcgccgccgtctgccaaggagaagcggcggtggagcttccggaggccgccggcgcaggccaccaccaacacgtcgtcgctctgcttctccgacgtgcacgccgtctcgccggcgccggaggcggagaagctcggccgccgctgacgtcgccgaggagaacgaggccgccgcggccgcggcggtcaaggattcaggcggcgttccgatcctacctggcgaggaaggcgctgtgcgcgctgagagggatggtgaagctgcaggcgatggtgagggggcagctggtgcggcgccaggcgagcacgacgctgcgccgcatgcaggcgctcgtcgccgcgcagaggcgcgcgcgcgccgagcggctgtgcctcctcgacgacgacaaggacaagcacgcgcgctcgccgcggccgccgacgacgaccagccgccgctcgtcgccgcagcaccaccgatcacggaagccactggaggtggtggataggggatcggaggagaacgtgagggtcgtcgaggtggacaatggcggcggcggcggcggcgcggcgagggggtgcgggaggcgcagcacgtgcggcgcggcggcggcggcggcgaagggcgagctctaccagaaggtgtcgccgacgccgtcggcgttgacggaggcgagcgcgcggacaatgagcggccggctcgacgactactccttctccgccgcggcgtccgaggccagcgggcgccaccacagcgttccagcagccgcagtcgccggcggcgaccacgcggcggcgctgcagcagctgttcccgaagaactacatgtcgaacacggagtcgtcgcgcgccaaggcgcggtcccagagcgcgccgaggcagcggcacgaccagccgatcagcgccgctgcctcgccgtccccttcgccgtcgtgcggcgagtggacgacgacgccgggcgaccgccggcgcagggcgtcgctggacccgcgtgacctcgccgcccccgcctccgccgccggcgtcggcgtcggcgcgcgcatggagcggtgcgcgtcgcaggcgcgcgccagcgccagcgcgagcgcggcgtgcccgtgggcagtgaggatggacaggtcgacggcgtcgctcgccggcggcagcgacggcggctcgtccgccgccaccgcggtgaccgcggccacggcggcgcgcgtgacaagctga

SEQ ID NO: 83769 - DNA, 5586 bp, Oryza sativa
  unsure (1)..(5586): unsure at all n locations
  Clone ID: PAT_MRT4530_83068C.1
tttcttgtttgttggtctgctctgtgtgtttttctgtttgctgtgcctgccggtctcttcgtttgcctcattggccctcaggttcaagcctgcaaagcctctctccagttccatctagcgcacgccttcctattcgcgcaccccacatccatcgcccttcgcccagatacaatcgaatcagcaggaccaccaaatgccctaaacaatcaggcatctgtctcttgttaaatataacctactcgggagcatgctactctatgtactaataaacagtaaatgcacattgcaaactgaaacgcttccaccacatacttcacacagctcagcaaagncataaggtcaagcatttctgcagataccgggggtaatttacttgcccaacacaagcttcttatagagcgcaagtatatccttcttgttaggattctttaactctagcaactgcgctccaaatccatgcttggtaagctcctctttcagctttgcaatcgtgagctttttatacccatctggattgccatctttagtgtctgtgctgactgtgacactgtcttcacccatatgaacagaaccgccatcttcagattggaaatgctttagagggctagtattgcttttagatctctttctgctcctctccggacgatcaatatccatatcttggaccgactccatgcctacttcattttctctcaacctcttgccatgagtggtggtacggagcttgctgtccagtgcagtctcaacaaggcgaactgatgtcagctcctggtggagtacatcaagtttgctttgggtagactgtagctgtaaagacaaggcttctgcacgcttgttcgcttcagctctagctgcacgctctgttgacaaaagagactcaaggacgtgcacggtactggacctctgttcattgctctgtatcattaattcctcgatttctttctccctctcggcaaccctactctcaagcaaggcaaccttggacaaggcatctgtttccgatttatgcatcttctgcacttcatccagtagatttactttctcctgctccagtctgtcaacttgtctttggattctttcaatcactgctaatttttccattgacaagcgctgtgcctcgtccttctctttttgggctgtaacggcctcggttcgagctacatcagacaactcggtagctctttttgcttccctttctgcagctttgtatctttcttctgcttcatcatatttcttgcattcagataagaacttctcttgaagatggttcttttcctgttcaagcattcttgcttgcttttcaaatgataccgccctgtctcttagaaattctaattttcctgttagttctcttatttcatccttcaaggctgcagtttccttgttatggctttgtgcctttgattccgctacctgcaagcgctcagccaacacactttcttcactctctgcatgtctgatctttgcaactaatctcttcatttcttcttccttttcctccagatgtgaagcaaactcagcccttataccactctctctttcatgggcaattttgttaatttgctcttgcacagatgctaatctctccaatgcagctttagcttgtgcagcagctgtttcatatttatccctccactctgtggcctcatcctgagcagccgctgcctgttcacgggctgctcccaactttccctctgcagagctatatctggactcaagagttgctagttgagaaatgaatccatcttgctcagccttttgctgagtaacatattgctcatacttcactctccaatcagtgcattcatggcgtacaagatcaagttctttagacaagctcaagcagcgctcatctagtgtgctacacttggtcctcaggtttgcaagatgagcactgtgatcttcagaaactcgttgtttttcacttatagcagcttcatatcgttttagatattccgatttatgggcctcatttgcttcaagttgcctttttagaagctcaagctgatcttcatttgaacgatatttcaatgcgaaggaagtcctctctgattcagcttcatttactaacttaaggcagagatccaatatgggtccttccaaatatttaggggtatcacatggcagttgtgctgggtgatggcagatgtcattcaccatcaccattggagtctgaatcacattagaaactttgactccaggagcagaacacgctgctcggagtttcctctccataatttgtatcatgtttgagcactgcttatcggcttctaaaaaggcattccttttgtattcctgaaatgtttttctgcagaagttgctaagaactttctcataatgcatacgggaagtgccagttccaacagcaacggtaccatatgcttcaagtgccttccttaaagcagcttcatgtgcatcccttaaagcatcttcttcagcttgtttagtgcgatcaaaagctgaaagatagacctctgcagcagaatcgtatgctctacggcattctgcttcttcaacactctgccaagaagatgatatagtaggtacagctccgttgtttattgcatccaaaaaagactgtgttacaccagcaagtacaggtccagtcatgactgtaccagcaacttgctttggccttgtcctctctaaaatgaacctagttaattcatcgagtcctgcttgaaattcaggccgcaatttctctataggaatttgatcaaggcgttgaagttcattctcactgttcaatgggcgcactagtgtgaaacattctctatcaggaaagagggcacggatggactcacggatctcattctttgaagatatatcttttcctctgccttcaagaggcctcagagcgatttcaagataatctcgtggagttatcttcctgtcgttctcaactaaatctaggtaaaaatccctcagtagccagatgaagataggtgagaattgcccgagctctgatgcagtagacttcccaccatttgcccgcacacggatatgcttggtcatttcagtaacaagtgaaaggcgatcaagagctgcctcatcgataccacccatctgattatatataaacatacttgaaagtaggactgccagtgagaatatctgaatgctgtaagtgcccttgaattcattgagaacaaattgctgccttgttttgaacctcgtctgatcgtatgcatcaatgccctcagtatcaagaagcaaaagactatattcagttccatcaagtgcagttctttttattggggcactccacatccaaaggcccttggtgcagggccgatgggtgcttgctacttgaaatccgctgcttcttcctagaagctggttaaggatgaagctcttgccctgcctggcgcggccgcagacggagacgaccccgacggggcccttgacgagctgcagcgcggccaccgcctccgggtccatccggaacctcccccgctcgtcgcagtacaccagccgcagcggccgcccacccccaccccccgcgaacggcgaccgcggggaggacgccgacgacgacggggtccacggcgagccgtggcccggcgacgcctcgtccccgccgcggcggccccggtcccggtccttggacgcggagccgcgtagccccagcatttgtgtagcaacccacagtagtccaattctaggaaatattatcagaaccttgtggtagttgaacttcttgccgtaaacctcccagctttgttttcttttagccagacgaaagcaaagaggtgctatgtctttcggacatttaccttggagccaatgatcgtgccagaaattcatttttttaccatctcccaatacgtttgtggttgctgcttggaacaaccgtctatcagtatcatcacaaggcactttcatgccaacccaaggtttatcctcatctttccactggaaccacaaccagcgtagacgaagaatcctggaaaatctttcaagatcagggaccccaagtcctcctattcttttcggtctgcaaactgttttccaattgaccaagcagctgccaggattagtgtgatctgggtcttcacctttccaaagaaaggaccttcgaaagcggtcgatcctcttgaaaacccatttgggcatgtgcagagatgaaaggtggtgaattggcatggagctaaggaccgtttttaccaacgtctcgcgccccgaagaagtgaagaatcgacctttccaagtgggaagcctttcccctattttttcaatgagggggagaaaatcaattttccttaattttcgataatgaagtggaaggccaagatatttgcaggggaaagatttaacgatgccggggaaagcttgcagcaaagaagcaaggtctacctcttcacacctaatagggaaaatctctgtcttggcaccgtttgtatgcagaccggacacttggcgcaggcctcttgcatggaagatctgttgtcccggcgcgccattgacaagaatttgggaagacgtcgcaacaagattcgagatccagttgagccattgagtgcagaaaccaaattgttgaaggacatcaaggaggtaaggccaacataccgtgtcgaacgccttcgcaatatccactttgatgaacaggctttgctttttagtcctatgaaggagacttctttggaaattggtacccaatctttctttgtagaaacggtaaagttcctcttctttatcttggtttgtgacagcaattccggttggggtctgtaaagactgaatgaaattctttcttctccttgagttggcttttaggtagaaaaattttgaattaacatcaccctccttgatccaggtgagtcgagaccgctgtctgatcttaattttgttaagcactgcaagccctagcactcgagatttcaggttagagattaacagacgttccttgtcagatagacttcttgattcttgtgctacgtcaagctgaaaaatgactacagtcgccaccgcaaattgcagcgcaatgtcccccacctgacttttgttccacctcttaagatcacaagctagtcgacaaagcttgatcctgaaaactgcaagagggttggtggcaaagattgatctgtgccaggattcttgaactacttccaaaaaacctggaattttcaaccaaaaggcttcaaaacggaattgaggtggtttgcttcttttctcttttccaacaaggaaaagaggtgcgtggtctgaacatgtagaggagagggggaaaaggtgtgcttctccaaacatgaaatcccaatcagttgtgataaacgctcggtcgatttttgtttgtgttggatttgtcccatctcccgcccacgtgaagcgacgaccaggaaggtgcagctctttcacttggattttatccaggagaccactaaaacgttgtatcatccttctattgagacgatcattatttttgtcagaaattttgtagataaaattgaaatctccgatcaccatccaagctggtttcatggtgggttgaagtgtctctagttcagccaggaattcaattttttcagcttcgagttgagggccatatacaactgtgatcgaccattgaagcccttcttcgcgcat

SEQ ID NO: 83770 - DNA, 156 bp, Oryza sativa
  Clone ID: PAT_MRT4530_83069C.1
aattcggcacgatggttggctactacactgaactgaacaccaaccgaagcagcgacctcaacaaccatcgagcaaactagcaatggcctccccaatcccctcgccgccgccggagccggccaccgattgcgatgatgcccaatcccaccctccccc

SEQ ID NO: 83771 - DNA, 243 bp, Oryza sativa
  Clone ID: PAT_MRT4530_8306C.1
agcgcacgaggcagtcatgagacagcttacaccaacctagtggagaagctctctgagattcctcctatctacagagcatctagcatctccttacatagctgtaggtcgctgatctcactggcggatgagtccagcagtatgcacggctaagtcccgacatgcttattcgagcagtgcgaggctcagtatcacacagcgtcattatgtttatacacttcaggaagctatcacgtcattcgggct

SEQ ID NO: 83772 - DNA, 304 bp, Oryza sativa
  Clone ID: PAT_MRT4530_83070C.1
tacctccggcgggggagggcaaagcttactcagctgcctctggggccgcgtagagacggctccaacggggctagccaagcccgctgcaacaatggagaaggagactacgccggctccagtgaagaaggcggaaatagcaatgacatcctcgccgtcgtgcgctgcaaacatgacagcaattcctgccgggatccaaagcacacatgccgacaactacttacgggtgcagggccaaaaatggtgcaacttgcttacggatcgggcgtcaacctatgtgcactcttctgcgggcggtggttcgtaa

SEQ ID NO: 83773 - DNA, 258 bp, Oryza sativa
  Clone ID: PAT_MRT4530_83071C.1
atggggtgggagagcggtccctttggcgcttggatttgcgggaagttcgcttgcggggaggcatccttcaaacaagatatagacaagggatcagtgaatggaagccaaagaagcaagaaccaagggaagaactccaccaaaggaaatcgcaagataagacttgaggaatcgaaggatttgattttagggtggatacctcaagaacgcgaagaacacttgaagaacgcggtgaagatcaacaatgtaggtcccaagtag

SEQ ID NO: 83774 - DNA, 555 bp, Oryza sativa
  Clone ID: PAT_MRT4530_83073C.1
atggaggcgttctactcggagatttcctcggggtggtacaggttcatccccgacgacgttgacgacgacggcgtgccgccgccaccgggcgagacgaaagagaggagcgggtgcccccacgacgagacaagcgagagaagccaaggtggcaatggccgccgtcgtctcactctggcgccgtcttggacaacttcttccaagggactagcagctagcctttcgccggcgaagtcctcttctgaagaatgtgagcgcgcttgttttcggcttggccgcttggtggaggcggcggcggcttctgcgacaagaccaagagctgtgcatggatcgtccgctgcgtttgatcagtttggcagacttggaaagtgcggtaaaaccctggagcggtcctcttccgtctccgaggaggtcgccaccgagaacgttggacgctatggtttcttcagctctgcaagtgaaaacaaaactggagggtggggttttgcaatccgggatcatgcggggagtgctgtgcttgctgtgcagggaggattgattcggtgcaggatgctctaa

SEQ ID NO: 83775 - DNA, 357 bp, Oryza sativa
  Clone ID: PAT_MRT4530_83075C.1
atggcgagcaccagcatgcaaccaggtctaacacatgatgtgatccaaaaactaaacaagtacttaaggatcctatgcaacaagattagtgctaacatgcccgccgacgagctactccatgttcttaaggggctatgccccgacgcctacagctacgccaaggacgaccagaccagcaccttcacctgccccgccggcaccaaccaccgcgtggacttctgcccgccgacgagcggcgtgacggctggcgacgacgacggtgtgcgtggccaccgcctcccgcagctgagctgccggatttgtgcagccgcggcggtggtcctcctcccgccgcaggccacggcctcccgcggctga

SEQ ID NO: 83776 - DNA, 845 bp, Oryza sativa
  unsure (1)..(845): unsure at all n locations
  Clone ID: PAT_MRT4530_83076C.1
caagggaacacgaatataacaattaacattgtgaaaaaaaaaaacatggtgctcttcgcacatacaaatacaatgcaagatattagactgccaaatttcaaaattctaaagcaaagaacaaaagaggaattagtgcattactccataatttctaggaatcagaaagagggattagtagagatgattgtcgcaaaaaaaaagggataatatattcagttccaaatgactaaaactgatcccaaattatggttactacatagtcgaaaaacagaaggctgcggaagacggatcgatgatggccatggctgtacttgaaacagggcatataccaccatacaggcctgaaatcacacgcagaaccttaaacgagtacctcattttcaaataagtcgggcaacctaaactgactttaagctctccaattacatccataaacagccggccaagaagtactttcatttgaaagaagatccaactattggtataacaatgtcctcaagcaacggtatcaaaaaccaaagaaaccaagctcggttgccctctctttctcgaatgtctcgaagtactggtaaatgatggtaacagcaagcagaataccagttcctgaaccaatcgcacccatgaaatcagctagaacagtcaatgcaccaatgcacactccaccaaatgcagcagcagtggggatgtatctgttcaattccttctgcagtttgactcacgatggccaggcatcaccattttgntgntcctttcaactgtttagcaacatccttttgcagatgagccagatacttcantccatgtctttgagaaagagagcacagctgacagcatgaataccacat

SEQ ID NO: 83777 - DNA, 1308 bp, Oryza sativa
  unsure (1)..(1308): unsure at all n locations
  Clone ID: PAT_MRT4530_83077C.1
nttatataatgcataccaaaagtattaatcattcattcatgtgggcactaaatgttgctatagaccttactaacccaattaattacatgttgaccccctctgccatctgatggacctgatgctctccctaaacactaacagcatctctgcccccaggaccagaaattaacccttaattaattaattaacaagatgaatcaaaatgatataaaccaaaacccaaaaaaaaattatatagagatcaatgagcatcagcattatcatcatcatcatcaagagatgtgctctaggccctagtgattagaattgtgaaagaaaaatttatgctgctaaatcccctttctcctcaagctccaagagatcacaagaatggctcatcttgcaggtttggtacaccatgcaagtgatgacagtgtcaagaacacagatgatggagtagatgtatgcaatcaagaagccctcacaaaccattgatgaggtcagctcgccggtgacggcgtacggcctggcgatcctgagctggaagaggccctcgacggcggcagtggcgagcgtcgccgggagcgccacggcgacggcggtggcggcgtcgccgcggacgaggaggacggccctgaggactgcgcgggcgccgccgcgcccgccctccgccgcggcgaccaccgtggcgaggttgcacacggcggcggcgttggcgagcgccacggagtagacgatcacgcccgccgcggacagcgcgagcacggcgcggccgtcggagcccaggcgcagcgcctccgccgcgttgaacgccgccaacagcgccgcgaacaccgccgcatgcgcggacaggagcgccccgaagctggccagctgcgtccgtgccatagccgggtagctcgcgcgcaccagcgacgccatcgacggcgccgcgccgccgacgcaccgccgcgccccgcgtccgcgcgcggcgacgacggcgtgcacggcgtacgccttggcgaggaggaggaacgacatggcgagcgggagcgtggcgaggaaggagacgatggactgggacagccggtggttgaggaggaacagcagctgcgacgccggcgggaacccggcggcgacgaacacccggcgcagccgccgcgacagcgcgggctgcaggaggaggatggcgcgtggcggcgccgccagctgcagcagcgccggcgagcgcgacacgagcgcggcggcggagaacggcagcgcgagcagcgccgccgcggacgccgccgggtggtagtggctgaagaaggcgtgcagcgccatcctcactatcctcgtcgcgctccccat

SEQ ID NO: 83778 - DNA, 222 bp, Oryza sativa
  Clone ID: PAT_MRT4530_83078C.1
atggcgccgggggctactgtcggagatatgggcccggggggctgccgcaagtcctccctcgtttatgagggaatgacagggctgccccccgtgtcaggcgggagacggcgctgggccccactcaaggaccgaccgatgcttagcttccagcaaaaggcacgggtggacccccccccccggtgggcggagaggagcaaggagaaccttgtaaaaatccactga

SEQ ID NO: 83779 - DNA, 132 bp, Oryza sativa
  Clone ID: PAT_MRT4530_83079C.1
tcatgggcccttgatgggccgtctggcgatcgccggccctattgcccccttggcctgagacacctctggcctggcaaggcacttcgcacgactcttcgcctcacgccgttcttgctccatagccttcgccat

SEQ ID NO: 83780 - DNA, 546 bp, Oryza sativa
  Clone ID: PAT_MRT4530_8307C.1
actagtggatccccgggctgcaggcagtcagctcatcgcggcggcagcaaagggacgacgcggcggcaggcaggcagagcaggcggcgaccagtggcggcgggcagcagatccgacggaatggcggcgaaggcgatctcgagccccgtgccggtggagtggtacccgacgctggccgtcttgatggtctccgtcggcctcatgctcaccgcctccttcttcatttatgaagcaacttcatctaggcggagccgtagcctggcaaaggagatcacaacagcagctgttgcttctgtatttctgggctttggatctctttttgtgctccttgcaagtggtgtttacgtctgacgactgtctatgcaagctgtttccttgtgtttggcagccttagttgtaggacatgccagattctgaaatcatgtgttgtcctagcgaatatgcagtcatttgaacttgttttagaccaatgtatgagagaaactgagttgaagcgatgttctgactccccccctgatctctattatatcatcaatctacgatctct

SEQ ID NO: 83781 - DNA, 464 bp, Oryza sativa
  Clone ID: PAT_MRT4530_83080C.1
ggcgaccatggcggagtaccaccaccaagaccaggtggtctacaccccgggcccgatctgtcagccagtattgggctacccgatgtacccgctcccgtgttgcctggcgttggtgaagcgccagtgcgtcggccggggcacgggcggcggcgccgaccacgtccggcgagactgctgccgacagttctgcggcgtcgacgacagctggtgcaagtgctaggcgatcagccacatgctgagaggcatgtacagggagctcggcgcccacgatgtcgggcaccctatgtccgacgtgatccgcgactgccggagagggtacttgaaacgcgcgtcggagagcctgccggcgatctgtcacgtgtacatccacaacggcatacgtggcgtctgctactggctgtcgagatctgtctactaactaggctactgtatctagctgtgcatgtatgtggggtggttactaa

SEQ ID NO: 83782 - DNA, 619 bp, Oryza sativa
  Clone ID: PAT_MRT4530_83081C.1
aaatacaaatccgtatttgagttaggttttaatttcgttcgcttttgaaaatacttaaggaatcgtataataaatctctttaaaaaaactcgcatgctaatttgagacgatccgactcctaattgcagtttatgattttcaagctgtttttgccgataccttggtacgtcatccttgtatgggttggttttttaaattcgttcgcttttgaaaatacaaaaggagtcgtataaaaaatctcttttaaaaaactcgcatgctaatttgagacgatcggactcctaattgcagttcatgattttcaaaatgttttttatggtactttggtacgttatccgtgtatgggtcggtttttaaattttttcgcttttggaaatacaaatccatatttgagtcagtttttgaattcgttcgcttttgaaaatacagaaggaatcatataagaaatctctttaaaaaactcgcatgctaatttaagacgatcggactcctaattgcagcttatgattttctaacaaaatatatatccaagcaaatttaacacagtgaattttatcttaactaaaccatataacaataataagattaaaatagtcttcacccgttgcaacgcacgggc

SEQ ID NO: 83783 - DNA, 432 bp, Oryza sativa
  Clone ID: PAT_MRT4530_83082C.1
atgctccgccctctgctgcaacccgcgaggcgcacgccaaagacgcatcgatcctcgccttcaccaagaagctccgcgaggcacaccacgtgctcgaccggccgccttgtcgatgactacgccgactaccaccgagaccccaagcgcccgcgcggcgaagcggcggcggacgaccccgagccggtgtcagacggcgacttcggcgcgtcgctgcactccaagctcaacttggacgacgtcgctgcactccaagctcaatttgctgaaacaacaattgatttgatggtcaaagctaaacttggttcccggtcggggacgacagtgaaccggtggatgatcccggaggcggcgctggagttcctctggtacgacgtcgacagggtgttgcgcccccgcggcctgctctgggtcgaccacctctggagccagtag

SEQ ID NO: 83784 - DNA, 126 bp, Oryza sativa
  unsure (1)..(126): unsure at all n locations
  Clone ID: PAT_MRT4530_83083C.1
ccccctttgacnggggctncaccgactgggagacgctcancggagaagcngccaagaaccagggcgccaggaaccccancaacaccgncnnngangccaagcgncncangggcaggagggggagcg

SEQ ID NO: 83785 - DNA, 570 bp, Oryza sativa
  Clone ID: PAT_MRT4530_83084C.1
atggctgaggattatgatgtttggaaaaaagttgcacagccatatgtgattcctgaacagattgacactattgctttgaaaacttattttaataacaattgcaaagctcgcaatattcttttgagtgaaattttttgtacggatttttatcgtgtttcgcatcttaaaactgccaatgaaatttggagtgctttgaaaaactttcgtcaaggaactaccaacattaaagaacttcgtcgagatcttttcaaaaaggagtacataaaatgtgcttcttcatcaaattctattgtccttgctttgattcatgccatgtccgatgagcaactcgaacagttcgaggacgaggacttggctttggctgctaataagatttctcaagctatgaacaatgttaggtacaggaaaaaatatggtccagctcattgctttgaatgtggtggtcttgatcacattcattcgcattgtcctaagcttgggagaggcaagaaggaagacaatggtgaagagaagaccaaggacaacaaacccaagagcatgtttgttggtatttcttacgaccacagataa

SEQ ID NO: 83786 - DNA, 2031 bp, Oryza sativa
  Clone ID: PAT_MRT4530_83085C.1
atggcaaacaagtttactactaagcctcatgtttttgatggttcggattttgcttattggtgtgataagatgcaatcttacattatggctgaggattatgatgtttggcaaaaagtttcacagccacatgttattcctgaacagattgacactattgctttgaaaactgagtttaataataattgcagagctcgcaatattcttttgagtggaatttctcgttcggattttgatcgagtttcgcaacataaaactgccaatgaaatttggaatgctttgaaaaacattcatcaaagaactactaacattaaagaactttgtcgagatcttttgaaaaaggaatacataaaatttgagatgaaacctggagaagctttggatgattatcttggtagatttaataagattttgagtgatcttcgatctgttgattctgcttatgatatgaaagttacatcacttcaggaatctgttgacatgtctactttgactttggattcactttacacaaagatcaaaacacatcagatgaatattctttctcgtaaagttgattctaagtctagtgctttggtttcttccgcgacttctttggatgttggtgcttcttcatcaaattctactgttcttgctttgattcattccatgtccgatgagcaactcaaacagttcgaggaggacttggctttggccgctaacaagatttctcgagctatgaataatcttgggagaggcaagaaggaagacaatggtggagagaagaccaaggacaacaaccccaagagcacgttcaaggggaagaagactaaggagaatctcaagaagatgtttgatcaagttttgttgatgcgaaaaacacacactggcctggaagatctgcttaacttcagtgcagtctatgctgcttttgagccactaaccaatgtagatggtgagagtgaagatgaagataagggaaagaacatctccggtgtttgcttcatggcacgtggtgaatcgaattcagagtgtgaagacaatgatttaaaacaacaacatggtgttttggattgctcaacatgtacaccaaacaagatgaagctaaaagatgcattaggtcatgttgagtacatggaggaaattgtgaaaatcaatgaagtgctttcttcccccaaatgtcgtaaaagcaaaggtttttgtaaggtaaatgacaagttcgaattgaaaaatgtagctttggttgaggacttaaagtataatttgcttttagtttcacaaattgttgatgaaaattttgaggttcactttaagaaaactggaagtaaagtatttgattcttgtggtgattttgtgctgaatatttctcgctatggaagagtgtttaaagctgattttgaaaatcttgtttcacctgtgaaaacatgtttggttgctaagtttaaaaaggatgtgatgctttggcatcgtggacttggacatgctgattttgatcatcttacgaggttaagtggtttggatcttgtttgtggttgggctaaacttaagaaagatcttgatttgatttgtacaccatgtcgtcatgctaagatagttgtttcttcacatgctcctattgattctatgatgacggatgcaccgggacagctattacatatggacactgttggtccagctagagtgcaatccgttggaggaaagttgtatgtgttggttattgttgacgatttttctcgatattcttgggttttcttcatggcaactaaggatgagacttttcaatattttcatgatttgtatcttcgattggatcttgaatttcctggttctttgaaaagaattcgaagtgataatggtggtgggtttaagaatgcttcatttgaacaattttgcaacgaaaaaggtcttgaacatgatttttcttctcctcgtgttccgcaacaaaacggtgttgttgaaagaaagaatcgatctttggttgagatggctagaacgatcttggatgagtatcatactcctagaaaattttgggctgaggcggttaacacttcttga

SEQ ID NO: 83787 - DNA, 1899 bp, Oryza sativa
  Clone ID: PAT_MRT4530_83086C.1
agattaatctcggtcagaccgcgatccgtcgaattcgaggctcgcaatattcttttgagtgaaattttttgtacggatttttatcgtgtttcgcatcttaaaactgccaatgaaatttggagtgctttgaaaaactttcgtcaaggaactaccaacattaaagaacttcgtcgagatcttttcaaaaaggagtacataaaatgtgagatgaaacctggagaagctttggatgattatcttggtagatttaataagattttgagtgatctttgatatgttgattttgcttaggatattaactatacacaatctgaggattttcgccactttttgaatggtcttgatatgtctatttgggagataaaagtcacatctattcaagagtctgttgatatgtctactttgactttggattcgctttacacaaactcaaaacacatgagatgaatattctttctcataaagttgattctaagtctagcgctttggtttcttcatcgacttctttggatgtaggtgcttcttcatcaaattctattgtccttgctttgattcatgccatgtccgatgagcaactcgaacagttcgaggacgaggacttggctttggctgctaataagatttctcaagctatgaacaatgttaggtacaggaaaaaatatggtccagctcattgctttgaatgtggtggtcttgatcacattcattcgcattgtcctaagcttgggagaggcaagaaggaagacaatggtgaagagaagaccaaggacaacaaacccaagagcgaccatcgacagtgttcaaagggaagaagactaaggagaatctcaagaagatgtttgatcaagtctatgccgcttttgagccattaagtgatgtagatggtgagagtgaagatgaagagaagggaaagaacatctccggtgtttgctttatggcacgtggtgaatcggattcagagtgtgaagacaatgaggtgcgttcttttgatgaagttattcttatttgaagtgcaaaaaataagaagtgtgagaagatgtatagaaaacaggaatttattattgaatctcttaattctgaaatttctagactaaaatatcttattcctaatgatgatgagtgcaaaaattatgagcttttaatgcatgaaatttcaaaaattagagatgtcattgttacacatgatttcaaaaatagatctgctcttgctcttggatttgtcttgcatacacgcactttgaatgagttgtttttgattaaaaagttgttgaaaaaatatcaaattgcttttcatgctagtttgatgtttaacatgatttgtgccaaaaaagttaaaataagaacatggtgttttggattgctcaacatgcacactaaacaagatgaagctaaaagatgcattaggtcatgttaagtacatggaggatattgtgaagacccatgaagtgctttcttgccccaaatgtcgtaaaagcaaaggtgtcatgggtgattgtgaaaattatgttattttgcaaaggtttcttatttgaaaagttctttgaaaagattttttttgatggtaagaaacaacttaacatgattttggatcaatctaaagtgactagctacaatagggctttggtggcgacgaaggagaacgtgtggatcgtggattccggttgttcgcggaacatggccggtgaatcgattatctttggtgatgcttttactagtgctgttcttgctacaggtttggttaaggtaaatgataagtttgaattgaaaaatgtagctttggttgaggacttaaagtataatttgctttcagtttcataaattgttgatgaaaattttgaggttcactttaagaaaactggaagtaaagtatttgattcttgtggagactctgtgttgaat

SEQ ID NO: 83788 - DNA, 384 bp, Oryza sativa
  Clone ID: PAT_MRT4530_83087C.1
caaaaaaaacattgaagttcatattttattcaccatttgtttttatgcttcctgacaaaagaaacctttatttttttaccacccccaaagagtcttacacacagtttgttttattaccctagggaccatttttgggggtcttaggataacctacccagtggcaaaccccacttgtccaatgggggattcccactttgaaaaaccccggaaggtttgccgccgcgcgttaaaagtcccttttcgggaagccgggaaaaacttgggcaatggggggccaaaaatggggggccccaatttccttgtaaatgcctcaaaccttgtggttgagcgccaaccacctgaaccatttttcttaaaccgagggaatttgcccgaacgcttggt

SEQ ID NO: 83789 - DNA, 333 bp, Oryza sativa
  Clone ID: PAT_MRT4530_83088C.1
cccacctaacatgtactgacatcacgggaacgtttggatacttggctcccgagtatttttcgcacgggaaggtcaatgagaagattgatgtctatgcatttggagttgtaattctggagattatttcaggaagaagacctattagaacaggatgttcaaagggtcaggaaagcctagtttgatgggcaaagccattactatcaagtggggaaattaaacaattggttgatccattcttgggaaatgattatgactgtgatgaaatggagaggatgactctcgcagcttcgctgtgcacaaggacatcttttcatttccgacccgaaatgtcac

SEQ ID NO: 83790 - DNA, 146 bp, Oryza sativa
  unsure (1)..(146): unsure at all n locations
  Clone ID: PAT_MRT4530_83089C.1
tcggagatcatgtgctctatgaatagagcttgaatcacatggttatatgtactgacgaggtacgatgtgtcatagattcagcgtgagcagcggtgcgtaatgagactgttctacctcgtanaaaccggccttctgtgactggttnt

SEQ ID NO: 83791 - DNA, 294 bp, Oryza sativa
  Clone ID: PAT_MRT4530_8308C.1
ttggtttttgaattttgggggtttttttttttttttatactttttttgttttatcttttttaattcgaatagacaaacattgcaattaaaaaagggggaccttaggttccaccctaatgccggaaggattaaaaaaaactactggaactcctattttaaaggggcatgggactctgggacatgcaccttggacagggtttaagggccaaaaggagacataggagatctacctctttatctttggggggagcttaaataaaatgttttcccccctggaggaacttaccaagaaac

SEQ ID NO: 83792 - DNA, 1657 bp, Oryza sativa
  Clone ID: PAT_MRT4530_83090C.1
ctgacttctcgccaagggaggttgcttcgctttgcttgctcgcgtcggaaacgcatcgtctcctctccgccgccgcagcggaagcggaagcgcgcgcgcgagagagatggcgtccagcgccgtcggcgccgcagtcgccgccgtggcggtgctcctgctgctggctcccggggcggagccgatcgggctgtggctgccgcctcccaccggtggcggggggcgcctcggcggcgccgccgcaccaggcagatttcatgtgagcttcacttttgataacgccattccgatgttcatgtcccgtacacataatgttcatgagactttcggacctcataaaaaggcaatcggtacttcagcggaccatcggcaattcaagcagcgttactatgaattccttgattactaccgagatccaaaagggccaatattcttgtatatctgtggagaatcttcgtgcaacgggattcctaacagctacttagctgtgatggcaaagaagtttggtgcggcagtggtctcccctgagcatcggtactacggaaagagttccccttttgagagtctgacaacggaaaatctaaggttcatgtcgtcgaaacagcgcctaattgatttagctgccttgaacctgtgatacagaagtaagaaaacagatcgtcgatcacattgatttatggttatcagaatgtcaagagcaaggacccgacaatgagccattgctgggcagtagatggagcatagctacttactgattacctgctcgagctaccaaccatatgttcaaaaggccatgagtacaagacaatgcagctgtcatttagactagtatgattcactcaaataatacggacagttggttgttccaagcattctcatggtaccaagcattatcctcaggactgcggtaacaattgctcaaacactactacggtgacgacctctgtcatttgtcaataaccttacaggttgctctcaggctcccccattctgcagaagattaccatgatatgtaaaatgttactgaattatgtacaagataaactttgtttattcatgagactaagatattagataaccgggtaaaaaaaaaaaaaaaaatgaagcatcagttgcatcatatgatcaagaatatttgaagaacacaactccacctcctgctgaatctgcatataggttatggtggtaccaagtttgcagtgaagttgcatatttccaagtggctccaaaaaatgatagtgtccgttctgcaaagattgacacaaggtaccatttggacttgtgcagaaatgtttttggggaaggagtttaccctgatgtattcatgacaaatttatactatggaggcacaagaattgcaggttcgaaaattgtttttgcaaacggctctcaagatccatggcgccatgcttctaagcagaaatcatcaaaagaattgccgtcatacttaattgagtgcagcaattgcggacattgcagtgatctatctggatgccctcaagctccttcacatattgaaggtgactcgtctaattgttcatctccagaagctgtgaacaaagtaagaaagcagatcgtcgatcacattgatttatggttatcagaatgtcaagagcaaggttgctctcaggctcccccattctgcagaagattaccatga

SEQ ID NO: 83793 - DNA, 279 bp, Oryza sativa
  Clone ID: PAT_MRT4530_83091C.1
atgcgggagcaggaggcgtcggcgccgtgcagcggcgacgtcgacttcgcgtgcctgaagccgccgcggcggctgcgcattccggtggccgggctgctcgagcacttcaagctcatcggctgcttcgacaacagcagcgtggagttcatgaccgtcgctgcacggggcctggtgttcttcaacgttctcgtcgtcagcaccgagatcgtcaccgtcggctggtacagcggcaaggaccagagaaagctccccctcaactgctacttccgcaccggctga

SEQ ID NO: 83794 - DNA, 639 bp, Oryza sativa
  Clone ID: PAT_MRT4530_83092C.1
atggacaacttcttcgcccccgttttcaccatgggcaaatattatacgcaaggcgacaaggtgctgatgccgctggcgattcaggttcatcatgccgtttgtgatggcttccatgtcggcagaatgcttaatgaattacaacagtactgcgatgagtggcagggcggggcctggcacgacaggtttcccgactggaaagcgggcagtgagcgcaacgcaattaatggcgccggggtcggaggagggccagcgacggcgtccggcggcggcggcgggagcggcacggcgcgggcgcagagggcgaagctagcgactgcggcggcgcttcggggaggggcaaaagaggaggccggcgggcggagcgacggtttggggtggtttgttagagctcaaggtgggtggcggcgagaggattcggcgcgggaccgaccggcggcggcggtgaaacagagcgacggcgacgagaaggggaagagaaccgacagcgaggagaggatggccgatggcggcgcgtggttgcccgcggcggcaagaacagcagcacggcgcgggaggggaaaagaacggtgcgaccgtggcgataagagcagggaggaggcgagtagctcaccgacgggcgaggcgagacggcgttggtga

SEQ ID NO: 83795 - DNA, 402 bp, Oryza sativa
  unsure (1)..(402): unsure at all n locations
  Clone ID: PAT_MRT4530_83093C.1
agagagagagagagatccttatacnttgcngctacttgagatcaagctcgtncnttcgcgcgcgcacacctgtctgtctctgtttgattgattcttctacntcntcaacatacacctgttcangatgtcgctcancctggctcaccagaccggaacggcggccgccgtggcaccggcggcgccacgtncggccgtggtcgcggcgctgccggtacaatgtctgctccggcggtcgcgccggcggcggcgccgaacctgcagctgcagacgcagactgtggacccggcggcgccggcgcnggggccggacctccccntggccttccaggcgctggtctagagcctgccggaggagcagcacccggacntgggcngcnaagaacggcgcaaggtgggccttgcc

SEQ ID NO: 83796 - DNA, 1335 bp, Oryza sativa
  Clone ID: PAT_MRT4530_83094C.1
atgggccaagcccacgagccagaggagagaggggtggctgacttggcgctgtggactgggtcaaatgccacgtgggctgccacgtaagcgcaagagagaaggagagggaggcagagctcgcccggatcggacggcttacggcggcgcaacggcgccggcgagcggcagcgagccagagggaggggacggcgccggaggcaagaggaggaggaggcgccggggtcggaggagggccagcgacggcgtccggcggcggcggcgggagcggcacggcgcgggcgcagagggcgaagctagcgactgcggcggcgcttcggggaggtccgagggggcacggggaggtgcgcaaccgtgtgcacggcggcggcggaaaggacggcacggcgcaggggcaaaagaggaggccggcgggcggagcgacggtttggggtggtttgttagagctcaaggtgggtggcggcgagaggattcggcgcgggaccgaccggcggcggcggtgaaacagagcgacggcgacgagaaggggaagagaaccgacagcgaggagaggatggccgatggcggcgcgtggttgcccgcggcggcaagaacagcagcacggcgcgggaggggaaaggggagcgcgaggatggggcggcccagtggcggcgaagagacgttcttggtcgcggcggcgacggccagcgacgaaggagtcggcggtgctccgttcctaggagcatgagaccaaggggatggattggggctcaaggggtggtatttataggcgaggaccgaggagggcgcatgcgagctggcgctcggctagcgaccgcaagcagcatcgacgctttcgtgggtgacgcgaaaacggcgacggcgtggatgcgttgggcggcggaggcggtggatcgggcggagcgaattgaacgcggggcgcgggagggttggcacgggcgagcgggcgcggtcaaggtgggggcggcgaggtgctgcagcggcgtcagcggctctgcctcttgagcaagaagccaaggagttgaggcagggagctcgctacccgggaagggaaaaagcgaaaggaggaggaaagggagctttgctccttccgttttgggaggaaagggatgagaacgagccgcgcctcacggttttggatgcacgcggcatggggcgccgggcccggcggacacggtggtcgtcggggcaagcgacgaccgagggtagcgatggcggcgcccaggcggccggccacgtgcgtgggcacgcgggaatcgaaggcggcggccggaattttgggcggcgtcggtgggaagcgacgccgagagagagagagagagagagagagagagagag

SEQ ID NO: 83797 - DNA, 468 bp, Oryza sativa
  Clone ID: PAT_MRT4530_83095C.1
atggacaacttcttcgcccccgttttcaccatgggcaaatattatacgcaaggcgacaaggtgctgatgccgctggcgattcaggttcatcatgccgtttgtgatggcttccatgtcggcagaatgcttaatgaattacaacagtactgcgatgagtggcagggcggggcccgccttccccagctcggcctctctctcccgcagagaatcccttgcccgttggaggatggtgagttcgtgccacctcttgtcccagatccatcccagattttcaaaatcaaaaatccccaggaagatgtgtcagctgcagatttgggggcaaatcgaaatctgtctatgaagatcctccaccctcagagcaagattgtgcagattcgaaggcattactccaccatactgaagagcgacattcaaccccacgccgcgcgccgtctgtcggttgctgaacgccttaaccctccgatgtga

SEQ ID NO: 83798 - DNA, 684 bp, Oryza sativa
  Clone ID: PAT_MRT4530_83096C.1
atggcggcggcgagccagcttctggccacggcgacctgcctcctggccctgctcctcgccgccggctggatggtcgccgccgccgacgcgcgccgcctgctcgacgacgtggagtacacgggcacggctatgccgccggcgccggcgatggcgccggtggctgaaccgggcatggacgttcacggcggtcggatgatgctcgccgagggccgcggcctgctcgccgccaatccctgggtgagtttcaccagttttgatttaaacgtggccaatatggacaacttcttcgcccccgttttcaccatgggcaaatattatacgcaaggcgacaaggtgctgatgccgctggcgattcaggttcatcatgccgtttgtgatggcttccatgtcggcagaatgcttaatgaattacaacagtactgcgatgagtggcagggcggggcctggcacgacaggtttcccgactggaaagcgggcagtgagcgcaacgcaattaatgccggctggaagttgtggccttttgcacacttggttacatatggcctagttcctgttgaacaaagacttctgtgggttgactgcgtggagttaatctgggttacaatactgtcaacttactccaacgagaaatctgaagcaaggaactccgaggacgcatccacatcaaatgcttccaatgtgtaa

SEQ ID NO: 83799 - DNA, 498 bp, Oryza sativa
  unsure (1)..(498): unsure at all n locations
  Clone ID: PAT_MRT4530_83097C.1
agagcattgtggagtcatttcatatataactgaaaattgaaagcttaggtgctaagaatggtggcagacgtattatcattttgcttgctggtacctagttttgacgcttgacgacaagcttacaaattctgtgccttttttaattttagcttttatgcagttggtgatagcttgcagtaggtgatttttgaacttctcaaaataagtgtttttgtcatatttgtattttgtttttgtcacttttttgaacttataaactaaatggttttttgtcatatttgtattttttttgtttttatcaaaaaaacatattttgtcaagttctggtatgcaacgtactgggtttatttttgtgtgtacaatgaaggngctgctataaacttggggctgatccatcttctgttaggtcattagngggcacccctgaatgcatagttagngccatgaagaaggagtttggtatagcccctttaaattaggttctgaccctaagggggg

SEQ ID NO: 83800 - DNA, 1536 bp, Oryza sativa
  Clone ID: PAT_MRT4530_83098C.1
atggcagccaaggcccctctcgtgctgcgcctctgtctcttcctctgcatctccctctccctcttgctgttatcatctcctcaacgggtgacgagcttgagcctcgatgccgatgtggacgatcactactaccattacgatggggacgaagacgatgacaactactaccatgatgacgacgacgacgtcttctccggcaggccggtacggagaatatacgacggcgacgacgacgaaaactactaccgcaatgatgaagtagacttctccagcaggccggctcggaggctatacgacggcggcgcagtcatgccggagaagtacaacgtcctgaacggcaactcctccaacagcagctccggctcggccttttgcaggttgctttctctccagatcctggacctgtcaaacaacaagctcaccggtaagctgcctgactgctggtggaatctgcagagcctgcagttcatggacctctcccacaaccgcttctcaggtgaaatccctgcagtcaatacaagctacaattgttctcttgaatcggttcatcttgccggcaacggcttcaccggtgtttttccatcagcgctaaagggatgccagacgctggtcactttagatattgggaacaacaatttctttggtggcattcctccttggattgggaaaggcctttcatctttgaagattcttagccttagatcaaacaacttcaccggtgaaattccttctgagttatcacatctttctcaactccaactgctagatatgaccaacaacagtttgacagggtcgattcccacatcttttggcaacttaacatccatgaagaatccaaaaattgtatccagtgcgggatcattagatgggtctacctatcaggatagaatcgatataatctggaaggggcaggagataattttccaaaaaacacttcaattaatgacgggtattgatttgtcaggtaactcattgtctgaatgcatccccgatgagttaacaaacctccaaggccttcgatttctgaacttgtcaaggaacaatctatcgtgtgggatacctgaaaacataggtagtttgaaaaatcttgagtcccttgacctctcgtcaaatgaaatttcaggagccattcctccaagccttgctggtatatctacccttagcactcttaatctctcgtataatcatctatcaggcaagatacccaccgggaatcaacttcaaaccttcactgacccatcaatatacagccataattcagggctctgtggccctccgttgaacatttcatgcacaaatgcttcagttgcgtcagatgagagagactgtagaacatgcgaggaccagtatttctactactgtgtaatggctggagtggttttcggtttttggctatggtttggaatgctcctttccatcggaacctggaggtatgccattttcggttttgttgatggcatgcaatgtaaagttatgcagaaagtctcctctgttgataaatttctttcaagaggaaatactgatcagtatttgtag

SEQ ID NO: 83801 - DNA, 368 bp, Oryza sativa
  Clone ID: PAT_MRT4530_83099C.1
ttcaattcttcatcccctcttcgctctcatcaacaagcaaatcgagaaaaaaaaaaagaaggggagaaaaaataatataataacagaaaaggagatgaaaaaggagttccccggccaagcgccgacgagtcggttacactccgagatggacgcggcggcggccggcgggggcggggcggcaaagcggaagcgcagcttctccgaggacgacgcctacctcatcctgcacaggtaaatccatctcccccatctctctctctctccgttctctcgccccgcggcggaggcggcgggtcgtttctagggtttcgtttcaccggcgcggcgctgcccccccccccccccccccgaaccttgcaggttccagc

SEQ ID NO: 83802 - DNA, 272 bp, Oryza sativa
  Clone ID: PAT_MRT4530_8309C.1
acgttctatgacgactactgttttttttcttttttctgttgcttgatgtctttttttttgtctttggagccccaactttttttctgaaaaccttgactcatggaaaaccaaccgttcctataggagaccagccgttttccaaaagcgcggaggattcctcgagggaaaatacaaaagcctgtggggaaaacctcgtggtcacgggggaaaactttttaaagagcggagagcacttgtatgctatgcttactcctaggagccgacagaccatt

SEQ ID NO: 83803 - DNA, 144 bp, Oryza sativa
  unsure (1)..(144): unsure at all n locations
  Clone ID: PAT_MRT4530_830C.1
ccttngtctaactcttcatcaaaaatcaaagttatggataccttccacatctacatgaagcagtattagatgacggtgcaggtcaatgtcatgccagaataccttttccagacggactcaaatacaggtaagaagacctccttc

SEQ ID NO: 83804 - DNA, 1857 bp, Oryza sativa
  Clone ID: PAT_MRT4530_83100C.1
atgtcgacttccgccagcccctctgccacgccatcggccgagtgtgcagagcatctttccaatctagttgcaattcccagcctatctcatgagcaccaatacttccttggtccaatcgacaattctgacccctctgagtttattattgccgaaaccaataggataccatttagattggccaacccaaatctaggtcattggaagaatactttgatgtcttggccttccctcgagaaaactgctcctgagaaaagttggcccgtatggtacaagcgcgtatcggccaacaagcaagttcactgggatgaattaggaatcggccaagcccttgctcttactctagcaaattcggctaaggacgaacccttgatggcttctacagcctgtttctggtccaacaccctcaatgccttcttgttcaatcaagggccaatgacccccactctgcttgatattgccatgattactggtctagatggtgaatggaagcaacacatattccatcagccggcttccatgtacatgacagatctattcccagacgacatccctcagggacatagaatatgctctaggcctcatcccaaatggaggtggattagctcccccgtcgtcggctatcatgcccctaggacctcaagtctactccaagggcagctaggagaaccagccgatgctggcaggaagaggaagaccaaggcatcagctgttgatccattagcactggctcccaagaaaaaggccaagaagaagaaatccaagccaaccgatgacttgcctaccttagatccatcgatcaaacaagccctggatgaggaagcgattgaagatgtcgaccaagttgcagccgaattgagtgacatagtagaaaaaacaccatcggcttcacccaagcaaactcctccaactcctgctgctccagctcatttctcaagggtcttagccgatctattctcctttgacatcaaggactactttaacgaagaggcggaagaggaaacaacaagcaagactctagcccctctagatgaagatgtcaaaagaactcttgaagatatatctcatcgactagagtcatcattagataatttggtggatgactgtggttcaatccgggccagatttgtagagattcaagccctagttccagatgatctggcgaataccatctctccagctgtgtaccttgagcaacatcagttcaagctggaaaatgctaagcagaggatagccgatcggcgagagaaaaatgatattgaagccactattcaagccaatcggcaacttgtgcatgaagagaaagccaagcttgatcaactctctgttgggccagtccagtctaacatagatcggcttgaagcccgcaagattgatctcatagcacaacttgaagaatgcaacgccgagctggatctggagaagcagaaggtcaggcgggggacacgagttcggacggcatcgcgcacgcacgcggacggggttggaggcggcggcgaggacggcggcgtaggccgagacgcgcatggcggcgaggacagtcgcacgcatggcgctgcggcgcgcacgcacgcggacaggggccggacagcggcgaggacgacggcatgcacggcgcgcacggcggcacgcacggaggtgaagctccaggacctccccgtcgtgctcgcctcctgctgcgtcctccacaacatctgcgagacgtgcggcgaggagctcgagccagagctccggtacgagctcgtcgatgacgagacatcgccggagacccccctccgctccgaggctgccgagcatgacagcgacaacatcacccacaacctcctctaccgcggcttcgccggaaccacgttcttctga

SEQ ID NO: 83805 - DNA, 2526 bp, Oryza sativa
  Clone ID: PAT_MRT4530_83101C.1
atgccgtcttccgccagcctgtttgccgcgccatcagctgagtatgcagagcatctctccaacctagttgcaattccaagcctatcccaagaaaaccattattttctcggcccagtcggcaaccttgatcctactgagttcatcattggcgagaccaataggattcccttcagattagccaacctagttctaggtcactggaaaaataccttcaaatcttggccatctcttgagaaaacttcacccgagaagagctggattacatggtacaagcgcatgtcgactagcaagaaagttaattgggacgaaattggaatcggccaagcgcttgaccttaccatagccaattcagctaaagatgaacctttaatggccgccgccacctatttctggtccaacaccatcaacgctttcttgttcaaccaagggccgatgactccaactttaatcgacatcaccatgattactggattagatgtaacttcatcggctaaccctatgacatacatgggccaaggatctatcactcctcgggaacatgtggcttttctgctgatgtggttggaaaaattccttttctgtggatcaagctgtggccctacaaccaactggcagtttgtagccgaagccctagaatcaaagaaacaatttcctttaggcaaaatccttctcggctacctgtaccaagtgttaaataatgcaacggccaagatagctgtcggctcagtggttggagcaggtggaccatggtggctactacaaacttggctaaacctgatggtcatgaaattcgtcaatcggccatctgtgacagaagccaaattcccaagactggagccaatcatagaagacgatggggaggaatgcacccaccacagatgcacatcctatggagaatatgcttccacaccagccgacgcaggggcaaagctatcagctgaactgcttaaggactggttctacagtttctatgaaggctttcggaaaaaatctcgaatttggttcccctacgaagactcagcactgctagagcatccatcggactttagatttaaagacatcaaccatgagagataccaaaaatccaaagaagttttctcggctgcaatcagcccatgcatccttcctgtcggcattcatcaaggaaggaatattcaagtctcttatgagttctatcatccgatgagtgctgccaaacaacttggaatgggtcaactaccaatcggcctattctttgccgataaaattcaatgtcgaggggaaatttcattggccctgatgatggataggctgctcaatcttcaaggacctcctttgggcagtattgaaaacatagaactggcaacctttaggagcagatcatttgacatatggcggggtgaatggaagctgcatcttttccatcaatcgacttctatgtacatgacagatctcttcctagacatcatccctcagacaacagaattctcccctcctcatcagagcaatagcggcagagacatagagtacgctcctggtctcattcccaatggaggcaggccatctcctcctgtcatcggctatcatgcccccaagacttcaagtctgctccaagggcttattagagaaccagccgatgccggcaaaaagagaaaaaccagagcatcggctgtagacacattggctccaaccccaaagaagaaagctaagtcaaagaagaccaagccaaccgatgatcagcctgccctagacccatccgttgaacaagccctagatgaagaagagattagagaagatcctcctcctcctcctcctccttctcctgtacaacaaccatcaagtgctcgaactccatcggctacagggagtcatcttgttgaggaagaagaacaaccagccgctcctactatcctagccttagccgatctgttttcttttgatatcaaggattactttgatgagacagaggaagaaaccacaagcaaggataaagcccctctggatgacactgtcatgaaaacactcaaagacatatccctttggctagaatcttcattagacaatctggtggctgattgtagttcaatccgagcacgatttgctgaaattcaagccttaattccggatgaactagcaaacatcatcactccagctgtttatcttgagcagcaccaatttaagctggagaaggctaagcaacatcagctcgaagctcgcaagatcgatttaatagctgaactcgaggaatgcaacgccgaactggatcttgaaaaacaaaagctagccgatctttcaagtgtcgttaaagaacaaaagtccagattgagatcagctatcaagaatgtagctgatatgactaaatctctcaaggtcatccctggaaccgatgcccaaagacatccaagccatcgaagaagtagatcaaatcaggcaacgggctttgtcggctatctagcgctatctgtctcaatgacattatgtgtaatagattcaaggaatttttgtaatcggctaagaaactctggctctttgtttaactcgtcttaa

SEQ ID NO: 83806 - DNA, 381 bp, Oryza sativa
  Clone ID: PAT_MRT4530_83102C.1
ggaaaaaaaaaaacttcaacggggtggccgatgtttttactaacaagaccccccatcttttttttgccggggaaaaggggtgtggcgttccccgcaaaaaaaaaaaacggcctttaaagagttttgggggggcaacccatttgggatgggtttttttccaaggcatattcccgcgcctcgaatggggggtgcgaatcccatgcgtcgattaaaattcccatggattttattttgccacggggggcttgttcttgacccaggcgtacagcggtttgcccagggagtaaaccatgaaacctttctccctgggcttttccgggtcggcaaccttggggccggaaaaaaccacccccggttttggcatgttggcctaaaactttt

SEQ ID NO: 83807 - DNA, 1457 bp, Oryza sativa
  Clone ID: PAT_MRT4530_83103C.1
cgcggcaaggacgcaggcgagcagctgctccgacaagcgctctctctctctctcaactccggcgaggctcacgcgcgctccgaagcttcggatagcggcagtagtcagtgcattgatggcgaccgacgtggcagcgactgagcccgaggtggcggcggaggaggctgcggccgccgcgcctgagaccacggccaccgccggggattccaagccggcgaaggaggccaaggccaagaaggccgccgcgccgaggaaggcacgctccaccgccacccacccgccgtacgccgagatgatctcggaggcgatcgcgacgctgaaggagaggaccgggtcgagccagtacgcgatcggcaagttcctcgaggacaagcacaaggaccacctgccatccaacttccgcaagcagctgctcgtccagatcaagaagctcgtcgccgccggcaagctgaccaaggtcaagaactcctacaagttgccgccgacgcgcgcgccggccgcggccaagcccaaggcgaagcccgccgccgccgcaaagccgaagccgaagccgaaggccgcagctaagcccaaggcggctgccaagccgaaggccaaggctccagccaagtccaaggccgccgcgaagcctaaggcggctgccaagccagccgcgaagccgaaggcggcggctaagcccaagtctccggctaagccagccgccaagcccaaggctgcccccaaggctaaagccaagccggccgcgaagccgaaagccaaggcggctcccaagccgaaggcggcagtcgtgacgaagacgaaggcgacctcggctcccgcccggaggccggcgaaggcggcgaagacgtcagccaaggacacgcccagcaagaaggcggcgccggcggccaagaagcccgccgccgcggcgaagaaggcgcccgccaagaaggccgcgccggcgaagaaggcggccgctccggcgaggaaggtgcccgcccggaaggcgaagaagtagagctctctctccggcgagcgagcaatctagggcttcatggttgttttcttagctgtttttttttctcttctctttgttgttagttgcgaggaggggtcaggggtacaagcttgtaaatttgatatcgcggcgggggtacactggtcatttcgtacccaggtggtggtgggcgacgatgatgacgacgacgacgagacagtgtttttagggcaatgtatttctgagtagattggtggagtttttattgtggtaacaatcttgtgatatttgtcgaaatcactttagctaagtaattaattatggagtaattttacttactgtattggcttgaccacaccctgtattcctctgaattttcagatctggaaattgaaatgaaatataggatttgtgacttggcgtaaaaaaaaaactcgagacctcgtctcccgcgcgccctctccctcccccccgtgccgat

SEQ ID NO: 83808 - DNA, 121 bp, Oryza sativa
  Clone ID: PAT_MRT4530_83104C.1
gtaccaaccggcccagcagaaatatctcccggaatccaccggcggagaacgtgacactccctcggcgtctactgaaattcaccgcgaaaaactaggcaaaaatccggtcgccgctcgctag

SEQ ID NO: 83809 - DNA, 441 bp, Oryza sativa
  Clone ID: PAT_MRT4530_83105C.1
agctaatcaagtggctactagaagttaaagcccctcgaatagtgtacgtttcatgtaatccagctacctgtgcacgggatttggattacttatgtcatggtgtggaggaaaaagatttgaaaggatgctacgagctgaagactgtaatacctgtagatatgttcccccacactcctcatatcgaatgtatctgcgtgctggagctgtgttgattgtcagttctgttcatccaaaagaaaccacaaggatttcaaatgcttcatcttgccctcatttcctgacaactagacttgcaggtcggaaattggatcgcagtctgcaaagccatgttgttggtgtttttacaagatatagagtattcatttactgaaactcccacattgggttttatagttgtggaggacgcagcttagctgaatgagttcttcaattgacatatct

SEQ ID NO: 83810 - DNA, 519 bp, Oryza sativa
  Clone ID: PAT_MRT4530_83106C.1
tggatccccgggctgcaggaatcgcacgagggtgcttctcatggacaagcagctcggcaagaactgtgctacgtcagttcccccagcgcttcgacggctcgaccgcacgatcgctacgccaaccgcaacaccgtcttcttcgacatccacatgaaggggctggacgggatacaggggccggtgtacgttgggacggggacggtgttcaacaggcaggcgctgtacggatacgacccgccgcgggcggagaagaggccgaagatgactgtgcgactgctggccgtcgtggtgctgctgctgctgctgcttcggcggggggaagcgcggcaagtcgcacaagaacaagaagggcggcggcggcggcgagggcggcggcctcgacgagccgctgccgcgggctgctcgggttctacaagaagaggagcaagaaggacaagctcggcggcggcgcggcgtcgctcgccggagggaagaaggggtaccggaagcaccagcgcgggttcgagctggaggagatcg

SEQ ID NO: 83811 - DNA, 3493 bp, Oryza sativa
  Clone ID: PAT_MRT4530_83107C.1
ccccccccctttttttttttttttttttttttttttttttactcccaaaaatcttaaaagaaaattcaaaaacaattgttcttaaattcgagtataatctccacctcagttcttacaaattttacccccaaaacacttttatcccactcacaaaaacttgtacatgaacaagtcaaaatactccatacaacaagaatcatccatccggtcatccctcttgcaaaatgcagagacacagagaagtagcagcagcagctcagcacgagaccccgcatggcttgaggacggggcccttgggcttggggatgaaggggtcgatcctgacccagacgagggagaagatggaggcgaggaggatggaccagagcacgacaatggtgggcgtccggttctgcctccccatgagccccttgaggaaggggtagaggtggaggatgacccagaaggagaagaagagcttcccgaacagcgggccccacgacccgtacccgttgttcacggcgtccgacacgccggcgacgatccccaccatgttgatgatgatcagcgtcgtcggcggcaccagcagcgtcgtccacttgaacaggtagagctcgccgaacgcgtcggtctcgtcggcggcggccttggacgtcaccgtgaagttggtgtccacgccgccgagcaccttgaggaggccctggaacacggcgaacaggtgcgccgacacgccgccgatcacccagaactgctcgttcctccaccagtcctcgatgctcaccccgctccaccgcagctccagcacccccgtcgcgatgatcgacaggaaaagcgctatgaaccatatgctcgccaaattgttaagcgtggggatgatgaacttgccggtgaggaggcagacggcggggatggtgcagtaggcgaggaggggaatggaggtgaaggggtagacgatggtgttggtgtaggcgaagcgctcgagccacttgaggcggccgccataggcgtaccagagcgggcaatggcggctcatgaagatctcgacggagccgagcgcccaccggagcacctggtgcagacgatccgacaggttgatgggcgccgaccccttgaatgccgccctcgccggcgtgcagtacaccgacttccacccacggcaatgcatcttgaaccccgttaagatgtcctccgtcaccgacccgtagatccacccaatctccttgccccactcggtcttctcctcgtagccgcagctgatgacgtggatggcctccttgatgagggcggcggggtcggcggcggcgccctgggggaggccgccgtcctcgacgagggtggaggcgatgaacaccggcgactggccgaaccgcttctcgaagctcttctgcgacatgagcgacgagcgctccagctcgtcgtacccctcgaggccctcctcgatctcctccagctcgaacccgcgctggtgcttccggtaccctttcttccctccggcgagcgacgccgcgccgccgccgagcttgtccttcttgctcctcttcttgtagaacccgagcagcccgcggcgcggctcgtcgaggccgccgccctcgccgccgccgccgcccttcttgttcttgtgcgacttgccgcgcttccccccgccgaagcagcagcagcagcagcaccacgacggccagcagtcgcacgtcatcttcggcctcttctccggccgcggcgggtcgtatccgtacagcgcctgcctgttgaacaccgtccccgtccccacgtacaccggcccctgtatcccgtccagccccttcatgttgatgtcacggcgcgacgcacgcacgccggagaagaaggcagtgctcacgtcgaagaagacggtgttgcggttggcgtagcgatcgtggcggtcgatgccgtcgaagcgctgggggaactggacgtagcacagcttcttgccgagctgcttgtccatgaggaagcacatggcctcgcggacggccttgctgttgttgacgtagtggtcgcagtcgaggttgaggatgaagggggcgttggtaagcacggcggagacgcgaacgagggagttcatggcgccggccttcttgtggtggttgtagccgggccgcttctcgcgggacacgtacaccagccgcggcagctcgctgccctcgacgtcgagcgcgccctggctgcccaggtacacctggatcatccccgggtggtccctcgtgttgttccccggccatggcgtcccgtcctgcatcacccacccttcctccggcttcttctgcgccttcgccaccagcgcgtttatcctcaccttgaactcctcatactctctcttcatggcgcggcgttctttgacgaaggtgggctggaccttgtccttgaggtagtcgatcttctgggagaagtagaactcgggggcgcggggctcgatggtgaacttcttgcagaaggggacccaccggcgggcgaactcggcggtctcggagagcgtgtcgaagagcagcatggacgcgccgtcgtcggagacgtagcaggagacgcggtcgacggggtagtcgacggcgaggatggacagcacggtgttggcggtgatgatgggcggctccttgagcgggtccaccgtgctgacgaagaaatcgatcggggccaggcggcacggctcgccgtcgcgctcgtaccggagggccagccggtccaggtacgtctccctcgtcaccggcgaccacttgggcagctggtcgaggatccacgacagcgcgaaccacagctcgcagatcaccgaggccagccacagcggcaccgcgtccatcgccggcgtcgtgatccggaacttgaggaagaagcagagcaccaccagccggagcacgatcacgatccggtacgggttgatcttgctcgacgggatcggcaccttcctccacagcggctgcctcgcctccgcgagcagcatgtactcgtcgtcgttcttgtcgtcgtcgtcgtcgctgtcgtcgcggttgagcttgccccgcttctcctgcttcgtcttccacttgtcgatcctgtccttccactccatgccaccctccatctccctctcctgctccagatccttcccagccacgcttccggtgaaggaagagagcgccgggcctccagggcgccacttctgtgccggctgctcgccgttctccgagtagacgtcgaagttgacgggctcgtgggggggtttctgcttggtggggctcttgatctggaactcctcctcgaagtcgtccatgtcgccgccgtcgtcctcgtcgccttccacccgtgggcaccctttgtggcgcttgtagcgggtgttgcactgggggcagcactgggtgccctcgctgcgctcgtactcgtagcagggcttgcacaccgggaagccgcactcggcgcacgccacgaacggcttcccgtcctccctcgccgccacctcctcgccgcacacccggcacgtcttctccttccccttgtgctcgccaccggtgacggaggcggtgtccat

SEQ ID NO: 83812 - DNA, 348 bp, Oryza sativa
  Clone ID: PAT_MRT4530_83108C.1
atggctacaagaacggccgtggcgagggtggtggcgcctcatcaacccgcgtgggcggcggcagttttggcgaggaggatggagggaggccggcgcgtggcgcgctacttcagcgacggcaccggcagggtgctcagcgaggaggagcgcgccgccgagagcgtctacatacagaagatggagagggagaagctggagaaggagaggaggaaggcggacaaggacaaggccgatgcagcgaagagggcggccgccgccaaaggggataaggtgaaattaaaaacaaaccaattagccggtcttgatctcctccaacttaggagtatttggttaatttctgggttatga

SEQ ID NO: 83813 - DNA, 762 bp, Oryza sativa
  Clone ID: PAT_MRT4530_83109C.1
atgctgatgccggtgccggagctgacgccgccggagacgacgacgacgagggactggtcggagctgccggtggacgttctctcggtggtcttcgccaagctcggcgccgccgagatcctcatgggcgccggcatcgtgtgcagctcatggctccacgcggccaagctgcctcacctgtggcgatgcgtcgacataccgcaggtggtgcgcaacgatgcagtgtgttgcgcaatggcgaaggtggccgtggatcgctctgacgagcggcttgaggtgttcaaggcgatgtattttgttgacgatgagcttctcaagtatatagggcacaggtcgcccggtctgaagagcctctgcctcgactcatgctccatggtctccaacacaggactcacccagctgatggccatgactccactgctggaggacctcgtgctacgcggcggccttgatttgtccgacgaattcgacgatccacttgtgatcccaacgatgcaccagctgcggcagatcgctcttggcagcctctacatcagcaggaaaacgctgacgaaatttgttgatagctgccctcacctggagcttcttgacgcaagcgagtgtgtcgcggttgacgtcgtcgacgacgcccttcgtgccaagtgtgccaggatcaagacgctcaagctgccctcctactcttctgctactgatgctatggctacacttgatcagttgtactaccttgcagatgatgatgatgagttcttcacagcttattattga

SEQ ID NO: 83814 - DNA, 268 bp, Oryza sativa
  unsure (1)..(268): unsure at all n locations
  Clone ID: PAT_MRT4530_8310C.1
nacgagattgaactaggcatggtgttgttcaccgccctgcattttgccaactgaagctctattanacttggataatacaatttttgcataccttcggaaacaactatttttgcatacagcatcattttttttanaaanananancatcgttatatttgttcggctattttcacaagctcaggtttctgtagcgtancaaggttttgtcaccaatttttgatcttgccgatatttctatgacacaatggaggttaaatgatttatacaa

SEQ ID NO: 83815 - DNA, 554 bp, Oryza sativa
  unsure (1)..(554): unsure at all n locations
  Clone ID: PAT_MRT4530_83110C.1
cacaagcatacgatacaggctagcgtggtggggaccccattttcggttacaattgatgaacaacataagtcatgcagcaacagatgcgccaacagcttaggctgctggtgaagctgtttgactaccagtctatttatcacgccattgcgattgtgcaggagctacagctgcagctagtgggggtgtgggactttgatcagtcttaagctcaagactcaagctttggtggactttaagttggccttcatctggggattcttttgtggcttctatattgattcctggagtgttcccacgggcgttggcgcctggggctgagtctggatctgatattggttcatatgttggttctaatgttatgcattatcttttttttcatcnngacacccnnnnnaaacttntcttcccnntttttttncnnnnttccttttttttttttttcctttttttttttttttctttttttcccctttttctttttttccttttttttttttttttttttttttttttttnttntttttttttctctctcttttttttcctcctttttt

SEQ ID NO: 83816 - DNA, 332 bp, Oryza sativa
  Clone ID: PAT_MRT4530_83111C.1
gagggttcgcgcgctcttcgtcccgccgcgcgtggtacgtcctcgatctcgcgccttctctcgtggatccatgccggccgccgcgtttcgctgatgtgatcgcttcttgtttcgtttcgccgagcgtccacaagccttccgataagagagctggcgagagatgcgcagaccgcccatccctactggatccgatgcgaccgcaaacataggatacgcgaagaggcactggcgcgaccaagttgggtctgagcaggaggtggcaccgctgctgctgcggattttgtttatggatgttcagtgttatgcaagctaggatgtgattcatgatgctt

SEQ ID NO: 83817 - DNA, 321 bp, Oryza sativa
  Clone ID: PAT_MRT4530_83112C.1
cacgcaaccttgaacccgtaaaatcgacagccgccgccctttatttttaaacaaaaaattttttttttttctatctaaattttcaactccaccaccaggagggacctttttcaatttacaacaatttccacactctcctttatcccacccctcccacaaaaatatggctgcccacccaccacgaataaacattacaaaaaacggtgcgaaaaacacatccaaccggaaaaaaaaaagttaacacgcccccccacccaggaggagcaaaaaaaaaaaaatggtccgcccctttttacccttgggaaaatccaacaaaacgga

SEQ ID NO: 83818 - DNA, 576 bp, Oryza sativa
  Clone ID: PAT_MRT4530_83113C.1
atgacggcaatgtcttcttcggtgaccggctcaatgtcgtgcacgaacgtcgcgtttctaaccgatggggtcgccggcgatgcgatgcatgcagggcctggctacgacgacgcgagaccgtacaccgtgctgttccacccgctgacggggcgctgcgtggtgaggcgggcggcagatgacgcggcggcggcaacggcagcggggacgctggagctgggctggtgcgaggacacagatgcgtgggcatacacgcagccggtgtccacgctggcgatgcagggcgtgtggcgggggtcaccgccgctctgcctgagagccgtggggagcggccggccggcacggctcgccaccaacgacgccgctgccgacgccgctggctgccgcggcgacgcccgactgctccgggaacgccgagctgcgcgagctgcgccggggatgcgtcgtcggacgggaagaacaatcgtcgggaggaagaggaaagaaaatagaggagagactgacatcctgggcgcacgtagggcaatctggaattgtttggttcactaccacaatttaccttaccatgccacagcttaa

SEQ ID NO: 83819 - DNA, 960 bp, Oryza sativa
  Clone ID: PAT_MRT4530_83114C.1
atgtcgttgtcaccgttttggacgctgaaaacagatcccaggtatcgccaggtgttggatcccgccaagaagacctcgctgctgcttttctcatggggcatctccgacacttccttccaacagcagagagaagagacccactacggtgctttctactggacgtggctgctgatgacgagctcccggcgtggatggtggaggacacggccgccggcgatgagctcgggcgtggacagtggaggatgtggccaccggcgacgagctgtggcgtggtgtgggacgtggatggtggaggacgcggtcgccggcgatgagcttcagcgtggcgtgggggtgtggacggcggaggacgcagccgccggcgataagctccgacgtggggcatgggcagtggaggacgtggccaccggcaatgagctgtggcgtagtgtgagacgtggacaacgaagggcattacaggttggtgacaaggtcccggcgcggcgtgggccatcgatagcaaaggaagtggccaccagcgacgagctttggcgtggggtgtggacggcggagaacgcggccgccagcgacgatctccgacgtggacggcgcaggaagcgagcgccgccgcagacgtatctgtgcccggctcctgatactaagcatcatgatagcagccatgatactcagtgtcttgatgaggagtcgacggacggcgaggtgccgctggaaggaagcgaggaattgagcgcggaggcgcgcgattacgaggaggtttcaccaggatgctcgcgccggtggaaggaagcgaggaatcgcgcgattcctagaaggattcgccatgatctggagaagccgacggatggtgcgcgcgccggcgggaggaagcgaggaatcgggaagccggcgtttggcgagcgttggtcgtcgttctcgtttttgagcgctggttttgctacaatgcgcgcaagtggtgggtga

SEQ ID NO: 83820 - DNA, 321 bp, Oryza sativa
  Clone ID: PAT_MRT4530_83115C.1
atggcgcaggctgccgtcagccggagcaaggggcagtgcgaggcattccggagccagcacgccgtggacgacggcttcctcctcttccttggcgagacgtcactaattcatctgttttgcacttgcattagaatcatctgttttgatttgtgggcatggaattcaaaagcgaagtctgatcaaacaaacagatcatcatcacaatgcaaggtgcatatgggcgaggtcatcaatcatcagactgatcgtagccgtcgcatctgtcataacagtagtaatcatcatactcgtcataaccttcaagggcggaaggaagcttga

SEQ ID NO: 83821 - DNA, 215 bp, Oryza sativa
  unsure (1)..(215): unsure at all n locations
  Clone ID: PAT_MRT4530_83116C.1
cccactcgtccgcccacgcgtccgcccacgcgtccgcccacgcgttcgctgactctttgtcgggcgcgtgggcaaaaacgcagtagccttccatccctcttgctttagtttgttcatccactactaaatcttattggaaaacaanctnnaaagcatggaaggagtgaatagtttgatcatttgtatgctagtgctaagcttagtcctgcaacaag

SEQ ID NO: 83822 - DNA, 467 bp, Oryza sativa
  Clone ID: PAT_MRT4530_83117C.1
gaaaaagggatttattgcgtcatcaaaggcggttcccccggtaaaccgggttcaaagagacggtctacgaaaccaacggccgagatctaatctaagccgaacggacgggcgagatcgatccggtccaccacgggctatggatgacgtcagcaatgacatcagcgatgatgtcatcgccggcggcggctcgagaccacgggctcgacggcgaacggcagcgaggcggcgcaaacggaggacaccaacgggtagagctcgactcggcgaactcaccagcggcttggatgatggcaaacgacgacggatgacgacgttggcgaggttgaagcggcggcggtcttcgggtcggcggtgacggcggcgctccgaagggaaatggcagcaacctcgcgatcctgatggtagcaacggcgaccgaaggcggcggctgcaatagcagtgcggcgcggctgcaacagcggccggag

SEQ ID NO: 83823 - DNA, 322 bp, Oryza sativa
  Clone ID: PAT_MRT4530_83118C.1
agggaagcaattaaccatcaacaactccatatttccatatcggaaatcagtttacaaaatctccaaaacaaccctgcaaagagaccatgatctcgatacaagacagcgatcgaggcgtgtttgtgaatgaaggggaaggggaagatccggtccccttgacggggtccaagttggagacgggaaccacggcccccacaatggggacaagcaccacccccccggacactatgcttaggaggaagtttttgagcgacggggttaggctttcctgtgcggccttcgggacgttggggaggaccatcgccccccccatggccggggt

SEQ ID NO: 83824 - DNA, 276 bp, Oryza sativa
  Clone ID: PAT_MRT4530_83119C.1
atggccggaaccccccggacaggtggggtccacctgtcagtcgtcttcaacctccggccgctgttgcagccgcgccgcactgctattgcagccgccgccttcggtcgccgttgctaccatcaggatcgcgaggaggagcagcacctcgtccacccctccgttgctgccatttcccttcggagcgccgccgtcaccgccgacccgaagaccgccgccgcttcaacctcgccaacgtcgtcatccgtcgtcgtttgccatcatccaagccgctggtga

SEQ ID NO: 83825 - DNA, 231 bp, Oryza sativa
  Clone ID: PAT_MRT4530_8311C.1
atgtggattctccttcgttgggatatcagctgcatgcagcacgcaaagcaggccgttgggctttccgccgcggagctatcgacgatgatccttcggtggcgactcctgaatcttatcgtggagaaccacaagatcaagcggcgtttatacactttcgccttctcggagaattcttgttgggccggaggcctggaacgggattgccaccaatgtgaggcccgtaatagttga

SEQ ID NO: 83826 - DNA, 253 bp, Oryza sativa
  Clone ID: PAT_MRT4530_83120C.1
ggttttcgtcatgttctcggaatcgaacttgcattagggagttaagaaaaaagggctccacacggtcagtaagtgtggatttgtaggagctttatgatttcaagcaattagacagaactctgttgtcaaaaaaaaaaaaaaataaaaacaaaaaaaaaaaaaaaaaaataaaatgataaaacaaataaaaaatgctaaataataactaagaacttgaattcaaagaggaacatttaattatttgcaactttct

SEQ ID NO: 83827 - DNA, 1673 bp, Oryza sativa
  Clone ID: PAT_MRT4530_83121C.1
cccactcgtgcgttcaactcatgcaagtagtgtactcaaattcaagctacacaacttacaatatcccaaccctttgttacaacagcatgatgcccagagctcagttaaccacatttctcatcgtcactagcttcctctctactgtcccctatctcagggcaccggtgcatggtggcgtcctcactagttacgatgtttcttctttggatatcatgtccaaaatccacactgatcatgacgcgactaccaaggcatcatcggactttggccatattgtacatgctacaccaaacggggtatttcgtcctaccttccctgctgacatcgctgccctaatccgcttatcactctctcagccgacacccttcaccgtggcaccacgaggcaagggccactcctctcgaggacaggccttcgccccgggcggcattgttgttgacatgtcggctctcggtgatcacggtcaccataccagtcaccgtatcgacgtgtcggttgataggatgtatgtggatgccggtggcgagcagctatggatcgacgtgctccacactgccctcaagcatggtctcacgccacgtgtatggaccgactacctccgcatcaccgtcggtggcacgctctccaacgccggcatcggtgggcaggcattccggcatgggccacagatctccaacgtccacgaacttgatgtggtgacaggaatgggtgagatgatcacttgctcaccagaggtgaactcggccctgttcttcgcggtgctaggtgggttgggtcagtttggggtcataacccgggccagaatcagacttgaaccagctccgaaaagagttaaatgggttcgaatcgcttactcagatgttcacccatttactaccgaccaagagttgcttatctcaaaatgggctagcggatctgggttcgattacgttgagggccaggtccagctcaatcggaccttgacccaaggccgcaggtcgtcttccttcttctctgcaaccgaccttgctcggctcactgggcttgccattgatactggatccgtagcgatctattacattgagggagcaatgtactatgacgataacaccgccgcttccgtggatcagaaacttgatgcgctactggaggagctgagcttcgtccggggcttcgtgttcgtcagggacgcatcgtacgtggagttccttgaccgggttgggcgggaggagcagaatctccggtcagccggcgcctgggacgtgccccacccatggctcaacctcttcgtccccaggtctcgcatcctccacttcgacgccgccgtcttcaagggcatcctccgcaacgccaaccccgtcggcctcatcctcatgtaccccatgaataaggacatgtgggatgacaggatgacggcgatgacgccggacgaggacgtgttctacgccgtcgggctactgaggtcggcggtggccggtggcagcggcggcgacgtggagcagctggagagggagaacgcggcggtgctggagctctgcgacctcgccggcggcggcatcgggtgcaggcagtacctgccgcaccacgcgtcgcgggacgggtggaggcgccacttcggcgcgaaatggggcagggtcgccgacctcaaggcccggaggttaatttgcgagggtgctgaatggtttggtttgtaa

SEQ ID NO: 83828 - DNA, 187 bp, Oryza sativa
  Clone ID: PAT_MRT4530_83122C.1
cgtacgacccttttctccaccaccacccgccgctcggcgctcgcccaccatgggcatggcgacgggggtggggaagctctactacgacgccctccgacggcagccggtctgacgcgtgaccccggtctactacatggcgtgcctggcggggaccgcggagagatccggaggcacctggcccaaacag

SEQ ID NO: 83829 - DNA, 1250 bp, Oryza sativa
  Clone ID: PAT_MRT4530_83123C.1
atacttactaccactactactgctgctgctgccagttctagctagcctactgctcttctccgagctgaagatttttcgagctagctaggatggcagccagaatgggcagcaaggtcgctgcaatcctcgcgattctgtccgtgctcgtggtgcatggctcttgcaaggggcatcctgtgaactacaacgtctccgacgcctccgcctacggctccggctggctccctgcccgggcaacctggtatggcgctcccaccggcgccggccctgacgacaacggcggcgcttgcgggttcaagaacgtgaaccagtacccattctcgtccatgacctcctgcggcaacgagcccatcttcaaggacggcaagggctgcggctcatgctaccagatcaggtgcaacaaggacccgtcgtgctcgggcaacatcgagacggtgatcatcaccgacatgaactactaccccgtggccaggtaccacttcgacctgagcggcacggcgttcggcgccatggccaagccggggctcaacgacaagctccgccactcgggcatcatcgacatccagttcaggcgcgtcccctgcaactacccgggcctcaagatcaacttccacgtcgaggagggctccaacccggtgtacttcgccgtgctcgtcgagtacgaggacctcgacggcgacgtcgtgcaggtcgacctcatggagtccaagtcggcgtacggcggcgccaccggcgtctggacgccgatgagggagtcgtggggctccatctggcgcctcgactccaaccaccgcctccaggcgcccttctccctccgcatccgcagcgactccggcaagacgctcgtcgccaacaacgtcatcccggcgaactggtcccccaactccaactaccgctccatcgtccagttcagctagatcaatcatccactgctgatcgaatatggaatcatattggctcgcgatcgatcgatcgatcgattagtttattctctactactgctgctgcaaaatttgcgtgggattgaggtgtttttttttattaggcgaggcctcatgtgctgtctggtctagtgtgtgaagtggtgaagtgatgcatgtgtgggaaaatggaggaggggcacagtaatacagtatgtgcatgtgctctcccgcccactgtcactgtactacccagtgctttgtaaccaaatcttaaggctacagaattataaatacaatgcttaagttaattaaaaaaaaaaaaaaaaa

SEQ ID NO: 83830 - DNA, 1300 bp, Oryza sativa
  Clone ID: PAT_MRT4530_83124C.1
atgggccgcgtcctcgccgaccaggcccccaccggcggcccgtgcgtctccttcgcctgcggctcgtggctcgacgcgtcgtactcgctcaagccggcgtaccgcgacgccatcgtcggcacgtacaagggcgccgcctccaccgtcgacttcaagaatcacccggtggaagcaaggaaggagatcaacgcgtgggtggcgagggcgacgaagaacctgatcacggaggtgatcaagccggagagccagagcgtggacacgaggcacgtcgtcggcaacgccatctacttcaagggcgagtggctcgccccgttcgacaagtccgacacggcggagcgcgagttccgccgcctcgacgggagctccgtcgaggtccccttcatgcagcggccgtcggggagctaccaccacgtcgcctgccacgacggcttcagggtgctccgcctgccgtacaaggcgacgagcgacacctacaacctcaagctccgctacagcctcccgtcgttcgccatgctcgtcttcctccccgacgaccgcgacggcctcccgggcctcctcgacaggatcaccgcctcgccggagttcgtcgacgagcacctcccgccggggtgcgtccccgtgggcaggttccgggtgcccaagttcaagctcgccttctgccactacggcatcgccgacgtcctccgcggcctcgggctccgcctgccgttcgacatgttcgccgcggagatgagcggcatcgcggtggagggcgacggcgaggacccggcgatgttcgtgagcagcgtgatccacaaggtggtggtggaggtgaacgaggaggggagcgaggcggcggcgtacacggaggagtccgacgacgacctcgggtgctcgctgtacgacgacgactacacgccgccgccgaagctggtggacttcgtcgccgaccatccgttcgccttcttcatcgtggaggagaggtcgcaagccatcgtcttcgcagggcatgtgctcgatccttccgaggaagagtaggcttctgggcaatcctgaccccgatggttgccgcgtggacaatctcagaatcggacgtctagctcgttgcggcttcaagcacaacgcaaatatggcagatgagcctcgctcgactcggctcccgggccgttggcttgcaggctcagatccctctcctaccggttcctccgcagccgctgccagcggcggcaagcggcgcctttctcatctacagtctctcgtccgtcaccactccctttctcgaacgtcgtccactcggccggaaaaccgtatgatatgttaa

SEQ ID NO: 83831 - DNA, 1574 bp, Oryza sativa
  Clone ID: PAT_MRT4530_83125C.1
tttttgccgccttctccttcttctccgacggcgaacaccgtccatcgcgagaactcttacctcgtcggcgtcggcgtcggcgtcggcgaggaggagcaaacatttacggctggcttgcaatcttaatcttttgcagtgttcgtcattcaggaggctcccggccgatccggtggatcggatcggagcgggagcacaaactgcaaattgccacggtccttgcacttgatttccggagccaggaggatgatttgctgcggcggcgaggaggaggagacgtacgctccccgtgcagccagtcgcagtcgcagcaggcgcccgacacctgcgacgcagtacaatgcaggccctcgtaagccaagaggaccaaatgcacccaggagcggcggcccgccaccgaaggtgctctccatcgacgtgccagccatctccatgggcgagctgaacaacatcaccggacactttggacagagtgccttgataggagaaggttcgtacggtcgaatctacagggcggtgctgacctccggggagccggttgccataaaaaagcttgatcccagcgtgtcaagcgactctgaagcagacttctctgctcagctgtcaatggtttcgaggctcaagaacgagtatttcatccggctgatgggctactacctggatgcaaaccgaagaatcctggtctaccagtttgccacgcacggctccctgcatgacatcctacacgggaagaagggcgtgagggacgcggcgccggggccggcgctgaactggagccagcgggtgaaggtggcgtacggcgccgcgagagggctcgagtacctccacgagaaggcccagccgcccatcgtccaccgcgacgtgcggtcgagcaacgttctcctcttcgacggctacgagtccaagctcgccgacttcaacctcaccacccagcctcccgacggcgccgcgcggttgcactccacccgcgtcctcggaaccttcggctaccacgcgcccgagtacgcgatgacgggacagcttaatcagaagagcgatgtgtacagtttcggagtcatcctactggagttactgaccggcaggaagccagtggaccataccatgccgaagagacagcagagtcttgtaacctgggcgacgccaaggttgagcgaggacaaggtgaggcagtgcgtggatccgaaactcggggatgactatcctccaaaagcagttgccaagatggcggcggtagcggcgttgtgcgtgcaatacgagtcagatttccggccgaacatgaccatcgtggtgaaggcgctgcagccacttctcagcaagccagccggagcaggagggccctagcagcacatgcatactaacaccagcccatgcatcaaaccaacttagcatccaaaacacattatgtgctctgttcttcttggatgctgagacttgttaaacagctggtgattgtaccatgtactactcacaaatcaatcaaactgctaaaagggtccaagggctcacagagtttcaggtcaaaaaaaaaaaaaaaaaaaaaaaaaaaaaaaaaaacccaaaaaaaaaaaaaaaacaaa

SEQ ID NO: 83832 - DNA, 575 bp, Oryza sativa
  unsure (1)..(575): unsure at all n locations
  Clone ID: PAT_MRT4530_83126C.1
ggaagtatatattggactattgtaancataggtgtaggcttggtgtatacgtnggtagtataggtcttggttcactcnatggaggtgtaggccctgggtactgngagatataaacgactagcacttgtgcgatgttggctgtgcctgcaggggatatagagcctgggagattggcaatgctatatgggatggaccataggtggatgggccactaactttgggggcgtgggggataggcttgttgcctggtgtgctaaggtgtgctggaattnttgggttgattggatggtgttgcaataagtgatggctggtgttattgtgcgctggtgtgtggctgaaacaaggagtgatatacactgaatacgtgccatgcagccatcaccgatatgatactggatggtacacttaattgtgcatgggcgggttgagcagcatgcctgcctttgctggaatcaatgcagaatattttcatnccaaaagaaaaggattatctttcttatggagtatgttcagatttgcgtgtaaagaactggattagtccaatcttgtttcttcaaaaaaaaaaaaaaaaaaaa

SEQ ID NO: 83833 - DNA, 542 bp, Oryza sativa
  Clone ID: PAT_MRT4530_83127C.1
cgtactaccacgagtttgaacactttctctgagttgttaataagaagtaaaccacgtagaggtagaccttagaattcaaaccactgtcttgcgcacctgtgcgacttctgggaaagagggatacagacacttatagcatgtgtggcaccggtgccaagttcactctcctttgccttgctagatgacatacgccaccatagctgttctttttccatataccctagtaataatataaaaaggccaccatagttacactgtgtggtgtgttttgtttaactaatggtgttatgtctctagagttaggattaatagaactagataaaaccccacgcacttgctgcggagttttgtatgatattagtcgaaataacatgtaagatggctaccctttgtataattttcatctatgatcgactattaaaaaagaaagctataaaccattaaaatgttgtggtttataaccatttaaatcatatatggattgatcattccaaagccaaacttacgtgatgtggctagatgaaaaaaaaaaaaaaaaaaaa

SEQ ID NO: 83834 - DNA, 536 bp, Oryza sativa
  Clone ID: PAT_MRT4530_83128C.1
tcctgcagccctttccttttaatggcaacccgtcgcccgccgccgcaactcgccgcccaccgcctgcggcctcccctcttgccagatctggcggaggggagggcgccgccgcaacccgccgcccgccgcctgctgcctcccctcccaccaaatccggcggagggaagggtgccaccgctgcccgccacctgccgtcacccctcccgccggatccggcggagtggatggtgccgccgcaacccttcgcctcccgtcttgtgccgccgcctgccgcctcccctccagccggattcggcggaggggagggcgcggccgccgcggttgccgcctccgtcgagccgccgcccgggcaccgccgtgcgcgcgagagagatagagacgagagagctgagagagagagaggcgagagagatagagatgggagaggcgagaggataacgttgacttggctgcgtcggctcatataggataaccggcagctatagttatttaaaggtgtcggttttacgtgtttctagcctgcggggctgcaggaa

SEQ ID NO: 83835 - DNA, 2389 bp, Oryza sativa
  Clone ID: PAT_MRT4530_83129C.1
atggcggccacctcgccttctcaggcggacgaagaagacgtgggccccacatggcagcgtcaggaggccaagcaccggcagagccagctccgtggcaacctcaacgtggaggtccccgtcgccgcccccaccggctgcttcgccggctgcttccgcccgtcgccgacctcctcccgatcgtcgcccccgtcctgcaacagccaggctgacaggccggcgtccccgtcgctgatccggtcgccgtcggcgtggatccgcgcgcgcgggcagagcttcgcgtcgtcggcgcggcacgcgcgccgccggtccggtgacttccagtacgacgcccgcagctacgcgcgcaacttcgacgagggcaccgacggcgaggcgagcggcgacgagcaggccgggctcgccgccggtgacacgctcaagtaccggtccttcgcgtccaggctccccccgtcgcccacgcccgcgctgtcgccgtccgctgcgccggtgggagggcgccgtcgcaacccgtcgcccgccgccgcaactcgccgcccaccgcctgcggcctcccctcttgccagatctggcggaggggagggcgccgccgcaacccgccgcccgccgcctgctgcctcccctcccaccaaatccggcggagggaagggtgccaccgctgcccgccacctgccgtcacccctcccgccggatccggcggagtggatggtgccgccgcaacccttcgaccgccgccgcctcctttcttgcgccgccgccggccgcccgccgctcgccacctcccgtcttgtgccgccgcctgccgcctcccctccagccggattcggcggaggggagggcgcggccgccgcggttgccgcctccgtcgagccgccgcccgggcaccgccatggcgatggcggcatccgcggttctcgccgcatcgtcctttctgctcgctctagtgttgtggatttggagggcattgcctctcgaaagtcaaagctggaggggcagcgtgcggcggcatcagcggcatcagcggtgtgcggcaggaggagcggcggcgggctcgccaacgggaggtggcgcgactgctcgaagagctgcgcctgtgcgctcttgtgcttcgcaaaatcctttgaccgccccttcgtctcccttcaccgactcccaatccccaatgtctgcctaccagcccccttccctcatcgtccttgccgccggttctctcacagacgcgcgcggcaacgcctctacctccccgacgaacacctcggccagatcctcgtgacgctctcccagtcccttgcccatggcgtggacgaaccgacgacgcctctgtcgctctcaccgcgcgtctcagcgtcaccatgcccacgagcatcctaccccatcccggtgccaaccatgacaagcacccctacatcctcgcggctgaccaagttggcctcctcatcagtggtggtgctcccatcgatccacagtatctcccctttatcccgagctcgctcatctccgccgcgtgagatctcgttgctgctcatgccgtccacaaccacgacctccttcttctgcgtcgccagtggggacacacaccaccgtcccggcctcttcgccgacgcccgcatcgcgagattctacggctccttcccgggcggctggctcgccgccgagctccccgagtcgcgcggccacgcgctgctcaacctctgcaccggctcgcgtatcgccctctcgacatgactccgctacagcgtcaacgcccgcaggagcaacaagtactccatcatcatccacatccacgccgtcactctctccgccgccctgtccgacgatcacccgtactacgccgccgccgtaatgtccagccagtcgaacatcgatattgtgttctggcgccccagcatggactactgaacggtgaacgccaccgacggagaattggggcgcgaagttagaagattggcagaagcatgtcgtccatggagatgtacagcgtctgtgatgtttgcgtcggccatgtttgcgcatgtactgcaagatgcggcggggtgacttctgctgtccgacgtgggtgacgacggacgcccggaagctcatcaagatgctgctcgaccccaacccgggcacccgcatcaccgtcgtcggcctcctcgagacatgtggttccagaagaatgcgcccgtcccgtgccccatcactgacctcgggctggcgccggtggacacgcttggcaaggccgacgacgacaaaagacgaacctcccgaggtgctgaacgcgggcggcatcgctgggacgcatggcagcgccatgcccatgcacgggacgcagggggcggctcgccgtggcgccaggggcaatcccgctatttcaaaaaatttctcaactcttttgacctggaaattataa

SEQ ID NO: 83836 - DNA, 156 bp, Oryza sativa
  Clone ID: PAT_MRT4530_8312C.1
gatttataaccttgcgcactaagagacattgatatatttgatgggatcaatgaagacatgcagcttgctttatagtggggagcataagcgcttgtggtcatcatgacaatagctgatacttgatagaaattgcactcagatctaacgatgataccg

SEQ ID NO: 83837 - DNA, 342 bp, Oryza sativa
  Clone ID: PAT_MRT4530_83130C.1
atgctgctcatcttcttgttcttcctgctgttcctctacttcctcagtgggggccgcttcctccgcaggaggaaaaattacccgcgcatagcaccgcctcctctcgcttcctccccggatctgtatgaggggaccaccgccgctaccggcgaagggggctgccgccactgccgggagaaggggccgttgccgctgcaaggagaagggggcctccgccgctgcctccttgtagccgccgctgctttcgggagaaggggccgctgccgctacaaggagaagggggcgccgccgccgctgtcacgtggcggtttaggagtttatagaatgcaacatcaggcttaa

SEQ ID NO: 83838 - DNA, 1290 bp, Oryza sativa
  Clone ID: PAT_MRT4530_83131C.1
atgaccagccttggcccctacaatggcgtctcacttaaggggttagttctgcagcttcgccacttgatcgttgagctgggctacaccgaagaagtccagtttgttggtaccactgtgccagacgaaggagaaaaagagttggcatccccccgatggtcagtcaaggccaccttgctctccaccaaccctagcttggaatcattggagctaacgggagggactgacaccttcatcgacgcatgccaagaagtggtgcttctgggcattggcaggctgcttcaacgacactggacacgtctgcaacacactccattccgctatcatcctactcgcagtttggcggaggactatgccaccttcagggatgccgagcacgagaacgacaccacgatcgatcacctggccaagatggtgcaggcgtatgatgatgctcgtgtcgactactacaagatggcgaagagaggttttattcaagcttctagtaggattctacggctaaggaggaagaacctgtgtgtgaagttggagatggctagcctgaagcgggaattgcgtaacctcgagctcggacatggtcaggttggagaaggaagctctgttgtggggtctaagcgttgccgtgttggaccgtccttgaagatcacgacacgcaagcgagatggccttcctccgatggtgcacgatgctcaagcgtcagccagggtgattgtccagaactacttggagcgaaggggattgactgtggctcttgccaatgaagatgactccaacgacaactcctatgacggtgatgatgagtcagagccgacagtggacgacaacgcaacaaaggacgaagctcacgtacctgctggagttttagccctgaggaagaaagaattccgtgaactcaagcaagatggcaggaccgtcactgaatttttgcacgagttcaataggttggcccgctatgctcccgaggacgttcgcaccgatgaagagaagcaagagaaatatcttgaagggttgaatgatgaattgtcaatccatctcatctctggtgactacgaagacttccaaaaactagtcgacaaggcgatccgcttggaggacaagcaccgaagatggaaagcaagaagcgcaagttggctaatgcgagtcaattcgtgttgtctgatacatatgcatagaggattatctgcagctgcggtatatggaagagatatttacaatttggaaattgtagattggtttggaaattcagcaatagagtcctattgggaatatgagttgtatttctactttgagtag

SEQ ID NO: 83839 - DNA, 448 bp, Oryza sativa
  Clone ID: PAT_MRT4530_83132C.1
tttttggtttttttttttttttttttttttttttttttttttttttttttttttttttttttttttttttttaggcaacaacaacagaccattttttattttcagccccggtttatctttaccgggggggggggccccccttacaaaaaccaaaagggcctggaccaaagctacgggggccacggggcacactggggattcagctttcaaacaagcaagcaaaagccacccttcttaacggggtggctagttgcagaagggggggggggataaaacacccaaacccgaagcagctcaattgggcggggggggtttagcccaaaagcaaaaaaccttgggtgggggccccacccagggggggggcctccggttttttttatttagctaaccacctttgaaaaggttcgcttgattttttttatttgggaaaaaattaggggagcttttt

SEQ ID NO: 83840 - DNA, 168 bp, Oryza sativa
  Clone ID: PAT_MRT4530_83133C.1
atgagggcgcaactgctatgacaggtatgttggactgactggtatcccgtcttattcaggacacctagctgatgaaatgagccttactatctcctaactcggtatttccggtcgtttagcatctactaaatgatgcaccagtccaatgcaccgagatgacatgtgcct

SEQ ID NO: 83841 - DNA, 351 bp, Oryza sativa
  Clone ID: PAT_MRT4530_83134C.1
gagaaagctggcacgcgtgcatgaactggtaccctatacagcggtcgacctacgctttcgtccacgcgttcgtccacgcgttcgtcgtgagagtgggtacttgatgtcatataaatctaaataaaatcacctatttaaataagaaaacctaagaaagcaaaataacaccaaaaactgatcaagatgcccaaatggacaaacattaaagaacatcgcagttcccatggctcaaagcaccatgacagtccatgatgctgctcatgagcgaggtgaaagatactataactggcctaggcctggaagttagttttgatgacattgagagatcattcttgattttcagccatttgc

SEQ ID NO: 83842 - DNA, 387 bp, Oryza sativa
  Clone ID: PAT_MRT4530_83135C.1
cacatcctttgctgtgatatatagtggtatactcctaggttctccttgtacccacgatcggcggggccagtgtcaatgatgcctacagagaacagagcaagatcagtgcagcacaccgagctggacgagcatcccgccgagcatacatcctcgcggtgcgcggctctccttccgcgcagcagctcctactccgaccctcgcctgctctccctagacatggggccgcgggagggctcgatgctgatgggtggtggcaggtggcggcgccctcccttccgctgggaggggaggcggcggcggtccgacgtcccagatccgtactctttctgcactcacccttgctggcaagggcacggtgactcgaggcggcggctacggcgactcggt

SEQ ID NO: 83843 - DNA, 301 bp, Oryza sativa
  unsure (1)..(301): unsure at all n locations
  Clone ID: PAT_MRT4530_83136C.1
cnttttatagtaaaccctaccggcgaagaggttgacggcggcggcgcgggcgcgcgcncgcnagaacgacgacgacgtctgcgcactgcgagcgcagagggggggtttttccgagattttcctaaaaaggggacctcgccacngtaccgagaaaagaaaaagantacgaggcgaaaaccaanacctctntctcgtctctccccctccccgactcgactcgactcgacttcaaccccgtcctccncctcgtccngtcccttctttggtttcctcctcccnaaatccgaggggtggctggggg

SEQ ID NO: 83844 - DNA, 268 bp, Oryza sativa
  Clone ID: PAT_MRT4530_83137C.1
gacaggttaatgtgatggaaaaggactgaagtttagatctaaacacagccagagtttagtggcacttaagttttggatatgatgtcctattgtcgtgacagcacatgctacaattactattttttagggggtggggtggggggtggggttgttgttgttgttatcatgttccatatgcgttaatgaattaaaaaggtgccatgttattttttctaccgaaaacctgaaaaaaaaaaaaaaaaaaaaaaaaaaaaaaaaaaaaaaaaaa

SEQ ID NO: 83845 - DNA, 1202 bp, Oryza sativa
  Clone ID: PAT_MRT4530_83138C.1
gcacgagggggaaacctgacacctgtccagatcccatgagacgaagatcaacccatcaaggtcacgaaaacaacgggaagtcggcaacctgtgctgcacagtgcacacagcctttgacagcacgtgcgcagcgcgcgagccagatctagctggtagtacagataggcagcatcggcggcggcggctcgccggaggagcgcgcggcggccggtgggccggtgtgcgtgacggggtcgaccggctacgtcggctcgtggctcgtccgcgccctgctccgccgcggctaccgcgtccacgccaccgcccgcgacccagacaaggcgtggcgggtgttctccgccgtggaggaggggaaggaccagctgcgggtgttccgggcggacatggccggcgaggggagcttcgacgccgccgcgaccggctgcgtggcgttcttccatgtcgccgcctccatggacatccacgtcccaccccagaatggcaacgacaacaacatcgaggagcacgtgaggacgcgggtgctggagccggcgacgaggggaaccatcaacgtgcttcaatcctgcgtccgcgcggggacagtgcgcagggtcgtcttcacgtcgtccatcagcacgatgacggcggcgacgacgacggcggcgaccgggcggcgcaaggccgtcgtcgacgagtcctgcctccgcgccgccgccgacgtctggaacaccaagcccatcggctgggtttacatcctgtcgaagctgatgacggaggaggcggcattcgggttcgcgagggagaatggcatcaatctggcgtcgctcgtgctgccgacggtggccggcccgttcttgacgccgaatgtgcctaccagcatccagctcctcctctcaccaattacaggcaaacaaattctccatcacacaagtgatccgaagctgtattctctgctggcatctgtgcactccaggttcgggtgtgtgccattggcacacatccaggacgtgtgcgacgctcacgtgttcttgatggagacggagcaagcggatggacggttaagcaaagatttccatggctcaaacccgtcggtggtatcgtccaagcggctgagggatttggggttcaggttcgagtatgatgttgaggaaatcatcaagaacagcgtcgtacagtgcgttgatcatggattcctgcaggatcccgacagttccaactgttag

SEQ ID NO: 83846 - DNA, 2463 bp, Oryza sativa
  Clone ID: PAT_MRT4530_83139C.1
ccaaagcgagatgcccatgccggagtaccaaaattccccagtagcagccgccgccgccgccgccgccgattcaccaacccttctcctccatcggcatgtcgcgggggggaggccggctgcccccgcgcttctctctacccagctgtacctgtaccggaatgcttctatcatgcgagtgaactgatataggacgaagggtcaggaggcgttgggatttgtactgctccatcaagcatctgcatcaccttatgcattgttggccgcatcgatggctcctcctggaggcaccacagtgccacagcaacgaagcgctccaccttttttatgttgaagattgcctcgtcatcgctcgccaccagcaagtcaatcctcccacacctgtagcaatcatttgcccaataagttagtattgtctgctcctcatctgcaacttctaattccacattcttcctgcagcacacaagctcaagcaggatcactccaaagctataaacgtcgaccttagaagtaatccctatgttcttgaaccactcaggtgcaacatatcctcgagtaccccgaatgccggtgtttgtttgtgtctgattcaccggaagaagctttgctagaccaaaatctgaaatctttgctacaaaattatcatcgagaaggatattctgtggtttcatatcgcagtggatgatttgtttattacactcctcatgtaggtagaacagtcctcgtgaaaccccaagtgctacttgaacacggaggctccaatgcggatgactatcgttgaagaggaatgtattgagtgagccattgctcatgaactcatacactagcagcttttcagttccctcattgcaaaaaccaagcagtctaactaagttcctgtgaaacgtctgcccaatggtttggacttccaccaagaactccttttgtgcttcctgctgaagcttttcgattttcttgactgcgatgttagttccacactcatcttgcagctgtcctttgtagacaatacctgaggctcctgtaccaagtacctcatggaaaccaccggttgccttttccagctctctgtaagtgaaaatccggagtccgccgtcgtcgtcaagccgagccgccgccgccgtcctaagaagaacagaactcaaggcaaattcgctatcacagagcctccgagaagcaacgaacttcctaggatccagagcttcttgtcactcttccattttctagactttctgagctctggctgcgaactgttgctctttggcaccttgataagaactgttctctgcactccactccccatgatcccgtttgatagagggagcttcttcttccagcaggtgttttcatggaatacagcaacagcacagaagcaatcaatcaggcagagccgtcgacattcatccatgtctatgggagtgtaccactcatagtcagcctgaggccaatccacattattaaccaagttaaactcatactgtgccatggaagctgcctcatccaaatcacagctttgtagctcgaagtccggtctgcagcctctgtacttcctcacctcatcaaagaacgagtactgctccgggcacacacagcttgtctggttgttgctgccatcaaacatgcagtaactattgaatccacaggtgccactgcctacttttgtctgagcattgcagatgttttcaggttggatgctcactgctgtccatgcctgactcatgctgctgggcttcttcgggtacacatattgcctgaacacaccatctgggtcaagcgtagcacgatggtagtagtcctccatggagcggatcaccccagatgtcatgttgaattgtgttccattcttcatgctcacgtatatcctaccggtagtattgaacaccagattggtgacctgatttgtgacattctcatctatgggtgtggaccaatatgggtcataaaggtttccagatggaactgccatggtataaagtgcagctcgttgagtttccatgttaagaagaaacctgccattggagtaatctgtggtaaggagtcggctgcggagcttcattccaggggacagcgcttgtgtgaccaggatggtgtctgttgggttcttgaaagtttcccagctgatagtagagcctcctgcagcagcaatcacaaaattcccggtgtcgagcatgctggcatagggtgcaccagttgctcctggattccatacctctctattggtgggatctcggagagaaagtacaccagttgaggtaaactggaggatggagccaatggcacttgtatcggctgtggttcttgctcactggtcttggcataccatgttgccgtcttgtcgctgatcttgttgaaccagatggcgaggaggtagaaggaggagttgccatcgatgggccggaatccaaaccaaaaatatgaagaatcattgcttagctcctggaaaacaatcacagccgaagtggatacctt

SEQ ID NO: 83847 - DNA, 240 bp, Oryza sativa
  Clone ID: PAT_MRT4530_8313C.1
atggggaaaacaccgaagggcggattatttctaacggagaaaacacggaggaaggcctggcgcccttgtggggtccggagagcgggccccgagaggcacgaaatccccgaccctggcatgataatgagaaatatagaaaatctgggggggagcttatcgccgccggcccgcccggagccatccgtcccgggaaaccttccacctgtgacggtccgacgtttgcgagtccgtcacaggtga

SEQ ID NO: 83848 - DNA, 292 bp, Oryza sativa
  unsure (1)..(292): unsure at all n locations
  Clone ID: PAT_MRT4530_83140C.1
cgntttttgggctcttgctcttctctctagcttttgctttactagttagttggccattggttgcactcgatcttggtggtgatatgagctgagctcttctctagctcatcttcttggtggatcttgtggtgttcgtcttcttggtggatcttgctgctggtctagctatagttcctgatggggggggactccttaccatgtccagtctccccgangcatcctactgtggatgattgccacgaagcagccgccgccggcgctgccgccggcggcgggcccggcgctctgcctg

SEQ ID NO: 83849 - DNA, 497 bp, Oryza sativa
  Clone ID: PAT_MRT4530_83141C.1
ccactttcttgctcgcgatcgattcgatcgtcgtcgacgcttcgattaattctcgctcgcagagaccaccaccagtagcagcatccagctgattaaattaagctcgcggcaatggcgcaggtgagcaggacggtcgtggcggcgctgctcctcgtcgccgccgtggtggcggcgtcgcccgtggcgtcggcggccacgtacggctgcttcgaagactgctacgagcgctgcgcctccgggaagaaggacgaggcctgcaccaaaatgtgcaaggaggcttgcggcggcgccgccacggacggccatgcccccgccgctggcgctggtgctggcgccggcgctggcgcgccgtcggggctggcgctaaggctgccatcggggttggcgccggagcttgcgctggcgctggcgccggcgtcggagcttgcgctaaagccgcaatcggggctggaacggagtttggccgtgccgtgttcttgccccgcttcgtcggggct

SEQ ID NO: 83850 - DNA, 1023 bp, Oryza sativa
  Clone ID: PAT_MRT4530_83142C.1
atggggcgagcgccggtgggtgtgggcctgctcaaggtggggcgcagcagccggcagggggtgggggcggggctcggtcgcgccgcgcgctgcgcggcggcgcagcggcgcggtcgcgcggtgcggcggcgcggggcagaggcacgacgcggcggtggccggccaggcagaggcaggcaggcgcaggcgcagtgcagggcgcaggcaggcggcagtgagaggctcagagccaggcacaggcagggaggacagcagagcaagaaaatggatagaaagaggaaaggaaaggcattggcttcacaaaagagcgttactgaaatcgtcaatagcttcgactacaccgacaactacaacgacttggacaccgaaagcgtcaacaactctaagcaacctcggccgctgcttttcctacgccaattgacgcttgagctgtggcttcgtcgtccatccgagccaccactgtgcactaccccctttggccgccttttgccatcgtcgcggtcgctgctcagccacgccattgacgtcaatagctttgttgtgccaaggagctcctcaacagcctcttccccaccgctgggagccgctagaaccacgttcctcgtgcgtgatcatcgtcggagcaccgctcgtgccaccgtcctgagaagcgccaccgcctttactccctgtcgcctcttgtcgctggggatctgggctgtccacgcagccgtgccaccttggcatgccgagctattgtggccgccacatggctaccacgtggtgcacgcgcacccgagccacggtggaccatcctcctttgacccagcgactgaatgccacgactcccgcgtcactcctagggcaggggcaacacgggtggtgaccgccgccgccacaccaccacccctgcctccttctctgcctcgccgccacccgagcgggccgccagaaaccacacggtcggaaaggagacagcagcaatgcctcctttcttctccccgagggcgccgggtcgtagcccacaacctcacctggttctag

SEQ ID NO: 83851 - DNA, 439 bp, Oryza sativa
  Clone ID: PAT_MRT4530_83143C.1
acatgaattaaaattttgtagtactagcttttgaccaaccaaatgttccgaaccaaccgctcactcgccccacaaccaccatcaccatgcaagttctcaggtcagtaatagtactaacctcgagtgagaaaaccgtcttatactacagaagagatgaaaagctgtacgctaaaaagttcttaaaatggaaacaagaacaggggcaatgtgagaacgctaaactttccttaaatagtagtacgtatgtacacagccggaccagtgctctccactcccacattaatcggttacccctatctactagtgatctctaagcttgatccttggtcctagtactacccagtgatgctctactcacgtacgtgtcgagatcacgagccgaacagcagcgccggcggcggctcgttgaggtcgaacgggagctcgccggcgctcggcc

SEQ ID NO: 83852 - DNA, 363 bp, Oryza sativa
  Clone ID: PAT_MRT4530_83144C.1
atgaacttgtcgaatttctttgaccactgcctcggagcccatacaagctcttcttcaacaaccatatgtgaccttcttttccccgagtttcgaacccctcggatgcaagtcctcgcccgctactataccgagaatcgtccagatggttttgagcttgactgcttacctgaaagcatgcggcactcaactcagctgaagaattcacttccacccgggttcttcgcgagacatagggcacttttgcggctatcgattggattccgaaccaagaaagataggcaactttcacttgaaagaaaggagcttcagaactattgtattccaccgaataagaataagagcaagaaggggctatctttgtga

SEQ ID NO: 83853 - DNA, 1038 bp, Oryza sativa
  Clone ID: PAT_MRT4530_83145C.1
ctaaagacctcctaaggcagctgcaagagcagagggaggctcatctgcccccacaacagggatggaaaggtatcgatcgaccatgaacttgtcgaatttctttgaccactgcctcggagcccatacaagctcttcttcaacaaccatatgtgaccttcttttccccgagtttcgaacccctcgggttgcaccatgtagatctcctcctcctcgttgttgccatggagaaagactgtattcacgtctagttgaaatagatgcaagtcctcgcccgctactataccgagaatcgtccagatggttttgagcttgactgcttacctgaaagcatgcggcactcaactcagctgaagaattcacttccacccgggttcttcgcgagacatagggcacttttgcggctatcggtgaagagtgtgcaccgtccttggtccttccccatttccttttgatcatattacgcttgactcgctgcaaaacatttcgctttctgcgctcgctcgtacgtggtttacactccttgcctttcatctgacttgaaaccataacacagatttcaacctgctcttggaaatcctcgaaacccattccatatctgtcacgccctaaaaatcgcccatgcctatataaagcatcccctagtcgtcctcttccgtttgcccccaagtcccgagccccgccgtcgcttgtagcgcagccgccgcgacgccctagccgccgccgttgccatcgtcgttccagccgccccgcgccgtcgctgtggtggtcgtcgccggtcgccgtcgctatctccgggttcgcaaggagaagccgcgcaccgtccggccgttcgctgccgttgcaagtcgccggagcgccgctgtcggcgaggtccaagccgccgccgccacctctcgtcgccggccgtcgtcggtcgtcgtttgacgcataggtgagcaccattgggttcgcgtcgtcgccctctacgtgtaggtgtcctccaaaaccccggccgaccaccctagctccggcgaggtcgccatccgagccggccgccat

SEQ ID NO: 83854 - DNA, 360 bp, Oryza sativa
  Clone ID: PAT_MRT4530_83146C.1
atgggcattgatggacgcgccggccatggagacgtcgcgtccaccgacccaccgcgatcgatagccggcatctcctccttccacgcgtctccgagctcgcgcctcctcccgccagcggccgcctcctcccactggccgccgcctcccaccgacgcggttatcgccgcccgcaccgtcatcgtcatcgggttcgcgtcgtcgtcgtcgcgggtttgcatcgtcgtcgtcgccatcgtctccgagctcgtcgcctcctcccgtcgccatcgtccctcttcccgttgtcgcaccagcgccggccgccgcgcccgcatcccgcgccggccagctcgcccgggtgaccacctccctcgctcgtga

SEQ ID NO: 83855 - DNA, 177 bp, Oryza sativa
  Clone ID: PAT_MRT4530_83147C.1
atggggtggcatcaatgcggggcgttctcgccttctcggcgagcaaggaaacgcgcagcgggtcgagcggcggcggctaagagcgcagcttggcaagcggaggcagctacggtgacaacgggccaagcggcggcggcagcgggccaagcagcggtggctgaggacgcggctcgatga

SEQ ID NO: 83856 - DNA, 827 bp, Oryza sativa
  Clone ID: PAT_MRT4530_83148C.1
ggctactaggtcaatcatgctgatgattgttatgctttttttttgtttaagaaaaggccacaaaatcaccacgtgattaatgacatacaaactgcatcaaaacaaagcagatgcaaatgttatgcctataagatgagaaaggcagggaaatacattaaacgaccgacaaagctgtcattagagtatatatcgaagcagctgtgctcaaattaactgaaaaagtttttaatcacaatgcatgcacttccagtttgaagttgcttatgataagatgcataggaatgtaacaataaactggaaagttttttgctgactttccgtacaaaataaaccatcaaacgaacatcatcacaactccaggtagctcatcggtggaagaacagaaattctgttagatcgaatcaaccacagacaaaccccaagtcctgacctcggatctagtggtgggcggcgccggcggcgccctgcctctcgagctcctcgaggtgggcgaggtggcggcgctccttggggaggttgatgaggtaggagaaggccatgaggccgtagatgacgtggaagagcggctccggcgagctggtctcgatgtacttgtcgatgtagcggtcgacggcctggtcgctgctcttcttcacgttctcccagctcagccgcggcttcaggtaccccggcacctcccgcaccttcatcccccggatctcgctgatcagggctcgcagcgccatggatggatctctccgatctcgatctctcctcttccccttcctcgcaacgtcagggctcgcggctagggtttggtggcttccgagacgggagcagccggccgg

SEQ ID NO: 83857 - DNA, 643 bp, Oryza sativa
  Clone ID: PAT_MRT4530_83149C.1
acctttcttttttttttttttttttatatcgaagcagctgtgctcaaattaactgaaaaagtttttaatcacaatgcatgcacttccagtttgaagttgcttatgataagatgcataggaatgtaacaataaactggaaagttttttgctgactttccgtacaaaataaaccatcaaacgaaccacctcacaactccaggtagctcatcggtggaagaacagaaattctgttagatcgaatcaaccacagacaaaccccaagtctcctgaaaagctagtatcacttttttccctataataatccagatccctctcctgacctcggatctagtggtgggcggcgccggcggcgccctgcctctcgagctcctcgaggtgggcgaggtggcggcgctccttggggaggttgatgaggtaggagaaggccatgaggccgtagatgacgtggaagagcggctccggcgagctggtctcgatgtacttgtcgatgtagcggtcgacggcctggtcgctgctcttcttcacgttctcccagctcagccgcggcttcaggtaccccggcacctcccgcaccttcatcccccggatctcgctgatcagggctcgcagcgccatggatggatctctccgatctcgaactctc

SEQ ID NO: 83858 - DNA, 377 bp, Oryza sativa
  unsure (1)..(377): unsure at all n locations
  Clone ID: PAT_MRT4530_8314C.1
cggtccgtattcccggtcgcccagcgtccgagcctgaagtttctttcagtacaccagccgtcgccggtgccaccgccgccggctcacccgccacgcgcaaccgcccgccggcgcctgcgtctccagccgccatggtctccctccgcttccccggcgccacctttccgcgccttcagctagagtcgtttttttttttacaggggggggtggtnaacccatataatgagtgcgtgaggcagcagtatggcataggggggggcctcttcttgcatttagctgcgtttcaactgagaaacaaccaagtctggcaacagctcgcgctggtggcgcatcaatctcactattaggacattaacatttgttcaggcctatagcgc

SEQ ID NO: 83859 - DNA, 333 bp, Oryza sativa
  Clone ID: PAT_MRT4530_83150C.1
ggaccatacgtccagtagagatacaggttaaaaaaggggggatgaagcacatgagcagaatgtaaatggttgttgcaaacaacaaatgtttcgtttttgaagtaaaaaaaagcaaaggatatcgattctatacattttcatatgttctctttttaaatggttttcctataacatgtcaatatctgatctaggagtattgggactttgggagtatattcctatcaagaaaacggcctatccctgaatatgctaccccatacttggttacatttcactacgaaaggaatttccttgagacctcagatagtcagcgttttatgtatgctaaatttt

SEQ ID NO: 83860 - DNA, 933 bp, Oryza sativa
  Clone ID: PAT_MRT4530_83151C.1
atggctgacaagagtcacaagaccctccatgaatttgttgctccctcagctgacaacgtggccattgggccgcagatcaacctgggagaagtggatttcgatctgaagtccagcctcatcacgatggcgcaggctagcctgttctgcgacaaacctaatgaggatgccaatgctcacttacaacagttcctggagatttgcagcacatacaccatgaagggtgtcagtccaaacgccgtcaggctgtggctgtttccgttttcccttcttgggaaagcgaagctgtggttctatgccaaccgtgcaatgatctacacctgggataaatgttctacggcattcctatcgaagttattcccgatgggcaaaaccagcgcccttcgtgggagaatatcgtgtttccagcagacgggggatgagtccattcctgaggcgtgggaacgacttcagaaaatgaagcgattgcctcgtctgtgcaagggatccagcccttcatcaagtcatcatgatgagtctagtgctcgttcatcaaccgatgtctcgatggaggatgccgacattctgcaacgtctcttgagcgatgccgacttcgaccttgtcgacgatcaggaaagacaagcctactacatgccaagagaccgggagtatactcacacgcgagaatactctctggagctattggaaaagataggtgaatggcgctcaagttcctctcgttgggacttgggtgaaatcacccggagaatgaatacccttgatatgcatatgggagaggtccaatacaacctcgaggaacacatagcacaagcgcaagaatggcaacaaactactgatgctcagttcaccaacatcaacaacctgatgcagcaaaagcccgatgaccttcaaacatacttccgctttcaggggttcaatccttaccaaggaccctga

SEQ ID NO: 83861 - DNA, 434 bp, Oryza sativa
  unsure (1)..(434): unsure at all n locations
  Clone ID: PAT_MRT4530_83152C.1
ggggcaaacatttttttattaaattcgaattgttgaccatactctttagagaaaggccacctggaaaccaaaaggaccctatnctttggagaaaaatatgaccgttttgttgggggcaaaccggggaaaaaggatcaccggtcccaggggacttataaaactaacttgggaagaagggaaaccccaccctatcggaagtatcacatttgattcatggcagcttgaaaactatgcagaaaggggccgaacttcaaacccaggggacttatcagggctttgaaaccccttggccaacttccatcctagaaaaagggccaactggaacttttgagccaacttgctttgaaaaaacattcaggacgctcttgttgtttgggctggcatagacaacctattttggctccaaaagcacaacttatttaaaaaaccttctt

SEQ ID NO: 83862 - DNA, 491 bp, Oryza sativa
  unsure (1)..(491): unsure at all n locations
  Clone ID: PAT_MRT4530_83153C.1
gaacacgatgacggaatttttcttggactcgcgagtgattcgatcatggggggaggtcatgccaaaatttttctccgggttcatcggattcagagggggaggtgctgcctctgaatgcaattgagtgcacctgaaacagaaaaaagaaaaagaaactctgcttcctttttttctctctcttcatgctcgttcttgcgttaggggataataataagccgagatctagtgaatatttggggggtttagcgaacatgatcatcgataacgacatggtgagatctagtggtgatgatcttgcttctggatctgggggtttagttcagcaagcctgaaattctcacctgggtttaaggtttcttttatttttcttttttcatcagattgaagtggatagaatgctagatctagtaatgtcctatgattgtttctctttcacctgaatttttaaaagcatttttgttggnnnnnnnnnnnnnnnnnnnnnnnnnnnn

SEQ ID NO: 83863 - DNA, 330 bp, Oryza sativa
  Clone ID: PAT_MRT4530_83154C.1
atggacttcccaatacagccagatttggtttttgcaagcggatggccaggccgtctgcacgagaaggtctgcaaaaatagtgattttcgcatgagggcgttgcacccgcatgctaaattgctattttcgcatgcgggaggaggcctgccaccgtcggatctgggcgggaggaggcgagccgccgctgccgtccgctcccaccactgccgttcctgctgtcggatccaggcagcaggaggcccgccacttctggatccgggcgggaggaggcaaatcaccatcgtgaaagccgccaccgtccgctcccaccgccgctgctcctaccgctga

SEQ ID NO: 83864 - DNA, 234 bp, Oryza sativa
  Clone ID: PAT_MRT4530_83155C.1
ccgagccaccgctgccgccgccgttgccgccgaccgttctcctcgtcgatgagccaacgtcacccctccgcagctaccgccgagccgccaccgggcgatcctcctattcaccgagcccccaccggcggtcctccttgttgccgagccaacgccaccgtcgccgagacgacgccacccctccgcagccgccacaaccgctccgccgccaccagcggcggccctcctcgtaattga

SEQ ID NO: 83865 - DNA, 1100 bp, Oryza sativa
  Clone ID: PAT_MRT4530_83156C.1
tagtggatcccccgggctgcaggttttttttttttttttttttatgcttgtgtaaccttgtttatgattttcaacgaagagaacatacaggtcagcataatttacaaataaaccttcaaggtcatgagctttctcacagcttgctgcaacacttaaattattctgttgtacaaattcagcttctgcaaaatttcagggatgggagaaaaagggacttgatttacaagaaaggccaaagtaggcaatctaatacacatgttttggttggttgtttcattttgtaattgtatgaccccttggctagataaagtcaacctgaaacttgtaaaaagggagaatgccgtatactaatcgaaccgtggtactagtgttcagaagtaaggaaatcaatagtatctttcagcgcatcgacaaagacatccacctcctctttggtattgtagaagtgaagactagcacgagcacttgcattgataccaagagttcgatgcaatatctgtgcacaatgatggcctgaccgaattgccacgccatgctggaggtcaagaatttcggcaatatctgttggatgaacattttcaacattaaaagaacataatggggcgcggtgaacagtttggcatggagctggaccgtagatccgaacatttggaacagcaataaggctctcatagagataggtcgccaactcattctcatactcatggatcttctgcatgccaatttgtgacaaataatcaattgctgttcccaatcctatagcttctccaatcgcaggtgttccagcttcaaatcttttcagaacaactagaaggaggctcagcatatgtggatttgtcttggaacacatctgcaatcatttcaccaccacctaagaaaggctccatggatgataagaggtcaaactttccatgcaagaatccaacgcctgtagggccacacatcttgtgtgatgatgcaacaagaaaatctgcaccaagcctctgaacatcgacaggcatatgaggaacactttgacaagcatcgacaagaactttagcaccaattctgtttgaccatgttacaatatcctcaataggacctgcagcccggggatccac

SEQ ID NO: 83866 - DNA, 1650 bp, Oryza sativa
  Clone ID: PAT_MRT4530_83157C.1
atgcacaaggcacttactaatcatttgtcgaaagaaaagtcttttgcttcgctgaaagcaccattcttctccaataactttgattggcctcaattggatcttgaacttttgatgcaattcaagtgtgctggtttttatttagtttatgcatcacaacagcggcagtattctctggtggttcttgcagcttctattatatcgaagtctggaaaagctcttgtttcgagacaatttgttgacatgtcccggataaggatcgatgggctgcttgcagcatttccgaagctggtcggaagtggaaagcaacatacttatgttgagactgaaaatgttcgttatgtctatcaaccaattgaagcactgtatttgcttctcatcacaaataagcaaaagggtgtctgtaaggcagcattcgagcttctgtttgcctttattgaagccatttctcttggaaacaaagagaacgtaactgttgcacaagttaaacaatactgtgaaatggagagccatgaagaaaagctgcacaagctggttatgcaaagcaaaataaatgaaactaaggatgtcatgaggaggaaagtcactgagattgagaaaagcaagactgatagagggaagcctgacaagggaggatttggatccttgagaactccaaacagcttcagtgacatgggcattagaggtggtggtccagggggcgatcctatatttggtgatatggactcgttcacccacaaggccaaaggccgcccatctgctcctgctcctgcatctgcttctactaaagttcctggtggtatgaaattaagcaaagcacagaagacaaaccagttccttgagtctttgaaagctgaaggagaagtcattttggaggacactcaaccaagtgcaactcaatcaaggtcatcatatatcccaccaagcgatcctatcacagtgacaattgaagagaagctcaatgtcactgttaaaagggatgggggagttagcaattttgatattcaaggaaccctggctctccaaattctgaatgacactgatggttttattcagttacagattgagaaccaagatgtacctggccttaacttcaagacacaccccaatatcaacaaagagttattcaacagtcaacaaattgtgggggcaaaagatccaaacaggcctttccccagtggtcaaaatgaaacaccgttggtgaaatggagaatccaggagttgaatgagtcatctcttccattggcagtgaactgttggccttcggtgtccggaaatgaaacctatgtgaacattgaatatgaagcttcagagatgtttgatttgcacaatgttgtcatctctatccctctccccgcacttagggaggctccaggtgttaggcagatagacggagaatggaggtatgactcaagaaattcagtgttggagtggtccattattcttgttgatcaatcaaaccgcagtggttctttggagttcactgtccctgcagctgatccatcaacattcttcccgatatctgttgggttttctgcatcaaatacatttagtgatttgaaggtgaccgccatccgtccgctgagggaaggtagcccaccaaagttttctcagaggaatcgattggttacttataactaccaagtggtttga

SEQ ID NO: 83867 - DNA, 2667 bp, Oryza sativa
  Clone ID: PAT_MRT4530_83158C.1
gtcgacccacgcgtccgcggacgcgtgggcgagctcactgttgcctgcgtcgtcgtcctcggctcggctcctcccttccctcgcggatctgagttctatatcttgtcaacttggatttggtaatccctggaactaaaaaggccattcaaaatggtggttcttgcagcttctattatatcgaagtctggaaaagctcttgtttcgagacaatttgttgacatgtcccggataaggatcgatgggctgcttgcagcatttccgaagctggtcggaagtggaaagcaacatacttatgttgagactgaaaatgttcgttatgtctatcaaccaattgaagcactgtatttgcttctcatcacaaataagcaaagtaacattcttgaagatctggatactttaaggctactctccaagcttatacctgaatatgctccctctttggatgaagagggtgtctgtaaggcagcattcgagcttctgtttgcctttattgaagccatttctcttggaaacaaagagaacgtaactgttgcacaagttaaacaatactgtgaaatggagagccatgaagaaaagccggggtggtgccgccccggttttggcgttctgcctggctgcgcgctttccgtggctccgctccaggctttagctgaagacacaataaaggaacaccaaaaaaatgggtaagaaaggaaattggttcagtgctgtcaagaaagtcttcagctcatctgatccagatgggagggaagctaagatcgagaaggcggacaagtcgagatccaggaggaaatggccatttggaaagtctaagaagtctgatccttggacctcaacagtggcagtgcctacctctacagcaccgcctccacagccgccaccgccaccgccaacacaccctatccagccacagcctgaggagatcaaagatgtcaaggctgttgaaactgacagtgaacagaacaagcatgcgtactctgttgcacttgcctctgctgttgctgcagaagctgctgccgtcgctgcccaggccgctgctgaggtggtccgcctcacaacagccaccacggctgtgccgaaatcgcctgttagttcaaaggatgagcttgccgctatcaagattcagactgccttcaggggttatctggcaagaagagcgctgcgagcacttagagggctagttagattgaagtcgctggttgatggaaacgccgtcaaacgacaaactgcgcacaccttgcattgcacacaaaccatgaccagagttcaaactcaaatatactctagaagggtgaagatggaggaggaaaaacaggctcttcaaaggcagctacaattgaagcatcagagggaacttctgatagagggaagcctgacaagggaggatttggatccttgagaactccaaacagcttcagtgacatgggcattagaagtggtggtccagggggcgatcctatatttggtgatatggactcgttcacccacaaggccaaaggccgcccatctgctcctgctcctgcatctgcttctactaaagttcctggtggtatgaaattaagcaaagcacagaagacaaaccagttccttgagtctttgaaagctgaaggagaagtcattttggaggacactcaaccaagtgcaactcaatcaaggtcatcatatatcccaccaagcgatcctatcacagtgacaattgaagagaagctcaatgtcactgttacaagggatgggggagttagcaattttgatattcaaggaaccctggctctccaaattctgaatgacactgatggttttattcagttacagattgagaaccaagatgtacctggccttaacttcaagacacaccccaatatcaacaaagagttgtcagaccacagatggtgcctctgttcgggatgatgcgagcctaacaagcacaccagctctccccagctacatgcagtccacagagtctgcaagggcaaagtctcggtaccgcagtctattgactgacaggtttgaggttcctgagagagtacccctggtccattcttcaataaagaagcgcttatccttcccagtcgcagacaaaccaaatggtgagcatgcagataagctgatggaaagagggaggcgtcattcagaccctcctaaggtggatcctgcctcactgaaggatgttccggtttcataattcagtcatattatcagagcttattattgttaggttgcttttctgtccctgcagctgatccatcaacattcttcccgatatctgttgggttttctgcatcaaatacatttagtgatttgaaggtgaccgccatccgtccgctgagggaaggtagcccaccaaagttttctcagaggaatcgattggttacttataactaccaagtggtttgacgcgcaaattaaagttagtttgttccagtcaagtaattgcgcacatttgcagtacataggagcttctgattttctgccaagcttagatagcttgctcagtgagttgtcccgacgtggataaatatgtggtatacgtaatgcatgctgtttttcctttacactgtaaaatgttaccccaaagttatgctttttactggagtgttacagaattgttttttaagaatggaatataaaaatacgaagagttcatcctaaaaaaaaaaaaaaaaaaaa

SEQ ID NO: 83868 - DNA, 3005 bp, Oryza sativa
  Clone ID: PAT_MRT4530_83159C.1
ctacatgcagtccacagagtctgcaagggcgaagtctcggtaccgcagtctattgactgacaggtttgaggttcctgagagagtacccccgacctcctcccttctccccgtcgcgttcgccttctctccattccggattctccctgggagccctagggtttgattcgggttggttttctccgcccgcgcgcgggtgctgcctgcggtgcggggcgcgaggatctgatcgggactcgtgccttccgccatcgacgcgccgcagtgacggagccgcctggtcggtcgcgccacccggaggccggatccgcagggcgctggccttgttgattcatttcgctggttctatatcttgtcaacttggatttggtaatccctggaactaaaaaggccattcaaaatggtatggctggtttattcgaattgctcatttgcaatgttactgtgttgtaaattgattcaggaaaggacatttagtaagggcatcacagcaaaggtggttcttgcagcttctattatatcgaagtctggaaaagctcttgtttcgagacaatttgttgacatgtcccggataaggatcgatgggctgcttgcagcatttccgaagctggtcggaagtggaaagcaacatacttatgttgagactgaaaatgttcgttatgtctatcaaccaattgaagcactgtatttgcttctcatcacaaataagcaaagtaacattcttgaagatctggatactttaaggctactctccaagcttatacctgaatatgctccctctttggatgaagagggtgtctgttaggcagcattcgagcttctgtttgcctttattgaagccatttctcttggaaacaagagaacgtaactgttgcacaagttaaacaatactgtgaaatggagagccatgaagaaaaatgggtaagaaaggaaattggttcagtgctgtcaagaaagtcttcagctcatccgatccagatgggagggaagctaagatcgagaaggcggacaagtcgagatccaggaggaaatggccatttggaaagtctaagaagtctgatccttggacctcaacagtggcagtgcctacctctacagcaccgcctccacagccgccaccgccaccgccaacacaccctatccagccacagcctgaggagatcaaagatgtcaaggctgttgaaactgacagtgaacagaacaagcatgcgtactctgttgcacttgcctctgctgttgctgcagaagctgctgccgtcgctgcccaggccgctgctgaggtggtccgcctcacaacagccaccacggctgtgccgaaatcgcctgttagttcaaaggatgagcttgccgctatcaagattcagactgccttcaggggttatctggcaagaagagcgctgcgagcacttagagggctagttagattgaagtcgctggttgatggaaacgccgtcaaacgacaaactgcgcacaccttgcattgcacacaaaccatgaccagagttcaaactcaaatatactctagaagggtgaagatggaggaggaaaaacaggctcttcaaaggcagctacaattaaagcatcagagggaacttgagaaaatgaagattgatgaagattgggatcatagccatcagtccaaggagcagtggaagaattctggccgaactataacacctaccttcacggatcaagggaatcctaactggggatggagctggatggaacgctggatgacatcaaggccttgggagagccgagtgatatcagataaggatcctaaggaccattattcaacaaagaatcccagcactagcgcttctcgtacttatgtaccccgcgcaatctcaatccagagacctgcaacaccaaacaagtcaagccgtccaccaagtcggcaatcgccatcaactcccccgtcaagggtcccctcagttaccggaaagatcagaccagcaagtccacgggatagctggctatataaggaggatgacttgaggagcatcacaagcatacgctctgaacgcccaaggaggcagagcacaggtggtgcctctgttcgggatgatgcgagcctaacaagcacaccagctctccccagctacatgcagtccacagagtctgcaagggcgaagtctcggtaccgcagtctattgactgacaggtttgaggttcctgagagagtacccctggtccattcttcaataaagaagcgcttatccttcccagtcgcagacaaaccaaatggtgagcatgcagataagctgatggaaagagggaggcgtcattcagaccctcctaaggtggatcctgcctcactgaaggatgttccggtttcataacccaaggaggcagagcacaggtggtgcctctgttcgggatgatgcgagcctaacaagcacaccagctctccccagctacatgcagtccacagagtctgcaagggcgaagtctcggtaccgcagtctattgactgacaggtttgaggttcctgagagagtacccctggtccattcttcaataaagaagcgcttatccttcccagtcgcagacaaaccaaatggtgagcatgcagataagctgatggaaagagggaggcgtcattcagaccctcctaaggtggatcctgcctcactgaaggatgttccggtttcataattcagtcatattatcagagcttattattgttaggttgcttttcttcctttgtgtattttctaatttagattgcattctcgagagtcgaggttgaaccctccgtgaaaatgtatgatttgtcagggttgatttgagacaattctaactgtttacaggcagtttttttcctgatgattgttgtgtgtgaagagtaagaaaaagaaaatgaagcggtggaaaaaaatggtggtgtgttctaatattgtgtgtgcttctcttccaaagtccaatactccatgaactatgggttgacctattaattgtaagacatgggtttttctggttatgaaatatgtgtgcccgatgtgctg

SEQ ID NO: 83869 - DNA, 1671 bp, Oryza sativa
  Clone ID: PAT_MRT4530_8315C.1
gaaacgaaaattacccttataaatcgaaatgtgacgttaccaaaatttaattagtcacaaaaagacaaaaattcacaagggtccaatataccaaaggatttcatttccgaactttggtttgaaacgaaatgcccaaaggaaaggttggttcgattggcctaaggaaagcgttggttaatcctaagccaattgacccaataaaagcctgggtgcaaaataaactatgatattccaccatctagctcaaaagaagtatgattaagtatggaagaaagatgctggaacacctgctacagcgtttcaaaatcctgaaacagcatgagagaatcgtcatgtctagtcagggctaagctccgaatatttttcaaaattcagtttctttgtgtcaattcagtatgtgacctcgagtaggagttcagctatgtaattgaccatttgccgcaggtttaaagcagcatgacatagattatcgatgaactgttcccggaatgtatttttcactctccatacaaaatattgtgtgttccctgttcctgttccagaaaggattctctctgtatcgatgtagtcgtccttccaaagcttatacaaagttccatgaacaatctgcttgtcaagaattgttgtgtcaataattttatctgtctcaactggaccgcgttctctgaccaatagcctaaaaattgtaaaagcttcttgcccgtatttctttctcacaagcgactctatctcctcatttcgagatgcttcaacaattctgcttaaatctccttccttctgtcctagcctctccataataccatttattggagatgtcacagagttgttgtccctttccattaaactggcctcgaaaaatgcttcccagataggatgtgtgccaaccttcaacttaggtttctttcggtctgcacaaaacttcttctttagacagaatgtgaatttctcaaaatttgcccgccaaagtacttcgttctctgcaattgttgaatcgagctctgcatctccttctaaggcattatgtttcctcttagcaccagaaatagaagaacgtggagaatcattagcattggatgcatcttccatgatgtatgggatctcagaaaatctttctgcatcagaaagagctgcagtattgacaactttcttatcaattgaaagagcaatctcgacagtttttggagcacgtttccttgacgaggtagattgttcatctacaagtggatcaaagaaaggttcaggtttcgggcaacgctccacataatgtgcaaatacaagtttgttgaagttcattcgtatttcctcccttgctggtgtgatactgccattctgaagcaatccttcaagcagcgcttctgacaactctgggatgtctgcacggatgatagaaaggaactttgagaaacgctgtctgtgcacgatgttgtcgaagatggccaggtagtgcgttaccgtcttatcaccatttcctctgggggcattgaaggcctgcacgcagttgtgctggatgaggacgaggagcgagttcttcacctgccccggcgagagctcgaggcggcggacgatctcggatacgagggggccgaagtggtcggagatgatggcgacggcgaggaggatcccgtgctgcgacaccatggtcgccggcggcgaggtttggctccgccgcgc

SEQ ID NO: 83870 - DNA, 769 bp, Oryza sativa
  unsure (1)..(769): unsure at all n locations
  Clone ID: PAT_MRT4530_83160C.1
aaacaagtcaagccgtccaccaagtcggcaatcgccatcaactcccccgtcaagggtcccctcagttaccggaaagatcagaccagcaagtccacgggatagctggctatataaggaggatgacttgaggagcatcacaagcatacgctctgaacgcccaaggaggcagagcacaggtggtgcctctgttcgggatgatgcgagcctaacaagcacaccagctctccccagctacatgcagtccacagagtctgcaagggcgaagtctcggtaccgcagtctattgactgacaggtttgaggttcctgagagagtacccctggtccattcttcaataaagaagcgcttatccttcccagtcgcagacaaaccaaatggtgagcatgcagataagctgatggaaagagggaggcgtcattcagaccctcctaaggtggatcctgcctcactganaggatgttccggtttcataattcagtcatattatcagagcttattattgttaggttgcttttcttcctttgtgtattttctaatttagattgcattctcgagagtcgaggttgaaccctccgtgaaaatgtatgatttgtcaggggttgatttgagacaattctaactgtttacagcagtttttttcctgatgattgntgtgtgtgaagagtaagaaaaagaaatggaagcggtggaaaaatgggggggggtgttctatatttgggtgtgcttctcttccaatgtacaatactccatgaactatggggttgaccta

SEQ ID NO: 83871 - DNA, 279 bp, Oryza sativa
  Clone ID: PAT_MRT4530_83161C.1
aaaagagcagagtcgtctattctcctgctacctaacccctacgctaacagaaccttgtctaagctcccgctcccaccccgcttgcgctccaatggcgaaagaaccgatgcgcgtgctcggcaccaggagcccaggacaaatggcatatgctctagcccccatgatcgctacacgtgtgatggtgggcgctagaccatgctgatattatacacagtgcttgcattgcaccagctactgaatctcttaatggacataatatggagctagttgatgctacat

SEQ ID NO: 83872 - DNA, 5535 bp, Oryza sativa
  Clone ID: PAT_MRT4530_83162C.1
atggccgagaaacaaccaccaccacctagcccaagttctgctaaaggcaagccgttgaagttgggattgactgacatcattgaagaaaacgtcatgccgattaatccggaaaaattcacacctgagcaaaaggaagagtttgaagcaatgatgcagcaggcacgggaccagtttttgaactcattcacgcagacccgcaagggaacatttgttcagaagtataaaataaaagtggttgctgatgatcctaggaccggttcttctaaagatggagaaggaaaacaagctccagacggctcggctcagccgagtatcaaaagtgctaccgacggagatcaaggcgacgattctcaaggagttcatagaattcaaggtgatggtgctcaggggccacaaggaggaaatcttaatcagaataatgaagcagcacaggactttttcaataaattccaagatcgggttgactatgccatacacaatgatttgattaatcaatctagggtattgactaataccttagcaaatatgatgaagtcggtagccgatggttcaatagctgaacatcaggctgcaggcccagtttacttgcaaggaagtacttttccaaattatcggcctttgatcaccgatattcatccacctactcaggcagttcctcccattgcatcgtcagctcagccgacggcaccagcatcggcccctgtacctgctacgccaccttcggctccaggccaattgatcaatcctcagttgttggtgagagagcaaccacagcatgctggaccaaatgtgactcagctggcgcaagaccaggccgtgcaaccagttcagcagacaccatcaagagggccggctttacagccgattcagcagacgccattgagacagcaggccgttcagccgattcagcagcaaggtttgctggatgcgtcggctgggttggcaacacctagtggtcaacttatgcagtatgctccaaatcaggttgtcccagaacatctggttcaccatgcgcaaccagatggcacgatgataccacaggttgttcctgaacatttggtgcgtggtattcagccgaaccttcacaattaccaggggggcaatttaaattatcaatatcagcctctatcacctcaggttcagtaccaacagacaggatcggcccagccccagtttgctcctcaacacaatcagtttgagccgataccacagcagcctcaagaatcacctcagcagggacaatcggccgatgtgatagctgatgtaatgagggagcagtttggacttaaaccaaaaaagactggaaatttgtatcggcaaccttatcctgaatggtttgaaagagttcctctacctaatcggtttaaagtaccagatttctcaaaattttcagggcaagacactacatcgacttatgagcacatcagccggtttttagctcagtgtggcgaggcatcggttgtggatgctttgagggttaggttattccgattgtcattggctggatcggcttttacctggttttcttctttgccacatgggtcaattaacagttgggccgatttagaaaagcagtttcatagctatttctatagtgggattcatgagatgaaactgtccgatctcacgtcgatcaagcaaaagcatgatgagccggtgcatgagtatattcaaaggttcagagagatgaggaataagtgttatagcttgagtttgaccgatgctcagttagccgatttggcctttcaagggatgattgctccgatcagggaaaagttctcgtctgaagactttgaaagcttgtcgcacctcacacagaaggtagctttgcatgagcaaaggtgtgcggaagctaggaagaactctagaaagattaatcatgtctatccttacatgtatgattcggatgatgatgagaatgattctgagatagctgcagccgaatgggtcaggagtaaaaaggtcataccatgccaatgggtgaagaactcagggaaagaggagagacaacagattcaggtggccattgagggaggcaagattaagtttgatgattccaagaggccgatgaaggtggatggtatgaggctaccatcaattgaagaatgtcctggttgcaatgaagtagcagaaagttcaagccgatcatatgatagaggcaatcggctaagacagagagttcctgttcatcaacgattgggtccaataaaccacgatcgcggccaggaagacaacgaagataggaagactcagtggtgcccttcggccgatgttgatgaagtagaagaggaatcggctaagttggttctatccccagaacaggcagtgtttaagaaacctgaagggacagagaatcggcatcttaaaccattgtatataaacggctatgtcaatgggaagccgatgtctaagatgatggtcgatggtggagctgcggtaaatttgatgccctatgctacgttcaggaagttgggtagaaatgccgacgatctcatcaagacgaatgtggtactcaaagactttggtggtaatccatcggaaaccaaaggtgttctaaatgtggagctgacagtcggcaggttcttacagcttgttgcttggaagggattggattcacgccaattgttgtattccctcgactatgcactagtgcttaattcagtggcaaggcaacaagatagagattgtaccagccgacagatggagaacccaagctattattttgagggcgtcgtggagggttcaaacgtctacaccaaggacacggtagatgatctcgatgacaagcaagggcataagattttgagttttatggatggaaacgcgggatataatcagatttttatggccgaagaggacattcataagacggcttttaggtgtcctggtgcaatcagtttgtttgaatgggttgtgatgactttcagcttgaaaagtgctggagcaacatatcaaagagctatgaattatatataccatgatttaatcgactggttggttgaggtctatattgatgatgtagttgttaagtctaaagggatagaagaccacatagccgatttgaggaaagtttttgagagaaccagaaaatatggcttgaagatgaatccgacaaaatgtgcttttggtgtgtcggctggccagtttttgggatttcttgttcatgagagggggattgaagttactcggagaagtatcaatgcgatcaagaagatcaagcctccaggggacaagacagaattacaggagatgatcggcaagattaatttcgttagaaggtttatttctaatttgtctggaagattagagccttttacgccattactacgattgaagcccgatcagcagtttacttgggggactgagcagcagaaggctttggataatattaaggattacttgagttctcctccagttttgattcctccacaaaaagggataccttttcggttgtatttgtcagccggtgagaagtcaatcggctctgttttgattcaggagcttgaaggaaaggaaagggttgtgttttatttaagccgtcggctcttggatgcagaaactagatattcccctgtggagaagttatgcctgtgtttatattttttatgtacaaggttaaggcattttttgttgtccaatgaatgtactgtcatatgcaaagccgatgttgttaagtacatgttatcggctccgattttgaaaggaagggttggaaagtggatattttccttgactgagtttgatcttcggtatgagtcaccgaaggcgattaatgggcaagctatagccgatttcatagttgatcgtcgtgatgattcaatcggctcggttgagattgtgccatggactttattctttgatggatcagtgtgtactcatggttgtggtatcggcttagttataatttctcctaggggggcatgttttgagtttgcctatactattaaaccttatgcaactaataatcaggcagaatatgaggtagttctcaaagggttgcagttactcaaggaagttgaagccgatgctatcgagattatgggggattctttattggtaatcagtcaattggcaggagaatatgagtataagaatgatacattgatagtttataatgagaagtgccaagaactgatgagggagtttcggctagtaactttgaagcatgtatctcgagagcagaatattgaagccaatgatttagcccaaggggcgtcagggtataagccgatgatcaaggatgttcagattgaagttgccgccgttacagccgatgattggagatatgaggtgcatcaatatttacaaaatccatctcagtcggcttctaggaaattaagatataaagcgttgaagtatactttattggatgatgagctttattatcggacgattgatggagtattgctaaagtgtttgagtgccgatcaggctaaagttgcaatcggcgtagttcatgaaggaatttgcggtactcatcaatcggctcataagatgaagtggttacttcggcgtgcggggtatttctggccgacaatgttagaagattgtttcagatattacaaaggatgtcaagattgtcagaaatttagagcaattcagagagcaccggcgtcggctatgaatcacatcattaaaccatggccgtttagaggatggggaattgatatgatcggtatgattaatccaccatcaagtaaaggacataagtttatactggtggcgaccgattatttcaccaagtgggtagaggcgattcctttgaagaaggttgattctggggatgcgatacaatttgttcaagaacatatcatctaccgatttggtattcctcagactattacaactgatcaaggttccatatttgggtccgatgagtttgttcaatttgccgatagcaggggtattaaattcttgaattcttcaccgtattatgcacaagctaatgggcaagctgaggcatctaacaaaagcttgattaagttgattaaaaggaagatttctgattaccctcggcaatggcatactcgtttagccgaagcattgtggtcttatcggatggcttgtcagggatcaatccaagttcctccttataagcttgtttgtggacatgaagctgttttgccatgggaagttagagttggctcaagacgaatagagttgcaagatggtttgacagccgatgagtattataaccttatggccgatgaaagggaggacttggttcaatcgcgcttgcgagctcttgctaaggtgactagagataaagagcgagttgctcggcattataataagaaagtggcgcctaaaactttttcggaaggtgacctcgtatggaaattgattctgccgattggaactcgggatagcaaatttggcaagtggtcgccaaattgggaaggaccgttccaaatccataaggttgtgtctaaaggagcatacatgctgcaaggactcgatggagaagtttgtgggcgagcgcttaatggcaagtatctgaagaaattctacccaagtgtttgggttaacacatga

SEQ ID NO: 83873 - DNA, 213 bp, Oryza sativa
  Clone ID: PAT_MRT4530_83163C.1
atggagcagtgtgagccagcattgccagtggatcagcaaccgctgggcttccaaaatcggcctcgtcttgcttactccagtgtctcgacaaggggctactccttggaccattcaaggagcttttcttgtcaggagctagctgctgcagctgcatccctgtcgtcctactaccactacatctcccagcttgtagcaacagttggtgacttgtaa

SEQ ID NO: 83874 - DNA, 2034 bp, Oryza sativa
  Clone ID: PAT_MRT4530_83164C.1
atggccgagaaacaaccaccaccaccatctagcccaggttccgttaaaggcaagacgctgaagttgggattgactgacatcattgaagaaaacgtcatgccgatcgatctagaaaaattcacacctgagcagaaggaagagtttgaagcaagattgcagcaagcacgggatcagttcttgaactcattcatgcagacccgcaaggggacacttgttcaaaagtacaaaataaaagtggttgctgatgatcctaggaccggttcttctaaagatggagaagggaaacaagctccagacggctcggctcagccgagtataaaaggtgctaccgacggctctctaggagatcaaggcgacaattctcaaggagttcatggagttcaagtatcagcatccatctccgcaagcccaatatcagccggggggccaacccaacctcagtttgcttctcagtacggtcagttcgagcccatgcaacagcagcctcagggagcagttcagcaacgaccgtgggccgacgtgattgctgacgtaatgagggaacagttcggcctcaaactaaaagagactggaagcttgtatcggcagccttaccctgagtggtttgagagagttcctcttcccaatcggttcaaagttccagacttctctaaatttttgggacaggatggtgtgtcaacttgtgagcacattagccgatttttagctcagtgtggtgaggcatcggctgtggatgctgtaagggttagcttgttccgttgggccgatttagagaagcaatttcatagttatttctacagtggggttcatgagatgaagttatctgacttgacagcgattaagcaacgacatgatgaacctgtacctgagtatattctgaaattcagggagatgaggaacatgtgcttcagcttgagtttgactgacgcccagttggccgatctggcttttcagggtatgattgctccgattagggagaaattctcgtctgaagacttcgatagcttgtcacatctgatacagaaggtaactttgcacgaacatgggtctgctgaagctaggaggagctctaagaaggttaatcatgtttatccttacatgtatgattcggatgatgatgaggatgactctgaaatagctgcagccgaatgggtgaggagtaaaaaggtcataccatgccaatgggtaaagaatcatggaaaagaagaaaagtatgattttgacattaataaagctgacaaaatttttgatctgctactccgagaaaagcaaattcaactccctgctggtcatacgattccatcggctgaggaattaggcaagaagagatattgcaaatggcacaattctggatctcattctactaatgattgcaaggttttcagacaacagattcaggtggccattgagggaggcaagattaagtttgatgattccaagaggccgatgaaggtggatggtaatccttttcctgtcaacatggtacatacagccagtcgaacagccgatacgggacatatgagaggttttcaggtgaattcggctaagattatcaacaagtatcagaggaaatatgataagcagcaggagaagtattatgaggaagaagatgacggctttgatcctcattggggttgtatgaggctgccatcaatcgaaaaatgtcctggttgcaatgatattgcggagagttcaagccgatcgtatagtaggagtaatcggctaaggcagacaagagttcctgttcatcacaagttgggtccaataaaccaagatcgcggcaaggaggacaacaaaaataggaagactcagtggtgcccttcggccaaatttgggattgaccgagccgatgttgatgaggtggaagaggaatcggctaagttggttctatcgccagaacaggcggtgttcgagaagcctgaagggacagagaatcggcatcttaaaccattgtatataaatggctatgtcaatgggaagccgatgtctaagatgatggtcgatggtggggctgcggtaaatttgatggcttag

SEQ ID NO: 83875 - DNA, 548 bp, Oryza sativa
  Clone ID: PAT_MRT4530_83165C.1
ctttttcttttttttcttttgctaagtaaaatcatactgaaaaatatatatgattttgtttagatgttagccacgcaattgcgcggaccggccagctagttgacataattgaaataaagaattatacccctcccccaactatctggacaaataacaaccacaaagctttattttggataacctctagtggttgaaatactatttgggttgataattttggttgaaattgttggtgacatctcgtgcatgtgtgcttatcatggaacaaaaaggttttttatgatgtgagcctaccacctgtggactgtggtgactgactgacaatgcttgaagatgctgccatttcgtttggacgtttgcccattccgtcttctcctcgcttctctcacattccgttcgtgatgacaagcccatcacggcaccgtcgcaccaactccgccaagctccggtagctgctccctccggcggccaccgccctcgccgcggcctcacggacgctcgccgccgccttccttacaccctcgtcggccatcgccgacctcaccttc

SEQ ID NO: 83876 - DNA, 188 bp, Oryza sativa
  unsure (1)..(188): unsure at all n locations
  Clone ID: PAT_MRT4530_83166C.1
ggntgcaggattcggcacgagcaccacaactgagagtgancaggcgaacgancggaatggcagcatcgctccaagccgcggccaccctgatgcaccggccaaactcggcggncgggcctcctccgccgcgctgccatcncgcccgtcttcncacgtcgccaaggngttcggcgtccanaccggtgccn

SEQ ID NO: 83877 - DNA, 313 bp, Oryza sativa
  Clone ID: PAT_MRT4530_83167C.1
acagcagaaaatgggaaaccactttatagtctacaaatcggggggggaatatctacatgcatcgcatcagatgagatcacatcgagtccaacaagatggcgtatgcaggttgcgcatgcattcatgaaaatcccgataaaaagggcttgattaattattaacatatatatatccatcaatagactttcacattccattgctccgacttcttcaactggttattgtagtcaagccattccatgccgtattttgcagcgaggtccatcatgatgtattccatgcctttctacatgcccttgatgccacacatgta

SEQ ID NO: 83878 - DNA, 334 bp, Oryza sativa
  Clone ID: PAT_MRT4530_83168C.1
ggaaaaaaaccccccagcccaacaaattccagggccaaaaacaaacgggtttaaaaaaaaaggcaggaaaacaatttcagcaaaaaaaaccccacttattctacggataaaaaaggaaagtaccaaagcaccgggggccgggagaaaacggccctggggggggcaaccaacaggacaaaaaggaggggttttttaaaaacggggctgggagcaaatttatgatttttttatcccccggaaacgccttaataaaaaaatcatcggaaaaaggggggttcaacccaaaccccgcatgggcaaaagaaaaaaccccgggattttggcttctcagggc

SEQ ID NO: 83879 - DNA, 277 bp, Oryza sativa
  Clone ID: PAT_MRT4530_83169C.1
caacatcaagaatgacttcacccccgaggaagaggaggaggtgaggagggagaaccagtgggccttcgaatgaaggccccccccccccccccaaaaaaaaaagcaacaaccatctcatgcgaatgaccagcaaggaaggggaagtcgcgtcatgtcgagaagttgatcctggagcagcctatgaactctctgcttgaactgtctttaagaaagttgtaattagggtaagttcgtcgttagttggggggggcagcagactatttagctgactccgtct

SEQ ID NO: 83880 - DNA, 162 bp, Oryza sativa
  Clone ID: PAT_MRT4530_8316C.1
cgtattcctctctctcccccgtgttcgcctcgcgctcgcgtatccctccctgcctgcttccgtccagatgcgtgtgggctcgaagaagcggcgggcgatacaccgggagcgtcccgcgtggactccgccccgtctgcgaccagcatgaatcccgagtacgac

SEQ ID NO: 83881 - DNA, 2275 bp, Oryza sativa
  Clone ID: PAT_MRT4530_83170C.1
gggctgcaggaattcaccaccatcgcaagagagacgctcgccttccgtctcctgacgcgcacacgccaccaacaccgcgacgcgacgcgacgcgagcgccaaacgtgagcgcggaaagaggagaggtgaggtgaggtgcgtggcccttggactttcgaggcgaaaccccgcgtgcgtgcgtatatgagatccacatccggcgcccgccccagcagcggtggaggaggaggggacgacgactacgccttctactactctttcttccaggacgccgccgccgccgccgcgtcgccgctcggcctcgacgacgccgccgctatgaccaacggtggacggaagcggaagaggggaggaggaggggatgggccggacggcggcgcccccgccgcgtacaggaaggatgggcctggaggggacggtgaggggggaaacggcaggaagcggtccatcgccaagatactcacctcgctcgccgcgctcgaggcggaggagcactccgaccgcgccggcgccgccgacgcctcccgccgggagctcgcgctgctcgagtccaacgccgaccacaagtcgcaggccatgatggactactacgccaagatggaggggagcttcgacgccgccgcggagtcggacgccaccgcgcggtccaagcgctcgcgcctcgccgcgtcggccaccacggcggcggtcgtggctaccgaggagggggccgccgagacggcctccgcgtcggcgtcgccgtcgcgagcgagcggcggcgggggcgcggggcaccaccagcggcggctgtgggtgaaggaccggtcgcgggcgtggtgggacaaatgcaacagcccggactacccggaggaggagttccgtcgcgcgttccggatggggcgcgagacgttcgacatgatctgcgaggcgctgggctccgcggtggccaaggaggacaccatgctccgcgccgccatccccgtgcgccagcgcgtcgccgtctgcatctggcgcctcgccacgggcgagccgctccgcctcgtctccaagcgcttcggcctcgggatctccacctgccacaagctcgtcctcgaggtgtgcgccgccatcaagtccgtcctcatgccgcgcttcctccagtggcccgacgaggccgccgccgccgccttcaaggagaggttccaggcggcgtacggcgtcccgggcgtgatcggcgccatgtacaccacccacatccccatcatcgcgcccaagatctcggtcgccgcctacttcaaccgccgccacacggagcgcaaccagaagacgtcctactccatcacgctccagggggtggtcggccccgacggcgccttcaccgacgtgtgcatcggctggccggggtccatgccggacgaccaggtgctggagaagtccatgctgcaccagcgcgccgcggcggggatgatgcacagcgcctgccttgtcggcggcgccagctacccgctcatggactgggtgctcgtcccctacacgcaccagaacctgacgtggacgcagcacgccttcaacgagaaggtgggcgacctccgccgcgtcgccgtcgacgcgttcgcccgcctcaaggcgcggtgggcgtgcctccagaagcggacggaggtgaagctccaggacctccccgtcgtgctcggcgcctgctgcgtcctccacaacatctgcgagacgcgcggcgaggagctcgagccggagctccggttcgagctcgtcgacgacgagacctcgccggagacccccgtccgctccgaggccgccaagcgcgccagggacaacatcgcccacaacctcctccaccgcggcttcgccggaaccaccttcttctgaccatcgatcgatcgatcacaccaccgccgcttcttggtacaaaatcccccgacaaagtagcgattcttttagccccgctagaatagaaagattttgctagttcttttttttgggtcagcagtgcaatgcgatggagtgtaaaacataatttgggcagctgtttgttttcaaattcaagatatatacagttcaatttacaactaggatacagattcccggagatgattgaattcaaataacacttgcagcatctccatattactattgtgatttgttattgtcctgcagacctgcagtttagttgtttgctctgtcgtcggcgtgaactcttcattgtttgattgcctcaaaggctggttgattgtttaccagtactccttgattgcatcttcgttcgctggaagtacaggttgtacagaagttttgcagttgatcg

SEQ ID NO: 83882 - DNA, 325 bp, Oryza sativa
  Clone ID: PAT_MRT4530_83171C.1
aagccggaatgcattccaagagatttacatggtacctgataaaacagggggtttctcaacagaaggtgaatattcaggtatataaaggaggatctaaactttggacaagtgactgactacctagagctccgtactatgctgactttcgctgtacacgaaactggaatcacaggagaagggcaatttttaccctcaaaatgtcggaaaacacgattagggtttgtttccttgcatggcacaaaattgttagaactgatgagatgggacaagcactgtacttgtaacacgcttaaacgacagcagcagacgcgaagcacctcacccc

SEQ ID NO: 83883 - DNA, 370 bp, Oryza sativa
  unsure (1)..(370): unsure at all n locations
  Clone ID: PAT_MRT4530_83172C.1
tgtgttaaactgatagctggatagaagaaagagtangaaggagcttgaataccttacagaacctcctgatgaacaagtgatgacgaaagacctgtatcagattgaactttgatcaactgttatattgtgccaatgttgtaagaagtatcacttttttgtttcctcgantaacttggtcaagtanaaagctggcactactgttacttccattangatttgtcatgctcttttgtacgctaaggtacctttangcctgtcacaatgacgctgtcttgtgctccgtgggcactgcacanaaccacanattgtccttgttaggatccnagaaaatcctnccttaccacnttgtttcccgggaacaatttgcacc

SEQ ID NO: 83884 - DNA, 762 bp, Oryza sativa
  unsure (1)..(762): unsure at all n locations
  Clone ID: PAT_MRT4530_83173C.1
taggagctgagcaagacgagggaggcagggttcaagcggaacaacacgttcgcctggagccgatcgggaagccgttggaagagttatttatccacacgtcgacaatccagaggtttcaacaggtctctaatttgttttctacggaggctccgatgaggcgggcaagcgaggagacggcggactcgtaggttttgtgagggatctggacaagggccgacatgggcctagacgccacgcgatttggaaatcgtgggaagagaatcggacgaagaaaaaataacaggtacgacgtacacacgcgcggtgaaaaaggaaatcggacagaaaaatatgcttatatgtgggcaatgagttgggcgacgtacgaaatttataggcaaaaacaccttgaaattttatataataggtaaagattaaaaaaatagagatagagatactagaaaggatgtccatgcaatgcaacggggaaaatttaaaatcaaaataaacatcaaataatttgatcgaggaaacagctaggaaagaaaacaatgacaaaacattttcagatcaataattaagggcatgtttgggatggaggatttccaaagaaaaatcaatagaactgaggaccatagtatatntttttttttcctataagggctgttcggaatggaggaatggaccctagaatttctttggaagcaacttctatggttctgtattctattagtattctagtacaaaacaaaagaaaggaatggaccctcgaattcctttgaa

SEQ ID NO: 83885 - DNA, 625 bp, Oryza sativa
  Clone ID: PAT_MRT4530_83174C.1
cccgggctgcaggatcggcacgaggctagctagcaacctgcaacctgcatagtatattgcattgcgcccaagctttcttctgcttctacttcttccctcgccgacaacctcctccgtttgcccggccattgttcttcagagcttggtcgcgatagaaagaaatgaaattgtagctatgatgttggcccggctcactcagatggatcatcggtgcagaagagtgcatgaatctgatgcagtctcagtgtagtatgctccatgctggaacttctgattgagccgtgccaatatctcagcaccatttttatgcaatcatgcgtacagatcactcccaaagtctcaatttaccatcactaatctgcggctatatatatggcgctcgtcggctggtaatagcatgattagttaattcttgcagctcactatcattatatatattcttgcatatgtatgtatatatgcatatttgaatgccgttgtgatcccatacaaatatatatgccctggatcttcttgttgcatgttctatcctacatctcttagccaagtttattttttttgaaataattgctttcaaaagcaccaagagcccgatctagtagtacacacatccacattggaagta

SEQ ID NO: 83886 - DNA, 902 bp, Oryza sativa
  Clone ID: PAT_MRT4530_83175C.1
ccgggctgcaggaattcatgggttgcgctgcctccgcgttcgtggacgacgacgacgacgatgaccgccgccggcgcatcatcggcgtctccgcctcccacatcgtctccctcacctcctccacctacggcatcctcgacaacattctagtatcatcagctcaatcccaatcccaatcccaatcccctactaggattcctcctccgcccacgccgcctccccgacccaccaccaccaccaacccaccatgtgcagccccgccggagaagcatctgaagaagcagggcgaggcggaggtcatcaactcgtgggagctcatggccggtctcctcgaccccgccaccccacagaaaccacggaggcccacgcaccactctcctcctcctgctcctcctgctggggttctgctctacaccaccacgcttcgcggcgtgcgcgccaccttcgaggcctgcaacgccgtccgcgccgcgctccactcgcacggcgtcgccttccgggagcgcgacatctccatggaccgcggcttccgggaggagttgcgccaccgcatctccctcgaccaccacgaccgcgcgcccctggtgccacggctgttcgtccggggcaaccacgtcggcggcgccgcggaggtggcgcgcctggaggaggagggcaagcttgcggcgctgctggagggcctgccgagggcgcgcccaggtggtggctgctgcgacggatgcggcggcatgcgattcctgccctgcttcgactgcaacggcagccgcaagctctgcttctccctccccacgccggtgccggcggcggcggctgcaaggagcaacaagacgcgggcggtggtggtggtgcgctgcggcgagtgtaacgagaacggcctcgtgctttgcccaatctgctcctaa

SEQ ID NO: 83887 - DNA, 216 bp, Oryza sativa
  Clone ID: PAT_MRT4530_83176C.1
ggcacgagatggctagcaaggtcgtcttcttcgcggcggcgctcatggcggccatagtggtttatccggcgcgcactaagcgacgtcggagataagactcaagagcatgcagtgtcagcagctagttgcaggacagcccgatgatgtgagtacctagcagagtccctaccgtcaacttacctgcctgtaaaagtattccagccgatattccggcaa

SEQ ID NO: 83888 - DNA, 285 bp, Oryza sativa
  Clone ID: PAT_MRT4530_83177C.1
attaatctgttgaatgtagtgcaaaagcccgcttatcaactcttgtttacatatcgcagataccataggaaagtatgggtataaagtttaaggccgcactctattagcttgagcctcaaatagcttcaatcagtactaaagaaagatgagccattggaaagtgattgcttcaacatggctatacctacgtggaaggcacgcccttgctctaggtggaataaagacatcaccttgtggaggcaaataatggtcaataatccggttcttgataggcaagttatcttc

SEQ ID NO: 83889 - DNA, 174 bp, Oryza sativa
  Clone ID: PAT_MRT4530_83178C.1
cagctctcggacaacagcgatgacatcggcggcactaacgcggaggttgataacggctccatcaccagtggcaagttcgtcacctcgaggcgccccccccccccgggcgacggctcggctttgtggcaaagcggcgtcggcccatcctcaaggcggagcgacgacgcgtctcaa

SEQ ID NO: 83890 - DNA, 422 bp, Oryza sativa
  Clone ID: PAT_MRT4530_83179C.1
tccccccttccttagcctgggttcctttaaaccggccgttccgaacctaccggccccgggggttattctttattggttttttattaggcctttaacctggaccaaaaaaaaatctttcttgaaggtccacctaaaatcttcttggcccatttaaaaattggctttctccttaacccatgtgaggggctaagggccaatgcattcaaccaattgtcagcaagggaattggtccttttgatggtccaaagatctcattaaaaagcttggccccattgggaactccctcacccgggcaaattgtgcaggatgttttattaaatatcttaaagcgcctagttagctttatattcattaagttctggcaattttctaaaaccatggtttcttgagcaacaaaaacaatagtactagcccagtaacgt

SEQ ID NO: 83891 - DNA, 1993 bp, Oryza sativa
  Clone ID: PAT_MRT4530_8317C.1
ctggtatggctatgtttaccagaaggcctatcttgagttcttctgttcaaaagagaagctggatcagctaattgagaagagcaaggcattcccttctcttacatacattgccgtgaacaaggacggagagtcattctcaaacattcccacaaacgctgtgaatgcggtcacatggggtgttttccctggcaaggaaatagtccagccaactgtcgttgactcagccagctttatggtttggaaagacgaagctttcgaaatttggtcaaagggttgggcttgcctgttccctgagggcgactcatctagggagatactagacaaggtccacgcgtccccacgcgtccgcccacgcgtccggcaagccgcagcagcagcatcaggggaagggtctagaagcttctagaagcttcttccgagatgaaggtgatcgagaagatccaggaggcggcggcggatgggcggacggtgttctcgttcgagtacttcccgcccaagacggaggaggggctcgacaacctgttcgagcggatggatcgcatggtggcgcacggccccaacttctgcgacatcacctggggcgccgggggatccaccgccgacctcaccctcgagatcgccaaccggatgcagaacatggtgtgtgtggaaacaatgatgcacctgacatgcaccaatatgccagttgagaagattgatgatgccttaacaacaataaagtctaatgggattcaaaatgttctggctcttaggggtgatcctcacatggtcaggacaaattatcagtgctgtggattagcttctttggattagtcttgtggacaacgactacatcaacggtgatctcttcgcggcgttcaaggagatttgatgacatcttatagtctgcaacctctcgtgtctgaattcctatctttatcaagtgttattgcttccacgactataggacagctttcgtcgaaagcttttgctcatgtgatctcgaaggattcatctagtctgatttttcgtgacttgtatcggttttattggattcatccaacatatatcaataaaaaatgagttgtgtttccattgaaaaaaaaaaaaaaaaaaaagataacgaggaggcggtcaaagcatatggaatccaccttggtactgaaatgtgcaagaaaattttagctactggaatcaagaccttgcacctttacacgctaaacatggagaagtctgctctaggaatattgatgaaccttggattaattgaggagtccaagatctcaaggtcattgccttggaggcccccaacaaatgttttccgtgtcaaggaggatgtccgccctatattctgggctaacagaccaaagagctatatttcaaggacccttggttgggatcaatacccacatgggcggtggggtgattcccggaacccatcgtatggagcacttactgactaccagttcactcgaccacgtgggaggggtaagaagctccaagaggaatgggcggttccagtgaaatctgttgaagacattaacgagcgattcatgaacttctgtcaaggaaaacttacaagcagcccatggtctgagcttgatggccttcaacctgagacaaagataatagacgaccaattggtgaagattaaccagaagggcttccttaccattaacagccaacctgctgttaatggagagagatctgattcaacaagtgttggatggggtggtcctggaggctatgtttaccagaaggcctatcttgagttcttctgttcaaaagagaagctggatcagctaattgagaagagcaaggcattcccttctcttacatacattgccgtgaacaaggacggagagtcattctcaaacattcccacaaacgctgtgatctcgaaggattcatctagtctgatttttcgtgacttgtatcggttttattggattcatccaacatatatcaataaaaaatgagttgtgtttcctttaaaaaaaaaaaaaaaaaaaaa

SEQ ID NO: 83892 - DNA, 176 bp, Oryza sativa
  Clone ID: PAT_MRT4530_83180C.1
cactccgggtgactaaccgcagtgacacacgacacatgttgactgcacacactgtgccactgcaaacacggccaggacaccgttaaacacatgtgcctgcgttgcttggctgttatttccactacgtgctcctgcccccccttgaccgacgcactcccacacacacacctcgacct

SEQ ID NO: 83893 - DNA, 619 bp, Oryza sativa
  Clone ID: PAT_MRT4530_83181C.1
cagctcaacagattttgcattagcaggttcaaccatttttcacatgagattagccttgcggcttacatgtatcatcgacaactcatcatatccctagcaaaaaaaacaagagtaaatcctgcattaccactagctagctacagaagctagagcttagatctagatggaaggaagctcaaatggagaagaacacacaaaaaaagacgagggaaaaaatagtatcccctaattcccaccaaacagcaggtgctaaaaaaatttgagctgcaggagaaaatgcggggaaatccccgtcctacccccaccaacccattcggaggtggagttaaccctccctatgtacacacacccacacaggggtaggtcagtaaaatgccagcagctaaagcaattggccgctgcggctgctgctgcggatttaccgtttcaccctggggcaaatgacaactatgccctcgatgggtaaagcgtaaataccgcgagcgagaagggcaaaacggggagacggacggggaaggggaagaaggggggggtctctagtagtagaccaggccgccgccgtcttcgtcgtcgtcgtcgccgtcaccggcgacggcggcgaaaaggcgtaggaggagct

SEQ ID NO: 83894 - DNA, 320 bp, Oryza sativa
  unsure (1)..(320): unsure at all n locations
  Clone ID: PAT_MRT4530_83182C.1
aagttcgtggccagcnccgtgctccgncggttcgagctccgccccgtggcgccggagggctcgccggagttcgtgccgctgctcaccgcgcacatggccggcggcctcaaggtgacggtnaggaggaggcagcggcaaaatggcacgtgcnagacangnagccaattttagtatttttcttaataggttcttaatagntnncggctgttaacattcagaatatactgtttgantnattatctttttaaaaattttttaatgtnagtgtataagatatgaatcatgnttaaagtatttgtgaaataaaaaaaaaaaaaaaa

SEQ ID NO: 83895 - DNA, 769 bp, Oryza sativa
  Clone ID: PAT_MRT4530_83183C.1
ccggccgggggccataataaactcaaatttccaatttcttcggtcgcgacgccgacgggaagcaaatcgatggacggcggcggcggcatgttgggcgccgtgttgtgcttgctgctggtcttcgccatcttccccctcctcctctggcgccgccgctccgatgccgcccaccgcctcccaccccagccgctccaggacgaacgtgtgctccgcggcggtcccgctcccggtccggcggcgcgccgcatgcgccggaggccgctctccacttcggctgacgcttccaccagccgcgaccgcgatgtcgacgacgctgacagtgacctagaggaggagatccaggatgtccccaggggttccaagaagaaggagaagaaaaggcaagaccgagaggcccagcgtcaggccgaagaagcagcccgggattcgaggaggactaaacaagatcgctatgcagaaatgaggaggaagaaagacgaagagcgtgaggcacaagagagacttatggaagaagaagcaagggcgaggaaagccaaagaggaggaagctgctgccttggaatttgagaaatggaaaggagccttctcagttgatgctgaaggtacaacagagagtgacacacaagatgatggccagggtttgctccacaattttgtagagtacatcaagaaccagaagtgtgttcctctagaggaccttgccgcagagttcaggatgagaacacaggactgtatcaaccggatcattacacttgaaggcatggataggc

SEQ ID NO: 83896 - DNA, 267 bp, Oryza sativa
  Clone ID: PAT_MRT4530_83184C.1
aaaaaaaaaatcacaacaccaaatttcaatggacagggtaaaaacccgcacaaaaaaacacactaccgggacaaaactaaccttttttccaaaacttggacaaccaaccacgggggccaaaagaaaacgtacatttatacgggacacggacgaacaattaatggaacgcggacaaaaacgcacacttttctgcaaagaaccccaaaggagggaacctaaaaaggttaactgaaggggaaccgtccccatggaaaaacgggggggggg

SEQ ID NO: 83897 - DNA, 1755 bp, Oryza sativa
  Clone ID: PAT_MRT4530_83185C.1
gaacatttgcgtggcccgtgcaagcaagatcctccccatgttgacatcttccctaacacgccccccaccccctcccttcgtgtggaacggtcggtccctcgatctctctccaaataccaccggtctaccaccgccgccactttctactactccgatctctctctgctcccgtcccgcctccatgcacgacaccggtctctcagcccgcgccgccggcgcctcctcctcctcctctccctacgctggcgcatcctccgccacctccgtcggcgacgacgacgacgagtccaagatccgaaaggcgaaccccgcgttcgtggccgccgcctacgcccgcctccactcttcccaccgagccgctgcctccttcctcctcctcctcgccgtcgccgccaccgccttcctcatcggccgcgcccgcccccgcgccgactgcccgccgccgcggctcgacgcgcgctttctcgctctcccggacgcggccgcggcctccgacttcggcgccctcggggtaccctggtgcagatcaaaaactggaaagatagtggagtggacttcaaaggatctacttcgtggactggaagaatttgtaccaatatatgaaacacgacctatcaagaacaacatgtatggaatgggctttgaccacagttttggcctttggtttgtggctcgctggcttaagccagatctgatgattgagagtggtgcattcaaggggcactctacatgggttttgcgtcaggccatgccaaatactaagattatatcactctcacccagacaccctgagaaatatctgaagaaggggcctgcatatgttgatgggaactgcacttatcttgctgggaaggattttattgacttcggaagtgttgattgggggaagctattgaggaatcatggcatttctgatctcagcagagtgcttgttttctttgatgatcaccaaagtgagttgaagaggttaaaacaggcttcaatagttggattccgacatatcatatttgaggacaattatgacactggtacaggcgatcattactccttaagacagatctgcgatcaggaacacatcagaggtggtggacatagctgcttttgggatagtgacgaagcaagattaaggtcgagacgaaagagtttttgggagaaagctgtggaaacagatgagctttgtggaaaggatgatgcatggtggggagttagaggttatatgcgtgacaatttcaaccatagcaacaaagccatctcatacaaagagcatttccagaacagcagacttgttgaatccgtgttggatttgtattgggagctacctccagttgctggtccatccttaacccaccaaacaagatatgacccagcccgtgcatctgatcctatcatcgaagatggtcgttttggcatgtttcaacgaattggtctagcgagattggatgcctcagttttcaatggctacactcagatgtcatatgttcagatatcaggctcaatgttgagcagagaggatgcttaaagattttattccgtagggttaatttttcttctgatactgactaaacaggttgacaggctttttctataatgtcgcaggttggcatacacacgactatattctcgtagtacagcttgtgtgactatgcaaatgttatcaaaccaatgatgagccttgctattctgaggcatatcagcaactcactggattggatttgaaagcattccattaaaaaaaaaaaaaaaaaaaaaaaaaaa

SEQ ID NO: 83898 - DNA, 2619 bp, Oryza sativa
  Clone ID: PAT_MRT4530_83186C.1
atggacctcagcctgaggggggaagctgaggcggcggcggtgtatcgctctaattcgaagcagttcacaattgaggttcatcatgggggatttttctatggtatgggagtgaatcgcagttatgtggatggcaaagttagctggttcgattatgtcgattctcgagagtggggtagttctctgcagttggcagatttggttgctatgttgggttatgatgcagggccaaggctgaaagtatattggttgctgcctgggaagaacttggttgatggcagaaatcaagaagatatcgtagtgagcccagtctctgagttgcctatagtaatgagccctgttagaggttgtcagcagaagggagatgggaaccaggggggtagtaatgtaggagtacaagcatgtggggttgtagatgaagtagctgatgaaattgaagatgatgttgaatatgacagtgatggtagtgaagttgatgattcagactttgtggacagtgactatgagttccaagatgatgatgatgatttatttgaggataatgtggatggtgatgtggtggaccagggcccagctcctaagaagttcaatcagaagaaggttgcaggtggcaagctgaagggaaagagagtaattagagaggaaggttcagatgaggagtcaagtgatgaagagtgcttggaactgccagagaatccagatgagatcaatttgaggttcaagtcctttaacccagaagatatgaataaccctgtctttaaagttgggatggtgttcccttctgttgagctgcttagaaaaacaatcactgagtacagcttgaagaatagggtagacatcaagatgccaagaaatgatagaacaaggatcaaggctcattgtgcagaagggtgcccttggaacatgtatgcatctctagatagcagagtgcatggttttattgtgaagacctatgtgcctcaacacaagtgcagaaaagagtgggttcttcagaggtgcactgccaattggcttgcattgaaatacattgagtcatttagggctgattctaggatgacactacctagctttgccaagactgttcagaaagagtggaatttgacaccctcaaggagcaaactagctagggctaggaggttggcactgaaggagatatatggagatgaggttgcacaatacaacatgctgtgggactatgggaatgaactgaggagatctaacccaggcagctcattctatctgaaactggatgatggcaagtttagttgtctctatttctctttagatgcttgcaagaggggttttctaagtggctgcaggcctatcatttgcttggatgggtgccatatcaagacaaaatttggtgggcaattgttgacagcagttggcattgaccctaatgattgtatatttccaatagcaatggctgttgtggaggtagaatcatttagcacatggtcctggttcttgcaaactttgaaggatgatgttggcattgtcaatacttatccttggaccatcatgactgacaaacagaagggtttgataccagctgttcagcaactattcccagattctgagcacaggttctgtgtgaggcatttgtaccagaattttcagcaatcatttaaaggtgagattcttaaaaatcaactttgggcatgtgctaggtctagttcagtccaagagtggaatactaaatttgaggagatgaaggctttaaatgaagatgcatataactggttagagcaaatggcaccaaatacctgggttagagcatttttcagtgatttccctaaatgtgacatcttactgaacaatagctgtgaggtcttcaacaaatatattttagaagctagagagatgccaatactgaccatgctagagaagataaagggccagttgatgacaaggttcttcaacaaacaaaaagaagcacaaaaatggcagggcccaatctgtcccaagattaggaagaaattgctaaagattgttgagcaggctaacatttgctatgtgttgcctgctggaaagggtgttttccaagtagaagagagagggaccaaatacattgtagatgttgtgaccaagcactgtgattgtaggagatgggacctaactggcatcccttgttgccatgcaatagcatgcattagagaagaccatctgtctgaagaagattttcttccacactgctactctatcaatgcattcaaggcagtgtatgcagagaatatcattccttgcaatgataaagccaattgggagaaaatgaatggaccccaaatattgccacctgtgtatgagaagaaggaattaatgggaccacaagcaggtggctcatcactattagctgaggtgaatgacaatatgttggatcatatgctgcaggaggcatcacagcccagtcaactaactcaggaacatggtccactacctgactgtgctttcattcaagaaaaccagccaacagctagaccagtggtattaaccacttcaacaaaagagggaagatcaaagatgaccaagcctaagaagaatgcagctggcacttcaaagaaaaagaaggcaacagatggcttgagtgatggtgctgctgcaaagaagaagaagaaggcttga

SEQ ID NO: 83899 - DNA, 2724 bp, Oryza sativa
  Clone ID: PAT_MRT4530_83187C.1
tcaagccttcttcttcttctttgcagcagcaccatcactcaagccatctgttgccttctttttctttgaagtgccagctgcattcttcttaggcttggtcatctttgatcttccctcttttgttgaagtggttaataccactggtctagctgttggctggttttcttgaatgaaagcacagtcaggtagtggaccatgttcctgagttagttgactgggctgtgatgcctcctgcagcatatgatccaacatattgtcattcacctcagctaatagtgatgagccacctgcttgtggtcccattaattccttcttctcatacacaggtggcaatatttggggtccattcattttctcccaattggctttatcattgcaaggaatgatattctctgcatacactgccttgaatgcattgatagagtagcagtgtggaagaaaatcttcttcagacagatggtcttctctaatgcatgctattgcatggcaacaagggatgccagttaggtcccatctcctacaatcacagtgcttggtcacaacatctacaatgtatttggtccctctctcttctacttggaaaacaccctttccagcaggcaacacatagcaaatgttagcctgctcaacaatctttagcaatttcttcctaatcttgggacagattgggccctgccatttttgtgcttctttttgtttgttgaagaaccttgtcatcaactggccctttatcttctctagcatggtcagtattggcatctctctagcttctaaaatatatttgttgaagacctcacagctattgttcagtaagatgtcacatttagggaaatcactgaaaaatgctctaacccaggtatttggtgccatttgctctaaccagttatatgcatcttcatttaaagccttcatctcctcaaatttagtattccactcttggactgaactagacctagcacatgcccaaagttgatttttaagaatctcacctttaaatgattgctgaaaattctggtacaaatgcctcacacagaacctgtgctcagaatctgggaatagttgctgaacagctggtatcaaacccttctgtttgtcagtcatgatggtccaaggataagtattgacaatgccaacatcatccttcaaagtttgcaagaaccaggaccatgtgctaaatgattctacctccacaacagccattgctattggaaatatacaatcattagggtcaatgccaactgctgtcaacaattgcccaccaaattttgtcttgatatggcacccatccaagcaaatgataggcctgcagccacttagaaaacccctcttgcaagcatctaaagagaaatagagacaactaaacttgccatcatccagtttcagatagaatgagctgcctgggttagatctcctcagttcattcccatagtcccacagcatgttgtattgtgcaacctcatctccatatatctccttcagtgccaacctcctagccctagctagtttgctccttgagggtgtcaaattccactctttctgaacagtcttggcaaagctaggtagtgtcatcctagaatcagccctaaatgactcaatgtatttcaatgcaagccaattggcagtgcacctctgaagaacccactcttttctgcacttgtgttgaggcacataggtcttcacaataaaaccatgcactctgctatctagagatgcatacatgttccaagggcacccttctgcacaatgagccttgatccttgttctatcatttcttggcatcttgatgtctaccctattcttcaagctgtactcagtgattgtttttctaagcagctcaacagaagggaacaccatcccaactttaaagacagggttattcatatcttctgggttaaaggacttgaacctcaaattgatctcatctggattctctggcagttccaagcactcttcatcacttgactcctcatctgaaccttcctctctaattactctctttcccttcagcttgccacctgcaaccttcttctgattgaacttcttaggagctgggccctggtccaccacatcaccatccacattatcctcaaataaatcatcatcatcatcttggaactcatagtcactgtccacaaagtctgaatcatcaacttcactaccatcactgtcatattcaacatcatcttcaatttcatcagctacttcatctacaaccccacatgcttgtactcctacattactacccccctggttcccatctcccttctgctgacaacctctaacagggctcattactataggcaactcagagactgggctcactacgatatcttcttgatttctgcctgaaacatggtcagtatggtctaaatagataacaaagttcttgactttattgcacactgaattcattacattaatctctacttcgctgtccacaattctcaaaccatcaaccaagttcttcccaggcagcaaccaatatactttcagccttggccctgcatcataacccaacatagcaaccaaatctgccaactgcagagaactaccccactctcgagaatcgacataatcgaaccagctaactttgccatccacataactgcgattcactcccataccatagaaaaatcccccatgatgaacctcaattgtgaactgcttcgaattagagcgatacaccgccgccgcctcagcttcccccctcaggctgaggtccat

SEQ ID NO: 83900 - DNA, 2605 bp, Oryza sativa
  Clone ID: PAT_MRT4530_83188C.1
atgtggcggcgacgaaggcggcggactacggcgtgtgccgcgacgccggccctcgtcaagaacctcgccaccacgaggagggcgcggcgcccatcaattgtacgccgtgcccgtgacgccttcctccatggcgccggcgacccgcactgcgcgttgcaccttcaggtctatgccaccccggccggtctggacggctggcggctggcgacggtggcggctggacggtggtggctgacggtggcagttggacggtggtggctgacggtggcggctggacgggggtggcggtggcggtggcgatggtggctggcagtggtggctgtcgacggtggtgcaaggccatcatccggggctgacggtgtgtcgtcgtcggcagcggcatgtggaggcaaggaaggaggagtccggggaatcgcgagcgaaagccttgccgagccgtttggccagctgacgacggcgacgcccgtcgccgttctcctccttggaggcgttgtgttagattacccatctcctttcctaaccatattctccggcggtggcgcggcgaggcattcggcagcggcgcgacgccgtggcgaggcattcggcggcggcgcggcgaagccgcgagacggcaaccgacgggcgaccggtgacggcgggagcgaggccacgaggccgaggggcaggggcgcggcggcggccggccaacagctgcagctcagcgggacagcgcccagcggcactgcggcaggcgcaatttcagggttaggttctggttctggatcaacaacacaaccagttagaattgacagtgaagttgctgttccttctgttcagccgattacagatgcaaatgagagtccagttcagattcagattactgcagttgaggttgtgcctgaggtagcagccagtgatgcagcaagagatgtgacagaacctgaaacagaggtagctagcaatgatccagacatagcaacagcagtgacacagcaggagcaaccttccacttggtctcctatcagagattggtctcccatcagagatggtgatgatgaagagacagagtatgactcaagtgatgaagctatttatgacattgatttactttgtcatgatcctggaaggcgaattgcaatcaaaaattatgatgtcaatgaacggaattctgtgataaggggatatattgcattagggccatgccaaccacgcagccacaattttcctataaggaaaattggagaacaagagtctgaccatggcgaggacggctctgcaccaaaagccgccgccgtgcgtggtgggtcaccgagaggcggcgtccggtggtggctgtcggtggcggcggacatgttcatggtgctctgcggccagaccgtggccaccctcctcggccgcctgtactacaactccggcggcaacagcaagtggatggccacgctcacgcagtccgccggctcgccgctgctcgccatccttctcctcttcacgccggcgcccgccgccgacgagcccaggccggcggcggcaaagatggcgcccatctacgtcggcctcgggatcatcatcggcttcgacaacctgatgtactcgtacgcgctgcagtacctgccggtgtccaccttctcgctcgtggccgcgacgcagctcggcttcaactccgtcacctccaggctcatcaacgcgcagcggttcacggtgctgatcgccaactccgtcgtcgtgctcaccttctcggcggcgctgctcggcatcggggcctcctccgacgagaccgccagcagcgtgccgaggggcaagtaccccgccgggttcgccctgacgctcgccgcctccgccgtgttcgcgctcatcctgtcgctgttcgaggccaccttcgagaaggtggtccggacgcggacgctccggtgggttctgcgcgcgcagctgtggaccaacgtggtggcgtcgacggtgtcggcggtggggctgctcgcgtcgggggactggaggacgataccggcggagatggcggcgttcaaggacgggagggcgaggtacgtggcgacgctggtcgggacggcggtgtcgtggcaggtgatggcggtgggctcgctgcggctgatcgtgagggtgtcgtcgctgttcgccaacgtgacgggcacgctgtcgctgccgctggtgccggtgttcgccgtcgcgctgttcggggacaggatgaccgggatcaaggccgtatccatgctcatggccgtctggggtttcctctcgtacgcgtaccagcagtacatcgacggccggcgcgcggccggcgccgggaaggggagagcggcggcggagtgccgcgtttgcgccgcgcgcgccggcagcgatccggactcgcccgcgtgaggggcccgcgttttctcacggcccaacaaaccgaaagtagctcacgtctacttttcgcctgaggcccaatacagaggacatgtaggcccatcggcttgtgttttgagatactgtttagattttaaaccgtgtatccatcatctgtagggccccttggaaaggaataagttcactcgaggttctttaatttgtcaacgaatctgattttcatatttccccccaaatatttttccttcaaaaaaaaaaaaaaaaa

SEQ ID NO: 83901 - DNA, 1217 bp, Oryza sativa
  Clone ID: PAT_MRT4530_83189C.1
ccccgtgttttttttatatttttttacttgcaatcgcaagatgagatgcacatttatataattataattaaggatgagcggaacacctgacgtttttgaggtaaacgtcttagccggctcgacccaagtacataacaagttaacaacatgttttaagttacacatcggaggaacaacatgccaaagatgacagggcaaaccaacctatgcaagtacagtagaaccagtgccgctgccgttgccgctaacagattggaattcaaaattgctttgcgccacttgcattattgttaatatctctcctcttgaacatcgttcatagatctctgttgcgagtgtaacgagagactcggtctcctcagcaagcttgaagatcctttcagcctccgtcatgtgctcattcgcaaggtgtgatttggcctccgcatcagccactttcatagctgcagctgcagctgcttctagggcaggactcgtaccagcaaatgaacctaaattctgcgatgccttcagtggcttggctggatccttctttggacttggagacttatttgcttgcgaaactttggctgcataagattctgtgatcctataggacctgtcaatcttttcaatctttttcgctgctataagcctccttaattttgcagtaagcaatcttctaaaattcgcttgcacctcgtgcctttgctctatgtagtggcaaattgcatcaacatccgaaccatttggatccccaatttcacaaagagcttctattaccatggaatttggaatcttcacatcctgagagcttttctcaggatctgcggatggtgaagcctcagcaactttatttgggggtaggacgagaagcggagtctgagagcttggagatgtggaagatgaaggcccttttatccttggaacctttaatttatcccttgaacccagtccacttgcactaaaactcaaattcctccatttgtccttgaggtcgatgttcgagcgggaggagaggacggggctgaactccggatccttctggatggtgcgccacttgccggggccatgcttgagcacgccgcgccgcagcgcctcctcctcctccgaggtccacttctgcttcggggcgcccatctccgcgcgcctcctccccacaagcctcccccgcctcctgcactctccggcgtctgaactgtccgaccagaaaccctagtttgggtttctcctcgtgc

SEQ ID NO: 83902 - DNA, 270 bp, Oryza sativa
  Clone ID: PAT_MRT4530_8318C.1
atgaggcggcgactggcctcggggaggctggtgagtggtgacgaggcgggaggtggcgggctcgagcgtggtggcgagctgcccggcggacggcggcggcgaggggcgacggcgaccgtcccccacccagttccggcggcggcggtggcggcggccggcgggcggtggggaggaggcgcggcaacggcggatctggcgacagcgacgggagcaagcggatctggcgaggacgatgacgacgaggaggatgatggagactgcggcttctag

SEQ ID NO: 83903 - DNA, 1746 bp, Oryza sativa
  Clone ID: PAT_MRT4530_83190C.1
ccggccgggatctcttcccccttcccttcgcgtaaaagagaaaaaaaaaatctcccgtctcgtcgtctcctccgcctcttgcgcccttagagggtgcgaagagagggggagagggtcggagcgcggtccgaggagcaagaggtcctgcttgtgtctgcctaccgggacgccgacttccttctctctcgcggcggggccgtcgggctgaggagggggcggcgctgggcagaagtttgggcagcgcgcatcggttgagcttagccgctgagagctcacggcggcagttggcggcgggagcggctccccacggcgaggaggcgcacggcaggagctagacaacggcggcggcatagcagatctggtgcaaggaggaagctcaggtggcagcaaacaggaagcttgactcatgaggcggaggagggccgatggagaaggatcaatccgactctagaaaggctcctacagagtatcttgaccctggttccctgggctaagaggaccgatcggactactggaggggaggggctaagttgtctccactacagtgcactgtctccgaaatggagacgaacctacctacaagagtctaatcaattaggaagtgtgctaaagggcttttgaatcattcttatcatcgtcaaaggacacttccaatctcaagcgctccgggaagttccaggctgatgagaggccgcgatccctgtcatcgttctctccgccctgattagcaagcgcgataagctccagaaggggaacaattgagactctgggctcaatacaagctgcatcctggcagatggaagagaatatggatcaggtcgttcgaaaggcgcaaccactcctgcaaacgggcatcgaaaaccaaagaaaggaggtcgccctggagggagagacggcaagagaatacggccatcaaatgatccagatctggacgaagaagaggacttctaaatgaacatgtggctggacgagatcagtgatgatttaaccttgctagactcacgcttcgagtcacctctttctgtattgtaatttttttttaatcttgtgttgcaatccatggcaagcaaagccttttccccagggagtagccttgctcatctagtcatcttatcgtcggcatttgcctgtgcttgcattttcttccttttcaacccaccccggcgttgtctgattgtctcccgttttgtaaagcagtagcaagttaattagacggtgataatttctgttaactctactgtaaacaacgttgctatagattccagactccagtgagacgaagataagacaccagcgagacgagaatctggattggccgattcttagtaccagaaaaaaatgtctcatccgattataggtttttatattttggaacgtgtagttgctagcacaccgccgcgtttgccagggccaaggtggagttgaatctgtgagttcacctgttgcattgcaagacaagctggaacttgtaatctcaacaattagattgcagggtgcctgaggttaatttgtgtacacttttttttagtgtagctagcaaagactacaagtaatgctttttatattagtataggtgattaattagctctaagtacaatatgatgatgcaacacgcaggcatgcatgtctaaacagctgtgcttagcttcagtatggaaatagcttgagcatcacttcttcaacaggttgcattgacaaatactccctccgtcccaaaataagtgcagttttgcactatttatcttc

SEQ ID NO: 83904 - DNA, 680 bp, Oryza sativa
  Clone ID: PAT_MRT4530_83191C.1
cgacaggcgggactcaaggggagagaggggagcggccggtaggcgggccccaccggcagcggctccaaaagggggggtggtgtccgccgggctcggctcggttccaagccggccggccggctacggcgagcggtggcggtgcacggtcactggcgacggcaaccggcggcggcgaacggcgcggaaggcggcggcgtcggccgaaggcaacggcgcgcgcgcggtggatggcagcggacacgggagggagagaaaaagggaggagagggagttctcaccacggcgcggcttgacggcagttctagcggtggcgagcagtggctggaggagtggaaaaggcggcggcggcgggtgtagcggcgcgggagcgatggagggcacgggagggaggggcggaaagaggaaaaaggtggaggggattgcgggggagctttataggggctcgggaggggcggacgtggccgggggtctcccgatttcgccggcgacgtgggaggtagagagggagagagtggggggaattcaaatttgaatcccgccccttgcgggggtgcgtgcgcgggggagaggagggggaaacgggcggcgacgcggcgacgtgggcgcgggaaaggagggcggcgtgggggcgcggagcaacggggaaagcggctatttgctttgcctggatgataatgtat

SEQ ID NO: 83905 - DNA, 486 bp, Oryza sativa
  Clone ID: PAT_MRT4530_83192C.1
tttttgggtttttatcacttgaatcctgatgatgccactgctccattgccctttgcttatacagtgctttggcacacaggagccttttcttccatgtgcctctgtaattaaacccccccaaacaaatgaaattaaccattacacataattcagagtatcgtttcagtctctgcctaatacttcaaaacaggtcttgcgttacttttgatgaagcccaacatcgtcttcgtacaagagcttttctacgccaagagtacctgcctgatgctttcgcatgagcaggatgcagtttagtctcggcctgtcgtttaatgcccttgacctgctttctgaagatccctttgatgtagctcaacagccaagatccaacatgtcagcaggggttggtttgcttgtccatgtttggcacgatgttttgcaactggatgtggagcacgctgatccttgtcctcctcacccgctgggagatgctgagggggtgcctgg

SEQ ID NO: 83906 - DNA, 1878 bp, Oryza sativa
  unsure (1)..(1878): unsure at all n locations
  Clone ID: PAT_MRT4530_83193C.1
caacagaaaaaagaaacatattcagcattaagtttttaccatattattaaggagtaggaacagacgcgccagctagcaaggaaaaagaatataactacaataagaagtgaaggtgcgaattcacagttccgctgaggaaatggtaaacaaactagatgttttaaccacatcgttccatattatttcaaaactttggggaatatttttagatggcagttgaaactgtatcatgatttaaatgtgaatcgccttcaggtaggtctgtaggcaagcctccttcagggcttcgctcactgttggatgcgcatggcatgtccgtgcaatatcctcactagatgctccatactgaagtgcaagcaccgcctcatggattatctcacctgcattaggggccattatatgtacaccgaggattctatcggtctccttctcagccactaccttgaccaacccttcagcatcatcaattgcctttgcacggctgttggccaacagggggaacttcccaacctggtaggccactcctgatgccttgacctgttcttccgtcttcccaacagaagccacctctgggtgtgtgtacaccactccaggtacagtgtcataatctacgtgaccttctttacctgcgatgaattcaacacaggcaacaccatcttcttcagctttatgtgcaagcatgggtccagggatcgcatctccaatcgcataaacacccttaacatttgtcataaagcgcttgtcgacaaggattcttccacccttgtcagtctcaacaccaagggcgttcaatccaagaccagaggtgtatggtactctgccagcagatacaagaacaatatcacactcaagaacactctgctctccaccagctgcaggctccacagttaacttgacaccactcccagaggtatcaaccccaacaacttttgtcttaagcatgaacttcattttctgcttctccagcatacgctggaactgcttcctaatctctccatccattgacgggacaatgtcagaagcgaattcaacgacagtgacctcagaccctagcctgttccagacagaacccatctctaaaccaatgtatccagctccaataaccaccaacttctttggtatttctgaaagagcaagagcaccagtagatgacacgatcttcttctcatctattgtaactccagggagtgatttcacatctgagccagtggcaatgattatgttcttccctttaacagtagtgctaccaccatcgagcaagtcaacagatacctctgaaggggacacaaactttccaaatcctttgacatactcaaccttgttcttcttgaacaggccttcaatccctttagtcagcccagcaactgctttgtctttctgtgacatcatggcaggcaaatctatttcaagatttgagaatttgataccatggtgtgcaaaagaagccttggcctcatggtacatatgcgacgaatgcaggagagcccccattgtgcttcgtaattcataataaatcgatggcacagctaaatagaatgggtcgaaatgattcatcacctccttggaggggatgcagccgacgttgaggcaggtgcccccgagcgttcccctcttctcgatgcaggtggtcttgagccctagctgcgccgccttgatggcggccacgtacccgcccggcccgccgccgatcaccacgacgtcgctctcctcccccgccgccgccgccgcgtaccccctccacgcggacgcccacgccgccgccggcgcccgccgcagcagcgccgcctccgccgcgcgcctcctcgccaagctcgccatcgccatctcgcgggctcctcttcgccatgttttttttttcnttnntcttttcaaaaattt

SEQ ID NO: 83907 - DNA, 825 bp, Oryza sativa
  Clone ID: PAT_MRT4530_83194C.1
atggacatctctaggacaaatgaaggctacacgagctgcggtccggtagtcgagatgtcgtggcacagggccgcggctccaaaagggggggtggtgtccgccgggctcggctcggttccaagccggccggccggctacggcgagcggtggcggtgcacggtcactggcgacggcaaccggcggcggcgaacggcgcggaaggcggcggcgtcggcccaaggcaacggcgcgcgcgcggtggatggcatcggacacgggagggagagaaaaagggaggagagggagttctcaccgtgggggttgcccggcccgggaagaggcgacgacgaacggcgacggcgagcgaccgggagacgccggcaagtgccgaacgaggtccggaaccacctaggggtcaaaatgagagagattagagggagaagggaggtccgcggcgagcggaaactagggccgaaggcggcggcaatggtggaagctcaccggagtgcgaggagatgcgggctccgacgacggaattggacaggagagtggcggacgaggtggacctcggccgcgcgaacccgacggcggcgacggcgcggcttgacggcagttctagcggtggcgagcagtggctggaggagtggaaaaggcggcggcggcgggtgtagcggcgcgggagcgatggagggcacgggagggaggggcggaaagaggaaaaaggtggaggggattgcgggggagctttataggggctcgggaggggcggacgtggccgggggtctcccgatttcgccggcgacgtgggaggtagagagggagagagtggggggaattcaaatttga

SEQ ID NO: 83908 - DNA, 331 bp, Oryza sativa
  Clone ID: PAT_MRT4530_83195C.1
ccccaaggggtcattttatttattctgcaaaaaggacaagtgggggcataaaaagttcactttgaagttcaaaggggcccttattcattttccaccaaatcattgaccagggggaaacaaccaccatttcctccctagtccatgccaagcctagtagtccgggacaatttgcgggttttaggacttttgacagaggccatcactgaagtttgaagctccaagagggggtataatgggcccctacccccttaattctggggggccctccccttctaaaccctttgttggaacttttccttttgggaatcggactcccccaccactgtttcct

SEQ ID NO: 83909 - DNA, 1248 bp, Oryza sativa
  Clone ID: PAT_MRT4530_83196C.1
atggcggagcagggggcgggcgaggcggatgcgggcggcggggagcccgccgccggcggcggtgatgacggcggcggcggaggcgttggcggggcagaggtcgctgccgacgccgttcctgacgaagacgtaccagctggtggaggacccggcggtggacgacgtgatctcgtggaacgaggacagctcaacacctatggatttaggaagatcgtgccggaccggtgggagttcgccaacgactgcttccggcgaggggagaagcgtttgttgtgtgatatacaccgccggaaggtggtggcggcggctgccgcggcgccgccgccgccgtcgccggggatggcgacggcagctgccgcggtggcttcgggagctgtgacggtggccgcggcgccgatacctatggcgctgccggtgacgcgggcgggctcgccggcgcactcctcggaggagcaggtgctgtcgtcaaactctgggtcgggggaggagcaccggcaagcgtctgggtccggctctgcgcccggcggcggcggcggcggctccgcgtccggcggcgacatgggcgaggagaacgagcggctccggcgggagaacgcgcggctgacgcgggagctcggccacatgaagaagctctgtaacaacatcctcctcctcatgtccaagtacgccgccacccagcacgtggagggctccgcggggatatcctccatagcgaactgctccggcgagtcgtcggaggccgttcccccgccgccgcctctccccccggcgatactcgatctaatgccctcgtgccccgccctggccaccgccgccgccgctgcggggctcgccatagacggcgagcccgacccgagcgcgcggctgttcggcgtctccatcggcctgaagcggacgcgagacgacgccgccgccgccgccgacgaagacggcggcggcgaggatcaggccgagcacggcggcgcggacgtgaagccggaggcggcggatccgcatcccgccggcggcggcggcggaagcagcacggaggcgtcgccggagtcgcacccgtggcccatataccggccaacccccatgtaccacgcggtcaggcccacttgcaacgggccggacagggccgggtccgaccaagacgggtccagctccagcgtaagatccatcaggatgccggtgcacagtttggtcagttttacaagtgttttaggtgttagtgccaaaaatggtggtgacatagggcggaagcactag

SEQ ID NO: 83910 - DNA, 870 bp, Oryza sativa
  unsure (1)..(870): unsure at all n locations
  Clone ID: PAT_MRT4530_83197C.1
atggcggagcagggggcgggcgaggcggatgcgggcggcggggagccgccgccggcggcggtgatgacggcggcggcggaggcgttggcggggcagaggtcgctgccgacgccgttcctgacgaagacgtaccagctggtggaggacccggcggtggacgacgtgatctcgtggaacgaggacgggtcgacgttcgtggtgtggcggccggcggagttcgcgcgggacctcctccccaagtacttcaagcacaacaacttctccagcttcgtgcgccagctcaacacctatggatttaggaagatcgtgccggaccggtgggagttcgccaacgactgcttccggcgaggggagaagcgtttgttgtgtgatatacaccgccggaaggtggtggcggcggctgccgcggcgccgccgccgccgtcgccggggatggcgacggcagctgccgcggtggcttcgggagctgtgacgacgagcgacaggctggttggcgtctccatcggcctgaagcgggcgcgagacgacnccgccgccgccgccgacgaagacggcggcggcgaggatcaggccgagcacggcggcgcggacgtgaagccggaggcggcggatccgcatcccgccggcggcggcggcggaagcagcacggaggcgtcgccggagtcgcacccgtggcccatataccggccaacccccatgtaccacgcggtcaggcccacttgcaacgggccggacagggccgggtccgaccaagacgggtccagctccagcgtaagatccatcaggatgccggtgcacagtttggtcagttttacaagtgttttaggtgttagtgccaaaaatggtggtgacatagggcggaagcactag

SEQ ID NO: 83911 - DNA, 317 bp, Oryza sativa
  Clone ID: PAT_MRT4530_83198C.1
aggaatgattttcaaaaaaagcgcgggtttttttgcaaaattgccagctccagcgccgggggacgtggtttttaccggaagcgaacaccccagccaaaaaagccccggagcgctgggggggctccatttcgcgggcccctttaatttctccgatactgtgaccttcacatttcaagtcacttggtcagagaatagaaattcttaccagcttgtttcggcccaacacttgaaagcttagaaccagaaggcaggtttgaaaacagattatgctttttcataattggagcccaaacattcaggtaccctttcaaaaataa

SEQ ID NO: 83912 - DNA, 1238 bp, Oryza sativa
  Clone ID: PAT_MRT4530_83199C.1
ggcatcaattgcacaaaaccaagatcaactaataccagccttcaaggtacattagtgtgttgcttcaagctagagcagtgtacttctgtaactctgtttcagtattacagccatgatcgctgagaaaacaggggtgcataatatgacactgacaataccccaatcatacattcatcgtcaggtcccaaaaccttccctaacacagcataaatacgaaaagatactcaaggtaggaagtaggaaccaagttactaaagaccatgacctaatctacaaaaataaagcagacgatgaacggatgaagaagacgattatctcagcgcaactccattcagtttgctatactccagtccaaggtaaggggtgggaagcattcatgaatgaactcactatggaccaccaaatactccggctaaaatgtctttcggaagctttggtttagttttggcgtctgtctcctcaacaggtttcttttgcggaattgggcgagcgattttttcttctcggacttcattgaattcagctccttccgtcttctgtttctttttcctacgctcctgaatatgtttcagcgtacgggacttctcgacattggacaagtagtggtcacgttgtttctttgcagctgctatctccaagtttagtttctgctccctgatatgagtcttctcagctatttcaccaacaagatcatcccatttgaatttcttgagatattttatgttccaaatgtcataataaaatggagacctcttcttcccacctatttgttcaccgttaagtagattagccaccctcttggcaacgcttttcttggaaaattcaatccacccttcagtgtacgccttcgctcgaacattagtgtgcttgcgatgaccttggccttcaggcacaaggtaaatcctctgcacctcgccatacttggagagcatctggcggacgtgggacgggttcatgttgggagggacgcggctgaggtagcacaccccgcgcttcccgaggccgtccagccgcttcagcgcccgctccctcgccgcctccgcgtcctcctcctcgccttcgctgccgagaccgtcctcctcccatcccagctcctcctcctcctccgagtagtagtcgctctcgctgctccccgccatagaaaaaatctccaagcgcgcccccggtgtagatcgccggcggcggcggggcaggaggtgtctgcgcggcggcggcggcggcggaggacgagtccgcgt

SEQ ID NO: 83913 - DNA, 749 bp, Oryza sativa
  Clone ID: PAT_MRT4530_8319C.1
caacaagtgttggatggggtggtccctggaggctatgtttaccagaaggcctatcttgagttcttctgttcaaaagagaagctggatcagctaatgagaagagcaaggcattcccttctcttacatacattgccgtgaacaaggacggagagtcattctcaaacattcccacaaacgctgtgaatgcggtcacatggggtgttttccctggcaaggaaatagtccagccaactgtcgttgactcagccagctttatggtttggaaagacgaagctttcgaaatttggtcaaagggttgggcttgcctgttccctgagggcgactcatctagggagatactagacaaggtccagaagagctacttcttggttagtcttgtggacaacgactacatcaacggtgatctcttcgcggcgttcaaggagatttgatgacatcttatagtctgcaacctctcgtgtctgaattcctatctttatcaagtgttattgcttccacgactataggacagctttcgtcgaaagcttttgctcatgtgatctcgaaggattcatctagtctgatttttcgtgacttgtatcggttttattggattcatccaacatatatcaataaaaaatgagttgtgtttcctttcaacctagttcagttaaaattatttccctcctgcgcttgtgctgtaattgtctgtgtacctgttgtttgtgactgtgtcagttcccttggatatgatcccctatttgatatgt

SEQ ID NO: 83914 - DNA, 573 bp, Oryza sativa
  Clone ID: PAT_MRT4530_831C.1
atggtgcgcattgatcgacgggggcatcgatgccgagaaattcccaggcagcgcaattgtaggacacgacgtcgatggagcactcaaagtagaccggggccaccggcgtcggctccgacgcaccaacgcaccacccgccccgacgccaccgtgagcggagggaggggggggcgacaccgacgctgcctccgacccaacgtcgccgctagggaagggagaaaaaggggtaggggcactggcgccggcttcgacatcgccgcgaggggaaggagaaggggcgaggggcgcactgacgccgacgtgcacgcgatgtcccgtgcaagggcggcagacgatgaaggtgaagatggtgccgcacccatcggcctacgccactccgtcaccagcgcctatcgcggcgtagccaccgcgctagattcggaggggagggtcgccgccgccaccgacctctccctcccgacggagccgctgccgcatccaccctccacgccgcctccgccctccaccggatctaggaagagggaggggatctgccactggttccaccctctgcgcagccaccgcttgttctga

SEQ ID NO: 83915 - DNA, 1952 bp, Oryza sativa
  unsure (1)..(1952): unsure at all n locations
  Clone ID: PAT_MRT4530_83200C.1
atggcggagcagggggcgggcgaggcggatgcgggcggcggggagccgccgccggcggcggtgatgacggcggcggcggaggcgttggcggggcagaggtcgctgccgacgccgttcctgacgaagacgtaccagctggtggaggacccggcggtggacgacgtgatctcgtggaacgaggacgggtcgacgttcgtggtgtggcggccggcggagttcgcgcgggacctcctccccaagtacttcaagcacaacaacttctccagcttcgtgcgccagctcaacacctatggatttaggaagatcgtgccggaccggtgggagttcgccaacgactgcttccggcgaggggagaagcgtttgttgtgtgatatacaccgccggaaggtggtggcggcggctgccgcggcgccgccgccgccgtcgccggggatggcgacggcagctgccgcggtggcttcgggagctgtgacggtggccgcggcgccgatacctatggcgctgccggtgacgcgggcgggctcgccggcgcactcctcggaggagcaggtgctgtcgtcaaactctgggtcgggggaggagcaccggcaagcgtctgggtccggctctgcgcccggcggcggcggcggcggctccgcgtccggcggcgacatgggcgaggagaacgagcggctccggcgggagaacgcgcggctgacgcgggagctcggccacatgaagaagctctgtaacaacatcctcctcctcatgtccaagtacgccgccacccagcacgtggagggctccgcggggatatcctccatagcgaactgctccggcgagtcgtcggaggccgttcccccgccgccgcctctccccccggcgatactcgatctaatgccctcgtgccccgccctggccaccgccgccgccgctgcggggctcgccatagacggcgagcccgacccgagcgcgcggctgttcggcgtctccatcggcctgaagcggacgcgagacgacgccgccgccgccgccgacgaagacggcggcggcgaggatcaggccgagcacggcggcgcggacgtgaagccggaggcggcggatccgcatcccgccggcggcggcggcggaagcagcacggaggcgtcgccggagtcgcacccgtggcccatataccggccaacccccatgtaccacgcggtcaggcccacttgcaacgggccggacagggccgggtccgaccaagacgggtccagctccagcgtaagatccatcaggatgccggtgcacagtttggtcagttttacaagtgttttaggtgttagtgccaaaaatggtggtgacatagggcggaagcactagtaccagctgtgcagaaagtcctcctattcctcaaatgcattctcgtgtagatacacgagcgaaggtttctgaaatagatgttaattcagaacctgctgttacagaaactggtccatcaagagatcaancctgctgaagagcctcctgctgtcacacctggtgcaaacgatggcttctggcagcagtttcttaccgagcagcctggatcatcagatgcacatcaggaggctcaatcagaacggcgagatggaggaaacaaggtggatgagatgaaatcaggagatcgacaacatctttggtggggcaaaaggaacgttgagcagataacagaaaaacttggacttctcacctcaacggagaaaacctgacataattttgtttttctttttgtagatgaaaaactattaattcaggaacgctgacattggtgccttcctcagtgagatatgttgactaacatctatttcgcagtgtaccgtattttttccatcatgtaccgtaatgtatcatagtgccatacattcatctttggtccattgacactttctgatatcattgtgcgtgatttctaaaatattctcaagtttggttaaatgttacagattctattt

SEQ ID NO: 83916 - DNA, 374 bp, Oryza sativa
  unsure (1)..(374): unsure at all n locations
  Clone ID: PAT_MRT4530_83201C.1
aaagcaggttagaaacttctttaattgtttgcagactttcttgggtagttaccaacttggcgacttgtgttaaacacgtttacaatcatcatgtgcacgccttctggttctgtatgaacatttagtaggaaacatggaaacaaagggaaaatggtaataaacttagagacgctcatatgctgaaagaaatagacaggtcacattgtaaatctaagttgtcaaggttgctttcaattatgaatggagtgcctgagcatctagcagcagttggtgtttctgtggatttccttttcatcttttctcgatactaatcaatttatgttccattgnctgtaacatgtgctttgctactcaattgtttgctgggtcaaatg

SEQ ID NO: 83917 - DNA, 1153 bp, Oryza sativa
  Clone ID: PAT_MRT4530_83202C.1
tagttgttaatattattatcttcatcctgggtcccacacgcataggcagagagcaatcataacttgggtcaaagcgattaaccaggcgaagcaaacaccaacaccaaaaaggggaaagcaagcaaatcgcaagcaatcgcgcggcgtcgccgactcgccggcggcgaatccaccgacgagcaatccagccccccaatcccgccgccgcaccaccgcgcatacgatccgccaggaaggaaggaatggcgtcgtcttcggatccatgggtgagggagtacagcgaggcgtccaggctcgcggatgacgtcacctccatgatcgccgataggggttcgctcccgcagtcggggccggagatcatgcgccacacctcggccattcggaggaagataaccatcctcgggactaggctcgatagcctcgaggccttgctgtccaggattcctcccaagtccatcacggacaaggagttgcataagcgacaagacatgctttcaaatctgaaatctagagcaaagcagatggctacaagtttcaacatgtcaaactttgcaaacagggaggatttgcttggtcagagtaagaaagcagctgatgatatgagtagagtagctggtttggataaccaaggaatcgtttcacttcagaggcaagttatgaaagaacaagatgagggtcttgagaagctggaagagacagtactgagcacaaaacatattgctctagcagtcaatgaagaacttaccctgcatacaagattgattgatgatttggatgattatgttgatgttacaaactcacgtcttcagcgcgtgcaaaagaggcttgctattctgaataagcgcgtcaaaggtggctgctcgtgcatggccctgctgatatctgtcgttgctatagtgtttcttgcggtcattgcttggcttctcatcaagcacctgtaacctgtgtctaactcaaatcagtttgaaatgtgcagtctttcaaagatgtggatgctcccatctcatctctgtttcgtgagagtgtggaaaatggaatataattgcaacaaatcttcgttcagaagatgtgcaaaaagtatgttgcaacgttgcattgacacttgccaacaatttgtatagagcgtattgcctttctgtcgtaatcttttcac

SEQ ID NO: 83918 - DNA, 339 bp, Oryza sativa
  Clone ID: PAT_MRT4530_83203C.1
atggatggatggccgcaggacacaggaggacacgccactgccgtcgccgtcgacggccatgaggtgtccgggcccacatcgccggatcagacagcgagcctcggcaacacctgtccacggcccattgaatttgcagcagtgcagctgcagctgcagctgcaactgcaagcagaggtcgccgtccagtttgccgcatcaggccaggcaagcgcctatgagcccgcgggcaccatatctggctcctgtgaacttgtcgtgttggttctaccgtgtttgaggcgatggagctcgaggctggccgctagtccaccattggagaagacgtcgaacgagcggtga

SEQ ID NO: 83919 - DNA, 491 bp, Oryza sativa
  Clone ID: PAT_MRT4530_83204C.1
caacaagctactcttcttcttcttctacctcctcacccctacccattctctctctctctctctctctagctagctagagcagcaaccaaccatggagccttcccccgacgcgccacgcgccggggcagcggaagagcagcctggtccgtcctcctcggcgtcggcgccggcgcccgcggcgtcgtcgaacgaagaagaagggagacatcagtcgcaggcgcagcagcaggtgcaagaagcgcagccgcagccgctggcgcagcatgcgccggcggcggcggggctgagcaggtacgagtcgcagaagcggcgggactggaacacgttcctgcagtacctgcggaaccacaagccgccgctgacgctgccgcggtgcagcggcgcgcacgtcatcgagttcctcaagtacctggaccagttcgggaagaccaaggtgcacgccgacaggtgcgcctacttcggcgagcccaacccgcccgcgccgtgcgcct

SEQ ID NO: 83920 - DNA, 306 bp, Oryza sativa
  Clone ID: PAT_MRT4530_83205C.1
atggagctcttgatcaccatcaagcacttgcattttgatgactcctacttcgcacgatcagtgttgtacttctgtactattggagcattgtccaacgttctcttgttaaaagcatcttcactctcaccttctgccctcactggagcaatagctcatggggcaagacttggagagggtgaacctgagaagattgtcccagcggccgaagcactcttaatggcttgtgtcaaactgtcgaatacacgtgtgcctcttgccatatgcgctaatgttgaactgagaggaactgagaggttgtttggttga

SEQ ID NO: 83921 - DNA, 175 bp, Oryza sativa
  unsure (1)..(175): unsure at all n locations
  Clone ID: PAT_MRT4530_83206C.1
aacnncnggagcgcgaggccaacaacatatgnatcggctgggttgagttagaacacaagcacaaaagattacatggtttggtacgattagaacaaaaaactttagatagggcaaggttgtgccccggaattaacaatggtattggtataggaaggaatcaatggagctaactaag

SEQ ID NO: 83922 - DNA, 258 bp, Oryza sativa
  Clone ID: PAT_MRT4530_83207C.1
atggccgtgtcgcagcacgccgaggacatcaagctgggcatgctcgtgcacgagtaccaggtccccttcgttgccttcaagctcctggacagtggacacctcgtgcagcaagcacaagcgcgcgtcgacgccccatcgaatagctcatgctcggctgcttcgatgacatcttgcttaagtgataaagggtcgttccaggacgggcacctctgccgcctcctcgaggaggacgaggaggccaatcggcgggagctctga

SEQ ID NO: 83923 - DNA, 279 bp, Oryza sativa
  Clone ID: PAT_MRT4530_83208C.1
atggagtgctcgttgtcttcgacgccattgctgtgcccccatcatcatcttccccatccatgcggcggccttgaggagatctcggccctgagggacgcgaaggggggcggtgggagttggagcttgtgtgagggtggcacgcccttcgctgtgcacaaatttgccgccaacatgccaggtgacaaggttgtcccaaccgttcaccaccactgttggtcgtctcctctctatgtcagccgcaccaaggtgaggcgccgctgccgcccctcccccacgtag

SEQ ID NO: 83924 - DNA, 285 bp, Oryza sativa
  Clone ID: PAT_MRT4530_83209C.1
atggcggctatcaagaacaacggtgccatggttctgtgttttgcaactctgtttgctatgtctgttgttttcatgtcttgcgatgcaacaggaaggcataatgctggtgttctggacgatgctggcgtgttgtgcttcacttggctgaactgcacgaatgcttcatgccaaaaagaatgtaaggctggcaaatgggatgctaagaaaagcagttgcggcgcaagcgacgtttgctgttgccgagctgcaaagttgttggtgttggatgagcaagctgttagatga

SEQ ID NO: 83925 - DNA, 321 bp, Oryza sativa
  Clone ID: PAT_MRT4530_8320C.1
atgggctctctctcctttctgtcatgcctctgtctgcgttgcgtcaccggtggcgtcaagcacatcaggcattcatgcgttgcccaagggcctctgatgcccacctgtggcttaatccaatcttatcagcacaagatcatggcacattggcaccagattgtcagattgatgaacatcacaatgcaaatgtttcagttagtatttagcacagtgcctgacggtttcatgttgatcagaggaaacaagatgggagttgagttcagggtaatagcagcagaagcagcagcagcagcgatgcaaagaacagcattagcaaactga

SEQ ID NO: 83926 - DNA, 718 bp, Oryza sativa
  unsure (1)..(718): unsure at all n locations
  Clone ID: PAT_MRT4530_83210C.1
gcacgaggctcaaatccgacgcgctctcccaatcgtcgtcgttgcctcctccactccgcctcggtcctcctcgcctcctcgctcctccttgcgtggcgccgctccgccgtcgtccccttgcttcgctccccctctcctcctccctcgctcctccccgcgtggcgcacgccgccatcgtccccttccgccgccgtcgtacccttccaccgctgcccggacgccgccgcccatacgtcgccatcgtccccttccacagccggagccgcggtcttccccatcggccacacaaatcgcgccatggcaactcacaaaattccccacgcgtggaccaccaaggctccatcgcgctaatcccgcggtggctcccctaatcacgataacgccgccgccgcgcctttgaacgttgttgcgccatccgtcatcatccgcacttccgccgccgtcgtcaccgcaatcagtatcctggtggtccagggtttccaccagtgccgctgccccgtctcgccctggttgtgcatcctcccaccagcgtcgcagctccgccatcgccctgcaatcggtgcctcagtggtccagggctccgctggcgacgccaccccgtcgagccacggtgggtcaagccttccgccgacactgagcctnncatcttgtcgctgctctgtgagtcctccagtgttgccaccgttggaagaagatagactcagcagctaggcctccc

SEQ ID NO: 83927 - DNA, 195 bp, Oryza sativa
  unsure (1)..(195): unsure at all n locations
  Clone ID: PAT_MRT4530_83211C.1
cttctcgcggcgaggcgatgtngtcgtcggcgtagaggcgggtangtgggcgcgcagcgcgtgtcgcatcctcctaccggtcatcttcctcgccnncgtgntctacttgctcctctctccaccctcctctccgnctttcttcttcactcttcccacctccagggaggagtagccgtngggtgcggggtcgcgggt

SEQ ID NO: 83928 - DNA, 262 bp, Oryza sativa
  Clone ID: PAT_MRT4530_83212C.1
atccgccactggcggtggcggtcatggcgacgatgaacagcaccagcccgacattggtgcgctatattggcatcaggccatgcaggctgccgaagaggcagcaagagatggggacaacagtgcagtcttgtgcacgccgagcgccccgatcttgcgcggcgccgcgtgcacaccgagcaccccgacgccggcgccaccgaagctcgcggcggccatggttggatggacaacgacagtgaagattgaacatgggaagagataa

SEQ ID NO: 83929 - DNA, 1931 bp, Oryza sativa
  Clone ID: PAT_MRT4530_83213C.1
gaatggcggccggcgtcgcactgcacctgcacctacaaggtgacgcggccggccgccggataagcggcgaagctgcccaagttcttctccttgggctgcttctgcttctactggtgagttcagagttcagactccaacttgggtcagatctcgtttccatgactcccatgtacccatgtattctgaatttctgatcctagctcagaattgtttttttctctttttgtcatttcctgttttgatgaaacatgcgcatcattcaagtattataaatttataattggtgccagccccaaatttgcggaggttggtacgaataggattgtttttttgtcctcatgtatttgtacttttgtagtcctgttgaatccactaaagactgctgcttattgctgaactgccacatattgctgctaggaactcacaaattttcaggagttctactcgataaacttatcagcatattggccggccagctactgcacctgcacctacaagggatgaaggtgaaggcaattagagtccacaagattggtggtccagaggtgctaacttgggaagaggtggagattggggagcccagcgagggggagatccggatcaagaacaaggctatcggtgtcaactatgtcgatatttattaccgtactgggttgcatcaagaacctctcccgtttgttcctgatctggtgtatggggattctgataacaaaattccaacttactttgttaaatctaatgtcagttcatggcccggagaaaattcttggttgccatctgagcttatagagtatactggcaaggaagcagtaggagtagtgtctgctgttggacctggggtaacaggtatcgaagttggcgatgtagtcggctatgctgatactccaatgggcacttacactgaagaacagattataccggcaacactggccattcctattccaccttcagtggaccacattactgcagcatctgttttactcaagggaatgactacatatgtccttgtgaaacaagcctttaagattcaggcaggccatactgtcctagtccatgctgctgcaggaggagttggctctctcctttgtcagtgggcgaatgcccttggtgccaccgttatcgggaccgtttcgacacaagagaaagcaatccaagcagccgaagacgggtgccatcatgtgatcatctacaccgaggaggatttcgtagcccaagttgctgaaatcacatcgaggaagggtgttcatgttgtttatgatgctgtcggtaaagacaccttcaagggatcaatggagtgtctgatgccgcgtggatgcatgatctcttatgggcaatgttcagggaggcctgaccctgtaccagtgagtgatctggcgtccaagtccctgatcttgggcaggccagggatgaggcactacaccgccacccgcgacgagctgctgcacgccgccggcgaggtcttcgccggcgtggcggctggcgttctgcgcgtccgcgtcaaccatgtctacccgctgcatgaggcggctcgcgcgcacgcggatctcgaggcacggagaacctctggatctgtgtggtatcagagcccaaggtttggaacctggaacaatttccatgggtcacatggtggagaggccaggcccaatgtgacctgggtggcctacggttggtgggccgggctgcgcactccaacaagtggtagactaacctttataacaagtggtgagaacaatttccatgggtcacatggtaacaaagtggtatcagagcccaaggtttggatcccggaacaatttccatgggtcacatggtggacaggccagttgcgactaataagtacaggcaaacgagatggaggtgatcatcattctgataaacctcatgctggcatgtcatttcaagcggtgaacttgaaagatttaacagtttag

SEQ ID NO: 83930 - DNA, 312 bp, Oryza sativa
  Clone ID: PAT_MRT4530_83214C.1
atgccggcggcgacgcctggatccggcggcgggggatcacaggcacgcgatgaggtggtcgcccccctgccgcgccgccgcctaggctgccgcctcctgttcgacgaagctgatgccgaagagaggagctgcattgatgtgcgctcgatccgccgccgaggatgtagcccaatccacgttgccgtcgaggtcgatgccgccgctcgatctgttgaggcagacctccgcgtcggcactgccgaggtcctcgtcacatccggcgatgaggagcggaggatgatgcaacaggaagggggcaagggtggcgcctga

SEQ ID NO: 83931 - DNA, 1149 bp, Oryza sativa
  Clone ID: PAT_MRT4530_83215C.1
atgcttctccctcgcgacctcctcctcctcccatggcggcgcgccaccgccgccggtgaggccatcgcccgccgcctcaaccaccaccgagccccgcccttctccgatcccgacgacgacccgccgttcacgcggctcgcggagcgcccgcctcgagctccctcgaagaagaagaagaaggaggaggaggaccagggcggcaggatcaggccgccggagccggcgagctccgacctgccgttcgacttccggtactcctactcggagacggacccggcgtggaggcccatcgggttccgggagcccacccggttctcgccgttcgggcccggccggctcgaccggccatgggacggcgtcgccgcggcggcggcgcgcggggagggtgcgggtgcggcggcgacgagcagggaggaggttcttggcgagccgctggcggaggaggaggtggcgcagctcgtggagaggtaccggcacagcgactgctcccggcagatcaatttgggcaaaggcggagtgacacacaatatgattgatgacatccacaatcactggaaacgtgcagaagctgttaggatcaaatgcctgggagtgccaactcttgacatggacaatatatgcttccatcttgagtgcactattgtgcaggataaaacaggtgggaaagtaatctaccgtaacataaacatccttatcctataccgtggtcggaattatgatccgaaacagcggcctcaaataccactaatgttgtggaagccacttgctcctatttaccctaggcttgtgcaaaatgttgctgatggtttgactttcgagaaaactaaagaattgaggaatacgggattaaattcttcacctcttatgaaattaactaggaatggtgtttatgtcaatgttgttgatagagtgagagaggccttcaagactgtggaagttgtgaggttagattgctctcatgttggtagcagtgattgcaagaaaatcggtgtgaagctaagggatttggttccatgtgttcccctattatttaaagacgaacagattattctctggagaggaaagctatctggaatttggagttgtctgaaagagttgccagtgttgcatgagatgaagaccctgctctatttgagtgctgagcattga

SEQ ID NO: 83932 - DNA, 422 bp, Oryza sativa
  Clone ID: PAT_MRT4530_83216C.1
tttggttttttaaatttttttgtttttttttttttttttttttttttttttttttttttttttttttttgcttgttccaaaacacccataaacttctgtaccaaccgtttattgcccaccaaacggtgtttacatggcagcccaaaaaaaaacaatttccctaaaaaagattccttcaaaaaagtaaaaactaatcctaaatcctccctggcaatattggctatccccctggctctctcttttaaaccttgtcagctaaaccatgttccaaaaaatagttaccttttcaacaaagacaaatttattaaaaaaatatatttaattattggctgggggaaaccaatttaggattataaaaattaccatttttggctttaaacccaggtcaacccaaaaaaggtggacttttatcaaaaacaaaa

SEQ ID NO: 83933 - DNA, 419 bp, Oryza sativa
  Clone ID: PAT_MRT4530_83217C.1
caaggaacacgggtgggcggctcgggagcggaaatcttagacgcccgcgcgcggtaataccggccctctcctccacctcgccaccgccggagcttgctggcgtgctgccggccagctgggaaggcggcggcgaggccagctgagctcggcggcatcctccttggcacgaggaggttggggcaaagccgacagcgtcaacctcagtggttggaggcgaagatggcagggcatcgtgtggaggcggtagatccggccctcccacccccgaatctggtccgtgcggcgacggcgcgagctctagcgactgcgtggcgaccgtggcagggccactgcggcggcgcggtggcccgtggtggcagcgcggcggctgggcctcggtctggctctggggtgggggcgggtcgggctggcagcgcgcc

SEQ ID NO: 83934 - DNA, 1203 bp, Oryza sativa
  Clone ID: PAT_MRT4530_83218C.1
atggggcaccactgctgcagcaagcagaaggtgaagcgagggctgtggtcgccggaggaggacgagaagctcgtccggtacatctccgagcacggccacagctgctggagctccgtccccaagcacgccgggttgcagcggtgcggcaagagctgccggctccggtggatcaactacctccggcccgacctcaagcgcggcaccttctccgagcaggaggagcgcaccatcatcgacgtccaccgcatcctcggcaaccggtgggcgcagatcgccaagcacctgccagggcgcacggacaacgaggtgaagaatttctggaactcgtgcatcaagaagaagctcatcgcgcaggggctcgaccccaagacgcacaacctcctgccggcgtcgaagacgctcctccatggcggtggcggtggcggcgctgcaaaccctagcggcaacggcctcgcgcagttccagtctaacaacggcgcggcggcggcgggcaccacgccgttcaccatcagctctccggccaaggcggccgcctacgatgtcgcgccgccggcgttgtacgacgtcgtcctccctgctaaccccgccggtggaatgctgatggcgcatgatcaccaccatcatcaccaggtcgccgcggcggcggcgccggtgggatacccctacgccgaccacggcggcaacggcggaggcgtgctgatgagcttcagggatcagaacgccggcgtccacggcgccgcctccatggacttcatgaacggctcctcctcgtcctcttccatggagcagctcggcggcggcggcggcatgtcgtcgaacggcaacggcagcttcagcgcgagcatggcggcgttcatggacgaggaggcggcaatgtgggccaccgccgtcgcgccgccgggcatgggcggcctcgccgggatggatcaggtggcgcagcagcagcagcagcagcaagtgctggtgcaggatgcggccgtgggcgttgcgccgacgacgctgatgatgcacggcggcggcgccgccaccgccggtgcaatggtggtggacaagagcgtggagatggtggacgtctcgtcggcggtgtacggcggcgcgacggcgacggcgttcgatctagacctgatggtggagtcgtgcgggatgttctgcggcggcggcggcgccggcaacgccatggagcagctgcagtgggactgctaa

SEQ ID NO: 83935 - DNA, 507 bp, Oryza sativa
  Clone ID: PAT_MRT4530_83219C.1
atgacagcggcggacggcgcgcacggcggtgcggccgacgatcggccgccccgtgccccatcaaaccgccgccgctgccggcctccacctttacgagcgggcgccggcgtggctgtacatcacgccgccgccgcctccttagctcgccgccgcctctccccacagatcggcgccgacccggaccggacacgccaccgccgccgccctccagcacaacgagcgggcgccggcggggctatgcttgacgccgccgccgccccctcagctcgccgccgccgcacgcacgcacgagtgagagagagctgccatggtgtttacgccgctatggcatcttgctgttgcttgcctgaaacagcccgaagcggcacccactacgcagccgcccaattatatagtaatgtttatttgcatcaagaagctacggtgaaggaactgtatattgaaggaagagtggaattagagtttagaagaaatttatcaaaggaagataaacaagatttggagatg

SEQ ID NO: 83936 - DNA, 145 bp, Oryza sativa
  Clone ID: PAT_MRT4530_8321C.1
ggaagaaaggcaacgctgctctcctttaatctttttgaagaaaaagttcttgagtgccccactaatacactcgtgataatcaataattaaaaaactgggttgcccatgctacagtaaattgcccttttgtaaaacaaattttacc

SEQ ID NO: 83937 - DNA, 939 bp, Oryza sativa
  Clone ID: PAT_MRT4530_83220C.1
atggagttcaccccaatttcgccgccgacgagggtcgccggcggtgaggaggattccgagaggggggcggcggcgtgggcggtggtggagaaggagcacatgtttgagaaggtcgtgacgccgagcgacgtggggaagctgaaccgattggtcatccccaagcagcacgccgagaggtacttcccgctcgacgccgcggcgggcgccggcggcggcggtggtggcggcggtggcggcggcggggggaaggggctggtgctgagcttcgaggacaggacggggaaggcgtggaggttccggtactcgtactggaacagcagccagagctacgtgatgaccaaagggtggagccgcttcgtcaaggagaagcgcctcggcgccggcgacaccgtgtcgttcggccgcggcctcggcgacgccgcccgcggccgcctcttcatcgacttccgccgccgccgccaggacgccggcagcttcatgttcccgccgacggcggcgccgccgtcgcactcgcaccaccatcatcagcgacaccacccgccgctcccgtccgtgcccctttgcccgtggcgagactacaccaccgcctatggcggcggctacggctacggctacggcggcggctccaccccggcgtccagccgccacgtgctgttcctccggccgcaggtgccggccgctgtggtgctcaagtcggtgccggtgcacgtcgcggccacctcggcggtgcaggaggcggcgacgacgacaaggccgaagcgtgtccggctgttcggggtgaacctcgactgcccggcggccatggacgacgacgacgacatcgccggagcggcgagccggacggcagcgtcgtctctcctgcagctcccctcgccgtcgtcctcgacgtcgtcgtcgacggcggggaagaagatgtgctccttggatcttgggttgtga

SEQ ID NO: 83938 - DNA, 457 bp, Oryza sativa
  Clone ID: PAT_MRT4530_83221C.1
ttttattttgataatggaagagtaaactccagggtatgcaactgcttgcctgtcaacgaagttcccttctactcctggctgtgtgattgtcgacataccataccggcaaagcaacggtgcgggttcgataccatcatcgttcccggggcttggtcgatttggaaggaaaggaatggttgagagtattcgagcaccgccaacgcagcgggactgagggcgccaaggcaatgtcagaagaagccacactttggagattggcgaggactgcaatacctcaactaggtctaggtcacacaatagttttgggagatcagtgatttagtgtgtctttttccgtttctccttttctcctcccctcctctctcctccctgttcttctctgtctgtcttgtattactttactcctcttaatgcaatgatatgcaagtcttttgtgtatttcaaaaaaaaaaaaaaa

SEQ ID NO: 83939 - DNA, 974 bp, Oryza sativa
  unsure (1)..(974): unsure at all n locations
  Clone ID: PAT_MRT4530_83222C.1
atggcctcagatccgcttgatacttccatttccatggagataaccgcgttttggttgtggctcgagggaaattatgaccatactgattatcttgagcgcatagactcatttgatgatgatcactttcaggcaattgcttttgtggccaaaagttttgtcgaaaccctaaatctagaccactgtgatttaagcaatacaagaagtccctttcaacaagaagcaattgaaggaattgctttctatctcaacaatgtttgctacaaggccttaaaagatcttcatggacacgaagagacggaggagtttccagatcagatatgtcgagacaatgaaggaaacttgaatgatcaagttcctttgagcacggacgatcttctatccaagatcaaatctctgtatgcaaacaatcaagaaaatcatggagaaagctctagttatagaagcatccagtatccaagaaaccatatcctccaagatacaaaagtggcaatagacgagtatgcatcatcttcgtgtttggtgtcattcttggataacctgagtttaagggagaagcatagtgatccagtagtacaacaaccttctgatgttccaaatgatgaaagaactttatttgtgactttctccaatggctacccgttgtcaaaagatgaactatacgatttcttcatgaggcactacggagatattgaagatataaccatagaagagccacctgaacctaggccaccactctttgcacaagtcacgttttactcgcaattgacactgctccgtgtccttgatggcaacaagagagtcaaattcatgacaagagggaagcatctgtgggctcgacaatttgtgccaaagaaaaagaagtcaaagaatgatgaggcaaacctgattgactaagtactggagtacttatgttntaagcatattggttggaacaaactctgcacttcttaaacttattatcatccttatggatc

SEQ ID NO: 83940 - DNA, 376 bp, Oryza sativa
  Clone ID: PAT_MRT4530_83223C.1
ataaagtgacggtagatgatgtgtcaatttttagagctagctatttgactatactattaaacttgctctttggctgagttcatttgtgcaagtgcaaaactttctctcgtttttgttgacttttctcaaactattaaatggtgtttttttcgtaaaaaaaatctatagaaaagttgtttgaaaaaaaatcacattaaccgattttccaagtttttcttagttaatacttaattaattgcgtgttaatctgttactccttttttacgtgcatgcttcccgaagtattttaaaacgttgtgttttctatactcctttaaaagaagataatggttgttgtagccattttaccatctccacctattgttttgtttatttt

SEQ ID NO: 83941 - DNA, 490 bp, Oryza sativa
  Clone ID: PAT_MRT4530_83224C.1
gtaattatcgccatctcgcatggctgcgccggcgtcgccgcgcgagcttgcggcctcgtcggcatggagcccgctaaggttgccgaaatactcaaggatcggccgctgtggctgcgcgattgccggtccatggatgtggtgaacgtgctccctgctggcgccaacggcaccatcgagctgctctacatgcagctctatgctccgacgacgctggcgccggctcgcgacttctggctgctgcggtacacctccattctcgacgatggaagcttagtggtgtgtgagagatcactcagtagcaagcaaggaggcccaagcatgccacttgtccagccttttatcagaggtgagatgcttcccagtgggttcttgatccggcctagcgatgttggaggcagcgtgatacacatcgttgatcatatggacctcgagccttggagcgtgcctgaagttgtacgacctttgtatgaatcttctgccatggttgcgc

SEQ ID NO: 83942 - DNA, 682 bp, Oryza sativa
  Clone ID: PAT_MRT4530_83225C.1
aagaaaaggtggcaatctttgcagagacaagatctaacacatttgtaactgcagaggtagttcataacgtccatcgataacctacacacaatatgctgtttgatgcctgaccccttcagaattgagttgatgaagttcgtcgcagtgagctctttgtaggcatcaccagtgcagcaaatagaagatgaattacaagacttacctgtgatgaattacaagacttaccacgcatgacctgtcaaataatccattgatgaagtgagtgtagaaactcaagagagtaccgctgtaaatgcagacttaacatcaaggctagcacaaatagaagatgaattacaagacttacctgtgagaatgaagataagatgaaaagttgaaggatattactgttattgacaaggacatgggaggaccagagagcttacccagtcattacaatttagagatgaaccacagatttgcatatggaaaatgatataaatgatataagaggtttgcaagatgatctgagatctagcaatgagaatttgctaagagaagaaagactgatataagagctttagtctatccttgcaagcctgacttcgaaacttagtcaaaagagtatggccgtgcttttcaatttcttatgtagtcttagctgcctccaatttgttcacttgttggatagattaggtaacat

SEQ ID NO: 83943 - DNA, 572 bp, Oryza sativa
  Clone ID: PAT_MRT4530_83226C.1
catgtattgacgaacgcaatgtgcttgctggccgaatagacatgaacacatatcactgagagggagtgaaacagtgttgacgagtagcctgcttttgggtgatagaaatagcattgtagtagggtggtaatagcaagaagccgaaaggtaaggatcaggctataacgttggggcattggcaactcaattaaaaggggtagggtagttgtctggttgttcatgttctgatttaactcattagtgttgtgctaaatggaaggtcaagctgctctacatgcagtcttcaactctatgctccgacgacgctggcgccggctcacgaattctggctgctgcggtacacctccattctcggtgatggaagcttagtggtgtgtgagagatcactcagtagcaagcaaggaggcccaagcatgccacttgtccagccttttatcagagatgagatgcttcccagtgggttcttgatccgaactagcgatggtggaggcagcgtgatacacatcgttgatcatatggacctggagccttggagcgtgcctgaagttgtgcgaactctggtatgaatcttc

SEQ ID NO: 83944 - DNA, 1028 bp, Oryza sativa
  Clone ID: PAT_MRT4530_83227C.1
gctatggccttgccccagcggatgatggggccaaggatcatagtaaataaatattttgatgttatcaaggataatccgacatggaaagtggaacatattaagaagtcagttctaaaggacatgcttgttgatgtgcccatttcaaagtgcaagcgggccaaagccttagtgctacaagaagcattggataaaactaggggagagtctcaagagtgtatgattatcaattggagttgttaaggagcaaccctgggagtattgtagttgtgacccttaatccagatatacttgacaagaaagtatttgagaggttttatgtatgctttgatgcttgcagaaaagggtttcttgctggttgtaggagagtaattgggctagatggttgtttcttcaagggtgcttgtaatggcgagctaatatgtgctattggaagagatgctaataattagatgtatcccattgcatgggcatcagtggagaaagaaatatatgattcatggtattggtttcttgggtagctaaaaaagatctcaatataaatgatggaggtgaaggatgggtgataatttctgaccagtaaaagggactcataaaggcagtggctgagcttatcactagagtagaacataggatgtgtgcaaggcaaatatatgcaaactggagaaaaaaggacactgaccagaagcttcagaaaaaaatctaaaactgtgcaaagtcatcttgtagggagcttttcaactataatagagcaaagctagcacaagacacccctcaaggagccaaggacatgatgaccaccacacctgagcattggagcagggcattcttccagctagtgtcaaattgtgactccgctgataacaacatgtgtgagtctttcaacaactctattatggattcaaggttctttctagttatctctatgaatgaagccataagattcaaggttttttcaacattagctgcgttgttctcctctacgcgtaggtgccctccaaaagtccggccgagtcccctagcgccggcga

SEQ ID NO: 83945 - DNA, 2061 bp, Oryza sativa
  Clone ID: PAT_MRT4530_83228C.1
atggcgaatcatctatacataacagggactgcatgtgaatctcacgaacaaccagcgacggcagcgaaaaggcacttggacatcaggcgctgtgatggcttgacaaaaatggttgaggagttctggtttccagcaagaggcttgtggacgaacgtcgtcggtgacgaaaaccacggacgtcggccctcttcacggcatggcgagcaatcccggcgagccgcctctctccccaagccgcggcaccgaggggatcttggacggaggccactggccgtgccgcaaagggcgtggctgaggaccgcgctaccgctgccggatgacgtcatgcaggagcaggagctccctcccctgcttccctatgtgttcacaccacagaaagaatggattggagtaaatcagcagcggtgtggattgtgctctgacctcggcaggggcggatacaagaacacagcgatgagatccggtgcggtttgtggcggaccaagcatgccggccgatggagatggttctctgcatctacgcattccccaccaacatgccgcccttcaggtcaagctgctctacatgcaggcaagaacagacaagcctgaaaatttttgtggcaaattcttagctcaacctgaaattccgaagctgaaatctgtattcagtcttcaactctatgctccgacgacgctggcgccggctcacgacttctggctgctgcggtacacctccattctcggtgatggaagcttagtggtgtgtgagagatcactcagtagcaagcaaggaggcccaagcatgccacttgtccagccttttatcagagatgagatgcttcccagtgggttcttgatccgacctagcgatggtggaggcagcgtgatacacatcgttgatcatatggacctggagccttggagcgtgcctgaagttgtgcgacctctgtatgaatcttctgccttggttgcgcagaagatatcgatggcgtcatgcaaaattcagtctttacgctgcctgaggcaggttgcctacaaagatacccgttctgtgatcacaggatggggaaggaagcttgcggctttgcatgctctgagccaaaaagctcaccacgtaggactcctgaacagcagatgcttcttggttcttgccatgaatcttcagttcaaaagtgtgaaaaataattttgcatgctctcttttcagaggcttcaatgaagttctcaatgggcttgcggatgatggatggtccgtgatcgagagcgatggcatcgacgatgtttgcatctctgtcaattcatccaaagtgaccggttgcaatgcaacattcagcagtggactcactattgtcagtaccggtgttctttgtgccaaggcatccatgctgttgcagttcctggaagttatcaagctaggaaacaccagaaactaccaagatacactggtgcaccgtgatctgttcctcttgcaggacacatctagctcgaactgcatgctggatcttgcttccatgctcgaagcagcgacgccatggagcaggatcagcggcatcaattgcagcggctgtgctgctgcggcgagctccaaggcggtgatgacgatcgcattccagttcgtgttcgagagccacctgcagggcagcgtgcccgccatggcgcagcagtacatgtgcagcatcatctcatcggtgcagaggattgccgtggtgctctcatcctcccgcctcgtccctcccggcgttgccgccgccacgcagcacgcgccggcgactcggtgctgcccagatggatttgccagagctatagatgccaacagcagcagtgaatcggttctgaaagcagtttggcatcatcccagtgccatactctactgctctctcaaggtgatgccagtgttcacgtttgcaaaccgaagacggaggcggcgccaggcacaagatggcggaggaggtaagtcttgtaattcatcttctatttgtgctagccttgatgttaagtctgcatttataacggtgatgcctggtaagtcttgtaattcatcacaggggtcaggcatgagagaggatattgtgtgtaggtga

SEQ ID NO: 83946 - DNA, 651 bp, Oryza sativa
  Clone ID: PAT_MRT4530_83229C.1
atgcattccccatcgctcttgctgatcctgtgcgccgccgtagctagcttcctgatcttcttgtgtggcggggacggcggcgccgcagccgcagccggaggcccgcgtagcgtcaagatggcgtcgtccctgtacgtaccgcagctgacgaggtggcgcgtcgcgctgggcggcgtctcgcgcggcgtcgtcgagcacgaggggaaggtgcacctggtggtgtcgcgcggcgaggacgacgaccgcgtcgtcgccgccgccgggaaggaggaggagaaggaggacgaggacgaggacccgcgcgagcgcgtggagatcggggggaggctgttcccggtggtggacgagacggaggtggcgctccacggcgggaaggtggtgcgggccgtggagtacggcgagcgccgcggctcccccgcggcgccgctgctgctcacggtgacggaggggaaggagaaggaggtggcggaggtcgtcggcgcgcccgacggcggcggcgtgctgcgggtggtcggctgcggctgctacgccgacccggtgaccggcacggtgcagcacatggtggacgtgcagggctcggaggcgttcgtgctgctcgtgtcggtgcgcgaggagctcggtcgcatcgtgtccatcaagaggctcaactga

SEQ ID NO: 83947 - DNA, 309 bp, Oryza sativa
  Clone ID: PAT_MRT4530_8322C.1
tccggttttataggaatatttgtgcctttgagatatacacctacattattggggttgttcggaatccagtatcactaaatatcactcccaaatcaaataaaaaaagtgcttaaaagtcgcttacaaagtggaatatgctgcctctgttaattcggtgtgatgctactggtagtttccacaatacattggacgccagatataagggatctttcggatggccaaattagcttcatgcctgttctctatgattccgtaggtcccttagtccaaaattttcactcagctggtcactaccttaataagaaaact

SEQ ID NO: 83948 - DNA, 708 bp, Oryza sativa
  Clone ID: PAT_MRT4530_83230C.1
gagcaagaagccgaaaggtaaggatcaggctataacgttggggcattggcaactcaattaaaaggggtagggtagttgtctggttgttcatgttctgatttaactcattagtgttgtgctaaatggaaggtcaagctgctctacatgcaggcaagaacagacaagcctgaaaatttttgtggcaaattcttagctcaacctgaaattccgaagctgaaatctgtattcagtcttcaactctatgctccgacgacgctggcgccggctcacgacttctggctgctgcggtacacctccattctcggtgatggaagcttagtggtgtgtgagagatcactcagtagcaagcaaggaggcccaagcatgccacttgtccagccttttatcagagatgagatgcttcccagtgggttcttgatccgacctagcgatggtggaggcagcgtgatacacatcgttgatcatatggacctggagccttggagcgtgcctgaagttgtgcgacctctgtatgaatcttctgccttggttgcgcagaagatatcgatggcgtctttatgctgcctgaggcaggttgcctacaaagatacccgttctgtgatcacaggatggggaaggaagcttgcggctttgcatgctctgagccaaaaagctcaccacaggcttcaatgaagttctcaatgggcttgcggatgatggatggtccgt

SEQ ID NO: 83949 - DNA, 2854 bp, Oryza sativa
  unsure (1)..(2854): unsure at all n locations
  Clone ID: PAT_MRT4530_83231C.1
atggacgcgagcaagtacgtgaggtacacgccggagcaggtggaggcgctggagaggctgtactacgagtgtcccaagccgagctcgctgcggcggcagcagctggtgcgggagtgcccggcgctggcgaacgtggacccgaagcagatcaaggtgtggttccagaaccgccggtgccgggagaagcagcgcaaggagtcgtcgcggctgcaggcgctcaaccgcaagctcaccgccatgaacaagctcctcatggaggagaacgaccgcctccagaagcaggtctcccagctcgtctacgaccacggccgccacggcgtcgccgccgccgggatgatgcggcgagttcctgccttccctcctcaggccgccgccgccgccggccaccagctcgccaccgccaccgacaccagctgcgagtcggtcgtcaccagcggccatcatcatcagcagcagcagcacaacgtcgtccagccgccgccgcgcgacgcaagcccagctgggctgatgtcgatcgcggaggagacattgacggagtttctgtccaaggccaccggaaccgccgtcgagtggctccaaatgcctgggatgaagcctggtccggattccattggaatcatcgccatctcgcatggctgcgccggcgtcgccgcgcgagcttgcggcctcgtcggcatggagcccgctaaggttgccgaaatactcaaggatcggccgctgtggctgcgcgattgccggtccatggatgtggtgaacgtgctccctgctggcgccaacggcaccatcgagctgctctacatgcaggcaagaacacacaagcctgaaaattctgaacctgaacctgaaattctgaagctgaaatttgtattcgatcttcagctctatgctccgacgacgctggcgccggctcgcgacttctggctgctgcggtacacctccattctcgacgatggaagcttagtggtgtgtgagagatcactcagtagcaagcaaggaggcccaagcatgccacttgtccagccttttatcagaggtgagatgcttcccagtgggttcttgatccggcctagcgatgttggaggcagcgtgatacacatcgttgatcatatggacctcgagccttggagcgtgcctgaagttgtacgacctttgtatgaatcttctgccatggttgcgcagaagatctcgatggcggctttgcgctacctgaggcaggttgcacacgaagatacacgttctgtgatcacaggatggggaaggcagcctgcggctttgcgtgctctgagccaaaagctcaccagaggattcaatgaagctctcaatgggcttgccgatgatggatggtccgtgatcgagagcgatggcgtcgacgatgtttgcatctctgtcaattcatccaaagtgatcggttgcaatgcaacattcagcagtggactccctattgtcagtaccggtgttctttgtgccaaggcatccatgctgttgcaggatgtctctcctccatcactactgcaatttttgcgcgaacaccggtcacagtgggccgacagcaatttagacgcattcttcgcctccacgatgaaaccaaacttctgcaatttacccatgtcccgtcttggaggattcagtggtcaggtcatacttcctttagcacacacgtttgaacctgaagagttcctggaagttatcaagctaggaaacgccagcaactaccaagatacactggtgcaccgtgatctgttcctcttgcagatgtacaatggagtagaggagagcagtgcaggaacatgttcagagctcatctttgcgcccatcgacgcatcgttcagtgatgattccccactgctgccttccggtttccgcatcatcccaatcgattctcctctcgacacgtcgagcccgaactgcacgttggatctcgcgtccacgctcgaagccgcgacgccacggagcaggatcagcggcgtcaatggcggcggcggcggctgtgctgctgctgcggcgagctctagctccaaggcggtgatgacgatcgcgttccagttcgcgttcgacggccacctgcaggacagcgtggccgccatggcgcggcagtacatgcgcaacatcatctcgtcggtgcagaggatcgccgtggcgctctcgtcctcccgcctcgtccctcccggcgccggcgccgccgccgcgcagctctcaccggtgactccggaggcggcgacgctgcccagatggatttgccagagctacagatttcattttggagatgaactcatcaaatctgtagatgcaaacagcagcaatgaatcgattctgaaagcagtttggcatcatccgagtgccatactctgctgctctctcaaggcgatgccagtgttcacatttgcaaaccagtctggcctcgacatgctcgaaacaactctggtggcgctccaagacatgacgctggagaaagttttcgacgatcaagggaggaagaacctgtgcacagagctccccaacatcatggagcaggggatggcgtgcatggagggaggggtgtgcgtgtcgagcgttgggagggcggcgtcgtacgagaaggcggtggcgtggaaggtggtcgacggcgacggcggcggcgcccactgcatctgcttcatgttcatcaactggaccttcctttgatttcatttcattatacaccccaatgcaaaacggatatataatattacaactagtgcaatttacgtacgtaatctcatgaaacagcgtgtacaaatgttttggattttgagaaccncggtgctagtttttgtacggatcgatagtggatacattctctgttcggagtagggataaaaaaaaaaaaaaaaaaaaa

SEQ ID NO: 83950 - DNA, 176 bp, Oryza sativa
  Clone ID: PAT_MRT4530_83232C.1
gctggggtggctcttctgcgggcgatcaaaagggcagtgacagcatgtattgacgaacgcaatgtgcttgctggccgaatagacatgaacacatatcactgagagggagtgaaacagtgttgacgagtagcctgcttttgggtgatagaaatagcattgtagtagggtggtaatta

SEQ ID NO: 83951 - DNA, 3321 bp, Oryza sativa
  Clone ID: PAT_MRT4530_83233C.1
atggcgaatcatctatacataacagggactgcatgtgaatctcacgaacaaccagcgacggcagcgaaaaggcacttggacatcaggcgctgtgatggcttgacaaaaatggttgaggagttctggtttccagcaagaggcttgtggacgaacgtcgtcggtgacgaaaaccacggacgtcggccctcttcacggcatggcgagcaatcccggcgagccgcctctctccccaagccgcggcaccgaggggatcttggacggaggccactggccgtgccgcaaagggcgtggctgaggaccgcgctaccgctgccggatgacgtcatgcaggagcaggagctccctcccctgcttccctatgtgttcacaccacagaaagaatggattggagtaaatcagcagcggtgtggattgtgctctgacctcggcaggggcggatacaagaacacagcgatgagatccggtgcggtttgtggcggaccaagcatgccggccgatggagatggttctctgcatctacgcattccccaccaacatgccgcccttcaggtcaagctgctctacatgcaggcaagaacagacaagcctgaaaatttttgtggcaaattcttagctcaacctgaaattccgaagctgaaatctgtattcagtcttcaactctatgctccgacgacgctggcgccggctcacgacttctggctgctgcggtacacctccattctcggtgatggaagcttagtggtgtgtgagagatcactcagtagcaagcaaggaggcccaagcatgccacttgtccagccttttatcagagatgagatgcttcccagtgggttcttgatccgacctagcgatggtggaggcagcgtgatacacatcgttgatcatatggacctggagccttggagcgtgcctgaagttgtgcgacctctgtatgaatcttctgccttggttgcgcagaagatatcgatggcgtcatgcaaaattcagtctttacgctgcctgaggcaggttgcctacaaagatacccgttctgtgatcacaggatggggaaggaagcttgcggctttgcatgctctgagccaaaaagctcaccacgtaggactcctgaacagcagatgcttcttggttcttgccatgaatcttcagttcaaaagtgtgaaaaataattttgcatgctctcttttcagaggcttcaatgaagttctcaatgggcttgcggatgatggatggtccgtgatcgagagcgatggcatcgacgatgtttgcatctctgtcaattcatccaaagtgaccggttgcaatgcaacattcagcagtggactcactattgtcagtaccggtgttctttgtgccaaggcatccatgctgttgcagttcctggaagttatcaagctaggaaacaccagaaactaccaagatacactggtgcaccgtgatctgttcctcttgcaggacacatctagctcgaactgcatgctagatctcgcttccatgctcgaagcagcgacgccatggagcaggatcagcggcatcaatagcagcggctgtgctgctgcggcgagctccaaggcggtgatgacgatcgcgttccagttcgcgttcgagagccacctgcagggcagcgtgcccgccatggcgcagcagtacatgtgcagcatcatctcatcggtgcagaggattgccgtggtgctctcatcctcccgcctcgtccctcccggcgttgccgccgccacgcagcacgcgccggcgactcggtgctgcccagatggatttgccagagctatagatttcattttggagctgaactcatcaaatctgcagatgccaacagcagcagtgaatcggttctgaaagcagtttggcatcatcccagtgccatactctactgctctctcaaggcttcttcagcctctatttttctttttctgattaagatacagattttacctagatttttataaattcgtttttttaaactgttgaactgtatatttcgaacgaaaaaaatttatatagaagctttaattataagataaatctatttttcaattttaaaataattaaaccttaattagtgagatgttaatgattttctcgttttacctgtccgaacttaatcttttatcttaaactcgaatggggccagtactcaatactgttatgcatggaggattgtttgttatctcaatttatttcagggacttttgaatcttttgtgcagcttgactgaaattttgttgacacaaattcaccttaaagttgacagtgttgcacaccattaaccatttgatttttcatgtaggtgatgccagtgttcacgtttgcaaaccgaagacggaggcggcgccaggcacaagatggcggaggaggtgaacaaatctatgatcatcaggaaaatcaatcaaatttatgttacctaatctatccaacaagtgaacaaattggaggcagctaagactacataagaaattgaaaagcacggccatactcttttgactaagtttcgaagtcaggcttgcaaggatagactaaagctcttatatcagtctttcttctcttagcaaattctcattgctagatctcagatcatcttgcaaacctcttatatcatttatatcattttccatatgcaaatctgtggttcatctctaaattgtaatgactgggtaagctctctggtcctcccatgtccttgacaataacagtaatatccttcaacttttcaacttatcttcattctcacaggtaagtcttgtaattcatcttctatttgtgctagccttgatgttaagtctgcatttataacggtactctcttgagtttctaaactaatcttaaattttttgcgtcatgttctataaactgtaattctatcgcaagcatcttcacatcttccccaagctacatcagtgggttccttatatatatttcacttgcactgagttatttggaagaaggttctttctatcatttttgtacaattttactaaggatattcaaagatgcggaatgtatccacagactatgggagcctgagcatttttgtctttccaagaatcgacctatactctattgaatatggccttttagtatggcagctgctcatcatggtgctgggtccatagcaattcatttttcattttattctggctcatagtatgaacttgaagcgatttgtaccagtaaattatgacgtgcatagaaacaatgtacttattctcagacggtgaaactgaagagcttgagtagaattacttcacaaaaaaaaaaaaaaaaaaaaaaaaaaaaaagggggggggcctgcagcccggggatccacta

SEQ ID NO: 83952 - DNA, 637 bp, Oryza sativa
  Clone ID: PAT_MRT4530_83234C.1
aagcttgtgttaagaactggaccaaaattaaaacacatgcatctacctctttatttggttgtccaattggcactctattatttacatatcttggtcttcccttgggcacaaaaccaccaaatgtaattgactttgctactctaactgatagaattgaaaggagattgccttcggccaccacatttttatcctatggagatagattaacattagtaaattcggtcttttcatctccaccaaatgtaatatatgtgttctttgtctacctgaatctgtgaaaaaagagtattgatagagttagaagacattgtctatggagaggttcagatataatatctacttcctccatttcattggtgctttgggacagagtatgtcagccaaaaaaagaggtggtttgcaagtcattaacctcagactgcaaaataatgctttgctaatgaaaagcctgcgtaaggtttataataggatgcctcttccctgggttaaattgatctggaacacatactacatgaacaaggtgccacatgatacatcccctagaggctttctggtagagagatatctgtcaatttatggatatctttagaggcattgcttgctgtcaaccaaaggatggaaaaacatgtttatactg

SEQ ID NO: 83953 - DNA, 449 bp, Oryza sativa
  Clone ID: PAT_MRT4530_83235C.1
caaaaactacacctgctggggaatatcttacgtctgcactaatggattttgatcctaatcagtttgagggagttgccgcgatagcagatggtgcaaataagcttttgatgctggtgttggctgcggttatcaaagcaggtgccgctagggagcatgagatacttgctgagatccgagacgctgtcttttcattcatccgcaaaatggaaccaagaaaagttatggatacaatgctagtttcaagggttaagatattgtacattagatctttgcttgctaggtctccggaacttcagtcaatcaaggtttctccagttgagcgttttctggagaaatcacatactagtcggagcagaagttctagcaggggaagtagtcctggcaggtcacctgttcatcaccaccacgatcatggttcacgaacttccttaatcgatgagcatgtgcat

SEQ ID NO: 83954 - DNA, 458 bp, Oryza sativa
  Clone ID: PAT_MRT4530_83236C.1
aaatgaagaagtgggctacatccaggaagaggatataaagcttctgtagtgatctgcttatacaacaagcatcagcatgcaaaaggagctcatgcaatgatgcaaaaaccccaactttggcataccattaaaatcaagtgccaagatgcatgaaacgatatgacaccaggtgaaaagtgcaatgtgcaccactatgactgggctcacacacacagagattatttagagagggaaaggaatgcataaaaatacagaggacaaacaccctgcattggcactgagatcttttatttgcaacacatttcctgtactttctgaaagtctcacatctcttgtactattcctctgtctgtacatgtcctaatgtaataatttctttggtttttgttagttacgtactaattaaaagttaaaacagagatttgtggatgatgacgcgccaaaaaaaaaaaaaaaaa

SEQ ID NO: 83955 - DNA, 4108 bp, Oryza sativa
  Clone ID: PAT_MRT4530_83237C.1
tttttttagtatcaaagttgctgctttgaacaagcatttatcagctacggctgccttaatattatgaaacatcaagcatcctgagtatggcaatcagagaggcaaagtaactctctcgaccaaaaaataatgttacaacataggcttgttcattgtataaacaaaaaaaaggaagttacaccgaatgccctcaattggcatccatatacaacatagggagtaatatataaactctaagaatgaactaaaactatgatctgacatccttgaaaacaccacctttctccatctccgcaacgatgtctttcaaggctggtactttgttagctagagttctgtacagtctagaatatctggctcttgtaccatcggcggttcgtgccagggcaagcaagctgattgcttctggtaattcctcaaagacaccttttatttcctcaaagctcatttctgcaagaactgatggctttggaacaactcggattatctcatcacctttaggttcctgaattttttggtcagccttaatgaccagttcacagctcgaatttgctccacattttatgatgaatggggctgatgttccagtgttgaactgtagtacgttccactgtgaaacttcgctctcgcccagtgtgtttgaattcaaatctgtggcaggttcatcgggatcctcttgcagtgactctacaactttccttgcttccatgatctgcttctgagcacaaggatgatcaacgtcaagaagagaaggcatttgtgccaatagatcatccaatgattctagcaacgctttcttttttgattttctcaatggccttgctgaactttgtctcattacttccttcacttgttttatgatgttgtctaaagatatgagagatgccaatcgtgcatcttcagcagcagttggaggatttcggataggtgaaccaccttcttctttggttaacaagacagtatccgttcgcatttgttgcatgatctttcttcttttgtgatcgactgactctagagcagatcgtagcttactgacatgagcgggatcatcagccacctctgtagccaatgtgccagcaatgtccttcaagtgatgtagttgggatgtgtaaactcgttttgtgtactcggataacagttgacccaaagcatcagttgaggggggtctcgcagtaccaaggccagccatccatccatccataatagcagttgataataattcaagttgcccggaagctccagcaacatctccaccagttacagataaaaactcaaagttctctgcaagccatgctcggatctggcgttgcaattcaccagctggcgtatgaacaaagagagcagctaaagccttgtttccaattgcaaaagccttggcttcctcggtaatttcccgaagctttcctccagtgacgtgttgtctccatgtctcctcctcaatcccacgaagcttcaaaacaatcgaggagaactttgatttcctgtctggtttaatgttaactttgaaaccatgcacatgctcatcgattaaggaagttcgtgaaccatgatcgtggtggtgatgaacaggtgacctgccaggactacttcccctgctagaacttctgctccgactagtatgtgatttctccagaaaacgctcaactggagaaaccttgattgactgaagttccggagacctagcaagcaaagatctaatgtacaatatcttaacccttgaaactagcattgtatccataacttttcttggttccattttgcggatgaatgaaaagacagcgtctcggatctcagcaagtatctcatgctccctagcggcacctgctttgataaccgcagccaacaccatacaccaatctgatatgggtggagtttcattatagtcacggtgacagtggaagtaaggcagcatcaaaagcttatttgcaccatctgctatcgcggcaactccctcaaactgattaggatcaaaatccattagtgcagacgtaagatattccccagcaggtgtagtttttgttaactcattgcttgatttcacaatagctccactgtttccagctttgtcctgtgacactggtaaggggaatacatctgatgactgacttttggtgctgtcactccttcctatatctcttccctgagcattagtttgtttgtttgaaggacttggagcctgtggagagcttcctaatcctgacttctctgtaagtctgtcaaagagtttctcattctcctcatgcaatttctcaataagggcatccctctttgctaattcctcttctagccttttggtcactgaggatgaatcagcagttgactccatcatctttggggtagatataactgaagcagattcagacccaatagttgatctagcatcacttgaatttagggcttcattaagttgagactcgatggacttaagttttgcctgtagtgactgaattgttaaatcgcgctcatgcatctttattttctgctcctgttcaacttccagaagacgagaaatctgatcccttagctggttgttctgttctttctcaatcctgtgcttctcagcgagcattaaattttcagacttcagatcagcttgaagtgtagaagaaactctccaggccttctgtacttcgttgaagagcagcgtacattggtcgttagcctctttaagagagagctttaatcccaaaacttcttggcgcagatctagaacctccttctccttgtcatgcaattctttgcgtgaatcatttgccacatctttccatttcttgattgtatcgcggtttccaaggctcagttcagcattttttgctctagcagaaaagctgagtgtagacaaggttctagacaaatttgaagcacttggacttacatgcacgatcagtaaggtctttgagctacttccaagagaatcagctaagatttgtgtaattcttgaattcccggatagaacaggttccttcttcgcacttaatgaggctaaagcatcacccaacgcagaaagcgattttgagacatgcaagaaatctgttacattgtctctattagcatcttcttcaaggaggcattcactagctggcaaatcaactaaagaaagcttgctgtacaggtgttctcctgttacatagtttctgtagtgtatgtggatagtaacaatcaagtgtgataccatgaccttcaaagaattcgcggatctattttcaagtgcagcctttagcgaattagaaaattccaggggattttcaaccttctcctgcacaagttccacaaaggattcttgcacacccatgcgaacttttgggacggggcttatagagtctgatagcaaatcccgaacctgatcgttgtagagctcgcaggcggtaatatagaaattaaagtgtgaggtagaagtagtatctgaatttgaaagatcaaacaattcctcaaagctccgcagatataaaccacgatcatggctagatccttcatagaattctaatacaatatgaccaggtgagatactgaggacagaggtatcagcaaccagggtatgtgtttttccagagcggctttgaccataagcaaatatggcaacattgtaaccatccaaggccgactgcacaaggggttgaacatcatggaaaagttcaccttgcccaatgtggggtccatataccctgtcgaactcataatccttcttaggattggttaaagattcatctccagtgtttacacggatagtaaaatcatctggaaactctactactgatgaaccttcatcttcaaataggggtctgctacggcaaaatactttgacattgcctttcaaggtcaataagtcattgaaaagccttttcttctcatgaatcaaaggagtgattctagcttcagtttcaagtgcagcttgatctgggacgctgtccgcgagctggtcgaggcggtcggcgaccgggaaccaccgccccgtcgggcccctgcggcgcgggccaccatggcggtagggcggcgccctcggcatggcggtcggcggcgccagcggcatccccgccgccgcccccaccaccggctgcggcggctcgaacccggggacgtcccaggcccagcggccgcgggtatccgccat

SEQ ID NO: 83956 - DNA, 428 bp, Oryza sativa
  Clone ID: PAT_MRT4530_83238C.1
gccaggcatatgacttgttcatagtgcttggcgcttggtcctacatatttgcttgatatgctgttgggtgattcttttcttggttgagacttgagaggtggtttttgtcacattacttgttgatgctctgttacgttggttgtgctcatgcggcatagcacctttggaaacgggatatgtgggattggaccggtaaattgttttgtttctgttctcttgggagaggaagcattctactgaaccttgcttgaaaatgccataagaaaaatcttggtccttaatcaactcatctcaaggtttggttgagttctttgttctcttgttctggattggttactactggcttaacagcgatttgttctagtcttatgaccggcttgttcgttggcatcaatctatcatgtgcggtttagcgtgggaaggccact

SEQ ID NO: 83957 - DNA, 270 bp, Oryza sativa
  unsure (1)..(270): unsure at all n locations
  Clone ID: PAT_MRT4530_83239C.1
actgntggaggacggcgaggcggagctggaggccaccatggcgccgccgctggacctnccgttgtgngccntgtagagaagaacttttcgtttctntgggtttgtgtagttgtgtacgtacgtacgtggtggcgatttgaggagggctgtgtgcattgtacgtgtcgatggtacaccctgtgtgtttgcgtttagaatttggcatattgtattttggatttcgatttgaatttgcaaagagaanggngggtttctactaaaaaaaaaaaa

SEQ ID NO: 83958 - DNA, 1101 bp, Oryza sativa
  Clone ID: PAT_MRT4530_8323C.1
aaaaaggtttataaaaagaaaatccctaaaagtcttcttttccccccttcctctcttgggccggctcggcccaactctccctccctctctctctcctctccccgcggcccatcggctccctccccgcgcgcgcgccgctgacaggcgggcccgcccgccaccctcgctgacgggtggggcccacctgtcatccccttcctcccgccgctcccgccgctcgcccgtgccctagcgccgccgccgccgcgaatctcgccgcctcccgccgtccccgcgcgcaataaagaggggggaaatattccccacgattccctctctctttccccccgtttttccctctctctctccctcggattcgtccggattcactcccgcaaacctcgccggcgccatcaatggcggccggatcctccgcgccggtttccatctcctccggccgccttccctcactcccaaccctatttaagccacccccgtgctctcctccaccgtttccgccactcgccgcctctcctccccgtcggattcgtgcccgcgccgtcttcctctctctccgccgtcgccgccgagctccggttcgccgccgtagtcgctctggacctcctcccgactcggcgtcacctccttcggcttcgccgcgtccccgtcgacctcggccaccccttcgtttcgcccgccgactgtcggagcgccgccgtcctcgtcgatccgaaccgcgccgccgccttcctccgctccggtcgtcgtttccgccgtcctcgtcgacccggggtgagccgtggaccgctcctttcgcttcccccttccctcttctctctcgggcgccgctccgccgcgctgttggtcgccggcggcgaccatcggggcgcgggtgcgccgcctcccgtcggccgtgccggcgaggccgccttcgggcgcgccccgcggctgccaggtgggcccggccgtcagccgcccgcgcccgcgggtgcggccgagggcgcgggcggctgacggccgggccccacgcggcagccactcggcgcgcccgagggcggccaagccggcgcagccggcgggaggcggcgcgcccgcgccccgatggtcgccgccggcgaccat

SEQ ID NO: 83959 - DNA, 189 bp, Oryza sativa
  Clone ID: PAT_MRT4530_83240C.1
atggctgcattgtcaatcgggcagttgctgtcacacaaaaaacaggctcaggctcgaccggtgccgtttgacctaaacctcgaggccggagagatccgaatccacgaaagagaacatggccagcagagactaaacaacgtgcaacttgttcgccaggtggggcaccatcctatgcgacttgtctgctga

SEQ ID NO: 83960 - DNA, 320 bp, Oryza sativa
  Clone ID: PAT_MRT4530_83241C.1
tgatgctctgttacgttggttgtgctcatgcggcatagcacctttggaaacgggatatgtgggattggaccggtaaattgttttgtttctgttctcttgggagaggaagcattctactgaaccttgcttgaaaatgccataagaaaaatcttggtccttaatcaactcatctcaaggcaggtgatgaaccattcataggggaaatgaactggtttgtttgagttctttgttctcttgttctggattgggtactactgtcttaacagcgatttgttctagtcttatgaccggcttgttcgttggcatcaatctatcatgtg

SEQ ID NO: 83961 - DNA, 439 bp, Oryza sativa
  Clone ID: PAT_MRT4530_83243C.1
cacaaggcgccacaactttgacccaagttggttttccaagggcagaatgttgggtcgccaatgcaaggctgaacaaaggcttgaacacaaccaacgtttgtgggcttggggcacgtgcgtgacatgtgtggatgcaagggcctcaaagctgcaaggcacccaaagctaatgtttgcgccacttaaaactttgcccgtccaaatgatgccggataatgctgacccaagccttacaaaccaccctcgctgccacttggtgacgcattgcactgacacagtcaggtgggttatctgggtgattgaattgtgagcaagtgatgagtgagtacaggagagaaaaataaagtcatgcatcatcgtgtgtgacaagttgaaacatcggggtgatacaaatctgaataaaattgtcatgcaaaatttaaaaaaaaaaaaaaaaaaaa

SEQ ID NO: 83962 - DNA, 2929 bp, Oryza sativa
  Clone ID: PAT_MRT4530_83244C.1
gaggcaggccagcagctttgctagctctcggtaacggagcctatattgaacatcggcctgtaattgttacgtttggggaaggtgtggcggggcaggtgcggaatggaagtgctggcttcatatttgaagctgaatgggtgcatgaggagaactgtgaagcagtggtgtcgaatgcatggagattatctatgaatactggaaccggtcgtgtggctgatgcggttagggacgtggcgggggatttgtgggattggagtagaaatattctaggggatttggagaaaagaattaagaaggtaaagaaggatttggaggcttgcaggagaggaggcttggacggtgccagtgtacatagagagcagatgcttcagtgcaagctggaaaaactagaagatcaatgtctactacagcaagttccaacaaaggtcactgatgccatgaatatggaactgatgaagccatatagtgatgaggagataaaaaaacgctttgtttagcatgggtgatctcaaggcgccgggaccggatggcatgccggccttgttttacaagaatttttgggagacaatggggctggatgtggggaaagaagtgaaatctttattgattggatcagagatgccagcgcactggaatgaaacagtagttgtcttgatcccaaaagtcgttgcaaaccgactgaagaggattctcccagaaattatatctctgaatcaaagtgcctttgtgccgggaaggatgatcatggataatgtgttgctcgcttatgaacttactcatttcttacagaataaaaggaggggttcgggtaagtttgcagcattaaaacttgatatgagcaaggcatataacagggtggagtgggagtttcttaggagaatgatggggaagttgggattctgtcaggagtggattaatatagtaatgggctttgtttctacggtctcatatcgtatcaaggttaatggtgacttaacagagcagataataccctagagaagattgaggcaaggtgatccactgtcgccctatttgtttttgctatgtgctgaagcgttctcttgcctactcaattcagcggaagacaggggtgatattgaaggaatgcgtgtgtgtcagggggccccgatcataaatcaccttctttttgcagacgactcgctgctactcttcaaaattaacaaccagagttcaactcatctgtagaatgtgctatcactttatgaggattgtttgggacagactatcaacaaggataaatcaacgatcatgttcagtaaaaacagcaccactgtggagaaagagaatgtgatggcaggactggggatccagtcggaggctagaaatgagaaatatttgggattaccaatttatatgggtagatcgaggagccaaactttctcatatctgaaagatagagtctggaaaaggctacaagggtggaaagaaaggttactttctaaggccggcaaagagatcctgataaaatcagttgtacaatccattccaacatatgcaatgtcatgttttgatcttaccaaaactttatgtaacgagttgggttcgcttgtgtgccggttttggtgggcacagcaggaaaatgagaacaaagtccattgggtgtcatgggagctgttatgcaggcgcaaggagcaaggagggataggttaccgggacctgcatttgttcaatttagctatgttagcgcggcaaggatggcggctaatcatggagccaatgtcgctatgtgcacaagttctccgagcaaaatacttcccgacgggagacttaatggctgtgagagagaaaccggggatatcatattcttggaggagcatcgttcggggaattcaagcgctgaagaaaggtttgatttggagagtgggagatggcacaaatattgatatatggcacgatccctggttaccgagtggaattaccagacggcctattacaccccgggggagaactgtggtgaacaaggtcactgatctcatcgatccgactattggaaaatgggacaaggagctcattgaaggtctgttttgggaagaggatgtcaagcaaatcctaacaataccaattagggcaggtgtggaggatgggttggcttggcattttgataataggggaattttttcagtcaagtctgcgtatcatgttttggaggatgagagacgtcgacataaaccgaagcaggacggagcatccagcagcggccaaacaaacatggaaaagttgtgctggcaacagatttggaaacttccatatctccctaaagttaagcacttcatatggcaccttgcacataacagcttgccctttcgcatgagtattcagaagcgtggtatgcagattgatactagatgtccagtatgtcacaggcagaatgaggatggtggccactattttttgaagtgcaaacttatgaggaaatgctggcagagcttggacctggaagagtgtagactggagctggtccaaatgcagtcggctagtgaatttgtggacaaaatcatgcagaaaagtgacggtcaaaacgactatattctatttactgtgggtatggtggagtgcaaggaataaagcaaacgtcggggaggagaagctaacacatggaaggcacctccaccaggtattctgaaaataaactttgatggagcttatcgggagatgtccagggatggagcctggggttttgtgatcagaggtgaaaatggacggggagtgctagctggatcagggcgtttgccgatggtttcagacgcactgatggcagaggcagaggcttgtttagctgcacttgaagctgcaatagatcatggcatttcccgggtgattattgaatcggattgtctcaatcttgcaatgcagccgattacgatggagacagttttgacggagctcgtggctcctcaccgggagaccg

SEQ ID NO: 83963 - DNA, 192 bp, Oryza sativa
  Clone ID: PAT_MRT4530_83245C.1
atggcgatagatttttgtggatccgatttgggtttgccgtggaagatgaatcgggctgttagagttaaccgggccagggaagactccagggaggcggcagcaagaaacgaggctatgcacttgcagtcctactccgtctacagcagcgtcggctcagtcctgctgtctggtgaggccgcaggcgacaagtga

SEQ ID NO: 83964 - DNA, 4461 bp, Oryza sativa
  Clone ID: PAT_MRT4530_83246C.1
atggaggcggtggaggggatgatggagcggatgaagttatcgatggcggagaagaagggcattagggttcaggcggagggttcaggtagtcagctggctgctccacaggcggttgggaaggtgctagcagagaagttagtgggagcggatggtcttgcccaaacgctgggaaggatatggtgcccgatcaagggagttatgtgtaaggatcttggtgagaaccattttttgttcaccttccttcaggggtcagggaagaagagggcgctggatgatggcccatggatgtttgggaaggatttggtggagatagagtttgtgtctattcctatctggatccgagtgatgaagttgccttgtggtatgatgaataggtgtacggggaaggcgataggggatgaggtaggaacatttttggagatggatatggatgagaattgtactgctgtgggaagatttttacgtatcaaaatccgattggatattagaaagccattgatgcggggtgtcacggtgatgattgggaaggaggagaaggctttatggtgtccgttagagtatgaattcctgccggatttttgttacagttgtgggattattggtcataccaataagatttgtgagaaggaagtgatgaaaggtgaactaccccctttcaataaacagttacggtgtataccgagcaagaagaggagtgatgatgggtatggcgatcgtggcattggtgggagactccagttgggatggagagccggtagtgggggaagtagggagagttttggtggatctggaagtagaagtggatcggggaaaccggctaaggtgggggaggaggaagttactagttctatcaaagtagttgagaagcttgctgtgaggcccaatgttggtcgagcgctggttctagagaaagaagtgcacgatcttgtcctagaagatttggtggttaatgcgccgaaggtgtctagtgggcagaccaatgatgggggaaaggaggatggctccagtatagtgactgagcacagtgtcatgcaatccatgcaaaatgatgttgggggcgttgggggaagtcttgggaagaaggaagaggtgttcggggagtctaagaccgggggacgagccaaatacaagaggaggtcaaggggggagggccaagcagtggcgcgcgcttcggtggtgacgttggagaggaaacgccagatagaggatgctgtgatggaggatggggatagcaagaaggcgaagatcggtgcaccagattgtgacgcggggctgtcggaacagccctgcgagacccaatggcgaagtggtggtctcgcgatcttttggcgcagaggtattgctttcactctgcgggcagtgtctcgtttgtacattgatggcgatgtggttggtacaaatgggctcacttggcggtttacgggcttctatggtgagccgaagtcggatcagcgggaggtgtcttggaaagctctcagggtgctgaacgcagctggacagaacccgtggttatgcatgggtgattttaatgaaattttgatgaatggggagaaggagggtggccatccaagatctcagatttgtatggaccggtttaagggtgctttggatgaatgcggtttggaagatctgggctacacaggcgacatgttcacatggagaaataattgtaagtccagccagcagtacattcgggaaaggttggatattgcagtggcggacagggcgtggcaaaaccattttcctgacttccatgtcaggaacggtgatccacaccattcagatcatcggcctgtaattgttacgtttggggaaggtgtggcagggcaggtgcggaatggaagtgctggcttcagatttgaagctgaatgggtgcatgaggagaactgtgaagcagtggtgtcgaatgcatggagattatctatgaatactggaaccggtcgtgtggctgatgcggttagggacgtggcgggggatttgtgggattggagtagaaatattctaggggatttggagaaaagaattaagaagcgcgcgaagacacactggctacagtatggcgatcgtaacacacggtttttccaccaattcgcttcggaaaggaagagggccaataggattcgcaaactggtaaaggaggatggcagtgcagttgtgaatcaggatgggatgtgctcgttggtgactgattattaccggactctttttacctctcagcaaggtacccgttacgatgagctgctacagcaagttccaacaaaggtcactgatgccatgaatatggaattgatgaagccctatagtgatgaggagataaaaaacgctttgtttagcatgggtgatctcaaggcgccgggactggatggcatgccggccttgttttacaagaatttttgggagaaagtggggctggatgtggggaaggaagtgaaatctttattgaatggatcagagatgccagcgcactggaatgaaacagtagttgtcttgatcccaaaaattccaaatccggagagacttaaggatcttagacctattagtctctgcaacgttgtatataaaattgcttccaaggtcgttgcaaaccgactgaagaggattctcccagaaattatatctctgaatcaaagtgcctttgtgccgggaaggatgatcacggataatgtgttgctcgcttttgaacttactcatttcttacagaataaaaggaggggttcggataagtttgcagcattaaaacttgatatgagcaaggcatatgacagggtggagtgggagtttcttaggagaatgatggggaagttgggattctgtcaggagtggattaatatagtcatgggctttgtttctacggtctcgtatcgtatcaaggttaatggtgacttaacagagcagataataccccagagaggattgaggcaaggtgatccactgtcgccctatttgtttttgctatgtgctaaagcgttctcttgcctactcaattcagcggaagacaggggtgatattgaaggagtgcgtgtgtgtcaggggggcccgatcataaatcaccttctttttgcagacgactcgctgctactcttcaaaattaacaaccagagttcagctcatctgcagaatgtgctatcactttatgaggattgttcgggacagactatcaacaaggataaatcaatgatcatgttcagtaaaaacagcaccactttggagaaagagaatgtgatggcaggattggggatccagtcggaggctagaaatgagaaatatttgggattaccaatttatatgggtagatcgaggagtcaaactttctcatatctgaaagatagagtctgtaaaaggctacaagggtggaaagaaaggttactttctaaggccggcaaagagatcctgataaaatcagttgtacaatccattccaacatatgcaatgtcatgttttgatcttaccaaaaatttatgtgacgagttgggttcgcttgtgtgccggttttggtgggcacagcaggaaaatgagaacaaagtccattgggtgtcatgggagctgttatgcaggcgcaaggagcaaggagggataggttaccgggacctgcatttgttcaatttagctatgttagcgcggcaaggatggcggctaatcatggagccaatgtcgctatgtgcacaagttctccgagcaaaatacttcccgacgggagacttaatggctacgacctattacaccccgggggagaactgtgtgaacaaggtcgttgatctcatcgatccgactactggaaaatgggacaaggagctcattgaaggcagcttgaccagggctacacctaatcctccacaccatcagcattattgtagaactcttcctctgatgaatgattgcaaggaaaagaggatttattgcgtcagcgggctagggtttcggtggaccgggcgcacgggcgacggttcacgcgaacggacggccgagatcaacccatccaaaacggacggccgagatcgatcggtccacgaccggctcacggcgaacggccccgatgacgtcggcgatgacgtcaccaccggcggcggcggctcggcggctcagatggcgcacgctcgccagcgaacggcggcgcttcggcacgaacggagggcaccaacgggtagcgggcagcacggcgaactcaccggcgaccaaagcgacggcagaagaggaacggacggcgacggcgacgaagaagaagcggcagcgctcttcggatcgacggcggcgatggtgctccggcggtcttcggcggcggcgaaggggcggacgagaacggcggagacttggcgatcacgacggtggccttcccgagcgacaacgacgaccggaacagcggcgacgcacggctggagcgacggcggcgacggcggcgcgaagctacacggcgctagggcactacggacgacgagaggcgaaggcgagggtggcggcgggtag

SEQ ID NO: 83965 - DNA, 947 bp, Oryza sativa
  Clone ID: PAT_MRT4530_83247C.1
ctgaggctctccagccgaagccgctcaccctcctccgcctccctcctcctctccccgtcgctcgccatggcagccttcgccaccgcgaccccctcgccggcgatctccgtgtccccctggagcatgtcgtcgctccgcgccgcgctcccctcccccacccgcgcctccccggcggggaagctccggtcgtcgttctcgcccgcggcggcggccacggcggcgtcggtcggctgcctcagctccttctccggcctcaccccaatttcgcctctcctctccctcggggaagagacttcaagctttgagcatcgattgtttggtattgatgcccgtggaaggatagtggcaatgagacatgggaggcgtgttcctaaacttagcagacctccagatcagcgaaaggcacttctgcgcgggctgaccacgcagctgctcaagtacggaaggataaagactaccaggccaagagcaaaggcaatgaggaagtatgttgagaagatgatcacactggcaaaggatgggtctcttcacaagaggaggcaggctctggcttttatctatgagaagcatatagtccatgcgttgttcgctgaggttgcagacaggtatggggaaagagaggggggctacacaaggatcatcccaacatttccaagacggggagacaatgcacctatggcttacattgagcttgtctaggaggccgttcatttgagcgcgctgcctaggtggaggggtcaagggaatgcctttttgaatatctgtttacatattttcttttgtaacaaaatgtagatcatgtgtgaagttttgaacagtggaatttctatcctgtaactacgaaagcattgtgctacattttggaagtgttcctggcaccataatctggtgcccttgaagttatggattgttttccagtcagttactataaaaaaaaaaaaaaaaaa

SEQ ID NO: 83966 - DNA, 523 bp, Oryza sativa
  Clone ID: PAT_MRT4530_83248C.1
ggcagggaagggggattggaactttgaaaaggcctcaaaaaaatttggggacagggggaggccccccccatccctattggaaaccaaacaagagcaatttgtttttgccccctttttttttacgaaaaaaaaatcccgaccaaaaaaatttgggttcccaacctcaattaagggggaaaaaaatctgccaaaaccggaagggaaattgcccgggcccccattccccgggaaggggggcccggccctccaacgttttaggccctaaaaaaacccccaaacccattggggctttactaactatatccccctgaaaaagcccttatgtttgcccccaaaatacccaaaaaaaggggggaaaatttcagggggggggcccggagttttatggggtttttgaagggggaaaagaaaacctccaaccggggttggtgtcatttttcatcaagaacatccttaaagctaggtgcctccccgcttcactgggagggcggagggctccaaaaaaaacaattccaatgccaaa

SEQ ID NO: 83967 - DNA, 437 bp, Oryza sativa
  Clone ID: PAT_MRT4530_83249C.1
ttttgttgttttttttttttttttttttttttttctttttttttttttttttttttttgttgaaaaaaaaaaaggattcgctgttttcaaatcccccattcatttttgggactcgcatacgattcacaggaccttggcttacattactactacggtgggtcgtcttacccaaaaggggggaacaatcccaaatttcttttcaataaacccaaggccccaagggaacgactgcatccaaaggtttggggaaacacctttttccctcacaagcttgatagcagttccccctcattcattgggctttcaagcccccaaaatgccctgttcaatgcaaaaggtcagatttttggataagagcaaccatgcgggccacactaaaattctcaaggtggggaaagaggacaactggggctgcatctaacagacaaacttgctgt

SEQ ID NO: 83968 - DNA, 513 bp, Oryza sativa
  Clone ID: PAT_MRT4530_8324C.1
gagcgagcgagcgaccgtcgctcgtcctgctgcttccgccacatcggtgacgcacatcctctttcccatctctctctctctctgtgtctgggtccacccacgcactcttttctcgaatttgcgttaaccctagcttctgttctagaaatttgccttaaccttaatactaataacagtttgatggttcccaaaaaggtttcggggttcaactgaaccccccgtcccatgttagatccgccactgcttgggtatgcatatatgcttattgttgtatatatagttgaaacttgaattaccattatggtgatattcaaatccaactgaaatagattaatttgagcgaattcatttttgctaccgatatgattcgtattcaacatacatactattcgtactcgagtcccactaaacttatggaaatggtaatggtttgaccattatatggattgaatctgacttggtcacacccctagttgggacttcattttgaaggattgtgtatttgtctgagag

SEQ ID NO: 83969 - DNA, 558 bp, Oryza sativa
  Clone ID: PAT_MRT4530_83250C.1
ctgcaggaattcggcacgaggcacgcctccgacgatgtcgtcatcctcctccgccgccgcaggtgctggctccggcgagcccgtcgtcgacgtcccggccggggaaggagagggaggacggcggcgatggcggcggccgtaaggagggggagggaggcgcggattttgatctggccggagccgcggctgggtgggtggaggcgcggaccagctgcccccacctccccgccatgggcgcggccagcgccgacgacctcgcgcgcgtgccgccgcccgactcgccgtgctctagatgtcatcaccctgctgaaaactggttgtgcttgatctgtaaagatgtcctgtgcagccgttttatcaacaaacatatgttgtaccattatcaagatacaggacattgtcttgccctgagcttcagtgatctgtcagtctggtgttttgcctgcgactcctacctagacgttcaatccatcttagaactgcgtccagtttatgaagttgcacatctgatgaaatttagacagcggcctccatttcgatcacttgatgtactggatt

SEQ ID NO: 83970 - DNA, 153 bp, Oryza sativa
  Clone ID: PAT_MRT4530_83251C.1
gctgttggcgccagcgcactgctgtcgtgctgcaacaatggcacattcgtcgaggcacacaaccgcgcctatgcacagcgcaagctcgctgccttggaccgtggttccagtgttgcatcaaggcttagtggattgagcgagaagacgaactga

SEQ ID NO: 83971 - DNA, 297 bp, Oryza sativa
  Clone ID: PAT_MRT4530_83252C.1
atggcatcaatttcccgaacgatgggtaacctcaaagcagcaacccatgatggcatcgatgatagcacccatggcttcaattcatttggcctattagggttaataaggtcgaatttaaatatttgtggaaggatgatatggacgcctatccaccagaagttccaacgcatgatggggaacattgtggcgaactatgacatggacacgcacaccatcgccatgtgtgacatgcgatttgataccgtgcaagtgctttcctgcaacgctgccttgaggctaaccatggatctaagcgca

SEQ ID NO: 83972 - DNA, 1287 bp, Oryza sativa
  Clone ID: PAT_MRT4530_83253C.1
atggggaggtctccttgctgcgacgagaacggcctcaagaagggcccctggaccacggaggaagatgagaagctcatggagtacatccagaagaacggccatggcagctggagagcgctgcctaagcttgcagggctgaacaggtgtggcaagagctgcaggctaagatggacgaactacctgaggccagacatcaagagaggaaagttcacctctgccgagaaggataccatcctccagcttcacgccgttcttggcaacaagtggtcagccattgccaagcacctcccaggtaggactgacaacgagatcaagaactactggaacacacacctgaagaaggatctgatccagaagggcatcgacccgacgacgcaccggccgaggaccgacttcttcgccgcgctgccgcagctgatcgcgctcgccaacctccgccagctcgtgggccagctgccgtgggacgaccccgccgccgcggccgccgggctgcagcaagccgaggcggcccaggcagcgaagttcggacagtacctgcacctgcaggcgctgctccagcctccgccgccgtccgccgcgactagccccagatcaggctgcatcggcggcgccgccgccgccatgccgggcggcgacatggagcagatgggcgcgggactgcttagcccgccggcgatgtcgtccgcggccttgtcgccgatgtcgacgtcgtccttgtcgccgctgccttcgccgatgtcgtccacggccttgtccccgttgcctccttcgagcttctttggcaatggtggccaaggctcattcctcgctggacaattgcctaacatccaaatgcatggcagctcgttgttcgaccagtcggccgccatcatcaacgacgccaaccacaaccaagattacgctgcaagcactggcgagagggagatcatcaatggcgccacgaagacgacgacgacgacgctgctgccggaaggctctcttccgccgctcgccgactaccccaccatctccaacctcggtgatgtctacagcaccccaagctgcgatggcaacatcactgaattccctctcttgcctgacgccttattcgacgagttgatgagagactatatttccaattgctttctggaagattggaaaaatacagactctaagaatttagatgtatctgatatattacagattcaagttgcagttaagattttgccattagcttctctcagtggcattgggcctgaaccacacctgtcagtgagagagtcagcggctcagtgccaaaaggcataa

SEQ ID NO: 83973 - DNA, 417 bp, Oryza sativa
  Clone ID: PAT_MRT4530_83254C.1
aaacccaaaaatattttggcaggggggcattaaatggtttcaaaacccaaagggggggtttaaaatttttaaaaaggggatgtttagggggttaattcccaggggactttttttattccacctggaaaaaaagggtttattttttttttaaaacccggtgggatttcctcttttttttttatttcccccccaaaaaaaaaggaccctccccttaaccctgttgttttaaaacgtggggggggccccttttccccaattagggggggcaaaaggggttgcccttaaagggcccggcccccccctcggggtgggggccttctttggggggggggggaaccttgcgggggggggcgccccctttttaaaattggagccgggggagcttaaccttttggggcttgggcttttgtttttggg

SEQ ID NO: 83974 - DNA, 305 bp, Oryza sativa
  Clone ID: PAT_MRT4530_83255C.1
acagagacgaggatttttatacaggttcgggcacctgaattgtcagtcgacaacagggtagtcttcctcctcgaatccgtgcccgacgagatcagagatagcgctttcgtctttcctgacagtatccggagacaccgtaggggactagccgtacttatccctgaagtcgatatccggcgtcttgtcttggcgtatattggcttctatttatctggaactccctccatatccaaggtcagtttccgtataagacatggtatatggtgggtcctgccgagatttaatcaactgccattaggtatgtg

SEQ ID NO: 83975 - DNA, 360 bp, Oryza sativa
  Clone ID: PAT_MRT4530_83256C.1
gaacaggctgaatacaatacctttgtaggccaagtccgttaatccgcggaacacgatgatgacagcgaccatccgagatcagaggcaaaagatgagttcacatgctgctattattgacggggccgagatgcttggccttggatctaacttagtgcttctagatggtccacgacggcgacatgggcatgaggcccgaacaccactcgacttggtgacagcaccaccttggtatggttgtacctgcagaaccgcatgatgtccccggacaccgacgcctcgtgggaagtaggctcgccttcctgggaaggaaagaacccgcacggggactggaatcactgctcggacgccctcgtgaccagc

SEQ ID NO: 83976 - DNA, 407 bp, Oryza sativa
  Clone ID: PAT_MRT4530_83257C.1
ggcagaggcagtagcgaacgaaataggagagaggagctgcccctgcatgcgcgcgatcatgcatgcacgcatcccctcccgctgctgctccctcctcctcctcctcgcatccgtcaggtcacttcctaaaaaaacacaggaaactacgcaaaaactcccatgattccgaccagccgaacactttccccacaaaaaaaattgcgctgaagttgccgtcagagagtcgccttcacgaacgccattgtgcgagttgacgcgtttcttcgcggaagaaaccaatgcccgcgttggctatatagaaagggtctgggttggcggtggggaggagatcggaggagggggtcgtctggattgggacccaattgaaagggaacggttgaagaggcgcaatggagagctacctgaag

SEQ ID NO: 83977 - DNA, 987 bp, Oryza sativa
  Clone ID: PAT_MRT4530_83258C.1
atggacggtgcaaccttttgtgaagcaaacttgttttacttccagtttgaggatggccaccgggacaagagaaatgtgacgctggaacttgcctaccaatatgctagcaaaggggcgtccctcgctctggtggcacggaggaagcaggcgctcaagagcgtcgccgcggccgcccgcgagcgcggcgcgccggacgtcctcgtcctcgacgccgacgtctccgacgccggccagtcgaggcgcgccgtcgaggagaccatcgcgcactacggcaaattgaatcatctggtcgccaatgccgggatctggtccacctgccctttcgatgaaatcaccaacataaccgcgttcaccacgatcatggatgtgaatttctggggcgccgtgtacccgacctactacgcgctgccgcacctcaaggccagcaggggaaagctcgtcgtctgctcctccgcggcaggaacggtggccacctcaaggatgagcttctacaacgcgtccaaagcggcggtgctgaggttctacgagacgctgagagcggagctcggctcggaggtcggcgtcaccatcctcacccacggctacgtcgagtccgagatgaccatgggcaaggccgtccagaaagacggcgtgctcgtcgtcgaccaggaggccagagacgtgcagatcggggtgttcccggtgggcggcgtgggcgccatgtgccgggtcgccatggacggcatccggaggggcgaccggtacgtgacgtggccgtccgtgtaccggccgctgcagctggtcgcgtgcctcgcgcccgagatcgtgagctggctgtcctacgcgatgtacaacaccaaggcgggaggaggagcgccgctcagcaagagagccctcgacgccaccggcgcgaggcggttcttcccggaggggctccgccgcaacccggtcgtcatcaagacggacgaggagtgcgacggcgacgaaggcgtcgccgcatgtaattaa

SEQ ID NO: 83978 - DNA, 489 bp, Oryza sativa
  Clone ID: PAT_MRT4530_83259C.1
cgtacgcgtggcttttgtgcgtattttagttgcaaactttattgctccgcgttcttcctttctctgtgtttgtttgtttccagttgccactaaccagccagagccccgggggggagaagagcgagagaggaggagaaatcttgcagcaatccctcgcttagattcgccattaccgccgcttttgttcccaccaagattaccaccccctcctcctcctgtgctcgagcgctcgcatcgcatttcaggctgcttcttgattctgcgaggaggttgaaatctctcgtggtatgatctgatttcgggttgattttcgtcacgcggtggattccttccccccaacactattccggtgccaacccttttttgttttttgtttttttttgtggctgttcttggcgtcgcctctactggcttcttgccgtgctgcagattgcaacagctgccatccgttcgttccggtggagtgcaccccttcatcaccaaggggga

SEQ ID NO: 83979 - DNA, 320 bp, Oryza sativa
  Clone ID: PAT_MRT4530_83260C.1
ggtcgaccacgcgtccgggtaatttaaagctgtgtgactactgctcgcagatatgatgtgaggataatggtgaagggtataacatgttcacagaacatttcacagtactctcaccagcctcattataagtacaaaggtaactgtcttatttatcgaacaatcagctatggaatggtatgatacttctcagaaaaaaaaaactaatggccataaatctgagaggattctaaagggaaggtgactctgtacattggctcaattgtcacgttgcaactactcacatgctctggccagctactgaaaaaggatagatgaaaggt

SEQ ID NO: 83980 - DNA, 967 bp, Oryza sativa
  Clone ID: PAT_MRT4530_83261C.1
gcacgaggcttcccccttttttttttttttttttttttttttttttttttttttttttttttgtttttttggtacaatcaaggaatgatctgcgggagagtgagagcgcccgcctcctgctgttcttgtttttttttatatgtatatcatgatttgggatagatgcaattggatggtcagaaaacaatcttcactaaaacatggctacccaataagcgtttaacaactgtccatagctgctcttaggcacgaaacaatctacctgcccaaggtttgcccagcaaaaagatttcaatagttgaaatgggtaaacgaccgcctaaagctctctttcagtgaaataaacacaggtgttcgaaaataagtgttgagatcactgaagatgaagtgccttttcactggaacataatgaccatgagcatattccaccgagggaattgaaccacactagcacacctttcgttttgcatctaattgttaagtttgcaactgttcccacatttgctatccagctcgcctaatggggtcttggaagtattggagagagatgagaagtgcttcctccgttcttattgttctgctcccttgactgggacatgtattcaaataggtattaaatacatcatctacacctttaccctaaaggaaggtaagttcagctcagatgaactaatgacctttccatgctctgaagtaccaatgatataatcatatccttccttggatcggctctcacggactactcctccctccttgctcgcatgccccaccgttttgcccctatccttttccgtttcgtccctcgctgaggacgccgccccaatttgccgcttgccggccgttgtaatgtcacgattggtacccatggcaatagttactctcttccctggttctagcatttgctcaaccagaacattcttactcaatccgacatcaacaaatgtccccattgaacgatccccatcca

SEQ ID NO: 83981 - DNA, 265 bp, Oryza sativa
  unsure (1)..(265): unsure at all n locations
  Clone ID: PAT_MRT4530_83262C.1
cctnttttttnttttttttggttatccaacatttaattatgcattgtttggggagcgcactttctcgttctattcatctcacgcacggtgtggatccgtcacatgttacggtaactgagcttatttttaggttgcgcgccactatcagatctgaacttgttgggatacacccgccacagtggtaatgggtttccgtgcaccattgtacctagggtagataccatatcgggtttgacggatattgtaacagagcttgagcttgagc

SEQ ID NO: 83982 - DNA, 594 bp, Oryza sativa
  Clone ID: PAT_MRT4530_83263C.1
atgccatggccattacccataactgcatatggggcaaggaatgttctggttgagcaaatgctagaaccagggaagagagtaactattgccatgggtaccaatcgtgacattacaacagcttgcaaaaggaaaattgtttccccttcctctcccagggatgaaatggaattgtattggggctataaggtccggtatgcttcaaatttgggtggagttttcagtgattcaccatacaaggaaggatatgattatatcattggtacttcagagcatggaaagatcattagttcatctgagctgatcttaccttcctttaggcaccttttaattgcatttggtggattggctggtctagaagaatgcattgaagaagatagaaatttgaagggtaaaggtgtagatgatgtatttaatacctatttgaatacatgtcccagtcaagggagcagaacaataagaacggagggatttgttcctattttgacagaagcaaacgttttcaggaagcacttctcatctctctccaatacttccaagaccccattaggcgagctggatagcaaatgtgggaacagttgcaaacttaacaattag

SEQ ID NO: 83983 - DNA, 1062 bp, Oryza sativa
  Clone ID: PAT_MRT4530_83264C.1
atggccaagcgcggcagcagagcagtggcgggctgtgggcggagcggacggcgggcgagcccggcggcggagcggaggcagcggagcgcagtggtggagcggaggctacgggcggcgcagccgcacgccgtggccgccgtcgtcgtcggctctccaccgtcgtcgtcgtcgtgggcgaggctgcacggcgcggccgttcggcggcatcggccaggcgtcgcagtggccatgcatagcggcagtggtggtggcggcagcgtcgccgacctgatcgcatggtcctcccggacgcccagctcgcgcagctgcagcaggagcgtgtccacgctcggcgtgccatcggcgtcgtggacggtggtcggcacgggcgcggtgaccctcgtcgtcttcgccgacatcgtggtagcacttgacgtcgtagctcatactcatatacgtcggggggtgcagcggaaggcgagcgcggcggaggagcggcgacgggcgagcgcagcggtgggcaaagcagcggagggcaagctaggcgaagcggaagacagtggatgggacgaggagctcccccgtgctcggccgccaccaccgccgtgcccccgggggtggccgacgatgctaggagaggcaccaccggcaggagaaggggaagaggcagaggaagcgattgtttcttggtcgccggccgcctccccctccctcccaaactcgctggccgccgcgctcgcgctccgctcctctctccgcggcctgctcgcgctccactgctcggcccgccgccgcgctcgcgccttccgctgctctgttgccgcgctcgccctccgctgcgccgcccgcatccgtgctcgccgctccgcccgctgcctccgctccgccgccagacggccgcaccgcatagcctcgcccacggcgacgacgacggtggagagccgacgacgacggtggagagccggcgacgacggcggccacggcgcgcggctgctctgcccgcaacctgaaggagaagagaatagagagaaaagaaaagagaagaggagagaaggagaagaaaagaggagaaaaaagatgtga

SEQ ID NO: 83984 - DNA, 779 bp, Oryza sativa
  Clone ID: PAT_MRT4530_83265C.1
ctgcagaactccaattcacaagcaaattgcagcgcagatccatcccatcccatctttccatccatgggggtgttcgacgatggctgcggcgagtgctgctccagctggaaggacttctgctggtgcctcctctgcatcgccatcctcctcgccatcgccctcatcgtcgtcctcgtcgtcgccttcggcttcgtcgtccagccctccatcaccgtcgacgacgcctccctcacccgcctcgccctcgccgccacgcccaccaccgccctcgcctacaacctctccctcgccctcaccttccgcaaccgcaactgggccatgtccatgaagaacgtcgagccgctcgaggccgcctacaggttcgacggccagcagttcgaccgcatccagctcgccgacaagggcgccaagcaggggcccaagaagacggtggtgtacaggctctcctccggcagcgacgctgccgcggcgcccggcctgggcaacgccggcgtcgccgagttcaagaaggagaacgccacggggacgttcgaggtggaggtgggggtcaccggcaaggtgagctacacggcgcggatcaccaagtgcaagatcgaggcgacgtgcaagctcaagctgcagctcgcgccgccggggcaggagccggcggcggtggtgttccagaaggtcaagtgcaagctcgccaaggccgagaagaactgctagtttagtgccaaagtagcggttgttgttgcaattgtgttaattaatttggatatttgtgcaattgtgtttaaata

SEQ ID NO: 83985 - DNA, 724 bp, Oryza sativa
  unsure (1)..(724): unsure at all n locations
  Clone ID: PAT_MRT4530_83266C.1
ttttttttttttttttagagagaggagaaatccccgaaaattcagattactaaagatcgnttttgagntggnatatacctggncaccaaatctttggcattgggattttacagcagaagggggacatattttcatcacacatagtctaagcacaattttgctcagtatacattgcagagatcccatcatcattttgttaacgtctcactgacagttggctacgcagtttttgggacaatttttctcaattatcaatgtcggaacagggaaaattacacaatttgtcaaataggaaattaaataaaaccttacaccattcgcacagcaagatgcccatcaccccggtgcatcggcgtgcatttttattctgagttctgacacatcacacacaactcgaactattatactctgccgttctggacgaagcaaaacggggtttattacacgcccccaaggtctcatttgaaaaggcctcaaacccggcccatctacgtgaatggaccgaaaattttcaaccaaaatcacggcccatattcacgcggatttctcttggtgttcggcccatgtggaacaaggcccaaggatgacacgactgatttttttttaattggaagccatataatttgttcaggttaactacgtcgtgtataataatttgtttttatggatatgatttggatatgagtcggaagctccgcggagggcccgcttggggcgcggggtc

SEQ ID NO: 83986 - DNA, 426 bp, Oryza sativa
  Clone ID: PAT_MRT4530_83267C.1
atggctatccctggccgcattcatcatgaggattatattccagatgattatgcgaaaatgcaaccacaacatgtgaatgaagggttcaagacatacgatttagacttcctgacatgtgatggtttagctgtacttggggatgcggtggaatatataatactatggcacaaaaaggatataatctttgggacctccatcgatgctccgctgaaaccaccaacacctccacaaaagaaatcggcccctcatgaggttgaaaaagatagcaaagaacatgaggtggcaccttgtgatggacacattgaaaaaatggttgatgaacttgctagagaggaatacattccaacggatgaagtaccggcgaagtttgaaaatggaaagtcgtctggtccaatcacatgcttgaagaaggtccacaggagatga

SEQ ID NO: 83987 - DNA, 798 bp, Oryza sativa
  Clone ID: PAT_MRT4530_83268C.1
atgcgggcggccggcgagcgcggcagcagagcggtggcgggcggtgggcggagcagacggcgggcgagcccggaggcggagcggaggcagtggagcgcggcggcggagcggaggctacgggcggagcagggcgtcgcagtggccgtgcataggtggctcgaagtgccggctgacgatgcaccccagtcgctcgcgctcctcctgtgccgcggcagcgacaatggtggcggcggcagcgtcgccggcctgatcccatggtcctcccggacacccagctcgcgcagctgcagcaggagcgtgtccacgctcggcgtgccatcggcgtcgtggacggtggtcggcgcgggcgcagtgaccctcgtcgtcttcaccgacgtcacggtagcacttgacgtcgtagctcatatgcatatacgccggcggaggagcgcggatgcggggggtgcagcggaaggcgagcgcggcggaggagcggcggcgggcgagcgcggcggtgggcaaagcagcggagggcgagctaggcgaagcggaagacagtggatgggacggggagctcccccgtgctcggccgccaccaacgctgtgcccccgcgggtggccgacgatgctagaagaggcaccaccggatataccacatcagcaaaacccgataaagacgacattgcgacgaggagagaaatagccgcgtcaaggctcgcctgggacgaaggcacgaagcttctattagtccagattccgctgaggcccacttgcggaaacggcccacggaaacggcccatagagatggacgtgggatga

SEQ ID NO: 83988 - DNA, 1246 bp, Oryza sativa
  Clone ID: PAT_MRT4530_83269C.1
atggtggccacggcagcgttgtgctttacagttgacggcgatgcacggacatttgggcattgcacggtggcaacacgaatcgccagcggcgtcggtgtgatgtcgcaagtacaaggagaagagtccaactggtccagaatccagatggagaggggcatgaaatctgacggtttgcccactaaacatcagctggcggcgggcggccggtgagcgcggcagcagagcggtggcgggctgtgggcggagcggacggcgggcgagcccggcggtggagcggaggcagcggaggctacgggcggagcagccgcgcgccgtggccgccgtcgtcgttggctctccaccatcgtcgtcgccgtgggcgaggctacacggcgcggccgttcggcgacatcggccaggcgtcgcagtggccgtgcataggtggttcaaagtgccggctgatgatgcaccccagtcgctcacgctcctcctatgccgcggcagcggcagtggtggcggcggcagcgtcgccagcctgatcccatggtcctcccggacgcccagctcgcgcagctgcagcaggagcgtgtccacgctcggcgtgccatcggcgtcgtggacggtggtcggcgcgggcgcggtgaccctcgtcgtcttcgccgacctcgcggtagcacttgacgtcgtagctcatacgcatatacgctggcggaggagtgcggatgcggggggtgcagcggaaggcgagcgcggcggaagagcggcggcgggcgagcgcggcggtgggcaaagcagcggaaggcgagctaggcgaagcggaagacagtggatgggacgaggagctcccccgtgctcggccgccaccaccgctgtgcccccgcgggtggccgacgatgctaggagaggcaccaccggcgggagaaggggaagaggcagaggaagcgattgtttcttggtcgccggccgcctccccctccctcccaaactcgctggccgccgctccgccaccgcgctcgcgctccgctactctgtccacggcctgctcgcgctccactgctcggcctgccgccgcgctcgcaccttccgctgctccgttgctgcgctcgccctccgctacgccggccgcatccatgctcgccgctccgcccgctgcctccgctccgccgctggacggccgcgccgcgtagcctcgcccacggcgacgacgacggcggagagccgacgacgacggcggccacggcgcgcggctgctccgcccgcagcctga

SEQ ID NO: 83989 - DNA, 451 bp, Oryza sativa
  Clone ID: PAT_MRT4530_8326C.1
aggaaggtaaaatgaagaattggtattgataattgagggaggttgtatacatgatttttcgattgcgaggaaactcagattgtaatatagactttctttttctaatactcaccaggaatacgaatacggacaactcaaaatagaaacaaatacagattacttcgaatacgaataaaaatcgaatatgatcggacacgaatacggaaacaattttttcggatatccgagttattatccgtatccggcggaaaccctgataccatatctgtattcgtatccgggaggaaatatccgtattcgtatctgtatccgagctatctgaaaattatccaaaccgaaagatatttgtattcgcttttctctgaagcagcgaaaactattcgctctgtttctaatagaattagtccaagattatggatgagttttattaatagtctacgtttaatattta

SEQ ID NO: 83990 - DNA, 951 bp, Oryza sativa
  Clone ID: PAT_MRT4530_83270C.1
tcagccgccgccgcagcaccacccctcgctgccctccttctgcctcgccgctgcccgagcgggccgccggaaaccgtgccgcggccgcaaggacggcggtggcggggccttctcccccgaggtcgcggcgttagccctcagccctgacctatcttcggggcgatgacagcggcgttgggcgacggcgagcgcaaacgacatggcgaggcggcgctgccggatccggcgtctgctgcgcggatctggcgcgagggctgccccgagccggcggcggcgcgcgcgggggcggcggggtggccagatccggcccccttctatccggatccggagcaggaggccgagccccgacccccaggcggcgaggcggcggggtgcggctgtgcagagccggcgagggcgaggctgtggcgtggccgtacggaggcgaaggcggcatggcttggccgtgcggagacggtggcgcagctgtgcggaagcggaggcgcaggcgctgaggtggaggcgcgggaatgagccggctggtgcggcgctggcgggaggaggagcgtcggctggctggccggtcggccggcggcggcggaggcagcgcgtgcacgaggtgcgactggcgagagcagaggccagtgaggctcggccggtggcagcggaggcgaccgtggtgcgtggaggtgcggtcgcggtgccggtgcggcgcgacgaggctgcccgcgcgtggaggcagtggccggtgcggcgggaggagaggccagtggcccggtgaggcgcgaccggtggcagcgcgcagagactggccggcggggggcgccggtgcagtggtgcccacgctccggcggaggttttggatggcggtggagcaatggtacatgtgtggtagatcgacaggtggtggacggcgggtgaaaacccagcccggccttggccggacaagcatcgatgacgttcgagcgtcat

SEQ ID NO: 83991 - DNA, 744 bp, Oryza sativa
  Clone ID: PAT_MRT4530_83271C.1
atggagcaagagcaagtgatgtcccaggagagcaatagctgcacctgcagcagcagcagcaacgacgcgagctcggccgcctgcagctcgctcaacgcgtcgtcgccgagctccgtggactccgggagcgccggcggcggcggcggcggcaagaagcggccgcgcagtgatcacctgaagcacccgacataccgcggcgtgcgcatgcggagctggggcaagtgggtgtcggagattcgggagccccggaagaagtcgcgcatctggctcggcacgttcgacaccgccgagatggccgcgcgcgcgcacgacgtcgcggcgctcgccatcaagggccgcaccgtgcacctcaacttcccggacctcgcgcacctgctcccgcgcgccgcctcggcctcgcccaaggatgtccaggccgccgccgcgctcgccgcggccacggcttcgcccgcgcccgcgctctcgcccacgccatgccacgacgtcgacgccgctgccgatgacgagcccgagccggcggagcctgagcaggcgacggcgccggtttgcatcgttgagaacgggacactgcagcaggacggcggcactggactagactacacgtatttcaccatgccagatgctcttctagagttcgggttcacgttgccgccgccgccgccgccgtattattgcggttcgccgtgggatgacgatgctgacgatttcttctttggtgagccactggtgctctgggaacactga

SEQ ID NO: 83992 - DNA, 516 bp, Oryza sativa
  unsure (1)..(516): unsure at all n locations
  Clone ID: PAT_MRT4530_83272C.1
cccacgcgtccgcccacgcgtgcgcgcaggcgtgcgcattgttacacatgcatggggctctgaattttatataggcaggcattgtacaaacatagctaggcaatgaattgatcagctatataatgtgaataaatttcaccctcatagatagcaacatggtgagaactgacatttacaagcatatatatatattgtcagtcataaaacggtttgtactatgcgtactatacagccgcataagtttctactaaaatgagcagttgctgattattgatgtagcataccgcagttgctcatatataatgtgaataaatgagcactgcagtgtggaagttacagtaccagcctaccggttaccaccaacgtgcattagttagagccaacaaatgatttccctacaatagaagtactccctctggaattttttaatgtacgacgccgntgactttttgacaaacgtttgatatttcgtcttattcaaaaaaaatatgtaattataatttattttattatgac

SEQ ID NO: 83993 - DNA, 713 bp, Oryza sativa
  Clone ID: PAT_MRT4530_83273C.1
gggctgaccacgcgtccgggcagtaccaacagccaagcaaagggaggcaaagttgccagcgttggggatcaggcgtacggtttcttcaaggggccatggcggctgcggcgccgagttcggtggtagccggactcgtgtccgggctagggctggcgcgctcctcgttaacgcccagcgacggccgctctccttccctctcgcccctgcatccgccatggcccgcggccccgcggctcgtctgtaggagcagcggagcccggccccccagggagagagccgtggccgccgccgccgccgccgcaaattctccgcggcagcagcagcagctaggagagcatgagcatgaggaggctgtggcagcggcggccatggagccggagaggagcagtccccatgaggtcaccgtcctttctttctccttggtttggcgattgattgattggttggtcccgtgcaggtgagggaggagatagcgaggtgcttcgatctcgtgcgccgcctcggccgtggcgccgtctacctcggctcctccagggtgccgcccacccatccccattacctccatgccgccgagctctcaagggagatagctaggctgctggactgcaccacatggtccggagctggtccaggtttcatggatgctgccacccaaggcgctcttgaggcggcaaaccggtcggtggcttcaagattggcaatgaggcgggtga

SEQ ID NO: 83994 - DNA, 393 bp, Oryza sativa
  unsure (1)..(393): unsure at all n locations
  Clone ID: PAT_MRT4530_83274C.1
gcagaaatttnaacaccatttttttttttttcggcctttctttttcaagaggcttttttggcctttttttggggtttagaataattgaaaaggggtttttaaattaattagcattgggcatagcacatttccgaaaaggttgtttggggggtttttaccttgtaaagccttgttctttatcccctttttggttatgtgggggtgaaggtgggattattttttgggggcttttggaataaaaaaaataaggatgggtgtttttgaagttttatttattgatttgaggtgtatcttgttatatgattttctttttggttgagatataaggtttcttatgttgggggcttataaagggacctttaatattttgtgttttttttgaatacttttttt

SEQ ID NO: 83995 - DNA, 452 bp, Oryza sativa
  Clone ID: PAT_MRT4530_83275C.1
aaaagcactgaaaagcataatcatgtattaatcccttgagacttctcttcataccatcaagttttggcaataaagttgtgtagattaaccgaggagataaagtaattaaccatgcatttatgcataagtgtgatttagcttgcacagaaacatgtatcttccatgccacagtacctatctttagaggtaggaatgaaatgaaaaattgaacaccagttagcccctaatgtaaatcagtaagatatagtccaaacgtagacaccaaacgcggcgagttacggaatatagaacctgcaatacaagaaaagatgatatcaaaatacagctatatttctttttcttgaaaaataatgttctgtaaaggtcaaagcaatccaacacaatcatggtaccccctatagttacaggcccttcccgtcaatatcatatatatgcaagccatcgagatgaca

SEQ ID NO: 83996 - DNA, 162 bp, Oryza sativa
  Clone ID: PAT_MRT4530_83276C.1
atggagaggctgcttctaccaaccgggcgcaacactgaaggcaatgcacctgtagtagcgcagtgcagcaggatcaatcagtatgcctccagagttgagagcacaaagctgaccaaagactggcaaacctcaattaagattctttctgactttggaatttaa

SEQ ID NO: 83997 - DNA, 1399 bp, Oryza sativa
  Clone ID: PAT_MRT4530_83277C.1
ttacttctcttcgtctgattgtgaaggcccgttgatggcatcagcaaagtactcaactatgtcattctggtctggggaatcaagtaaaatgtcggagtctgaggccaggaaaggagtacctgcgtagttctcaagtgcttccaagtctcccaaacttgttaaatctgctgttaggtcagaaaggctgaaattccagagctgtcctaaagatctgatggagtcccttgacgagccatctggtcctaactgcagttgtcctgtgttctcaacatcggatacaaatgttgaatctagagctgatgtatccatggttatccctggtatctcagatggagtgaaaggagcatggttgcttgatgctgccgatgagggactcacagccatttcagatgacatagcactgcaggtagcgccaacatgagcagtttcaggtgcaccgttgtccacaaccatgtcatttccagagttcatgcgaattggatgataaccaccagctgcagggatcccattcactacatgcccgctggatagaccacaggccattgagtcaatgtgaggctggccaggagcaggcatcataggttgctgaagtaccggatatcccataggcaaattattaactggcataggatgcattccgttttgcataggagccaatggaacatttggaggtgctggatatttcatcaaattgtattggtgctgcagtaaatggttgaacaagataatctgccttttcaatttcaaccgtatatagtaagcacgaaagaattcagagttctcttcttcaagtttctgccatactaaagtagtgaaaccaggttctattcttgcacgagtagaaagcgtcctaacaacctctcctttgttcatgtatagctgtagacagcgctctatcaaattctgcacaagttcaatatcttcacgggagacctttctattatcattactagcgatagacaatgaaccagagtctcctccaggaccatcagtggccattggattcggctggttactttgcacttcattagtaccttgtgctgatgactgcaactcggttgggctctgaatatcctgagaatccttcattgcaacatatgacataaaaacagctattccaagatcaatgtttatcctcaggcagtcaggcataacacacaagatctcgtagctctggttctcctgccctcttgacatgacagagctagagacagagtcagagaaagagagcttgtccaggccgctgcgtggggcggggagggcaggagaggagggagtccgtcgccgccgccgccgccgccgcgctcgctcgccgtccgtccgcgcgcgcgcgctctgctgctgtgcacgctgctgctgatgctgcgcgcggcgcacaccagaaacaccccccttactg

SEQ ID NO: 83998 - DNA, 210 bp, Oryza sativa
  Clone ID: PAT_MRT4530_83278C.1
atgctcatgggggagaaggatgatgttgacccgggcggcgatgttgcctgtggatgtggagctgacgacggcggtgacactgctactcatgaaaaatccgcggtggcagtggcggcttcactcgtagatgcatctgtcgacagccgcttcttcgtcgcatgtggatctgacaacgacagccgacgcaacctcggtgacaacggtgaatga

SEQ ID NO: 83999 - DNA, 1370 bp, Oryza sativa
  Clone ID: PAT_MRT4530_83279C.1
cagggatcccattcactacatgcccgctggatagaccacaggccattgagtcaatgtgaggctggccaggagcaggcatcataggttgctgaagtaccggatatcccataggcaaattattaactggcataggatgcattccgttttgcataggagccaatggaacatttggaggtgctggatatttcatcaaattgtattggtgctgcagtaaatggttgaacaagataatctgccttttcaatttcaaccgtatatagtaagcacgaaagaattcagagttctcttcttcaagtttctgccatactgaacatcaaagagtatcaaacaaaaatgagcagcataaattaaaaggctaatggacatatatagcaatctggaggctttatatacaatagacatagcataacataagttgggcttaggatgtttacaaatttccatttgaccgtgcattcctatttctttaagtaaaatgtataaattgtcagtagggtaaagcatgtacgattctacatacatctggtactgagttttgggatgccgcatttatacaaatttaatagagagcaacaaatgcacggtttatatcaaacaaattgagccaccatcttattagcaaggtttacctatgactgagtaagatgaattccatactggaagcaaaagcgtatattagcaattacaataagtacgggaaaaaacaaagattacacaaaactagtgagtgcggtatgaaaccctcaaaacattaatatcatcatcaactgattttgcaacatcacctaaagtagtgaaaccaggttctattcttgcacgagtagaaagcgtcctaacaacctctcctttgttcatgtatagctgtagacagcgctctatcaaattctgcacaagttcaatatcttcacgggagacctttctattatcattactagcgatagacaatgaaccagagtctcctccaggaccatcagtggccattggattcggctggttactttgcacttcattagtaccttgtgctgatgactgcaactcggttgggctctgaatatcctgagaatccttcattgcaacatatgacataaaaacagctattccaagatcaatgtttatccttcaattcgattcgagccgggaaggatgcgaggcgaaaggagacagacagacagacagatagacagaaacagagacagagacagagaaagagagcttgtccaggccgcgcgggggcggggaggggaggagaggagggaggccgtcgccgccgccgccgccgccgcgctcgctcgccggccggccgcgcgcgcgcgctctgctgctgtgcacgctgctgctgctgctgcgcgcggcgcacaccagaaacaccc

SEQ ID NO: 84000 - DNA, 221 bp, Oryza sativa
  Clone ID: PAT_MRT4530_8327C.1
atggcgagctggctgttctgctccgggaaggcggcggcgcggggcgagtttcgtgaagctggtgttccccggcggccacgtcgagctgctcgaccgggcggagccgggcgttcggaggtgatggcgcggccacccgcggttcgaggtggcgcggaccggaggttttctgagacccccgcgcgcggccggtttcagcttacggggtcgggacgccgtgccgg

SEQ ID NO: 84001 - DNA, 261 bp, Oryza sativa
  Clone ID: PAT_MRT4530_83280C.1
aatataattaaaaataacgatcgagtaatggggctgatgtgtatacgcacacacacattggcctaggtgtttcttggacctagatcaagtacatatacagggccacagcgacaacacttggccgatatgatcgaaatcgctatgaccatgacccagacacagccgacacacgacagatcatgatcctgcgaccaaggcccatgatcacaggcacttgcactaactgtgtccgtattcaaacattgagctgggggaggtgaa

SEQ ID NO: 84002 - DNA, 702 bp, Oryza sativa
  Clone ID: PAT_MRT4530_83281C.1
atggatctcgagaacgcatcatcaactgccctaactgggcaaatcaacaaccaccatatcaaatcaagacgcgaaggaagggccgtcggcgcgcgggacgaggatcgatgggagcggcctcgtctccggcagcggctgctgcggcgcgacggcgaggcgccagttgtggcagactcgtgccatgcggctgcggtcgacgaggcggaggacgtcggcgtcgaggtcgcgccatggcgcgtcgtccattggagaggcggaggcgcggcttgccggtggcaaggcgaggaggcgatgcgctattccgctgtgtgcgcgccctcgccgggattggttcctctgcttctcggcacaggaggacatggaagaagtgggtgggctaccatcctgacactgtggtacagggctcccgaggttcttcttggcgcaacacactactccactccggttgacatctggtctgattcatgccttgacagtgttgatatatcttgtgcatttcagctgagttggtcactactcaacctcttttcgctggagattccgaggttgctgggcaccccaaatgagcaagtttggccaggagtgagcaagctaccgaactggcacgagtacccccagtggaatccctcgaaagtgtctgatcttgtccatggtctcgatgctgatgctgtactcaacgacgtgaacaaggagctctactga

SEQ ID NO: 84003 - DNA, 1218 bp, Oryza sativa
  Clone ID: PAT_MRT4530_83282C.1
atggaggacgagctgggaggcgctcctcttctccatgagcctccacctccgccccagactccgccccgccggcgccgcaccggcgtccccgtcccaattctccacggcaacaactgcaacagcgacctctatttctggctgcctttggtcgacgcgaagggagtccaccgcggagacctgcgtttaccggacgttcgcggcatcgctgaggcggtccgcgacggcgccagggtcgtgtacgccgacgtcgtcgatggcctcggcggaggtcgcgtggtggcgcgcatccggggacagctggtgctacttgaggtagcccctctggctgcctatgccggtggagatggcggcggcggcggcgacgacggcgacgaggaggaagaggtgctggagcctgacgacaaggaagctgatgcccaggagcaaggaggaaaaccagacttcaagactaagaagaagcaacctccaagcaccacggcccacggggtcaggggaggtccggcggtggcggccggcgacgcgacagccgccgccggcggcgagctccacctctcggcgcagccgtgcagacgttcagtagagctccttgttcacgtcgttgagtacagcatcagcatcgagaccatggacaagatcagacactttcgagggattccactgggggtggatctctgcggccacgcgacgctggcatccgcccacttcctcttcaccaccgtcctagcgaagcagcagcacgccgccatggtcgagttcgtgaccaggtccggcatcctgaccgccaagaaggttcctgctccgcgtccgccgcggcggggtcagaaacgcgcgcggcatccgaggaggcgccgggaacggctgcacggctgcgccgagaggtggagctcgccggcgacgccggctgtcgcgtcgccggccgccaccgccggacctccccgtgaccccaggaaccaatcccggcgagggcgcgcacacagcggaatagcgcatcgcctcctcgccttgccaccggcaagccgcgcctccgcctctccaatggacgacgcgccatggcgcgacctcgacgccgacgtcctccgcctcgtcgaccgcagccgcatggcacgagtctgccacaactggcgcctcgccgtcgcgccgcagcagccgctgccggagacgaggccgctcccatcgatcctcgtcccgcgcgccgacggcccttccttcgcgtcttga

SEQ ID NO: 84004 - DNA, 162 bp, Oryza sativa
  Clone ID: PAT_MRT4530_83283C.1
atgcgagaagaagagggagaagaggacggacggacggcccggcgttctcgaggtgacaggcaggggaggatgagcagagaaagaggtcagatggaagcaaagtggagtaaaactattctcaaggaacgaatctggacgatgaccgccagtgatacaaaatga

SEQ ID NO: 84005 - DNA, 416 bp, Oryza sativa
  Clone ID: PAT_MRT4530_83284C.1
cccgcatccgacgcatctaggcaggggatattctttggttatccttataagcattcaaactcgcattcttctggatccaagagaagatgtcaacggcgtggcgataccgacgagtgcagaaacggttgcgcacggacaaggctaccacctgcgcccactgttgagccttatctataccgagtcccgcgcgtctcctgtagagagtatggacatggggctgccgagcggctactattacgacacattcgacgaggaggcgcctttcgagcaggggctcgcgaccatgcaatacatatcatgtgctgatcctgcgaaactattaaatgatggatctgaggaactgacctgcagttcattaagatcttcgaccaggtttcaactgtgggcaataaccattctagaccctgtccttggac

SEQ ID NO: 84006 - DNA, 1558 bp, Oryza sativa
  unsure (1)..(1558): unsure at all n locations
  Clone ID: PAT_MRT4530_83285C.1
cccacgcgtccgcccacgcgtacgcccacgcgtccggctatgtttgtcaatgaatttctatgcacctttttccttgagttttctgtcactattttgtggttgtttgcaagcatttagaagcattggcttggtcttcagatacaaccaaaaaaaatgcgcttctttcttgccttctcgtttaccttgacttatgggaatcattgcaagattgagaagaaagctgaacacctggcctttttcttcaattcaaggactagcataaaagaaaaaataagtttgattaatgatgacttgacttacaacatttttaactggtttcttcttatttgattcgtccgtcccactcactctgtgtttcacttgctgcctttcagttgcaaagcatagctgttctcacacctgccttgtagctagagtggttagcagagaagggaagcagtggagttcaggttcagccatggaggttgaggcttcctacagctatggcttccttccttcaggcaggcaccagccttatgcaccacctcctccccaccctgcagaggaaggcgaattgtgggagtactttccatgccctttctgttacatcgaggttgaggtgcccttcatctgcaaccatcttcaggaagagcattgctttgacaccagaaatgctgtgtgcccgttgtgcgccgacaatatagggagagacatgggtgcccatttcagagttcaacactcacatcttctcaagagaaggaaaccttctaggcccagcagctcatggcctacaccctccaacaattcagacccctactttgaggggcctccacagtatatgatgaacaacaggacataccaagatcctgcacctgatccactgctctcccaatttatctgcagcatggctcaaactgacactaactcggataacacaaacactgaaattgcagtttcagcagtctcacatgatcagaggttgagtcagcgtgtgactctgactgatgatgcatccaagctggaactcaaggaaaggttgcaaagaatcgagtttgtcaaggagataatcatgtcgacaattctttaatttgttgtctagtgttacttagcaagttttatttatgttttgtgttttgtgagcgcagatgtatcagtcatgtatgcgcaacatcccctggctcacagatatataatctataccatgtaatattctagtagatgaatgcttgcatactttggctccaagtttgtcatatgaattattatacatctggcaggagaatatgccatatcccatactaagagagcctacctctcaacttgttctatttctctctgtaggttgctttttggatggactaatatgcaaaaaccagctttcattaatcaaagcctagtcttaatctaaccaggtgctcatgatgtatatgcatcttcaattatgagatagtacctgtatatgcaagggaacaataatagctttcttggaccacttagcaaatctggagttatagggcccgtgagtaagcaatcttctagagnactccaggtctacatgatgctgttttatataacacat

SEQ ID NO: 84007 - DNA, 375 bp, Oryza sativa
  Clone ID: PAT_MRT4530_83286C.1
aacaaaaaacttttaacatagggaaagcctcacaaaaaaaagccagctccatttgtgggacccatggtaacaaaatacagtgtgcggcccctggtttacaattttgtactagaatggcgcatgaaaacctgtttacatttaaaggttgtttaagcggcataatagccgttaaatataacttatgatactacttagcatgacacgtaatatcagggtgcccaattttgatcaagcccccgggcccccaggtacctttaaacttatgcaatttttagccccttcacgagcattttcaacgcaggtgccctactgtacctttttgaccggcttttactttggatttggggaattttgtccattaaccaaatcttacca

SEQ ID NO: 84008 - DNA, 417 bp, Oryza sativa
  Clone ID: PAT_MRT4530_83287C.1
tatgaccgcgcgtaacccaccgcggcggcggacgctctataactactggatcccccgggctgcatgaattcggcacgagctcgtctcccacacgggcaaagagattctccatttctcccggcttcctcttctcctcctcctatacataggcgtcgccgcgtacgccattgccagcctcgtcccaatcccaccacctgcgccacgcgcgcgcgcgtccttcgggcaccctcgcaccgcaccgtccgttggcgcgcggttggtggggcggtggtggtggtggtgccttggctagtttggccggcgcgcgcggggagggagggagggaacgagacgaagaacgaggatgctccgggtttcaagttctcaaaaacccctgtgggttccgggggcggggggtctgaaccctaattttctggt

SEQ ID NO: 84009 - DNA, 420 bp, Oryza sativa
  Clone ID: PAT_MRT4530_83288C.1
aattccacccctttttttttttttaaacccgccaggagttaatcctgaaaccggggcaaaaacaggtttaaaaaggggaggggaaaggggcccccttaaggggggtaaaggaggggcttattttacattcgacgttttttggactagggggggacaaaaacaaataacttaggggctaaaactaaattataagtatccttcaaaaaacgggggggggggggatgggttttttggtgacaatattggggggggggagacgggcttttgaattgggggggggggggacataatccgcgggggcgggggcggcggcaaagaaacaggcgggggagggaaatgtcttgggcgggggggggggcaaaaaggcaggggggggaaaaaacactggggaggggggggataccaccggggccggggggg

SEQ ID NO: 84010 - DNA, 279 bp, Oryza sativa
  Clone ID: PAT_MRT4530_83289C.1
atggcggtggcggaggtggagacggctgcactcggtgacggcggcagcggcggcggcggcgggagaagaagagggagagggcatttattacagtccatgatgcccacacgcaggacttgtcttcagcactgtccaggcattaattttgaacatgaccagcgtgtgcctcgtggtaggcaaacacactgtcttcaatatggtgcttctactgatatgcgttcgatagagaagttcatgtggcttcttgaggtgctctataaggaggaaggtgaccagtga

SEQ ID NO: 84011 - DNA, 130 bp, Oryza sativa
  Clone ID: PAT_MRT4530_8328C.1
tgtttttttccccgagagagattcgttccaaccaagcccggccgctttcagcgacttcttcttggtgagcaaatcatttgagagtttagtaacgcgaggaagcgaatacgaggatgactgtgtagttgcc

SEQ ID NO: 84012 - DNA, 277 bp, Oryza sativa
  Clone ID: PAT_MRT4530_83290C.1
catcctatggtctagcacaaggcatcatctgaccttcccttgctggacagggttcctctccctatgggtcggctgcacagcctccaggctatggttctgggcgacagcagcgaatgctgggcagtaattatgaagctcctcatggacgcaataaattgggcacaaatttgtgatcgatattatcttatttgcaaatagagatttgtatacttgatttctttccgggccactgaaccatgtttaactgctctgagacgtgacaagaacctctgctgca

SEQ ID NO: 84013 - DNA, 342 bp, Oryza sativa
  Clone ID: PAT_MRT4530_83291C.1
atgcgcaccagagctgcagagcactcccgacgaacgtgctgtagcaaaagcccgagctgcacggcgtgggcgtgcacatgccgggggaagcaggcgcagtctggtggtgtggatcctcaggcgggcgcggcggggaaagctagcttggagccatcacgccacgcgcagcaggtggtagcggagatgtacgccggcgggtggattgagattttgaggatcaaggctttcatcatgtccggtgatggaaagcagctcgagctccggttgacacagagctccgtccaccggcggccggcggggagcacgggtcttcttgtcagagacttcggtggtgttatttaa

SEQ ID NO: 84014 - DNA, 2823 bp, Oryza sativa
  Clone ID: PAT_MRT4530_83292C.1
atggtttgttttgggtcaaaggctcttcgacggaagggtgacaaacaaaggtgtttgcctgagggagatattgatgacagcttaccgatgaggagaggaaggaaggataagagtgagaagcctcgaaaagggggttctagttcaagcaacagaccttcagctgagaaagctaaacatgggaggaagaagagtggggatgggaagaagagcaaagggcgtgggaagagttgccattcagatagttccatagagatgaatcctggccatatgaagaatgataatacattactgccctccaaggcatcaaagccagtaacaaattttctcaggaaaagggttgatccagaaactgcaaagtactttttggagatttcttacctatttgacaataaggaaattgatttggaggagcgtgcaactatatgtgccaatgcattagaagaaactaaagggaaagagcttgaacttgctactgacggtccaataagccacactttgcaggttcttgtagaaggttgtgaattggagcagctatgtgtgttccttcacaattccatcgaatcttttcatattattgccgtcgataaatttggatcacacgtggctgaagcagctctcaagtctctagcaacacatcttgaagatgaggcctccaggggcattatagaagatatattgattaggatatgcaaggtcattgctggagatgctgctaatgtgatgtcaagctgctatggatcacatgtgttacggacgcttctttgtctttgtaagggagttcccttgcaatcactgcaagacttccacactacaaagagatctgcagttctcgctgagagattaagttgtggttcaactcgatcaggtggaagcgatcccaagaaccaaggatgtgggttttcagacatttttaagtcttttgtcagggaaatgctgcaaaatgcaaaagatgatattgcgagtttagaaactgacaaaaacagtagccttgtgttacagactgcacttaaattatcagctggtgatgatcatgaattgaattatataatatcaattcttcttggttttgatgaggatgacactgcacagaaaaaagatcgtagtgaacaaaagaatgaaattattgctttacttgaagatactgcttacagccatctcttggaggtcatcgtggaggttgcccctgaggaactgcgcaacaatatgctgacaggtactcttaagggtgcactatttgcgatctcatctcaccactgtggtaactatgtggtgcaagccttggtagcatcagctaaaacctcagaccagatggagcaaatttgggatgaacttggttccagaatcaatgagttgcttgaactagggaaagcgggggttgtagcttctatcttagcggcatgccaaaggctcgaaacaaaacgccttgagagttcccaagttctttctgcagcattaagttcaaattctgaatcttctgatagcattgttgcacatatgctttttcttgagaactacctccaccagaaatcatcttgggaatggcctcttggtgcaaagatgagtgtcctgggttgcctgatgctgcaatcaattctgcaatacccacatcaatatattcgaccatatgttgcaagtttgctggctatggatgataacaagatcctccaaatttccaaggattcaggaggtagccgtgttcttgaggcttttctatgttctagtgctactgcaaagcggaaatttaaagtttttgcaaagttgcaaggccactatggagagattgctatgaatccttctggttcattcttagttgagaagtgctttactgccagtaatttttctcataaagaggctattgtggttgagctgttggctgtgcaaactgaactttctaggacaagacatgggttccacttgttaaagaagttggatgtagacagatattcaaggcgacctgatcagtggagggccagccaaacatcgaaggaaactactcagagagaatttcaagtggagtttggcttgagcagtaaaggcgctgggcagaacattgaagaacttctcacttctcgaagtccttccaagaagcgtaaacagaaagacaagactgatgttactactgaagatgcaagtaccaacaagcaggatttatcccacgtaggcaaaaccaagaggataaagtccgagaagacaacttgtgagaaagaatcaagcaacaagaaacccacgaacgaagattctgggaccagcatggcattcctgaagaactctgccaagaggaaatcaccaggcttcctttcagacaaaccaagtttcaaaaggcaaaaacatcataaacccaatgctggcaattcctctggcaagatgttcgttcgggacagtgctggcacaccatttgtcaggaatagcggcaaacagaaacggtcgatcgccgagcttgctgatctggctggtaaggagaaactgtctgcgagtgaagtgcgcaaacttcttaagactgaaatgcctggcaagagctagccaattcatatatcttttgggtgcagctgtagaaaacatgaacatctgagctaattttcccctttctttcaaaggttgggaagcagcaattttgtttactatttctcctcaactgttgcgagtcatgagcttgtaagatcctaggaatagattgttaactggtaacacgtgaatgctgagatagtttttttttttttttgttcaagtggggattttctgaaaagttcatcaaaccatcacagcatgtctttgctgaacatctgaaaataactcgtactaactccgtaaaaaaaaaaaaaaaaa

SEQ ID NO: 84015 - DNA, 402 bp, Oryza sativa
  Clone ID: PAT_MRT4530_83293C.1
aaacacatctcagtaataattgagctatgttggttgcaatctaactaaaagtgacatgttacaagaacttttttttgaggcaggctcttagcacaactgacccaaagttgtcgaggacggctggtcaatcttcttcagaccagtgacagttggctaaggttggtttttaaacgcgagaggcggatttctttaagagggatttgaacacacgagggcgccgatgcgagttaaccgacactggagattttgaaaacttgagtgagtacttagaggttcttcggtacatgcactgggcgtttatttggtcaggcctgctgatgatacatgcaaacgtaggccttggtataccttgagaatgctcagatttttcgaccagtgctctgaaatatggcccaaccgttc

SEQ ID NO: 84016 - DNA, 405 bp, Oryza sativa
  Clone ID: PAT_MRT4530_83294C.1
atggcagtgacaatgtggcaatcatcgttgttggtggcaagtgggctatgccagcctggtgttggatgcacgaccataggcgtgggttgctcgatggcaagcgggtcgacaacgggcttggctggcctggcattcgatgacgctggtaggtgtgatcgcaacagcttgggtcgtagtggaggacacacaatgaggtgggcgttaggtggcatgaagcaaactcttctccagacacatgccctcttgaggcagcggctagccactacaagatggccacgttggcaggcttatactgggaagagcggatccactcttctctctcaccctctacttctgcaactcaaagacgtggatgaagtggagcatatcggaatgtcgagctcctacctattggccgaccgataa

SEQ ID NO: 84017 - DNA, 693 bp, Oryza sativa
  Clone ID: PAT_MRT4530_83295C.1
tgacgcgcatgcacgcgcgaagcttggaccctaaggcgccttttttttttttttttttttttttttttttttttttttttttttttttttttttttttttttttttttttttttttttttttttttttttttttttttttttgggaaaaaaaaaaaaggggcaaaatttcccaaaaaaaattggggggccctaaaattaacgggggggggaccgaaaaaaactagggaaaaaaaaaagggggaaaaacccccaggccccaaaaaaagggggaaaaaaggccccaaaaggaaccccccatttaaaaatttggcccgggaagggggccaaaataaaaaaggggggttgggcccaaaaaaaaaccaaaaaccccccgggggcctttggggggggagaaaaaaaagggcgggaaactgaaaaaaaccttggggccttttccccgggggggggggggtaaaaaaacccggccaaagggacagggaacggggcccccaaaaaaaaaaaaaaaagggggcccccggaaaaaaaaagggggaaacccaaaaaagggcccctgctttggggggaaaattggcctttggcaaaagttggaataaaaaaaagaggccgggggggcaccaaacaacggccaaaggaaattggccccggaataaattttttatggccccccgcccttggaaagtttgtcccccggg

SEQ ID NO: 84018 - DNA, 432 bp, Oryza sativa
  Clone ID: PAT_MRT4530_83296C.1
atgcgggccccacaaggcagtgactcggggagggcggtccacgccacgcaggcggcggggttgcacggccccgatctaccgcccggtagatcggacagcggaggcggctcgcggccgggcgcgcacgggcacggctcaagccgacccggcggtcgtggcgcgcggcggcgcagcacgacgcgacggcgatgcaaggcggcgaccggcggcgaccggccggcggcggagggcggtggcgtcacagcgacacagacggcgacagcggcggctaagcggctaggcggcggcgcggcggctaagcggcgcgggagagagggaggaaggggaggaggggtctcaccgacggcgaccgacgacggcgagcgacggagggcgatggcgacggcgagacgggctgcggaaccacctaagggatcaaaagggatgagttag

SEQ ID NO: 84019 - DNA, 1754 bp, Oryza sativa
  Clone ID: PAT_MRT4530_83297C.1
cttgtggtgtgctccgctcttcctgcacaaataagaggtaataagaaaactaaattcctttttttggtgatttatatgtcatttcatcatttctttttcagttttaaaacatatagtacatatgattccttccatctctaggtcaaaccataaggaagatcggaagcaatattccgatgggactgaaaaacgtgcagccggcgagagaggagcacaagaccggtggcatcctccgccgctccggcgaagaagggaatcaaggagaagatcaaggagaagctccccggcggcaacaagggcggccagcagcagccgacggccactgcggcgaccggcggatatggtgccggcacgggacacaccgccgccgctggtacaaccaccgacgccggcgggacggcgtatacaccgacgacgcagccgacgcacgagaagaagggtatgatggagaagatcaaggagaagctccccgctccccgggtcgccgacaggtggggccctcctgtcgggcccgtctccctcctccagctggcgccgccgcgcccagcaaccgtcaccgcgccccgctcctgcgtctcccgggccacgtcgcccacgtcaccctcgtgcccgcgtccccgcgcccacttccccctctctcccgcccgcgcccgcgctcgagacggccgggattcaatttttgaatcccgcctctctctcctccccacctctccccactccgccggcgaaatcgcgatctccccgacaatccgccgccggagccccgtccgcgccgcgcgccggtgagcttcgccatggccggcgccttcggttgccgccctagccatccatggtttccccctccctctctaactcatcccttttgatcccttaggtggttccgcagcccgtctcgccgtcgccatcgccctccgtcgctcgccgtcgtcggtcgccgtcggtgagacccctcctccccttcctccctctctcccgcgccgcttagccgccgcgccgccgcctagccgcttagccgccgctgtcgccgtctgtgtcgctgtgacgccaccgccctccgccgccggccggtcgccgccgttccggctctcccaccgctccggtgtactttgaaatagtcgccgaggttcctccagcagcagagcaaggcaaatggccgaccacccacccaaccaccgtggagaaggcatggatgattttgtggctgaattggcttgcatgaccttggtggtgggctaccccaacgcgccagagtactcaactgttccaccgctcagtggcgagcttcctcaccgtgttcgtctggaggttcatggctatgtggacacctgccttgctaatatggtggttcaggcatctggaggcaccgcagatcacgcctgtcaggaggcagcatatctggtgatggccaggcttcgtgatcgccacaactacactttctgcaacacggcgtaccgcttccaccctcgccgagcaagcggtgatgacgtcagcacctttcgcccgacggccggcgagaacgacaccaccttcggccacatgtgcgccgtgatgaggggaagggacaggatgcactctgacctgcacaaggcgtccaaggccttgaatgatgggaagctcgtgaggatcatagctctgaaggatgagatagcacgcctgaagaaggaaaacgctcagttgaagggtttcccagcgccaggaggagtccggatccgcaccacgcccctcaagttgacgactgtacccatgcgcattca

SEQ ID NO: 84020 - DNA, 2811 bp, Oryza sativa
  Clone ID: PAT_MRT4530_83298C.1
atgtcgaagcaaaagaaggatgaggtggatccatccaatatctttccaatctcattggatgatcttgagggggatgcacgcaagatcatggaggagcgaatcaaggcggtcacacaggagatgttgatgaaatcatgcaccaagactcgtcaaggtgtggttcttaatcctggaccgtcacccaaagtcatctttgatgagccgagttacaacctaaagcctctgcaagtactagtcaagcccctgttaatcaaatacatagcaaatctgatggggcaatatgcaaacaatcgaggatacccgcaagatacggggtatggtcaatataacaatattgcgccacaacaactactttttaggccaccaaacccaccaccaaatcgagcaccaaatccaccaaggcctgaaactatggaggatttgattaggactattattagggataatttttggtttgaagtaaggaattgtgctaaggttcaccaaagtccgtatcctgattattatgacaatatcccatatcctcgtggttatagagttcccgaatttactaagtttggtggtgaggatagtaggaccacatgggaacatgttcaatcggccataaatgaaggacgattaaaatttaccgatggttccaagatgaagcttgatcatgatccttttccggtgaatacaattgatttcaatgacaagaaggtgttgattcggccggagcaagccgaatctaccaaggggaaaggagtgatcattggagagcctaggcctaagatgatggtgccaaaaaattcggaggttagtgtttggaaggagaatatgagtgaagcttcaaattacaaaactccaagaaagactaaggtgacctttgatatgctcttgaacaagtatgagaaaagattcacgaagggtagcttggaggcttcgtcgccttcaagtaaaatcaacaaggggcattacatacctcctggaaccgagtcgaaatcaaggtggatgcccaaagatttaatggctacccaaaagaggaggttgcaatgtcttcgggctcaagagttgcgggagagagaagccgaagagtggagagatagaagattcaatgagttgggaccgccgcctacaaagatgtggaggcgtaagtccatagagattgaagaactggttattgtgcaaaaggagaaggaagaacaatcgattgctagagatgattcgctaccaaaggaagacatgaccatcaacatggtgtgtatattgcctatggagttttgtgctacagatgaagccaaagttgctcaactttcactaggtcctaaagatgcggtcattgaaaagcccgatgagtcaaaccgtcatatgaagcctctttatcttaagggtcatattgatgggaagccggtctctaggatgttggaggatggaggtgccatagtgaatttgatgccatattcgttgttcaagaagttggggtgtggagatgatgagttgaagaaaactaacatgattctcaatggcttcaatggtgaaccaacggagacgaaaggtgtcttttcggtggagcttaccgtgggaaacaaaacgttgccaaccgctttcttcatcatcgatgtgcaagctaatgttattaaacacatgttgcaaatgccaattctaagtggaagaattggcaagtgggcgtatgctttgattgaatatgatttgacttatgaaccattgaaatctatgaaagaccaaattgtagttgattttatagtagaccatcatatagatattgcttatgaggatgaggcggtcgaaatagttttcgatgaaagcgacgaagaaccaaagcgaggtgggtctgtctttggacatgcagcgattaaccgagaaaggtttagaatgaaaaggccgctctttttacgcataatgaatgctgttgaagcccatgatgattattttgttcagaagagaaatacggctagtatcattgggctatcatgtttgcaaaagagttttaggaggtttatcatagttgttgctgaagtttttggggaggagtacatgaggacaccaaatgagaatgatatagctaggttatttgcagatggagaacgtagaggatttctaagtatgttgggctctttagattgtatgcactgggagtggaagaactgcccgactgcctggcatggtcagtataaaggaaaagagggagttcctatattagttttagaagctgttgcttcgcatgatcgatggatttggcatgtgttctttggtttacctggaacacataatgatattaatgcgctccaacgatctctgttgtttgcaaagctagctaaagggcagggtcctaaagttaattatactatgaacgggcacgactacactatggggtattatcttgcagatgctatttatcctgcatgggcaacactagtgaagagtatccagatgccacaaaggaataagagaaaatatttttcaaaagcacaagaatccattaggaaggacgttgaacaagcatttggtgtgttacaagctctcttcgctattgttcgtggtcctattcgtttttgggataatttgactatacgtaaaattatgagatgttgtgtgatcttgaataacatgattgttgaggatgagcgtgatgacgaggaagatttacattatgatgagctgggagaacaggtggaagattaccatgagcgtaccgctgaatttaatgagttcctttcgaattatgagaaaattaaagacaagacagttcacaaccagctgcaagaggacctcattgaacatttgtggcaacgtcatggagaccaatattag

SEQ ID NO: 84021 - DNA, 377 bp, Oryza sativa
  Clone ID: PAT_MRT4530_83299C.1
gccacttgtacgtgcacgctgccggttggaacttacgctacatgtaaggaggctccatgagagctcatctgaagctcccgctatgacaatgactatggcaaagaatcatccaaggggtcctccgtgcacaggaatgcagataagacatctcatttggatcggagtgcatatactaacggaccctctttctaccacacgtacatctcgcgtgttggtggtatgggcccaaggtatagacatgttgacttgaaggtgaacacctgctaccagagagagcctggcactatcgtatgcttaacgagcagactgaatggatcacctattggtgtccttcatggtaagttctgaaggacatgaagagagctctactgacgacc

SEQ ID NO: 84022 - DNA, 379 bp, Oryza sativa
  Clone ID: PAT_MRT4530_8329C.1
gggataaattaaccaacttaattcatctcaacaagagttgtacaaagggtctacattcaacgttgagggatcagccatagcttaacaaaagacaacaaagtgaaacaacggggcatcacgagcgggtcagttcacaggaactccagagggtcacttttatttgcctccgcagccggccatgccgagggacaccgaggcagcatccccaccaccaagtaacatcaaaaggcttcgcaacaaagccgttggatgcttgcagcttcacaggctcgagtgagccaattgatcaactaatcatcgcaagggattctttttctcgttggcgttctttcttggccgagcaggaaatcttgcacgaacgggagtgacgttctccttg

SEQ ID NO: 84023 - DNA, 2271 bp, Oryza sativa
  Clone ID: PAT_MRT4530_832C.1
ctcgttttaaacgcttcccctctccctgctgcccatcctccactccactccgcctccactcctccgccgcagcattgctaccgtctgaatcaatcatcagttcgtcgcagcgccgaccaccggatcagcaggactggtagttactgatataaacagatgctgatattgttcatttagtccagttgattcagagacacctcttatgggctataaaatttttgaaggttctttggttctactgtcgttacttcttttcacctcattggccgtggcagacatcgcctctgagaagcaagcgctccttgcttttgcctctgcagtctaccgtgggaacaaactcaattgggatgtaaacatttctttgtgctcatggcatggtgtaacttgctcgccggaccgatcacgcatatctgcccttagggtaccagctgctggcctgattggtgcaattcctccaaatacccttggcaggcttgtctccctccaagtgttaagcctgagatctaatcgtttgattggaagtatcccatctgatatcacctcacttccttctttgcagtccatatttcttcaggataatgaactgtcaggagatttgccttcttttttctctccaacccttaataccattgacctatcctacaattcctttgcaggacaaatccctgcaagtttgcaaaatcttactcaattatctaccctgaacttgtcaaaaaattctctctctggacctatccctgatctcaaacttccgagcttaagacagttaaatctgagcaacaatgggttgaatggctcaattcctcccttccttcaaatattctcaaacagttcattcttggggaaccctggattgtgcgggccacctctagctgaatgttctcttccttcaccaacatcctcaccagaatcttcattaccaccaccatcagcattgccacatcgtgggaagaaagtaggtactggctctataattgcagctgcagttgggggctttgctgtatttctgctagctgctgcgatatttgtcgtgtgcttttctaagaggaaggagaagaaagatgatggattggataacaatggtaaaggcactgataatgcaaggattgagaagcgcaaagagcaagtcagtagcggtgtccaaatggccgagaagaacaaattggttttcttggatggatgtagttataactttgacttggaggatttactgagagcttctgccgaagtccttggtaaggggagctatgggactgcctacaaagctatacttgaggatggcaccatagtggtcgttaagaggctaaaggacgtcgtggcagggaagaaagaatttgagcagcaaatggagcaaattgggagggtaggcaaacatgcaaaccttgtgcctcttcgcgcttactactactcaaaggatgagaaacttgtcgtctatgagtatgttgccaccggcagcttttcagccatgttgcacggtattaagggtattgccgagaagaccccgttagactggaataccaggatgaagattatacttggaacagcgcgtggtatagcacacattcatgcagaaggcggctccaagctcgcccatggcaatatcaaggcaaccaatgtactcctcgaccaagaccacaacccctacgtctcagactacgggctgagtgccttgatgagcttccccatcagcacatcccgggttgttgtcggttaccgtgctccagagaccttcgaatccaggaaattcactcacaagtccgatgtttacagcttcggtgttctcctcatggagatgctgactggaaaagcaccccttcagtcgcaaggacaggacgatgtcgtggatctaccaaggtgggtgcattccgtggtccgggaggagtggaccgctgaggtgttcgacgttgagctgatgaagtacctgaacatagaagacgagctggtgcagatgcttcagctcgcaatggcgtgcacgtcgcgatcccctgaacggcgcccgacgatggcggaggtgatcaggatgatcgaggagctccggcagtctgcttcagagagccgcgattcctccaacgaaaatgccagggaatccaatcctccttcggcgtaatgcctgacgagctgctgtgtggtttactggtttgtatgtttgcaggttgcagcaattcatttagaattaaggctggtcgtgatggcctcttcaatgtagccagaagctttcagcactggcactatgtagaagcattgcatgatgcgcaagttgatttgctggct

SEQ ID NO: 84024 - DNA, 297 bp, Oryza sativa
  Clone ID: PAT_MRT4530_83300C.1
gggtgtggcaatccctttaacccctttttcctttactgttggaccgaaagagcaccacaccaacgaacacggggacaaccagcttaggggggacaaacaagcgcaatcaggggtacaacaaaccgccgctgggggaaacagaacccgaagggatactcggggatactcctggggaccccccggaacacgggtaggcagaaaggggttcgtgaaaaacaacaaactagagggcgggcaaattcttggccttgggaaaaaaccccatggacacgggccccgcgaactggttgaacaggt

SEQ ID NO: 84025 - DNA, 837 bp, Oryza sativa
  Clone ID: PAT_MRT4530_83301C.1
atgagtcctccaggcagtctcgttaagatgctattggatgatgagtcttcgtcggatgacgacgatgaatttatttttgaggcggtcgaaacaattttcgatgataacaatgaagaaccaaagcgaggagggtctgtctttggacatgcagtgattaatcgggagagattggctggtcattggagactatacaatgactatttctcagaagagcctacataccttcatgttcaatttagacgcaggtttagaatgaaaaggacgctctttttacgcataatgaatgctgttgaagcgcatgatgattattttgttcagaagagaaatgcggctggtatcattgggctatcatgtttgcaaaaggtaacagcagtgtcacgtatgttgtgttatggaatagctgcagatgcagttgatgaatatgttcgtattggaggtagtaccgttattgagagttttagaaggtttatcgtagctgtacttgatgaagtttttggggaggagtacatgaggacaccaaatgagaacgatatagctaggttacttgcagttggagaacgtagaggatttccaggtatgctgggttctttagattgtatgcactgggagtggaagaactgcccgactgcctggcatggtcaatataaagggaaagagggagttcctacctcagttttagaagctgttgcctcgcatgatcgatggatttggcatgcgttctttgggttacctggaactcataatgatattaatgtgctccaacgatctccattgttgctcctaaagttaattacaccattaacggacacaactacactatggggtattatcttgtag

SEQ ID NO: 84026 - DNA, 298 bp, Oryza sativa
  Clone ID: PAT_MRT4530_83302C.1
gaccggaacggaagtgccgacccacgccgaccacttatgacgaggcctccctctcgcaccgcaaccaaccaaacacgacggcgacctcctctcccccaataattcccattccttcgctctcgccgccaccccggcccgcgcgcgcaagcaaccttaccttcccatgctgctgtgatgtgtcatacgccgccgccacagagcaaccggccgtcttcttccttccttcttggtcttagctgagctgcccgtgattctcgatcgctcgctcgctcgcacttcagttctggcggcgcgcgcg

SEQ ID NO: 84027 - DNA, 2461 bp, Oryza sativa
  Clone ID: PAT_MRT4530_83303C.1
ccgcgtggctcccgggccgcccaagcaggccgtccccccgctgccgccgtcgccccgccgctccgtccacgcggatcttctgctccttcctatccattccctagctacctggagagatctccattagagcgaccttgccctcatgcactaccaccatccatgcatatgcatcgcgtcgtgattgcttgccctcttcactcccagctttgcctcttcatatcctgcacacccatcgcatatagaccttctaccatagagtggttgaattgaatctacgtgtgtatatagctgagaatcagaggcttagcgctggaggtttcggagtacatagatgtcgtggtcgcctgccgatcttgcgaggtggagaggggagagattttgggatgcttgaggtgtccacgctgcgaagccctaaggcggatcagcgggcgggcgtcggcggccaccatgtcgtcggcttcgtcccggcgccgccgtcgccggccgacatcgccgacgaggtcgacgcgttcatcgtcgacgacagctgcctgctcgagtacatcgacttcagctgctgcgacgtgccgttcttccacgccgacgacggcgacatcctcccggacctcgaggtcgaccccacggagctcctcgccgagttcgccagctccccggacgacgagccgccgccgacgacgtcggctccgggccccggcgagccagctgctgctgcaggagccaaggaagacgtgaaggaagatggagccgccgccgccgccgccgccgccgccgctgactacgacgggtcgccgccgccaccgcgggggaagaagaagaaggacgacgaggaaaggtcgtcgtcgttgccggaggagaaagacgcgaagaacggcggcggcgacgaggtcctgagcgcggtgacgacggaggattcctcggccggcgccgccaagtcgtgctcgccgtcggcagagggccacagcaagaggaagccgtcgtcgtcgtcgtcatcggcggcggccggcaagaactctcacggcaagcgcaaggtgaaggtggactggacgccggagttgcaccggcggttcgtgcaggcggtggagcagctcgggatagacaaggccgtgccgtccaggatcctggagctcatgggcatcgagtgcctcactcgccacaacatcgccagccatctccagaaatatcggtcgcacaggaaacatctgatggcgagggaggcggaggcggcgagctggacgcagaagcggcagatgtacaccgccgccgccgccgccgccgcggtggcagccggcggcgggccaaggaaggacgccgccgccgccactgcggcggtggccccgtgggtcatgccgaccatcggtttccctccgccgcacgcggcggcgatggtgcctcccccgccgcaccctccaccgttctgccggccgccgctgcacgtgtggggccacccgaccgccggcgtcgagccgaccaccgcggcggcgccaccaccaccctcgccgcacgcgcagccgccgttgctgcccgtctggccgcgccacctggcgccgccgccgccgccgctgccggcggcgtgggcgcacggccaccagccggcgccggtggacccggcggcgtactggcagcaacagtataacgcggcgaggaagtggggcccgcaggcagtgacaccggggacgccgtgtatgccgccaccgttgcctccagccgccatgttgcagaggtttcctgtaccgccggtgcctggaatggtgccgcaccccatgtacagaccgataccgccgccgtcaccgccgcaggggaataaactcgctgccttgcagcttcagcttgatgcccacccgtctaaggagagcatagacgcagccatcggagatgttttagtgaagccatggctgccgcttcccctcggcctcaagccaccgtcgctggacagcgtcatgtctgagctgcacaagcagggcatccccaaggtgccaccggcggcgagcggtgccgccggctgatacacatcgatcacaccgatcgtctcctccgccgccggcgaaaaaaaaaaaaacctctcctctctgctccggccggtctccacggtgagaagaggcaatgcaacccgtcgacttgtcgtagcttcgtcagtgtgaattgattcatcatgcattcacccaatgcgtgtagacgagctcgatgtgtaaactagctagtgtgtcttgtgtgtttgcattgacatatctgggtttttgctctcatggaatgtgcatgcagagacgatgcaggcgacatgcatgcctacctgagagttgcgtgtaaaatataaaatgttttgagatggaacgtacacggactgctatatatattttggacagctggtaattaaattgagaaataaccaaggaacttacacttaaaaaaaaaaaaaaaaaaaaaaaaaaacaagagaagcactcgtcccaactcctgcagcccg

SEQ ID NO: 84028 - DNA, 411 bp, Oryza sativa
  Clone ID: PAT_MRT4530_83304C.1
atggcgaggccgcaacacaatgactggtcatccggactcttcgcctgcttcaatgactgcgaagtttgttgcttgacgacggtgtgcccgtgcatcacgttcgggcggagcgcggagatcgtgtcgaggggggagaggacgtgctgcgcggcgggcgtgatgtgcgtgctgctcggcttcttcgcccactgccactgcctctactcctgctgctaccgcggcaagatgcgcgacagcttccacctccccgaggacccatgctgcgactgctgcgtccacgccctctgcctgcagtgcgcgctgtgccaggagtacaggcacctcaagagcctcggctacaaaccctcgcttggctggctcggaaacaaccagcacgtcccgcccaagcacaacccgccgatgcgacgctaa

SEQ ID NO: 84029 - DNA, 1091 bp, Oryza sativa
  Clone ID: PAT_MRT4530_83305C.1
cggcacgaggccttcctctccttcccaagtcttcccacccaggcgcagaagtggctccggcggccggaaagtcaccggcgattcggcggcgccggcggcggcggacccctttctccacccctgccttgctccctcccgtctcctccatcagctgacttaactacactccgtaggagattttcagatcgagattgccggccatggcgtcgggccttgtcgtcgccgccaccgaccccctccgcgccttcctcgcctccgccgccgcctcccacgacctccccgctgacctccgcgacctcgcctcctccctcgccgcccgctccgccgtcccctaccgctccctccgcgacatctggtgcgccgcctcccccggcgcccgcccgcccctccgccgcctcctccacggcgccgacttcctgctctccagccccaagccacgcgacaagagcgatgagctgaaggcgaggctggacaagctcagggagatgcaggagaggaaggagtacgccgaactcgtcagggatgtcgcgccgccggcgaaggaggacagccccgagctcttctcctcctacaaggaccagattggatttggtcttcatgttgttcttataatgttcacgggttatttggttggatttgttgctttcagagctctgttcaacaacagtcctgtaatgaatgctgctggaggcatcttaggattagtcggtggcatgctgatggaaacggttcttttcatcatcagatcatctagtaaagaattggccacttctgttccaagaccaaagaaagttcagtagacatctgttttggtttcaatagtcagttttaatgaggatacgactgaagtttttaccttctgatctgaagtgaacaatacgaatgatgagaaacatgttgtaaatgtagccgataagtgatccgaggggtcacatcaggaggagttatttgtggagtccgcgatgggatgaaaatgtaattatctttagttttgtcgatgttctatgccagtgcacaatctgtctgatcaggataatatattacacggcgttatcagtcgatatattaattaatttgccagctgggatgtc

SEQ ID NO: 84030 - DNA, 1166 bp, Oryza sativa
  Clone ID: PAT_MRT4530_83306C.1
gcgcggcgtccgcagttcaccaccgcagccacccctagctaaatccctcggcggcgggggaggtggcggcgtgcgtgggcatctcggcgggggtcgtacgctcatgtcggcgctggtttggctctgcgtattggttttaagtggatttcctgtgcacaatgtcatcgattcttcgatccattcagctgaggaacagtatatggagtagcttccctgtcagatttcttaagcaacaagccggattatcaactgtagaattgcttgatcctagaagctgtgggaaacgacatttcacaacacaagtacaggaacatgggaaggaagttgcggcggcagcaactattctagtttttgatcttgagactactggctatttccataaggatcatagaatagttgagtttgcactctgtgatctttctggaggaaagaatagcacttttgaaactcttgttaatcctgaaaggactgttcctgactacgttgaacatctcattaaaattggcactgatctcgtgtgcaggcctggtatcccaaggtttagtgatgtaatcccactactattggcattcgttcgaagtcgccaagctcctggcaagccagttctgtgggttgctcataacgcaaaacaatttgatgctcgtttccttgctcaggagtttgatcgttgttcagcaccacttcctgcagattggctgttttttgacacccttctcttggcaaaaaagatggtgaaagcagaggggaaaaaacgtcgtacaagcttggaggcactgagagaacactatggcatcgtctcgcatgacgatgcgcatagagcaatgcgagatgttatgatattgtctcaggttttccagaaaatgacttttgatctaaaactgacaaatgaagaactaataaacgaggccatgaaggcaagtgaattcagcaagatttcttaatttttaaaactccagctttttttagtgcttaaacttatttaaccttctgtgcacatgctggatatttttctagctggtgtcatctcggcattaaagaactatgccttttttactattgaaatagtacctgtatttttcaataaaaacctgcaatttggaccgaacaagttgatatattcattgctaaaaagaaaataaaaccataaaaaaaaaatttgcattgga

SEQ ID NO: 84031 - DNA, 807 bp, Oryza sativa
  unsure (1)..(807): unsure at all n locations
  Clone ID: PAT_MRT4530_83307C.1
ccacgcacatcgcacacnatccatctcctccccgtcctctctngctcctcccttgcctcatctggctcgcatcgcagcgcctcctcgcccgcacgctcccgcatccgctccccaccgtccacacacgtccattcacgcgccacatcaatcccacgcctccgccacgctcccgcccctccggtccccctcgccctcaccaccgcccacaccacgcgtcgcctctcacccccccatcaccacacccacgttccgtaacggcacgcactatgcgcatacgcgcgcaagccccttcttgcaatcagctgcgtttcaactgacaaacaaccaagtctggcaacagctcgcgctggtggcgcaacaatctcactatcacgacattaacattcgctcacggccatacgccgcacgcacgcctacacacctccccgctacctccccgcgtcgactcctcctcacctcctcgaactccgcgacactcctcgggcctcccacgcctccaacgcctcctggttgcgcttcccaaccgtgccatccacatacgcgtatctaccctagcgtactatgcgtgcacccagctaccactcaccaccccttgggccggtgctctcgctaaccgacctccctacacacgctactacgctgcgctcncnggcacacgactacacacacactacacgccctccacgaactactccactccactaattgtttgaccactgctcgaaaaacctctcgcggctgacactacaactacgaaaaaaaacgntcggcctttcattaaaaaaaaaaaaaaaaaaaaaaaaaaaa

SEQ ID NO: 84032 - DNA, 331 bp, Oryza sativa
  Clone ID: PAT_MRT4530_83308C.1
aaaaagagacaaactgtgggggtttttttaaaggtttagggctttattttttatttttgggggggcttccgacgggttacgaaacttcaaccttttttttaactcagctttattaagggaccaaaagttgtgggggacaacttttcatttttattttaaacgtgggggaaaattgggggggcaaaacttccacttttttttaaaccaaccacacggttatgggccccgggaattccttattgagcgggttttggggctaaattgacagcctttgagctttttattaaacaaaagcccttgcaagttttcacaaacatttttcaggggacgt

SEQ ID NO: 84033 - DNA, 426 bp, Oryza sativa
  Clone ID: PAT_MRT4530_83309C.1
ctaccctgtttccttcagagagaattccttcaatctctttgccaattctatttctgttgctgcggcaccaggaataatccgactatccctgcacattgacttgtaagtgttgacaccgtcatcaacagctcttccgagatcatccagtatactatcagtgctgcctcttaagacagcaatagccaccgagtttcgaccttcttcatttcgaacacctccaatatcttccagcgaaacagagtctgcatatcctaattcatccgcatttggctggctcagtttcaactgttttttggaagagcaaagtgcaatagcccccgtagtacgacaaaacattctcagtttaaattttgaattcattttcctaataataatattagcctttgccttctccaccctttttgacgatgctcccaacagcgccat

SEQ ID NO: 84034 - DNA, 341 bp, Oryza sativa
  unsure (1)..(341): unsure at all n locations
  Clone ID: PAT_MRT4530_8330C.1
ttttgcagnatatggaagtgataacggattctcgagtgtgtattcttgatacatgttcaacacagagaccagaaattagtccacgtaacatcattgtttcatgttgaagcataaatatggatgtattattccaacattttaaattttgattagcacacttgtgcatgattccacaaccgcagtaggtacgtttccgtgacagtttacacttaatagcctaacaacctacagtgtgcggggccggtcctgacttttcagggtcccggtgcagagcccttgacgtgctatgtggtggtggtgggtgcgggcgtgtgctttgtgtgtgcgtggtgtggtcgtgg

SEQ ID NO: 84035 - DNA, 564 bp, Oryza sativa
  Clone ID: PAT_MRT4530_83310C.1
gtatgtgtcagcttattagctgcttcaataatccaaagtttttgtagcatgaatccaaagtgcttgtgattggtttcttttaatcctgggagagattaacgcatggtttgctactttgcaaaaggttcctttctagatacagaatttctcgaacagttcctcatcacctgacatctatttgtgtttttttttaaagccctcgtatttgaactgtagcttagtcttgttgagctaaagatgagaacattttttttaaaaaaaagaacaattttgacacaaactagggagttctttttcttgatatggacttacaaaagttcatgacaattttttatatatgtcatgtgcatggtgtgtatagtgatatgcatttatgtctctttttgcatagtacagtacttgcataatttcagtttgaaaaaaagtatagcaacattaaacacaacaataatttacaaaaaggaaaaatgtaaacacgatatatagttgtgtatagctcctacttttctacaaagagcacaatcttgtcaagatattatgatacaacatttggtataaaaggat

SEQ ID NO: 84036 - DNA, 489 bp, Oryza sativa
  unsure (1)..(489): unsure at all n locations
  Clone ID: PAT_MRT4530_83311C.1
nccacgcgtccgnccacgcgtccgtccacgcgtccgaagcatgatatgcacagccacttgccaattgttgtgcttctatttggaccgtatggaaattctttgttgtcttctctaagagaatgacagagtatgtatgatatactttgggacaatcttatgttgggaatattgattgatatgtcatcaaagattctccgaacttggcaatcttggtatatatcgcattgaacctttcagtttgtccattcaaaggtattgttattcgtgcatttgtatctccatttttattagcttaggccctgtttcttttagcttgagattattataatccagattattaggagtaagctgaaagaaacagacaacttattgaagtagcttattataatctcgagcctagcttattataatctgataagctcatttaggtgagcttttttcagattattgggtgaaaaattacccaccatgccaccccactcctttttt

SEQ ID NO: 84037 - DNA, 150 bp, Oryza sativa
  Clone ID: PAT_MRT4530_83312C.1
atggcggctttcgcggggagcaatggtgtcggttgcttcggggagaagcgtgcgtcggtcgggccgagccgacccgacaagcctcggcccaagcacggccgggcctgggccgtgtcgtgctgggcggcctacatggccatctataattag

SEQ ID NO: 84038 - DNA, 570 bp, Oryza sativa
  Clone ID: PAT_MRT4530_83313C.1
atggctgcatctggctcgcgctgccgccgttgcctgccatttctcttgcttccaccatcgagtagcagctcgcactggtacaagctcgcctacgccgaggccaaagggcgcgtccgccgcggccaccgcgtttggcagatcggcttcggcttaggcttcaggtgcaacatcaccgtctggcgtgcactccgcgacgtgccacccgtgtacgccttcgtcacggcggcgtggcccatggccttgctcggcggctcgttcgccgccggcgtcgcccgacgctatcgccgtccgccacgctgcctccccatccacccgatgccgccgggccgccttcaggccgccaccgtcgcctcggcccgcgtcgttgcggccggttgctggccgcgccgtcgcgcacctgccgcatcccgctcgggagcgcacgcgcgggtatttacgtccgacgcgcgtcaaaaaaggcctcccgtgcgccatgtcagcatggcagatggcgtggtatccatcggcaaatatccacgattatgggatgtcttcccccaaaacttcactttcgtggtgtccctgagctaa

SEQ ID NO: 84039 - DNA, 336 bp, Oryza sativa
  unsure (1)..(336): unsure at all n locations
  Clone ID: PAT_MRT4530_83314C.1
tacgacaacgaagtgggggttacagcaaccgtgtcatccgaacctgatccgccacatgggccaaaaaccaataaaatccttttgcttgccatgggtattccatgggccgccganccngaanataccggtatgctttgtctatgctgaaaaataaaacgtggacggngttcatcaagaaccacccccctgttaatgctaattgggganaatgaattgcattttgttttccnatctaccnacntgttaatttgttnccaangccganganatggaaccnaantcnacctttttgcctgtgaaaaatataaaccgncccntgccnttgnttattttgtt

SEQ ID NO: 84040 - DNA, 519 bp, Oryza sativa
  unsure (1)..(519): unsure at all n locations
  Clone ID: PAT_MRT4530_83315C.1
ggccgaccccgcgagcaggaagctcttcgtccacggcctcggctggggcgccggagccgacgacctccgctccgcgttctcccgcttcggcgagctcgaggactgccgtgtcatctcgctgcctcgggtcctgcccctccgacctcccagtcccagaaccctagctccaacaccaacgccaactccggtgcggccaataacgctggttctgcgtcgtcttcacaacctgacaacatgcaacgcaaaatctttgttggtaacgtgcatgctgatgtcgatgttgaccgcctgtatgagtacttctcgcaatttggtgagattgaggaggggccattgggatttgacaagaccactggcaagcctaaggggtttgcgctgttcgtctacaagtcagtggagagcgcccgccgngcgctggaggagccaacaaggaactttgatggcaaaatgctcaatgcgcagaaggctatacatggcaggaccaagaacacacctgggatgaatgcggattgtaaccct

SEQ ID NO: 84041 - DNA, 2124 bp, Oryza sativa
  Clone ID: PAT_MRT4530_83316C.1
ggcccccctgtgttcttgtctcgcgtttttttttttttttttggcccagaaaccatttgacataatcaataagaccggataacatcccaacaagtcaaaatacagatatttcagtacattaaaccccattacagaaaccataacgtacatgatgaagttgcaaggacaaagctacatagtaggcaataaaaacaacataaattcttcaagaaagcgccttctgtaaatactgccacaaagttgcctgattcaaaagccatctgattgtaaaagccaacagcaggaaccctttcgcaatactttggcaccaacatagattcaaaatccatccgaatgcaaaaccacacgaacgaatcacgaccagcagatgccaaactaagatatagagaaacaatcagaaatttttagcccaaatcaccaagttgcgaataatatttggaggataagctaactcaaatcattagtggtaaatgaggacttgaagcgattaaccaggatgtgaattgtcatacctagtgatttcaaaatccaccctgaaaaccagcacccccaatttgcgttccgggcacttggccctgcccagcagcagcagcctgataaccagcagcaccggcggcagcagccgcagcagtacccgcttgtgaagctgcttggccaacctgaaacccagcagaagtctggaacccaggcggaccctgaaaaccaggaggagcttgaacacccgctgcatttggaaaagcggcggcacctgctgcaaagccctgtgtcccaaaaccctgagctccaaaacctggaataccagccgcgtgcacctgctggcccccagcacccaatgcagcagcagcaaaagcagggttcagcgttgcgagcatagctgggttttgcatagctgctgccatcatggcaagcattgcagcattgggttgtgcaaacgcctgctgctgtgcacccaatcccaacatagccgcttgctgcgcataacccaagtcaggaacggcagtagcaccataagctgatgcatcatacggtgtaattgcagcagtagcaggagcagtcatctgtgcagctgcagcagcagctgctgccgaggcagcggtaccactagggttagaatttgcattcatcccaggtgtgttcttggtcctgccatctatagccttctgcacattgagcattttgccatcaaagttccttgttggctcctccagcgcacggcgggcgctctccactgacttgtagacgaacagcgcaaaccccttaggcttgccagtggtcttgtcaaatcccaatggcccctcctcaatctcaccaaattgcgagaagtactcatacaggcggtcaacatcgacatcagcatgcacgttaccaacaaagattttgcgttgcatgttgtcaggttgtgaagacgacgcagaaccagcgttattggccgcaccggagttggcgttggtgttggagctagggttctgggactgggaggtcggaggggcaggacccgaggcagcgagatggcagaaagcaaggcggccgccgatttggagctgggggcggcggagggcgcggagcgcggagcggcgggagcggaagaggacgaagccgtagcccttagatctgccagattgcttgtcggagatgacacggcagtcctcgagctcgccgaagcgggagaacgcggagcggaggtcgtcggctccggcgccccagccgaggccgtggacgaagagcttcctgctcgcggggtcggcctccgccgcgcgccgcacggccgccatcgtcgcgggggtagtctccgcggccgtgcggagcagcgccaccagctgctcccgcgacaggggctcgagcagcttcgcgatgtcctcctcatcgtcgtcccctccggcgccgtcctccccctcggcgccgccctctgcgctcggctccggggggtcgtcggtgatggggaagtagatggtcccccggggcttgagctccgaggagggcgtctcctggtggtggttggtgccggcgccggcctccgacgaggctaccggggactccgccggatccgcctttcgcttcttcggagccatgggtgagcgagctagggttttaggtgagaccaaatggggatttgcggttgcgaac

SEQ ID NO: 84042 - DNA, 832 bp, Oryza sativa
  Clone ID: PAT_MRT4530_83317C.1
agtactgaatataccaattccatttaattacaaatgccatgtacataggttagttgtacaaaaagagattctcctatacaatctacaaaatgagacaaaacgatggcaaatctacaacaggcaaggcatttcccttgtagagaaatgccactccaaaatatcttgtgaccgccatgataagttgagcatctaaaaacttgaatcagattatcagaaagacaaaagtattaagggtcagatatatagattataataatactccattcaatgataagtaatctatgcaacacctactatttcaatacagaattgaagatcagtgtcaaatgtgcaggataagtgtcaataacataactgatgtagttccatttaattcaatctgtagcatagcttcgatattctcacaatccaccaatattaaattaccagttccattttatgagaaatttatgttgaagcagtataattgcaatcgtaacagattcaattacaatttacaagcagcaaggattgcaatttatctcacaaactatgggaacaaactgattttagcttacatgatgtatgagcctttaagttagtgttgatcttctgttccttccggtacccttctctgacacttcagcaagaagttgattgctcacccacaggtcgcaaatcatagcctaaactcttttgcaccagtattaagcatggttgcaatgcaagtttccatcccatggctatgaatgacagccccagctctcatccactaagccttgggtgcccagaggcgtcgtcggcggcgacccagcgccaggtgctgcgcctcgtgccgaattcctgcagcccg

SEQ ID NO: 84043 - DNA, 468 bp, Oryza sativa
  Clone ID: PAT_MRT4530_83318C.1
atgtggccaccgacagcagctctcgttcatgatgggatagagattcacctgttcttttgttgcctatgtctgcctcctcttagctccctccgggtgccacaacaaatgtggcgtgatgatgaggagatcctggcaattattggtggaaacaacgtggtgctcctacaagatttcttcatgtatgagctggttgtggatgtggagtgggcaggaatcgctggcgaaagcttttccctaccgttagccaaatatgacgatggcgggggcagagcagaggctggccacgaagaagcagcgcgcggcggcgtgagggcaaagaggaagctcaaccagcggtggctgtctctgtctgcaaatcagagcggcggcggccatttcccgtcgtggagatcaaatttcgtagcaagcagcaatgcatttgctcaagcggcagatcgtcttatgttcgttgttaatctgaaacaatga

SEQ ID NO: 84044 - DNA, 357 bp, Oryza sativa
  Clone ID: PAT_MRT4530_83319C.1
ttggtttttttattttttggggttttaacattaagaacttttcttgaaaattttgttatttgtttcgtaaaaaaaaaaaagcaaacgagacggagcggacttccacccttttttcactcggggcttaaaacgaagttacactgccaaataacccgggaaaaaaagggaaaagaaaaaaggggaggggggtatttaacaccgggaccctctaaacctaaaggcagggggttgggaacaaaaaatggggttattggaattaggggggggaggacggccccggcccaatatccgggggccccccggggatatgggcctggcccctgcgggtggaccccctggggggggtttccccgggct

SEQ ID NO: 84045 - DNA, 440 bp, Oryza sativa
  Clone ID: PAT_MRT4530_8331C.1
atggctggcaatcacattagtttggaggagattgcagagcatgagagtgtgataaccaaggagtttagaagcgaggcagaaggatataagttctataatgattatgcttggtcgaaaggttttagcatcagaaaggacaatgttacgtacaatggagatggtaaggtggtatggaggcattcatgttgctcatatgaaggctataggttgttgaaatactttgaaagaacagaccaaattagggagccaagggcctgacacgttgcggatgtgaggccaaacttcagatacagttgaatgaggagacggggatttggtttgttaaagatttcaatgatggtcacgtgcacccacttgcaaagcatgaccaagttgcattcttacgatcccatcggaatctaagtgatgctcaaaaggctgaggtgtagaacttgggtcta

SEQ ID NO: 84046 - DNA, 1199 bp, Oryza sativa
  unsure (1)..(1199): unsure at all n locations
  Clone ID: PAT_MRT4530_83320C.1
cccgggctgcaggaattcgcacgagggcgagtgacaccccaccccacgacgccaccgagcccgggagggagaggccgacgcgacgcgacaagtccacacccacacacgcaccagcaccagcccaactcactcctcctcccccagattccgccgctccctccccctcgccgcgcggcgccgccgccgccgcggtggccaccagcaacgtcgagctcgccgtcgcccaggccggcggatgagagccagtgaaccatgggaggattttgctgttgcctctgcactgacgatttcgaggagtacgctcatccaaataaccctatctataggcaaggtgtatgcctaaggaattttttccacaacttttttggcgggtatactgccacattccagaggctcgaatctagacctagcaacccagctcaaggggctgctccattggcatccactaatccaagtaccaatataactgacaattcattatccgaaacttatcaccttgtgtccagacctccaccgtatgatactgatcctagatatgcccgtgttcaaagagagggtttggtatctaggcgtgaaaagtctataaatctaacacaagaagagtcactggctcttaggcgaaatggcagcagctctggcattgaacatttagctgctcagaagaaatggagcagcactgaacctgagggtgaatataaagtccatcgctctgaatccaccaagagtttatccgcaaaatcgtataacagcagttttgcagttgtcacttcagaagatgaagatgtctgccctacttgtctagaagaatacactccagacaatccgaagattatagctaaatgctcccatcattatcatcttagttgtatctacgaatggatggaaagaagtgatacttgtccgatttgtgggaaggaaatggagttttgtgaaaccccatgagagatttctcgctggttgtatcagtggaaggcaaaagatctacagtgtgatatgctggagagtctgtaaataatactagttgtccagatagatctcttttttgagatcaaattcttatgtgtactgaaatcatggcctacaaaaaagaaaatgcgctagaatttgatatatgaatatatttttgaatgcattaacccccccccccccccannnnaaaaaaaaaaaaaaaaaaaaaaaaaaaaaaaaaaaaaaaaaaa

SEQ ID NO: 84047 - DNA, 394 bp, Oryza sativa
  unsure (1)..(394): unsure at all n locations
  Clone ID: PAT_MRT4530_83321C.1
cccccctgaaagaagggattacttncataaaggtctnggaaattgtgggttgatccctcaaagaaatgccaacccatccaaaggacggggacccgtcatantaaaagcaatagaatagggcccttggaantcgcaccctcccagttcattntgaaaaactgggnatcccatttgatgtggggatttttgatgcatgaagttggattccaaagaccggatnagcgtaagcctcccatggcgaaagtggtgtttttggtttagctaatatgcctaatatgcaataagctgcctgaggaaagtcgcgcaacctttttgtgtaatttcaggtttatgtacttggtttgttttggaatgggaactctattattggtanaaaaaaaaaaaaaaaaaaaaa

SEQ ID NO: 84048 - DNA, 320 bp, Oryza sativa
  unsure (1)..(320): unsure at all n locations
  Clone ID: PAT_MRT4530_83322C.1
ancacatggagcgatgcgatcatactatcaaatcacttggaacacacatttacatgtatcacatataggctcatcacgtgcataagaactcatacgctgtatctgctgacagacatacacatatggatcacagctaacatagatcgatcagaagtgcagtcttacagtcttacacacatatgcgcgtacggtcgtacatacttctatattacaggactgatatttgattagagacaaacacggtgggcttattaatggaactttaggctggagaggatatgaatcgggacagacacttggaagtggtaactctagatctg

SEQ ID NO: 84049 - DNA, 207 bp, Oryza sativa
  Clone ID: PAT_MRT4530_83323C.1
atgacatatcagaactacagctggatcaaatctgccgctgctgctgctgttagggctaacaacaccacaaggaaattccggctgggagttgaggtctccgatccagaccggtcctgtggcggcacaggcacgggcgtcgaacgctcctccgtcgtcgggggcattgatcctgggacggcagctgcacaggcattcacaacagattag

SEQ ID NO: 84050 - DNA, 286 bp, Oryza sativa
  Clone ID: PAT_MRT4530_83324C.1
gcacgagcctttggcgaggttccttcttacgtggtggagcagccaagatgcccaccatcttaactccgtctgaagacactacagaaaatcaattaccccggcttagattccactgtataatataccctgagtgtacctatccctctggttcaaattctctttgttgctagctgctctcaggatcattgtgctgctaccggttgcttcatttggcagcgttaacggcgaaaaacacatttactacccattttatactgtaactttgcacctaatgcacatgtatatc

SEQ ID NO: 84051 - DNA, 433 bp, Oryza sativa
  Clone ID: PAT_MRT4530_83325C.1
cctgggggtggtttttttcttttttgctttttctttttttttttttttttttttctaaaaggaacaacaaccgcttcttttttttttctcgaaaaactgggccctccctaacaccaaaacaatggctggcagatttttttttttagtttttcttttcccccccccccccccaaaaggatttccccccattataaaccccttgggccccttttttttggattggggggaatccccccaccccatcccctttattatgctggacccctggagcctttttttttgaaacgcgatttgccttttctaaaccattttttgggaaaccccccaaaatggacccctttcctccaggggggctccccctaaaaataggattggcccccccccctggttcccccccggaattccggcccggtccctgggggcgtccccattt

SEQ ID NO: 84052 - DNA, 221 bp, Oryza sativa
  Clone ID: PAT_MRT4530_83326C.1
aaaaatgaagacaaactttttttctatttatatcacccaaagtttcacaatgtcacatatagatgtatctggcttatattttaacttccgaaccactatacgttaaaactcattcagcaaccgcagtgtggtaattggtactgggtgcaccatagtacctagggtagtacatatcaagcatgcacgtatgcacatgcgtcgtgtccggtcgtcggtggtcc

SEQ ID NO: 84053 - DNA, 1209 bp, Oryza sativa
  Clone ID: PAT_MRT4530_83327C.1
atggccttccacctccaacctcactcactcactcaagccaagctagcaatcgatcgatcgagctcaatgcctccatccatggcgacggcgagggtggcgtcaccgtccacggacaggaagcgcaaggccagcagcgaggacgacatagacgccgccgccgccgccgccgctctcacctcgccgctggcgccggcgagggggaggaagcggttcgtcggcgtgcggcagcggccgtcggggaggtgggtggcggagatcaaggacaccatccagaagatccgcgtgtggctcggcaccttcgacaccgccgaggaggccgcccgcgcctacgacgaggccgcctgcctcctccgcggcgccaacacccgcaccaacttttggccccgcccctcgccgccgcccgccgccgtcgcgccaccggagacgacgacgacgccggcgctgccgtccaaggtcaccaacttgctactgctccgcctcaaggctcgcaaccagcaggtcgtcgacgccggcgccgcggcgccgcaagaagccgctctgttgcagctgcagcagcagacgccggcgtcgtgccaggaggtgttcgtccgtagccacggcgaggagtacggcttccacgtcgacgacttcctcagcgacgcgtgcagcaacgagcagtactccggcgacagctcgctgggattggacgacgacgacggcgaggtggaagacgaggaggaggaggagctcgacttccagttcatggacgtcgcgcccggggcgtcgtcggcggcggcggaggcggggctaggcggcgagggcgcgctgtgctcgccgttcgagatggtcgccgcggagctcggcggcgcggtggacgtggccgcgcacgacgcgatgaggcagatggactacgagaggaagatctccgcgtcgctctacgcgctcaccggcgtctccgagtgcctccggatccgcgccgccgccggcgccaccgccgctgcgcgggaccacctcaccggcctgagagaggcttgccggaagaagcagaaattcgccgccgccgcggcggcgccgccacagcagcaagaaccatctcctcctccacagcagcctgagacgccggcgagctcaggcggcggcatgtcggagacggcgagcggcggcggcggcgacggcgacgtgctgatgtggagctcactggacttggctccgatttgccacatggcatag

SEQ ID NO: 84054 - DNA, 327 bp, Oryza sativa
  Clone ID: PAT_MRT4530_83328C.1
atggagcttgcctcggggatctccgccacgtatgccatcgccataggtccgaacaaagttggcggggaagacccctacgttgtcacccagcagccgcccgcctccatttgcgcgccccgccctgcagctggggatgctgctgccgtctgccaccaacgcggcgccagctcgacccggacgacgaggtgggggaacgggtgggagcggagagggagagaaggaagccccgccaccgctctcctccatctctgccgagccgcgccgtcagctggggtcactggctcgccgccgcccgcctccaacgtcgcgctgcccagccccgcatag

SEQ ID NO: 84055 - DNA, 315 bp, Oryza sativa
  Clone ID: PAT_MRT4530_83329C.1
ggccaacataccgacgaggacggggggaagggtcttgcctacaacatatcccatgaccagcaggacattaccagggggaagggtttaggcgactcccttttccaggctcccacgggtgatggcacccactaggccgtcctaagctcctccggtaccctaaccaggggtttagaaccttccaatttcgccaacaccctgggagggcttatacattggcccttgctttatggacaagctcttcatttccattcttcaaaaaccttaatgtacccttcccaacatcaaaggtcccacttcattcctgggttatctggg

SEQ ID NO: 84056 - DNA, 485 bp, Oryza sativa
  Clone ID: PAT_MRT4530_8332C.1
aaataatctaattatttaccaacaaagttgtataattagattcgaatcaaaagcattttactaatatcttacatttaaacatattcattttgatgttgcttaaacctatttgtaataaaaaaaaaaaacttggatcttgtaggaacaaacctacactagtttctgtgaaataaagtactgacagtcaagagatatcgctgttctacaaagacagactcaaacctgaaccctatcagatgccctgtgctgggacaatataacaagagatatcgctgttctacgaagacagactcaaacttaaccctatcagatgccctgtgctgggacaatataaacaaagtcttgagcatcatcatgcaaatgaagccaacaaccatatccatctccagaagctcgattggttcgcgagaaatttcagccgtgcagtttctccaagtagccaatgcaagcctttgaaccttcaacttcaagtttctccaaacaca

SEQ ID NO: 84057 - DNA, 516 bp, Oryza sativa
  Clone ID: PAT_MRT4530_83330C.1
atggctcgcgcggcgcgcaacggtgtccgcgagaggcgcgtgggggggacccgcggggcggggcgcggcgcggcgcggtgggagcaggaagcagcagccatcgccgtcgccgtcgcgcggggccaatgcgcggcggcggggtcggccgcctctcgccggcggtggaacagaattggtcgccggtttgccgccggcagcggcgggcgtggagcatccgagtctcgggcggcgccggtaccggtgacaggacttggcaaccttccgagaggaaaggtgcttgtaatggacactggtctaaacactgttgtctgtactgcacccaatggcaactcctgccataagaatgacaccagatgttatcgaggagatactcgtcaggcttcggtgcggcacgcaaatgtgacgagggcgccgtcgtcgccgcagtcgggcaccgccgccccgtcatcgccgcggccggccaccgtcaccgccaccgccgagctccgccccgagctccattgccggcccctctag

SEQ ID NO: 84058 - DNA, 445 bp, Oryza sativa
  Clone ID: PAT_MRT4530_83331C.1
ttttttttttttttttttttttttttttttttttttttttttttttttttcaaccaaccgggtggggattgttttatgaataggaaggtaaaatggttctttcatttacatattaaagcagaagggtaagcccttacttttttttcaaacacctccggggggggggtggtttataataagggggggaggagaggcttcaatatactcacccagtgaaccgggggccccccctgttttcatttgtaaaaaccaatcatggccaaaaggaaggaatcgccagggggcgggacaaatcccttctctcccaccgctggattataaaaagaagaaaaagaaggggggtttttcaatacaaaaagaaaagaacctgcccccctcggcgagggaaaccccaaaccccctcccttggggaaataagaaacgcgatgccctccttaactctgtt

SEQ ID NO: 84059 - DNA, 791 bp, Oryza sativa
  Clone ID: PAT_MRT4530_83332C.1
atggttccagttgtatgtttggtttgtggtatgggatggttatacagcggctaggttggagcgagtggtgagaatggggatggaggagctcgtcggcgcgagcggaggagaggcggaggcgggcgcggatgagcggcggcggccggtcgcggaggcgaggtgaggcgaggcgcggacgagtggcggcggtcggtcgcggacgaggcggcgactggtcgtggaggcgaggagaggcgaggcgaggcgcggatgagcgacggtggttggccgcggaagcggtcgcggacgaggcagcgaccggttgtggaggcaaggcgaggcgaggcgcagacgagcggcggccggtcgcggaggcgacgaggcgcggacgagcaacggcggccggttgcggaggcgaacgcggacgagcgacggcggtcagtcgcagacgaggcgacgaccggtcgtggaggcgaggcaaggtggaggaagcaggcggaggagaacggatggcggtgccgcggcggagctgagcgggaggttgtgggagctgacgacgagtggcggcggtcggtcgcggaggcggttgcgtacgaggtgacggccggtcgcggaggcggaggtcgacgcggatgaggcggcggcgttgcggcggagccgagcgggaggctacgggagctgacgccatgggctccgtcgaagtgggatggattggtccggccgatttcggcggaccgtttcatcccggatctgagaggaatattcctctccagggaccatcccgtcccactcacctctcaaccaaacactcc

SEQ ID NO: 84060 - DNA, 127 bp, Oryza sativa
  unsure (1)..(127): unsure at all n locations
  Clone ID: PAT_MRT4530_83333C.1
taggtcaaaagaaggttttctggatttgtgttggtctgctcgngatggcttatngtgttgcaatattgatgggagctacttctgcctgtttgtggagcaaatacgcaactgtgggacatgcaatcct

SEQ ID NO: 84061 - DNA, 735 bp, Oryza sativa
  Clone ID: PAT_MRT4530_83334C.1
ctatccagttaggttcgtccgctcccagcggctaggttggagagagtggtgagaatggggacggaggagctcgtcggcgcgagcggaggagatgcggaggcgggcgcggacgagcagcggcggccagtcgcggaggcaaggtgaggcgaggcgcgggcgagtggcggcggtcggtcgcggacgaggcggcgactggtcgtggaggcaaggagaggcgaggcgaggcgcggacgagcgacggcggtcggccgcggaggcggtcgcggacaaggcggcgaccggtcgtggaggcgaggcgcagacgagcggcgactggtcccggaggcgacgaggcgcggacgagcaatggcggccagtcgcggacaaggcgacggccagtcgcggaggcgaacgcggacgagcgacggaggtcagtcgcagacgaggcggcggccggtcgtggaggcgaggcaaggtggagggagcaggcgaaggaggacggagcggcgctgggggagggacgggcggccggggcggtgccgcagcggagctgagcgggaggctgtgggagctgacgacgagcggcggcggtcggtcgcggaggcggtcgcggacgagatgacggccggtcgcggaggcggaggtcgacgcggatgaggcggcggcggagccgagcgggaggctacgggaggtgacgccgtgggctccgtcgaagtgggatggattggtccggccgattttggcggaccgtttcat

SEQ ID NO: 84062 - DNA, 498 bp, Oryza sativa
  unsure (1)..(498): unsure at all n locations
  Clone ID: PAT_MRT4530_83335C.1
atgagtgncgtcggtcggtcgcggactagccggcgactggtcgtgnagnctaggaaagtcnaggcgacgctcgtactagcgacggcggtcgtcccgggagncggtctcggacaaggcggcgaccggtcgtggaggcgaggcgcatacgagtggcggccggtcccggaggcgacgaggcgcagacgagcacgggcggccagtcgcggacaaggcgacggccagtcgcggaggcgaacgcggacgagcgacggtggtcagtcgcagacaaggcggcgcccggtcgtggaggcgaggcgaggtggagggagcaggcgaaggaggacggagcggcgctgggggagggaacggtgccgggggagggacgggcagccggggcggtgccacagcggagctgagcgggaggctgtgggagctgacgacgagcggcggcggtcggtcgcggaggcggtcgcggacgaggtgacggccagtcgcggaggcggaggtcgacgcggatga

SEQ ID NO: 84063 - DNA, 512 bp, Oryza sativa
  Clone ID: PAT_MRT4530_83336C.1
gcttgcgacatggacgacatgtcgctcgccagccacttgtcgtggatcctctgcaggtcgccgttctccgacagctccaggatcgccgtcgacaggtccactgacagcggcgagtccctcgggaacgcctaccaataatcgtacacacgttttgcatgagatgagaaaaaaaaaggcatggaactcactatcaaaaggaaagtgttttcatctccccgaagatatcaatcatttcttgcataccatctaaatagttataaaaaaatatttttttaataatatagatttataaaacatatcactatagaataatgcaagtgtaaattcaacctctacaagttataataaaataacaaacttatctaaaaaaataataataaaataacaagtataactacgaacgataacaattataattgcaagtatgttaactatttttagtttaatctgtcctttttgaacttgaagtgatcaaatttaaccatgcatgttgttaatttcggacgcgtggg

SEQ ID NO: 84064 - DNA, 1071 bp, Oryza sativa
  Clone ID: PAT_MRT4530_83337C.1
atgcggaaggttgtgggcagggagagggaggtggagcagggcctgcaggggagagcgggagggaggtgcggagaagagtggaagaagcctcccgctcggctccgccgcaacgccgccgcctcatccgcgtcgacctccgcctccgcgaccggccgtcacctcgtacgcaaccgcctccgcgaccgaccgccgccactcgtcgtcagctcccacaacctcccgctcagctccgccgcggcaccgccacgggcgcccgtccctcccccggcaccactccctctcccggtgctgctccgttctcctccgcctgcttcctccaccttgcctcgcctccacgaccggtcgtcgcctcgtctgcgactgaccgccgtcgctcgtccgcgttcgcctccgcaaccggccgccgttgctcgtccgcgcctcgtcgcctccgcgaccggccgccgctcgtctgcgcctcgcctcgccttgcctccacaaccggtcgctgcctcgtccgcgaccgcttccgcggccaaccaccgtcgctcatccgcgcctcgcctcgcctctcctcgcctccacgaccagtcgccgcctcgtccgcgaccgaccgccgccactcgtccgcgcctcgcctcacctcgcctccgcgaccggccgccgccgctcatccgcgcccgcctccgcctctcctccgctcgcgccgacgagctcctccatccccattctcaccactcgctccaacctagccgctgggagcagacggacctaactgcccagcatgtcaccgcagtggctgacgacgagcggcgggtagctgacggcgtcgtcatccctggcctcctccgcctcgctccgtcgccggccgggcgcagcagatccagtaccgtcctccccgtcctcctccgcctcacgccgttgtcatctgctggggcgaggggtggaaggggaaaatccaagggtgggagcagtatcatgagccactcccctatccacggccagtggactgcagtgatgatggtggtgggtccagcggcgtgcgaggaggtgcgcttcggcgacggcgacggcaacagcgtcacctcctag

SEQ ID NO: 84065 - DNA, 3026 bp, Oryza sativa
  Clone ID: PAT_MRT4530_83338C.1
gctacaaggcttaatacccaaactggatttgtgtgaagcaacctcacttcaccagcttaatggaatggctaaaacagtgttgtatgtgtgatacaattgtaaccagctaaggagtaaattaaacctaaaatctcagaatctgttcaaccaattgtgcaggaattccaggagctgttcgaagaacccacgctggattacctcctccaagagcttgtgatcaccatattcccctgattgaaggagacaaaccagtgaatttaagaccctataggcataaaccagcccttaaaaatgagtttgaaaaacaagtagctgaaatagagattatgcattgactataggcaactgaatgcaatcaccataaaaggcaagtacccagtgcccattattgaagagttgctgggtgagttggctggatcccaacggttctctaaattagacttaagggaaagacatcatcaaataaggatggcagagggagaagaacctaaaatagcctttcagacacattcagggcactatgaatacaaagtcatatcttttggagtcctccaaccacattttttagtgctctagtgttttttgatgacatactaatctacagcccagtctatcagcacatttgactcacttgagaattgtgttgcaattgctagcaaataacaaccgaaaggttaggctaagcaagtgctcatttgcacaacaggaagttgcctatctgggacatataattgggcctaagggagtatcaactgatccaaagaagatacaagatgttgtcaattgggcaattcctacttctgtgaaaaagttgagaggatttctaggattggcaggatactatagaaaatttgttagaggatttggagtcatcagcaacccttgactgaattactaaggaaaggcataccctataaatggacaaaagaaactgaatagactttccaacacttgaagcaagcactagtttctgcccctgcattggccttgccagatttttgtaagcagttcacagtggaaactgatgccagtgagctagggattggggcagtactgtcacaggaaacacatcctatggcatttcttagcagagccttaggtccaaaatcaagagggttatccacatacggaaaggagtacatgaccattttgctggctatagaacactagaggacttacctacaacatggggagttcctaattttgactgaccaccatagtctgaaacatctctctgaacaaagattacacacgccatggcaacagaaggcctatactaaattaatgggtctacaataccgcatatgctatagaaagggggtgagtaactctacagcagatacactatccaggaaggagcatgatgacaaagctgagttagtgtccatatcaaaatgtgtaactctgtggttgcaagaagtcatgcaaagttatgaaaaagatgctcatgccacacacctggctgtagatttgatcattgatccttcagctaaactaggttttaccctgtagcagggcattttgaaatacgagaacaaaatctggttggggcaagatgcagaacttcagcacaagtaattgatgctttgcatgccacacctataggtggccactctgggtttcctaccacctacagaagaattaagggaatgtttgcttagtctagcatgaaaaaaatgatccagagcagattacaaacttgtcaaatttgtctataggctaaacaagacaaggctaaatacccggtattacttcaacccttaccagtgcatgaaggtgaatggcagaccatatcattggatttcatagagggactaccaaaatctaaccattataaatatatcctcgtagtggtgtacaaaatttcaaattatgcacattttattcccttggaccatccttttaccgctagcagtgtagccattcagtttctgcaacatgtttacaaattccatggcttgcctaaaatcatcatatcgatagagataaaatattcactagccaattctgggaacaacttttcattagatttggtacaaaattacatttgagctcttcatatcaccctcaaacagatggccaaacagaaagagtaaattaatgcctgaaaatttatttgagatgttttgttcatgctacacccactaaatggtcatcttgattgtatttagtagagttatggtacaataacacttaccactccacactgggtaaaacaccatttaaagttctctatgggtatagcccaagccactttggcatcaatatgaatgaccgtgttgtgcctgctctgaatcacgggctgaagcaaagaggattgatgcaacaattgctgcaacatcacttgaaccgggctcaacaacacatgaaacatcttgctgaatgtcatgcagagacatggaactacagttcagggcatcacacaatcttaacttccatccgatcaaccacccaagcttcgacaggaacggtggagatgatcttggaagttacatttttcagtaattttcattttatacagaagaagaaccttcctattgcccaaggtagtggccctattgtcagtacgtgcatccactcctcgaatcacaaccctgtcgccaaagaagtacttcctcggcgatttgacatcgatggctgggcactctagaacatctaggggcaaggttggaattcgttctttatcactggaaaacaaacattagaccctctgcttgtcaagagggaccgcgaccgagaggaagcccatcgggtgcggcatcttgtgagaggaggtttgtggaaccagcaaggcttccgctgccactggatccgcggcagccttctttcaagactgggtttgtgttagggactcaccatcgctccctcccgaactcaaaagtccccccaacccctcccgggccccagcaccacgagaccaagttggtggaagcggaggcgaagaagctgcgatcatggaggaccaaggaggggggccaagacggaggaagcccaactctcgatacaccagggaccaatgggccaag

SEQ ID NO: 84066 - DNA, 512 bp, Oryza sativa
  Clone ID: PAT_MRT4530_83339C.1
tctcctttctccgctgccttgctgccgccaagaagaccgcctgcgtgccaaccagctgtgaggaaggcggctgcggggcttgggacccgcccctacggggccggggcagggggagaattctcaccagtgggtcggtgacggcagtaaagttgatcgggagggcggcgggtagtggcgaagtgtcgacgacggcgtcccttcaaatggcggcgcgactagcggtggacaacgacagcctaagcgtcaacaaccaatcctcagctacgagatggcagatccgacggaggtgggtcccgtacgcagcggcccctgccggcggtagcctggtagttcggggagaagacttcctcggcggcggggactgtgcccctaggatcggcggtggcttgagcgctggtgcaaggttctcggtgaggggggaggccgataccgtcagcgatggtagaggactccagcagaggcggcggcccaataggttgccaaaagtcatcgggaatgttgcttgaacccat

SEQ ID NO: 84067 - DNA, 598 bp, Oryza sativa
  Clone ID: PAT_MRT4530_8333C.1
agtgatatctcccaaaattccaaactcttgaagccttgaggctccagccttgacctaggctcgagcctcctccttgatcttggcgatgatggaagccggtgttgaggcggtgtttcggaagattcttgcgtttcattcgcaccaaacttcccatgaaaccaagatcaccagtgctcgcaaaggaaagcggggggtgttaggagtgtctaccactaggttccaccattgctccaccgagtcgcagtcactctatttgctcatttggagctcagcgggggtccaccctgcttagtccgcccataccctcttggtgactctgcagtgcgccagcagatggatcgctgattcgttgattatgcagcatagcggttgattatgcagcatagcgggcatatcttctgattttgccaacctcttttctcgagtctatcagttgtccagagtctattttgggtggcgagccaggagaaaaaattgcattttggaggggcccatgctttccaaatggattggctgaaagccgatctcatagaccccataaattggagtccataggcaccataacttgtatgttgattattatcttataaaagaaatt

SEQ ID NO: 84068 - DNA, 5855 bp, Oryza sativa
  Clone ID: PAT_MRT4530_83340C.1
atggtgaggcgggcgagcgtggcggcgtgcctgacctgcccgctctgcggccgcctcctccgcgacgccaccaccatctccgagtgcctccacacctcttatggtattttcaattgtgttttgttcagagttgatcacagtatgcaattcgtaaggtcaaggatatttcctttcaaacgaaggaaggttgagaacccagaaatcatttgtccagttgcgtcacctgtcaagaggaaagaaagatcactatcttcacttacaatccctgctcctcaggtgtctatacagaaatgtttgacaaagaggagaacgaaagcttcgtgcttacgcaactttcctttgcattctacctcgaggggcagtaaagatacatcaaagaaacttgggggttggagaccattgggttgtcaacttaagcttggcaaagacaaaaaatctctcaaatcaagtgtaaaagatacaaacagaaccaaaagtaagtctggtgatacagatgatggtgctcctgctagtaaagcaaaggctagagaaccctttacaagatatgggcgtgcagctaagaggactggaagaaagaaattgctcatgttgaagaacaaaaagaaaaggttcaaggcaaagcagcccagtaaaaagaggagattccgagcactatggttttatctacttgctgcttttgaccagagaggagtaccaactttaccacaactaccagcaaagtatttgaggatcaaggatgttgatttgcctgcttctattatacagaagtaccttgcacagaaacttaacctctcaagtgaaactgaggtagaagtgttgtgtggtggcaaagtagtgaaccaagggatgacactgcatgatctagcagattgctggcttgagaaaggaccaaagagccgaatgcgctcatcgttttgtctctgccttggttgcttgtgggggttcgtcgctgatcgtggtgtcgtggggagagctgatcgcggtcgcgtgatgcggggagctatggcgaaaagtccacgttctgttgttaccacaggaacaaaaaggcgtagagcaaaggttcataaagaagatgagcctgttgagaatgaaaacttggagagtgaatttgatgtttccaagaaagagagcaatggtgccactgaacctggtaatgagcctgttgccagcaagagaccgaagagagcagctgcctgttctaacttcaaagagaagtcattggacttatcagaaaaagattcaattatcacaatcaaggaaagtcgggttgaagagaaggaaatagaggctgttaatttgacaaggacgggacctgaagatggtcaaccttgcagaaaaatcatcgatttcatcttacatgatggagatggtaatctgcaaccctttgaaatgtctgaagttgatgacattttcataacagctcttatcatgcccttggatgatgatctggaaaaggataggggaaagggaatatgttgttcggggtttggacgaattgaaaactgggcgatttctggctatgatgaaggtgctgcagtaatttgggtctcaacagaaacatcagattacaaatgtgtgaagccagcaagcagttacagatcttattttgaacactttagtgagaaggcacgtgtctgtgttgaagtctataagaagttagctagatcagttggtggaaatcctcaggtggacttagaagaattaattgctggtgttgtccgttccattaattcaaacagaagcttcaacggaacagtaaccaaagactttgtgatctcctctggtgagttcatatataaacagcttattggattagaccatacagctggcaatgatgatgagatgttggccacactgccagttcttgttgcactgaaagatgaatgtaaatcaagagcaggattcacacatttgccagctatgccctcgaatggaactctgaggattaaggatgggcaagacaagggactgactgaggatgaggatgcaaaattagcaagactgttgcaggaagaggaagaatggaaaatgatgaagcagagaggcaagcgtggaacttcacagaaaaatatctacatcaagatttgtgaaactgaaattgccaacgactacccacttccagcctactataaaccatataaccaagaaatggatgagtacatatttgatagtgatattggtatgtattctgatgatgtacctgtaagaatccttgacaactgggctctatacaattcagattccagactcatttctttggagctcatccctatgaaagctggtgcagaaaatgatattgtggtatttggatctggttttatgagagaggatgatggtagttgctgttcaacagctgagctagcacagttacattcttcctcaagtaaatctggccgggaagatccaggagttccaatttatttgagcccaattaaagagtgggttgtagaatttggtggttcaatgatctgcataaccattcgaactgacgttgcttggtacaaattacgccagccaacaaagcaatatgctccatggtgtgagcctgtgctgaaaacagcaaggctagctgttagtatcatcacccttttaaaagagcaaagtcgcgcttcaaagctttcttttgctgaagttatcaagaaagtagcagaatttgacagtagacaccctgcatttatatcatcgaaagcaccaaccgttgaaagatatgtcgtggtgcatggacagataatacttcagcagtttgcagactttccagatgaatctgtcaaacggtgtgccttcatcacaggtcttctagcaaagatggaggaaagtaggcacacaaagttggccatcaagaaaaaatctcaacagatgagaggggagaatctgaacccaagcgcaaaaatgggtccaatactgagaaagaagcttatgcgtgctacaactacaatgttgatcagcaagatatggggtgaatactatgccacttatttccctggggatacaaaggaagaagatcagaatgaaccaaaggaaattgatgatgatcaagaagaaaatgaagacaatgatgctgaagaggaggtaaatgttcaagatgagaaggccacaaggactccaccatcaacacggtctagaaagtcgtcagcagatactcgcaaggaaatcaaatgggaaggtcaaacagctggaaaaacagtgtctggagaagttctgtacaaatgtgttattgttcaagacctcagtatttctgttggtgcgacagtcacaacagaggatgattcaggagaaaccatcatgtgttttgttgagtatatgtatgagaaacttgatggtaaaaatatgattcatgggataattctgcaagaaggttcacagactgttcttggcaatgctgcaaatgatagagaggttttcttgactaatgactgtttagaatttgaagcaagtgacatcaaagagttggtgactgttaatatccaatcactgccttggggccacaagtacagaaaagagaattctgaagctaagagaattgaaaaggccaaggcagaggagaggaaaaggaagggcctgccagtggaatatatttgcaaaagcttatactggcctgagaaaggtggattcttctcccttccgtatgataaaattggaaatggcacaggcatctgtagctcctgtgagagaaaaccagttggcaatgaattcaagttactttctgagagcagctttgtctttgagaatattacgtataacatccatgactttctgtatatcaggcctgaatttttctcccaaggggagggccatgagacctacaaggctggaaggaatgtgggtctaaaaccttatgcagtctgccatctgctgagtgttcatggtcctgctggatcaaggaaagctaatccagaatcgacaaaagtgaaagtaagaaggttttaccgacctgatgacatttcatcaacaaaagcctactcatcagacatccgagaggtgtactacagtgaagatataataagtgtacctgtggtgatgatagagggaaaatgtgaggttcgactgaaggatgaccttccaaattcagatcttccagcggtggttgaacatgtcttttgttgtgaatatttatatgatcctgctaatggagctctcaaacagctaccgcccaatgttagacttgtgacactgacaaggaaggtacctgcttcaaaaaagaacaaaggaaagcaaatttgtgacattgagctaggtggttcagacaaaccaaaggatgggcaatcagagaactgtcttgcaacacttgacatttttgctggttgtggaggtttatctgaaggattgcagcgatcaggattgtcacttactaaatgggctattgaatatgaagaacctgctggggatgcatttggtgaaaaccatccagaagctgcagtatttgtcgaaaactgcaatgtgattctgaaggcaattatggacaagtgtggtgattctgatgattgcatctccacttctgaggctgctgaacgagcagctaaactttctgaggacaagattaagaatctgcccgtgcctggcgaagtagaattcataaatggtggccctccgtgtcagggtttttctgggatgaacagattcaatcaaagtccctggagcaaagtccagtgcgagatgatcttagcattcctgtcatttgcggagtatttccgtcctagattctttctcttagaaaatgttaggaactttgtctcgttcaacaaaggacagaccttcagattgacactggcatcactcctggagatgggataccaggtccgatttggaattttagaggcaggggcttatggtgttgcgcagtccaggaaaagggcattcatttgggccgctgcacctggagagactcttccagagtggcctgaaccaatgcacgtctttgctagccctgagctgaaaataactctacctgatggcaagttctacgccgctgtcaagagcaccgctgcaggagcccctttccgctcaattacagttcgagatacaattggggatctaccagctgtggaaaatggcgccggcaaaccaacaattcagtacggaagcggtcctgtgtcttggttccagaagaagattagaagcgacatggcttcactgaatgaccacatatctaaagagatgaatgagctgaacctcataagatgcaagcacattccaaagcgcccaggttgcgactggcatgacctgccagatgaaaaggtgaagctgtccacagggcagatggtggacttgatcccttggtgcttgcccaacacagccaaaaggcacaatcagtggaaaggactgtacggtaggttggactgggagggcaatttccccacttctgtaacggatcctcagccaatggggaaggtcggcatgtgcttccatcctgagcaggataggatcattactgtccgtgaatgtgctcgatctcagggctttcctgataactaccagttcgctggcaacatccagagcaagcacaggcagatcgggaatgcggtgcctccacctcttgccttcgccctcgggaggaaactgaaggaagctgttgatgcaaagcgtcagtaggtgctcagagtccttctccgatgatcgagggagatgattctcccctgaaaagaaacaaacaaccaaacatatgagtgtacttattttaattgtgcgctgcatttaactttgtgtgttgattaagattttagtcatatagatccttggtaaccttgtacattttagaggttgtgttgtgattgatacccttgattcaggggtatgatttagtggctgtattcagatatttaaacaaaataatactagttagtgatggttgaattgtt

SEQ ID NO: 84069 - DNA, 295 bp, Oryza sativa
  Clone ID: PAT_MRT4530_83341C.1
gcaaaccccaatttttttcagctttagaatgtgggaaggcctatttaaaattcaaaaaagtgctctgacaatccgggacaagcattgaaacctcaggcgcttgaaaaggaagataaacaacaatgggggctgggccaataacaagcccgtcatgaatttgggggggtgaacccatactgatgaaaaaccagaatcgagagggggaaataacaggtcctgcaagggggccttgccacaaaaaagggcctttacaaataaacccaacttggaaaaaaagggggggcggccattcttg

SEQ ID NO: 84070 - DNA, 690 bp, Oryza sativa
  Clone ID: PAT_MRT4530_83342C.1
gctcaaacgttactctgctaggaagaacgaaactacgtactgctatgacttcccgctggcttttgaaacagcactgaagaggtcatggaaatcaaccctctctgttgttgctgaagctaatgagcataataagagctatgctaaagtgacagagcttatgtttgctgattcaactggatcatggggtactcctttggttccagttgagcgttctccaggtatcaatgatattggcattgtcgcttggatcatgaagctctccacaccagaatttccaagtggccgggagattattgttgtttcaaatgatgtgacatttaaagctggatcatttggtcctagggaagatgctttctttgatgcggtcaccaatcttgcttgtgagaggaaacttcctcttatctacttgtcagcaactgctggtgctaggctcggtgtagctgaggaaataaaagcatgcttcaatgttggttggtctgatgacgagagccctgaacgtggttttcattacatttacctcactgaacaagattattcgcgcctgagttcttcggttatagcccatgaactgaaactagaaagtggagaaactagatgggttggtgataccattgttggaaaagaggatggactcggttgtgagaacttgcatgggagtggtgccattgccagtgcctattctaaagatac

SEQ ID NO: 84071 - DNA, 107 bp, Oryza sativa
  Clone ID: PAT_MRT4530_83343C.1
tatctaagccaaacagggtcaggagccggagcggctcgggagaggaaacactagagcgatactaccgaacaaccgcccgaaagtatacgcgcgccaaggcatgaagc

SEQ ID NO: 84072 - DNA, 195 bp, Oryza sativa
  Clone ID: PAT_MRT4530_83344C.1
atggaggatggagagggtgtagcgcacaaggtgcctccagcccttcaccgtgaacaagacgtacgacatcacccggcagtccacgagattggtggagttgggtcggctgccacaacaatgattagagccttgatcgccatgactatcatgaccacggaggcagtcaccctatgcatagacctaactgatggctga

SEQ ID NO: 84073 - DNA, 218 bp, Oryza sativa
  Clone ID: PAT_MRT4530_83345C.1
gctcgcttccgtcgccgcgcagttgcctccgccgccggatcttctcctgggaggctagatcgtgagagggagagagagagagagatagagttaccgttagagttagagaagcagtcttcatttttagcccatttagcgaccgctcattcaacctgtttagcggctatgtcgtgctaaatacagcaaatatcgttccgctaagcttatctgcaaaattg

SEQ ID NO: 84074 - DNA, 123 bp, Oryza sativa
  Clone ID: PAT_MRT4530_83346C.1
atggcgcaatcgatggcaaaacagctaagaaaccatgagaccacaccaccggctggtgcccacaaggctgtaatgggcgtcaatcagctcagctaccctgttgctgcacctgatccatcctga

SEQ ID NO: 84075 - DNA, 2332 bp, Oryza sativa
  Clone ID: PAT_MRT4530_83347C.1
ggccgcccttttttttttttttttttttttttttttttttttttttttttttggatttaaatgcatttgacatgcatgttcattcaattaatcaatatgacaacaatctgatatgaaataataacaatacaaatctcaaaaacagctacaactgaaatgaaattgagcactattttcaaccagtataagcatgggcaaccaaaaggccgggcaaccagaaaaaaagcttaaacgaacagcattgccggcagtctggaaaaaaaaaaggacttaataaccatcaatcattggctgtttttcatcctgggatagcttcatcactctaaaatggatgccactatcgccatcagccatgatgtaaccccagcttttaccattaactatagggggcttcctaattttccatgaaattgccaattgcttaactcaactaatgaagtccatatgactgcagcatcaggaggggaaggatacttaaatcgttcctgcaacatcattgtcagaagtaattgtgatatgacctccattacatcctatcagaatttccttacctatcatattgcagtcctctgagactcggatgtcttcacgaccaatggttgatgttgttgcttccttgaggctgtaccgcttgtgactgccgttgcagctgccgcagagcacgtagcgctcgccaccgcaccggctgcaggcggcgagggcggttgcgccggcgccggctacaacgcgtcggagctcgccggactcgtggaggcggcggacctcctcggcgccgccgaggtggcggccgccgacgaacacctgagggagggtgacaccgcgcgcgcgggggaggagcgcgccgagctcctggaggtagcgggggtccatggcgaggtcccgctcgtcgacggaggcccggaggccgcgcaggatggcgcgcacggcgcggcagtcctcatacgtggagcggacgacgtggagggaggtgaagtagagcaccacccggcggtcggcctcggccacggcggcgtgcggcgcctggagggtgcggagcgcgcggagggcggaggcggcgactcggacgcggtggaagacgcggacggagggggagcagggggcggtgttgggcggcagctgcggcggcgtcggggagggcgagtggtcggagaggaggagagcctggaggtccttgagggagggagaggagaaggacaagcgaggagaggcggcggcggcggcgagcgcggtggagggcgagggggaggcggcggcggaggaaggggaggaggggcgcgtcttcacccagggcagccacatgggggagatggatgaggcgagggggcgcacagcgcacctcacgcacccaggagcgacgcgccgcgaggctcgctcaatcaccgcgcctcagaactcctcgtctcccgtttttcttttttctttctttctccccaccgcgattccgcgtctgttcgtcatccgtatcggcggtatcgccgtcgccttagcaggcagcatcgccgtcggcccccgtcgcccgcctcttgtagtctctctagccggccgcagcatcgataggcagcagcgcaggctattaactatcgatgatattgacattgacagttttgaggtcaaggatgggcgacgggggaggaacatcctgcagcggagtatgtcctgccgcaagcacgacgcaggcaagccaagccggcagccagataagaagaagaagaagaagaagaagaagaagaaaatgaagggaagcaaacaacaccgcctgttcgcggccatcaccgccaccacttcatccctcatcttccctgttgctgccggcggcatcctcaccgtcctcatcctcccaccgctgctcctttgcacccacgcaggcgacctcatcgaggtctcctaccttttcctggcctcacacgctctccgttgcaggttcctctccgagatgggtcgcgccactgccgacgccatccggccactagagggccacgggcggcagcggctctggcggtggtgctcaggagggcggcagggggggatgcagagaggcagatctggcgcctcctccttcctcccgaccggtgacagcggcaaaggggagggatggcggtggggccatcgcctatgccctgcaccaaacaccaagatccaatggtggggtgacaaaccatcagccgtcgcgccgacacgggtgggcttggggagagttccggcacaggggggctctggcagcgggttcgcgcgggcttcggcaagggctccaacacggccgggctccagcggtggattcaacagccagtggttgaacaagctttggtggcgcttgggtgcgggcgggcagtga

SEQ ID NO: 84076 - DNA, 272 bp, Oryza sativa
  unsure (1)..(272): unsure at all n locations
  Clone ID: PAT_MRT4530_83348C.1
gataagcttgcctcaaagatcaagcaatgcatgtgcccgtatgagacgtaactcgaacgtgtgcaactctgacctggctcagtacacatattatagcgtgctggctgggactctacccttatatagccgccgtcaatctatatgtactacttgtactagacacgcattctgtgaagtgcggcttcgattagatatactgccacatgctgngatgcgcacactgattcagggattcatgctaactgaatggatacgcatgcgcctcatgacct

SEQ ID NO: 84077 - DNA, 343 bp, Oryza sativa
  Clone ID: PAT_MRT4530_83349C.1
ttttgtacataatagggacaggtgattaatttaactgttgactgaagaatacatagaggtttaagattcattaaaaaggggctgcaggacctacacaaaattatactccttactacttatgatagagcttaacgatgcatcgaatgaataattcactttacatacagagaccaaattattggccataggatgaatttgccgctgctgcgatctggcaaactgcatgctgaaccatggctgatgagcaaagcttaccttacttcgtgcggtgggcttcaaacactggacgggatgagcatccatcaatcggacaggttatcagctggcaacgctcatgctgagc

SEQ ID NO: 84078 - DNA, 1830 bp, Oryza sativa
  Clone ID: PAT_MRT4530_8334C.1
atgaccgttgagaaggccatggagcaaaacctggagagatctactaaacctccctgttggatgcctcaaattggtatgacatttaattcctatgaagaagcttgggatttttgggtcaaatatggtggtcgtattggctttgatgttcgaaagaattacactaacaaaagtgatcttgatcagttagtaacatccagtaggtttgtttgttcaaatcagggttctagagcagaagaaaagaaatatgctgtagcaaaacgtaatcgaactcatactcgaactggttgccaagttcgcatgggcatcactttactcagggaaacaatgacatacaaggttcatgacttagctgtagaacacagccatcttcttcaaactccacaaacaagccgtttgatgccatcacaaaggaacatttctaaacaccaagcagtcgaaattgaggtggcgtatgattctggtattacacctaaagcagcacatgagtttcttggtcggcatgttggtgggtcagctaatcttggttacacacagcgtgatcataagaattatttgcgttctaggcgccaaagggacttactttatggtgaggcaggaagtttactaaagtacttccaagataaaattgtggaaaatccctcatttcactatgcagtgcaattggattgcgaagaacaaatagctaatatattttgggcagatgctaggatgattgctgattatgctcactttggtgatgtcatcaccttcgacactacattcgggacaaataaagaaagtagaccttttggtatgtttgttggcttcaaccattttagagagacagtggtttttggtgcagctttgatgtatgatgagacatttgaatcattcaagtggatgttcaatacatttttatcagcccataatcaaaagcaacctcaaaccatttttacagaccaagacattgcaatgggaaaggctgtgtctgaagtattcactggtgcatggcatggtttatgtacttggcacatatcacaaaatgcagtaaagcatttgagtcctcaacaaacagaaggttcaagtatcctagcagatttcagtgcatgtatgtatgagtatgaggaaaaagaagaatttgaagaagtatttgatgccatgagacaaaagttcatacttgaagatgagcacaagttgactgccaacccttttgatcagaccgtgtcgtgtagttgtcgattgtttgagagaataggtctactgtgtagacatgccttgaaagctcttgatttagtgaacattaaattgttgcctgaaaaatatgtattgaagcgttggactcgagaagcaaaatgtggagctattcaagatatgcatggcagacaaatagtggaagaccccaagctgagtactactcttaggtacagatatctgtaccagcaatttcttcctttggcttccagagctgcagactttgaagaatgttacttgcttgtggaagaagcacttcatgccgttagtaaaaaagttgaggacaaaataaaacaaacttacagtgatggcattgcaaagtcgaatgatcagtcaacatcccagttagctcagaacttggcacatgtctctggtctgaagaaaaaggagagccggaaacgtgtaacaaaacggaaaacaaattggattgataaactgcaaaaaacaaaaaagagaaagcctgaagaaaaggcagaggaggaaaacatgcaaactgatgtggaagaacatcaagaatgtgaagcaattagcagctatgcccaacttctactgggttctattgacgttgaagatgtcatcttatctcaaaagttcatttga

SEQ ID NO: 84079 - DNA, 222 bp, Oryza sativa
  Clone ID: PAT_MRT4530_83350C.1
atggacctccatccccgccgcactggtcatggccgcgtaggcatctcccgaacatggcatctccgacacctctgcttctccccttccttagttcgctctactcttctccccttcccgccaccatcgttcgccatctccatcgccgagaaaggggcctcagctccatcatggacgttcctctttccccaagcccacatcctccccatcgtcctagcctcctag

SEQ ID NO: 84080 - DNA, 249 bp, Oryza sativa
  Clone ID: PAT_MRT4530_83351C.1
gtccaagggcaacttagtcttctatccggtgctattctaacttttggtttgacccgttatccatactcggagtttgaattgatggctgaggagcttcttatgagtgactcaacaatcaaggtgtttggtgccttgagaatgtctgtaaagatgcttcttatgtggaactccaaaatgttaattgatggtggtggagattcaatagttgcaacatcgttacttgatgctagcaatttgatagttctaaag

SEQ ID NO: 84081 - DNA, 483 bp, Oryza sativa
  Clone ID: PAT_MRT4530_83352C.1
atgtcatcccctctctccaacctttcttcctcctccctctccctcccttctctctcttccttcgagccgcgggtcatgcagcgatgcgtctccgcgcggccggatctcctatctctcttttttctcccccttcgccgtctgcggggagagctggagcgacggaggagtcggcctctccacctcgggatgtcggcgctgcctcccccgacgacagagacggactcaggtcagcgacgcacgcacgcgcgctttcttgccataaaaggagcaggcaagacgtcgtctcctcggacatcacgattcacgaagccaaacccttcttcatccgatcatcgagcatgccaaccagagtccaagactgccaattcttggcaccagcggtctgatccatcgacgtcgacggcggtggcctcggcgagcatggagatggagcagctcacagcccgcttcaatgatgtcgtcgctgtgcacggcaacaactag

SEQ ID NO: 84082 - DNA, 1257 bp, Oryza sativa
  Clone ID: PAT_MRT4530_83353C.1
ccgtctcgaggcggtggttgtgtcgtcaacgagctgtacgaggcggcgcagctctacctcggcgcgcgctgcctcgccacggcgcccgcgatgcacctccacaaggcgcacggcgcggcggccgccgtggcgtcgctgccgggctcccacgccacgcgcgacgccttccgcggcgtccgcgtgctgtggacgtcgcagctcgacgggaacgcgagctcgtcgttcgggtgggcgccgcccccgatcgacggctggcaacggtgcctgcggctcgagttccggcgacgcgaccgcgacgtcgtgcgcgacgcgtacatccccttcgttctcgaggaggcggcggcgctgcgggcaaagttgcgggagaggaagctctacaccaacaacggcggtggcgccatggacgatcaccagatgctctggaaggcgcacaagttctcgcacccgtccacgttcgactcgctcgccatcgacccggcgctgcgcgacgacatccgagcggacctgctccggttcgtgcgcagccgcgagcactacgcgcgcgccggccgcgcgtggaagcgcgggtacctgctccatggcccgcccggcaccggcaagaccagcctcgtcgccgccatcgccaacctcctcgagttcgacatctacgacctggagctcaccacagtgacctccaactacgacctccggaggctgctggcctcgacgcggcccaagtcggtcatcgtcgtcgaggacgtcgactgctccctcggactacgccgacgccgacgccgacgagcagcgcaaccgtgcgatgctgcaacacgcgctaacccttctgccgccggcggtcgaggcggccatgcggcgggagacgatcagcctctccggcgtgctcaacttcgtcgacggcctctggtcgtcgtgcgtcggcgagaggctggtggtgttcaccaccaaccacacggacaggctcgacccggcgctgctccggcccggccgcatggaccgcaaggtcgagctcggctactgcaaggccccggcgctgcgtgtgctggccaagaactacctcggcgacgacgacgacgccgacgaccacgacgagatcatgggtgaggcggggaggctgctcgatgaggtgcaggtgacgccggcggacgtcgccgaggtgttcatgggatgcgacggcgacgacggagcccacgtcgcgctgcagaagctcgtggacgagctcaacgctaggaaaggaattctagatcattggctaggtccgtt

SEQ ID NO: 84083 - DNA, 4074 bp, Oryza sativa
  Clone ID: PAT_MRT4530_83354C.1
ggaccaaactcacaagtttatttcaacatacttccatttatgatcctttccaatagaacactggcgccagccattatttcatcacaattccttaccactatttgtttacaatacacttgaggggatagcaggtaagggggagtaaaaaggcatacaataaaatgaaattctaccatcaagttacatacatctagaggtgtaaaagaaaaggtgaaaagaatacacaaccctaaaattgaactttacagtaggtgctctcttggtcttcctgtggtctatctactaaatactgtggtcttgctctgtctaaactagaactccacaaataccatagaagcaacaacccaagaatgtccctgagttccaattagtctactttttttttgtcatctttcaggagataacatcctataagctgtacaggatacaaaatctaaagggaaaaaaaaattatccctgaacttgtaattcggtttccttcgttacttgcatagccttgccatcacggcgagcagagatcccaaccatcctctggtgtgacgatgtccggtgtcgtgacgacaattgtctcgccacttccgggtcttcagccttccctaagtgtcttttccactgaatcttgttgtggaacatagggaagaatctgatctggattgcggcatagcagaagtaagggatgagtgttgccatcacagcaaaaagtgtgaccaaccaatatgaaagtgctggagccacttgttcaatgaaaaccatgtaagctgatttcgaaaacctcgggtccacagcaccataagccaagaggaagaggtaccatacggcaatgcttccccatatgaatatgtgctggattattgtgaagtagttcacagagagcgccatttggcagttcactacccataccacacaagtgtacatgaggactcctagagcatccaagcctgcaacttggccatcctgacggaatgcctggataccgaaggcagtagtgcagaagtaaaagattaggatggcattgattacgccattagccatccagccaagtatccggcgccaactaaacaatatattctgcacaccttcttggtagagccctggataatgcagacacagcctttgagacacatcttggtcaaatacccccaatgcaatgactgggagagaagtgaaaataacattgtatagtgacaaaaaccaatcattataagctggtttccctgagaaagacgcaaatgcttcatagagaaagatagtgactccaaaagttacattcttgtagaagaaatagcatatcatcactgaaatgcgacggtaacaccaatgcccatgaataagcagtaacctttccaggaaacggaactgagcaattgcaaaatcacttgccatgacagcctgcatcccctcaacaccactaatgccaacccctatatcagcttcctgaagcatgccaacatcatttgccccatcaccaattgctaaggtcactctatttgtatgtttaacaagtcttgtaaccagtgccttctgtttaggtgaagatcgacaacatataactgaagcacatttcaaagcaagatccaagaacttaaacttgacatcatcttccaaggcatatgttaaagatttaccatcaatgatcagtgcaaaggattcagtatttgattgacttgggggtggaatctgtttgattccatcctctatttgatccattaccctttgctttgattcccttgcaattgattccttgtctccatttttctccaatgcaataatgtcaggtgcttccagggtaacaattatctgtgtcattccttgtctaagtaggctacatgcaaagccaatattgatagccgtctccattttgtcacctgtgaggacccatattttaattccagcttgtgcaagcttgtctatgcattcgggcacccctttctggagcttgtcctcaacagcggtggcaccaagaagaagcaagtctcgctcgatgctctcagcagccgcctcaactttttcatctctgtcagcacttacagatgttctggcagtgttgaatttctcactaaatttcatgtactcattctcatccaagaaacggtacgcaagaaccaaggttcttagacctgagtcagaatactcatttatgtgccttttagtctcttcctcaaattttcttccagttggtgcgagccttttgaacataacactatcagctcccttgctaaaaagtaatatccttccctctggttccttaactatcacagacatccgtttccgtgaactactgaattccaagacattcaggagctcatactttctatcttttacaatattcgtgatcggatcccgttcatgaacaactatacttgactgtgccctatgataaaactcaaaccccaactctcttgccgcaataacaaatgcagcttcatcaggggactcagcttcatatgaaaccttatgggtttcttcatcctcttcaggtatacatgtgtgacagatggcaagcagacggaaaaaatctcttatcatatcactgttaggctcatgaatccagtttccatccatgatacgtggatccttgaaattaaatcctttaatgtgagggcttccatcatttttttggtctgtgtgctctatattttctatcccatcacctaaaacggaccctttcctcagagccatagctttctcaacttctgtgacaccctgaccataggcaatgccagcaatcgagcacttaatgaactccatcatgttacatgtcaatgtcccagtcttgtcagaaagaaccgtatcaacttgaccaagttcctcatttagattcgaagtacgagcatgagttggcttatctgattcttcatgatacatttcaatgtcctggttgatgaatagagcctgcagtatcttgaccatctcaatagatatgtacaacgagattgggatgaagtagctatacaacatcaaggctgtcaacaaatgaaagaaagaagctagagctgctcgctttggatcatagaagatagtagaatcatctggcctaagataccatcgtttcatctcgccattcattaaatcttcttttgtccagataccaaacaacactgaaccaagtaatgcaattacgagtagtgaagacattagcacataaatgattttatccattctcttctcaattttgcttcttttagatggtggatcagttgcattttgcattacttttgtatcatggcctgcgaagatcacagcaccatatatgtagtcagtgttccttagttttgagtctcgaagaagaagctgctgcggtgacagattgtactgcttgtccttccattccatagtaccaataaaagaatagagattcgcgtttggatcttcacatttgattgtctgcctgagatttacaaaactattatcctcttccaaatgcaatgtcacatcaagagcttgcttaattttcaaattcgtttcaccatcaaggttcatagtctctacataacagattccatctggatagttagatgaaagcagaaccaaatctgcaggaaagaaattatccttctccacctttattacatcaccaactttgatatccttccattttttctcttcaaaatcgccgtcgcctctatgcacctttactgtccgattattgagttcatgatcctgatgtttcctcctccaatcctcaatgccttcttttgccattgtcgccgcaatcacaacgcacagcgggaggagtgcgctgacagcggtgtagggcgcgagaggggtcaacgcgaggataccggagaccaggaagtagaagttggccaccctcctgaactgctcaaagagggactttggaatgaaagtcaccaaactgtactttgtcgtcgacacctcattcggctgatacctgaacccctcctcttcatgcctgtcgggctcattgacataaacaaccctggagaaccctgtcgtcccaatccgcgaagaatggtcctcgccggatcccttgctgcatagcgcgaaggtgtacaatgcgctgagcttcagcttgagcctcctgcttgtcctgctcctcctccccccggccat

SEQ ID NO: 84084 - DNA, 349 bp, Oryza sativa
  Clone ID: PAT_MRT4530_83355C.1
ccctcacaaaacctcaccacaattccgggggcgcagcgagaagcagaacagattggacgccgggagggatggagagccccccacagagagaggagaggaaatcggggaggaggcagacgagcagatggcgtcaaatcggagtgggcagttaggagttgggaggaaattttataggcgacgcgccgatccgattggtgggggaggcgaggcaacgacgccgcagcggaggcaacaaggtgggcgtggaagtcaatgcccatttccttgtccactccacgtctccaccacactgctctctatcctcttcgattggaaggagtttttcgcgtgcgcgtcccacaaaatctag

SEQ ID NO: 84085 - DNA, 793 bp, Oryza sativa
  unsure (1)..(793): unsure at all n locations
  Clone ID: PAT_MRT4530_83356C.1
cagnagggaattgaatcttagagattacgagtggtatgcaggttaacacaggggcgcatcaggtaccagttcttttccattgttactactgcgattaattcggcatgtctatagatacatcgagcacagaaagggccactgaatcaacacaccatgggcatgcaacacggactgccattcaataacagttcaagatgaagctccaacagaaaggtgggtttggaggcttactactagttgtaagccacctaaagattttcaccctattagttgctggttggattcaggagattttgtttgctatgtccttgatgacctcatccatgtcaagtttcttcatttctgtgaaaggtcgtggcatgttcagcagcgatatgaacacttcaccaccttcctcacgaatctccaagcaaccacgtcgtggcttttcagggttgattaccacggataccccaggaacagaactttccagatcctcctttaccttcgcagctctaatcttgaactgtctgcattgagtgcatgcctccacaacgatgcgcttcccgtcgctgaccacagcgccggaatccttctccgccgcagccgccacttgtgcatcttctttcttggccctcttcctccccttctgctcgggtggtgccgccgccgccgccgcttcctttttggccgccttggccggagcctcggcgcgctgcttaccgacggccatgctccgtgtcttcctcggtgacccgaccgccgcggtggccgccggggacttgcgcttaggaggcatcgccggcagcgagag

SEQ ID NO: 84086 - DNA, 1436 bp, Oryza sativa
  Clone ID: PAT_MRT4530_83357C.1
caggcacgacgccacgcgtccgggaagcgactagcgagcgagataattatcatcgtccactctatccgcctccagcttgccccgcctcggtcctccggaggtgtaggagcgaccgaccatggggagcgcgggggcgctgctctcgcactcgcctccggggctcggcggattccctcctcgccaccatcaccaccaccgtctctccgtcctccgttgcgtaccgctcctcccctccccggcgcccgagcccctcagctgtcgccacggccggcaccttcgctgcgccgccgtcgacgggggagccggccgggagacggagcgtccctcgccgcccgcacctcagagggaggagtcgccgtcgggcagcctcggcgcagccctcgaggacccatctcctcaacctggtgtgccccttatccttctccctttatgttgccgatgttatgctaaggaaatctgctctgaatatgtagttcgtacaacggatttagtgaaccatattttgaatagcaatgctatatcagaagggccatttagtatgagaaaagctagatttttaggctctgcttcagcctttagtgttaaacaaactgagtggccatgtgctacaactgactcaaagaaatgttacctccaaaatggatcttttggaggtatcacagaggatgaagaacagagtagcctgtacaattttctttatccgagcaaagagctacttcctgatgataaggagatgagtatatttgatcatctagaggaacttcgtgacaggatatttgtctcagtattggctgttggtgctgcgatacttggttgtttcgcttactccaaagatcttattagaattctagaagcaccagttagtgttcagggtgttcggtttctgcagctctctcctggagaatttttctttacaacattgaaggtctctggttattgtggccttctacttgggagtcctgttattctgtatgagataatagcatttgttcttccgggtttaacaagggatgaacgtaaattcctagggcccattgttctgggctcttctgtactattctaccttggcattttcttctcctacacggttcttgctcctgcagcattgaatttcttcgtgaactacgcagatggggcagtggaatcgttatggtcgattgatcagtattttgagtttgtgcttgtgcttttattcagcacaggattatcttttcaggtccctgttatccagctactgctggggcaagtcggtttggtttctagtgaccaaatgctttccatctggagatatgttgttgttggcgctgtagttgctgctgctgtgcttacaccgtcgacagatccgttgactcagatgctcttggctggtccgctgcttggcctgtacttgggtggtgcttggatggtcaagctaactggtcgataattcctactag

SEQ ID NO: 84087 - DNA, 172 bp, Oryza sativa
  Clone ID: PAT_MRT4530_83358C.1
gttaaggtgttgcatgtaggctggatcaatatggcacatccatatgaaaagaacctgctgggtgtttctatttttccttcctttgtttgctcacccaagctaactctaccccttctgccgcgcggcctggtaaaaatgatcaaagaactcaaatatataaaaaaaaaaaaaa

SEQ ID NO: 84088 - DNA, 2465 bp, Oryza sativa
  Clone ID: PAT_MRT4530_83359C.1
atgaggcttctacgggtggccacgtgcaacctgaaccagtgggcgatggacttcgacaccaacctccgcaacgtcaaggagtccatcgcccgcgccaaggccgccggcgccgccgtccgcgtcggccccgagctcgagctcaccggctacggctgcgaggaccacttcctcgagcaggacaccgccgcccacgcatgggagtgcttgaaggacattttgtctggcggctatacggatggcatcttgtgcagcataggaatgccggttattttcaagagtgtacggtacaactgccaggtgttctgcttaaacagcaagatagtcatgattaggccaaagatatctcttgcaaatgatggaaactatcgggaatttcgatggttttctgcttggacattcaaagatgcacttgttgactttcaactccctcttgatatctcggaggttacgtcccaggatactgtgccttttggttatggttttattcaatttcttgatgtatcattggcttctgaaacctgtgaagagctcttcactgcaaatgcccctcgcattgacctagcgttgaatggtgttgaggtttttgtgaatgcaagtggaagccatcatcagttaaggaagctcagtcttaggattgattcgatgagaaatgcaacccttgcatgtggtggtgtttacatgtatgctaatcaacagggttgtgatggtggacgcctttattatgatggttgctgctgcatcgctgtcaatggagacgttgttgcacagggatctcaattctcgttaaaagacgttgaagtattggatgctctggtagatcttgatgcagtatcaagttatcgagcatctgtttctagttttagagagcaagcaagtcaccgaaccaaagtaccttttgttaaggtaccatataagctttgtaagccatttcagagtggaatggttccaactggtcctgttgaggttatgtatcatcgtcctgaagaggagattgcatttggacctagttgttggttatgggattatctgcggagaagtcgagcatcaggatttttgctgccactgtctggtggtgcggatagttcatctgttgcagcaatagttggttgcatgtgccagcttgtcgtaaaagatatagagaatggagatgagcaagttaaggcagatgctatgcggattggccagtacaaggatggagagttccctaaagatagcagagagctcgcaaaacgtttattttacactgtttacatggggactgaaaatagttctgaaggtactcgatcacgagcgaaaatgcttgctgaagagatcggttcattccacttggatgtaccaattgatagtatagtatctgcattgctttctttgtttgaaagattgactgggaaacgcccacggtacaaggttgatgggggttccaatactgagaatctgggattgcaaaatattcaagctcgaatcaggatggtactagcctttatgatggcgtcacttatgccatgggttcataacaaatccgggttctatcttgttctgggaagttcaaatgtggatgaaggattgcgtggttatttgacgaaatatgactgcagctcggcagatataaatcccattggaagtgtaagtaagcaggacctccgggctttcctgcgatgggcagcagttcatcttcactattcttcccttgctgaggttgaagcggcgccacctactgcagagcttgagccgatccgtgcggactataatcagttggatgaggtggacatgggaatgacatacgaggagttgtcaatatatggaaggttaaggaaaattttccgttgtggtcctgtttcaatgtttcagaacctgtgccacaggtggtgtgggacactatccccctccgaagtggctgacaaagtgaagcacttcttcaagtactacgcgataaaccggcataagatgactgtcctgacaccatcctatcatgcggagagctattcgcccgaggataaccggttcgatcttcggcaatttctgtacaacgcaagatggccttatcaattccggaagatcgatgagcttgtgcaagacatggataaagatggcaaatgggtgaactctacagaaggggagctgagaagacgcaagggcgttagatccgcggaaggaggcggaatgggtgtcgtcgccgtgggatctgccaatccaagtgctggatcgtgagaaagcaaccgctttgcaggatgtttggttttctcaagtcacatcgaagtttctctaattcacacttttattcaataatttcttttttttttgataaaatccctgtgtgtggacggggattgaggttgtctcatccaaccaatgtaagtgtccataactaatcaaacaggaagcgtccataaaccacacacagccacacaggcgtgagtatgctaagatatcaaaatttctaaaccaagaccctttggttaagaacc

SEQ ID NO: 84089 - DNA, 518 bp, Oryza sativa
  Clone ID: PAT_MRT4530_8335C.1
tcaaaaaaaaaaaaaaaaaaaaaaaaaaaaaaaaaaaaaaaaaaaaaaaaaaaaaaaaaaaaaaaaaaaaaaaaaaaaaaaaaaaaaaaaaaaaaaggaagaagggaattcatacgatcaaaaagtcaaggtagtacatacgttgggattggattggtaggaggaaattgcctcgcggggggttctcgggtccaataagttcccccaggatcgacgtccccctcaacatggggaaccccttcctcaaccgcaccgtctacggtttcctcaagatcggcgccttccgggggtgcaaggccgccgccgaggacacattcaactgcctccacaaaggggatgtttcaaagcacaagcttgagcatatgctgaaaaaaatgtgcaaggagggggcctattggggaactgttgctgggcggaatgcggccatgggatacgaactggaaaggattcctggcccccatgactggaaaaatgctatgaattgaaggggttttaaggggggctcttgatctcagctg

SEQ ID NO: 84090 - DNA, 291 bp, Oryza sativa
  Clone ID: PAT_MRT4530_83360C.1
atgggtgcaaaggagacacctcgcagggaaacggggatgctttgcaaagtggagggtatcttcgatttgtttgcttacgaaggggatagatataactcaatcgggattagccttctctatttcgatggcggggtagataatccgtccagggcggcgcaccggggaggaggaggccggggcgccggtggaaggaggctggggccgggcggcgtggcgcgcggcgggtcgatggctgagtgcggcggcgcagctaggcatggcgcgcggtggtggggcggtggtctggcgtga

SEQ ID NO: 84091 - DNA, 155 bp, Oryza sativa
  Clone ID: PAT_MRT4530_83361C.1
ccccaaataagttaatggttaattagctatctccagtattcatttgtacgattgataatgtgtagattgcatgtttgagcgtctttgtggactgttaattgcttaatttgtacaccgggtgcagttatcatgtacaaaaaaaaaaaaaaaaaaaa

SEQ ID NO: 84092 - DNA, 238 bp, Oryza sativa
  unsure (1)..(238): unsure at all n locations
  Clone ID: PAT_MRT4530_83362C.1
gtaaacgacttactatgagggncgtattgggctaccctacgaggccggnccgggcgcattggtcacacagagggggggctatccaggaaaatagaaagatctagtggcccgcagcaatgaagatcattcnatcggggggggggggggggggggtgtctatgcatcgcctctgcgcagtgtgatgttttaggtcaaagctataggcaatatcagctggagaggagtgtcctgctacagc

SEQ ID NO: 84093 - DNA, 241 bp, Oryza sativa
  unsure (1)..(241): unsure at all n locations
  Clone ID: PAT_MRT4530_83363C.1
ccggtcgaccacgcgtccgcgatcatgtggacatgccacatgcagatgaacagaacttatgccaagaacacgtgcttttatcaagaggacgggacgaatcatacgaaactaccgagcacatgacatacatgtgtcaagttgacaccgttcacggccngnggaaccatcatgaggtcaaggtcaaggactccaagaccctcatctttggcacgaaagaggttgcggtgttcggctgcaagac

SEQ ID NO: 84094 - DNA, 724 bp, Oryza sativa
  Clone ID: PAT_MRT4530_83364C.1
gcggcggcggcgggcggcggtggcggcgggcctccagtacgggctcctcccgtcggtagctccggcccattctcgacgtgcgcctccccggcgacgcggcgaggcctcccgtcacctcgaacccctgtctaagcctagggcggcggcgatcgcggccagtagagggcggcgcggcagcggcgacagcagctgcgatcctccatcagagggagacctgcaggagcgaagctgacaagaggcagaggtcgcctcccatggattctctccatctcgtgcacgtcaagctcctggctgccgatctcctctccctggcctcccgccacacctcgccgccttcgttcgctcgctgcggccgtacggttactcgtgccgagatcgtcggcgtcgtggtttcccgtgatcgcagggagaagttcctccggtttctggtggacgatggcaccggatgcgtgccgtgcgtgctgtggctgaaccaccactacctgaatgctgcgagcagttcatccagggcatcagattctgatccaactgcagagatggcgttgaggatgtcagaggtggtgagcctgggcactctgttgagggttcgaggcaggattgtattgtaccgtggtgcgatccagattgctgttagagatgttgttctggagaaggaccctaatgtggaggtgatgcattggttgcaatgtattcgcatggccaaggaatgttacgatctgcggcc

SEQ ID NO: 84095 - DNA, 2390 bp, Oryza sativa
  Clone ID: PAT_MRT4530_83365C.1
ctagtgtcttggagggcactggtagcacttggtgaagaggccaaaggtgtcaacttggcgaacgaagttgaccgtgctcgcccatccgccgaagccaaagccgacgacgagcacccacgagacaacgaagcaattgacggcgaacgtccccggccagccgccgagcgcgcgcggcggaggctcgacggcgttctccctgtcggccgccggcgcgaacgtcgccatgtgcgccatcgccgggatgatgtagacggtgaagctgacgaggaaggatccgacggtggagttgatggggccgaagaaggggaagatgacggcgaggaaccagatggggagcacgacggggagcctcgccgccgcgcggcggagcacgccggcgccgccgtggacgccgatggccttctcccacacgaagtagagcggcgtgcaggcgaagccgagaggtgatgaactggtggatgagcatgagcaccaccgcggcgtcgcgccacggcgtccgcggcagcagcgcgaaggcgttggagtggtccagcagcgcgtccccgaacgcccagtacatcgccgccgccgacggcagcgtcagcgtcagcacgtacgccgtcgcggcgaggtagatcatcttgaaccgccgcggcctccacatggcgtgcatgatctccaccgtcacggcgtggccgccgaacgtgtagaggatgttggtggcgccggtgaagtagagcaccatcgtcttgctcggcccggcgcgcggcgccgccccatccaccttgccgtgcacgacggcggcgacggtgaggtaccacgcggtgtaggacgtcatgaggaggccgaggaaggaccagacgcggtagttgtggaaggacgggacgaacaccgtggtggcgcagcaagccccgaagatgtaggtccatgtccgcttgtcgaggcggtcgttgatgtagtagatgttgctggcgcaggcgatgagctggatgacggagccgaagaggaggaaggtgcagttgaagaggaggccggcgttgcgccaatggcggccgaggaggccgtcgagcacctcgaaccactggatgacatggttgcggaagtccaccttgtcgcgctcccgccgcgtccggtactcgacgtagagcacgctgatgaggtaggccgtccacgaccccatcagcccgtagaacacctggaacgccaccccggacgccatgcccagctgcgagaaggagtagggcagcgtcagcagcacctgcgccacctggttggaggcgcagctgaaccaggcgtcgtagacggagccgccgtgccagaagaggctggagacggcgagcttgccgcgccgcctgcccgacgccgccgcggctccgccgacgccttcgccggcggtggcggcgccttcacgctccatctcgacgtagttgcccgccacgatcgtctccaccttctccgacgccatgtcgatcgatcgatcgatgcttgattgagttgcttctaaagcgggatctctgcagctagctagctccgaacgatcgatccattcgattaaatgcctgcgcgacgtctctgccgctgctccagcccccgcgccagcgccccccgaacccctggaccagctgcgtcctcgagtccgcctgcgcccccaccctccgcgacgtgtgctcgcaggctcagctgctcctgcgagacctggtcagggccgccgccggaccgggggtccgtcacggcgccgccgcgctagtgctcgtcctccatgcggaacttgccgccgccgccgtggtcgtcgtggccgccgtgctgcccgccgctgacgcccagccgccgcgagctcctcctccttgccgttgctgtcagccacgatggcctcctccgcctgtctcgcgcggcaccatgctgaccacgccgcccttccccgtcgtcagctttctcgctacacaaaagatgatctggagatcgcgctcaaggaagccggggcgagtgatgggggagcagtaaatgcagggtgccggtggagagtgatggctggaatggtatatgatatggaatggaatttactgtgctatcgaggcgagtccctgcacactgttcgttctccgctgctagctaggagtacgagcgtcgtggccggcgccgcccgggctgcactgtttaaaggcagagccggagttgcagcagcagcaggaggaggaggatggccaagattacggggctttctccttcacttgctctgcttcttctcagctataggtcctctcctctgcccagtctttcctctgttcctcctttatgagggagtaatgcggaagagggggctagaaagagaagcgcggcgctcgtagggccgtaggggggagggacgggcgaacgagcgctagagagggatgagctggtgatgtagaccctcg

SEQ ID NO: 84096 - DNA, 1735 bp, Oryza sativa
  Clone ID: PAT_MRT4530_83366C.1
atggacatgcaactccttcagctctacacttttgttatccacacgctccaatgtgcttttaataaagtatggcaaattggcaagattcccaggccgcagccgcagccgcagccgcagcacctgctgtgccactgccgcttgttgattcaccctagatggaacttcaacgctcccatgttcctcgccgcatctttgctgctaagtaggaacatggtggcggtgttcactcctcacatcccttccaataaccacatacttcaccacccccagcatctcctcgtcgatggcctccgaagcccatcgccttccacctcgccctcagccacgtcgcttgcccttgcgcgctatgggacggcgccggcccagatccgggcgccgccggacccgcccccagatccagtcgccgccccgccggaggaacgctgccgcggccaccacgacctgggttcgcttcagttgagtagagttggaaggtctcctcgtactcattcacctaaggaactggattcaccacgtcctgaaaatgagggctttgcccaagaggagagactcaccaaggagagactctccatcaaggagaagggactcaccaaggagggactccccatcaaggagaagggactcaccaaggagggactccccatcaaggagaagagactcaccaaggaaggactccccattaaggagaagggactcaccaaggagggactccccatcaaggagaagagactcaccaaggaaggactctccatcaaggagaagggactcaccaaggagggactccccatcaaggagaagggactcaccaaggagggactccccattaaggagaagggactcaccaaggagggcatccccatcaaggagaagagattcaccaaggagggactccccatcaaggagaagggactcaccaaggaggtcctccccatcaaggagaagggactcaccaagaagggactccccatcaaggaggagggactccccacgaaggaggcacaggtcaaaatcaaggtcaccttcgaggaaaactgatggctctagacatagaagggaacatggtagatctcggtcaaggtctcctcactcaaggagtcaccataggcgatctccaagaaggcattcaccacggcgcagatcatctccttccagtcatcgtcatcattcacctagaaggccgtggtcaccacctgccaacaggaagactggattgggtaagcctggacggaatctgtttgttgcaggttttagttatgccaccactgagcgagatttggaaaagaaattctctaagtatgggcgtgtgacaagtgcacgtgttgttcgggataaaagatctggggattctcgaggctttggtttcttatctttggagaaggatgaggatgctgatgcagcgattcgtgcttgtgatgagactgagtggaacggtaggatcattcttgtggagaagtcaaaggcacctacatggtgaatcttacaccttggagatcagcacaccatgagccgacaacattgcttcagcttgcacagcttttattgcaccaaagatttcctattgactataacataaattatcattaaatatggcaaactcaccagctattgatggtatattaggagtaagagtcataatgcacttcctatggctaccttgctgacaattacaacgaataagatgttatgtcacaccttagcttgtttcaaaaaaaaaaaaaaaagggcggcaacaaac

SEQ ID NO: 84097 - DNA, 233 bp, Oryza sativa
  Clone ID: PAT_MRT4530_83367C.1
cacaccccccccaccccccctccccacacgcgtccgcctccttgcaccgaaccgcctcggcgcgagcgcgagggagagagctcctcttctcctccacggaggctgcgcggcgtcgtaccgctccaccgggccgacggctggatctgatctaggagcggacgcttcttactatttcggaagccctttttatcaggcgtgtacggtcgcatgccaaagaaaagtaacactaccaa

SEQ ID NO: 84098 - DNA, 675 bp, Oryza sativa
  Clone ID: PAT_MRT4530_83368C.1
atggaggaggttcagcacccactgcatgatcaccagcaatggatgggtttgatgcaacctcagtctcagcacaaccagcaacatcaatcacagcggcatattatggcagcgttccagtctcagtcgaatcaactgcagcaagaattggggatggaacagaagccttcagtgcaacaaagctttcaaacttcagccgggatgttcttgcaacaaaataacattgatgaacaaatgcaatatactcaggcacagtgcggccttcaagaagttccattcagtacaactatgcacattactactcaaactgatcatccaggtcaatgttatttgcaagatgagatatatgacatggtgaggaacttgaaggaccagcactttacagaactctatcatctgtacaataagatatctaggaagcaagaatatgtggatagccaaatgccatctcaaatgcctatagaacagtatggaaagatgaagaaatttaaagaaatgttggagcgcatactgcggttcctgcaaatttacaagggcgacattctgcctgctctcgcagaaaaaatccctaaatacaagaggcagattatcacactagtggagaaaccatctttcgtcggtcgggctattttcacaatagtcccggttgcaataaaaaccgggactaaagatctttag

SEQ ID NO: 84099 - DNA, 417 bp, Oryza sativa
  Clone ID: PAT_MRT4530_83369C.1
tgaagcgaacccaggtcgtggtggccgcggcagcgttcctccggcggggcggcgactggatctgggggcgggtccggcggcgcccggatctgggccggcgccgtccctgccggctcggggagggcgggggcggcggcggcggcagggggggaggaggggagagcgggtcccgcggggggtggggagaaggagggggggtggaaggaaaccctagtcgcccatggcaagggctgggacggtctgggtggcaggagcaggagaaggaagccgggaggcccgcaaaatcgagagaagcggcccgcgcaagggcaagcgacgtggctgagggcgaggtggaaggcgatgggcttcggaggccatcgacgaggagatgctgggggtggtgaagtatgtggttattggaagggatgtgaggag

SEQ ID NO: 84100 - DNA, 848 bp, Oryza sativa
  Clone ID: PAT_MRT4530_8336C.1
cccgggcggcggcaaggcggcccggggcccccgctggcgtcgcccccgggaagctctcctgctcctcggcgcgcgctctctgtctccgtcacgccaaccgcgtgctggccggcgtcagccaggaggaggagacgtgtggcttcccctggcaaggccgccgccgccgcccccgagccggccggggaggagaaaaagcccgccaccggcggcgccgcggcggcggcgggagacggccagggcggctgcgccggcgccgaagaagatcctcaagaacgaaacctgtctactccgtgaagaagggccagattgtgcgcgtcgacaaggagaagtacttgaacagcatcaactatctgtcagttggacacccgcctttcttcaaggggctagactacatatacgaggaccgtggcgaggttttggacatcagaatctttgaaacaggggagtatgccctgatcgcttgggttggaatcccaactccaccggcatggctgccaacttacatgctcatcaagtcggataaactcgactacgagagaatatgatatgcacaggatcgaaggttgcgttcaagctagctcagcaatcgggtgggagatcggtccttggcctgccagactagcgttttttcagttgttttcttccctgcattgcagattcttcccctatttcggttcttccgacgattaatctgcagatgttttcagtcggttcgtgatatatgacaatgtgttgtatatagatgtcaatatgaggcgatttgctgttgcctgttgctccgcatctaaattaattatactgaactgaaaaatttaacaaaagttaagtgatgatattcagagctattc

SEQ ID NO: 84101 - DNA, 514 bp, Oryza sativa
  Clone ID: PAT_MRT4530_83370C.1
cccagacgcactcctgtcaccatgtggggaacatcaacgctcacagctcgtgtatattactccaagcccgtgccccgggttcaagtgtcaacaacaagggaaagaccaagtgttcaacgcgagctttcgccgcggacactgcttattataccccaacacctatgcagttgtaaagaagccacaaagagaaggatgtgcttacatgcattcaagaccaatcctaactctatggtaacccacattgcaggaaagagttccatcttccgtggctctcccaaaatgatgttctagcaaatgcatatcgcatctcaagagaagagtcagaggtcaagcataacacaggagatgattcggccatcacccaacccaatacaagagctaccaagacgtttataaccgccagaatcctttagtcggcttccggataaagaatactaaataataatcaacatggtttctgctaggcgccatctttcgactaaggaggagacccctctgactaaaaaaaaaaaaa

SEQ ID NO: 84102 - DNA, 207 bp, Oryza sativa
  Clone ID: PAT_MRT4530_83371C.1
atgccttgttgctggtggctcgcgtccaaggatgtgagccgcggtgtggacgtggaccatgaacagatgtcgacggcgaaggaactagatctcgaggcgatgcggcgtcgtcgtcttctccgcccggcgccgttcaccaccgcccgtgccggcgcccgtgtgttaacgaccaaatttggtaatatctacatcggaaaagaggattag

SEQ ID NO: 84103 - DNA, 2488 bp, Oryza sativa
  Clone ID: PAT_MRT4530_83372C.1
atggcacggcagaggccgcccaggacaggagtctggactcaggaggaggagcgattcccaactccattgctgcgctcccttagatccagcgcctgccactgtccaagcctacgcgggatgccgccgcagccgcagccgaggacagcgacgtcggcgaacgcccggggggggggggggggggaggtgaccccaaacctgacgatggacgccgagggcacgcggctgctcaacctcaccgtgctgcagcgcctcgaccccgccgtcgaggacatcctcatcaccgccgcccagatcaccctctaaaacatcgacctcaaccaatgaggatctgattgcttcgggggtggttttgtctagtaggaatactcagccgaggttccagttcatcgtcatgaacaggcgtaaccgacgagctcgaccgcgccccgctgctcgtcccgcaccacgccagggagaacacggtggtcgctggctacgacgtccccgccggcacgcgcgtgctggtgaacttgtgggccatcgcacgcgacccggcgtcgtggctcgaccgccccgacgcgttcctgccggagcgcttcctccccggcgccggcagctgcgacgacgtagtggacgtgcacgggcagcacttcgagctgctgccgttcgagtcagggcggcagatttatccggcgaccaacctggcgaagaagatggtggcgctgggcgtggcgagcttgctgcaggggttcgcgtggcggcggaggacgtgagcatggaggagctggtcgggctgtccacacgccggaagttagtcaactacattctgagtgcgcaacatgggaagagaattgcagtggtattgaatgagttcagagaggaaattggacttgaaagagcaatgatcaataaggggcaaggtggcgcgcttgttgaagagtgggtagagctggcaaatggatatgtttgttgcacggtgaaacacagcctggttcaagcacttgagcagcttgtgcagacaaaggaaagttcttctggaaatactaaaaatttgattcaaaactttgatgcacttacctgtgttattgatgcaaaagccttcaggctgcaaattgatgagcacaaaaagtcatcatcattccctgaagcatttcatcaaattgcattttcggatgttgtgatattgaataaagttgacttagtagaagacaatcttgaggatttggaaaggcagattcttgaagtcaacgctcttgttacagtggtgcagtctgtacgctgtcaggttgacttaaataaagtatttgatcagcaagcatatggtgccaaagccataaacttcataacaaaagctctactcgttcagcacgaaaaattagtgttgaattcatcgcagctgcaagaacttctggagtacagtaaatcagtaccacctaatccagtatttctaccttgtgcatttgtgagcaaggatccagtttccctggctaagaccaaatttgtgttcgcatctactttcgtcacttccaccctcggctactccgtcgccatcgcctacagcctcagcgggcgtgcagcgaagatgtcgctgatcaggccaaggcctgaccacgtcgccggcaccccaaccaacttccacggtcccgaccgctgggagaccggagatgaccccgactacgcatccacctggcttcagttcacccccgtcatcttctttcacatcgcgatcattggccatctctgcctcaagcgtccccgtgatgtgtttcaacttaccaagggctcaccgaagcaaaaggaccttttgcaccgcaagaagaagcaacgcgaaggcaatgaaggtggagataaagaaaacaaagatgcagaggcaaataaagaggaagacgatgaagaggaaggcgaagaagaggaagagaaggcgaaggtgaagaagagcaagacgaagctagtccatacaccaaatcccccatcacctctccgtccacctccacacctatcttcaccatttcagcgaacaccatctgcgcgccccacattctctcttccttgcacagccatgacaccactgcccgggcccctcaaccgcattccgtcgaacaccttcatggcgtccgcgacaaggttattcttgaacaacgtcaccacgatctccttgtatgccgtggcggccggctcgagcccgcgcctctccatcccgttccataccctgcaggcctgcaagcgtcagagaacatctccacgcggcagtatcctacgaccagcagctcgcagcacctcccggtccgcgacacgccgtacgcccgtaccggtgctcggcctgcttgatcaccttctcggcgacatcgggcatcttgcagacggagcagacgacgtcggtgatgaagggcccaagtcagctcatgatgcatcacatatcaacagcagagcacgtgaggactatcgaacagaacagaacaggcaacggcggcggctggcctcaaggcagctggacgaacggcggccgtga

SEQ ID NO: 84104 - DNA, 287 bp, Oryza sativa
  Clone ID: PAT_MRT4530_83373C.1
taccggtgctcggcctgcttgatcaccttctcggcgacatcgggcatcttgcagacggagcagacgacgtcggtgatgaaggtcagcgtgtgggggtgttaagaattggttgggctgtaaatgggctgggttgctatgtttccaatcagggcccaagtcagctcatgatgcatcacatatcaacagcagagcacgtgaggactatcgaacagaacagaacaggcaacggcggcggctggcctcaaggcagctggacgaacggcggccgtgacctagcagcactctaa

SEQ ID NO: 84105 - DNA, 2185 bp, Oryza sativa
  Clone ID: PAT_MRT4530_83374C.1
aaacccacagataacccctccgcctcctcccctttggcctttgctagcaactctagctagcattagcaaaccacctctcctctcgcacaactctcccccatacgcacatgcagccatatcttcagctagcttctctccgcctcgccaccaccatccctctcgccccaagattatacgacgcgaaccttctcgccgcctccggggcggccatggcttcttccatggcctatatagcgctcctgtgcgcggcattggcagccgtcgtcgcgctcctccgctgggcgtacaggtggagccaccccaggtcgaacggcaggctgccgccgggctcgctcggcctccccgtcatcggcgagacgctgcagttcttcgcgcccaacccgacctgcgacctctcccccttcgtcaaggagaggatcaagagatacgggagcatcttcaagacaagcgtggtggggcggccggtggtggtgtcggccgacccggagatgaactactacgtgttccagcaggaggggaagctgttcgagagctggtacccggacaccttcaccgagatcttcggccgcgacaacgtcggctccctgcacggcttcatgtacaagtacctcaagacgctcgtgctccggctctacggccaggagaacctcaagtccgtgctcctcgccgagacggacgccgcctgccgcggcagcctcgcctcctgggcctcccagcccagcgtcgagctcaaggaaggcatctccactatgatatttgatctcacagccaagaagctgatcggctacgacccgtccaagccgtcgcaggtgaacctgaggaagaacttcggcgcgttcatttgcgggttgatatccttcccactgaacatccctggcacggcctatcacgagtgcatggaggggaggaagaacgcgatgaaggtgctgaggggcatgatgaaggagaggatggccgaaccggagcggccatgcgaggacttcttcgaccacgtgatccaggagctgaggagggagaagccgctgctgacggagaccatcgcgctggacctcatgttcgtcctcctcttcgccagcttcgagaccaccgcgctggcgctcaccatcggcgtcaagctcctcaccgagaatcccaaagtcgtcgacgcactaagggaggagcacgaggcaatcatcaggaacaggaaggaccccaattccggcgtcacgtgggccgagtacaaatcgatgacgttcacgtctcaggtcataatggagattgtaagactcgcaaacatcgtgccgggaatttttcggaaggcgttgcaggatgttgagatcaaaggctacacaattccagcaggatggggtatcatggtgtgcccaccggcagtgcacttaaaccctgagatatatgaagatccgttggccttcaatccatggaggtggcagggaaaaccagagatcactggaggaacgaagcatttcatggccttcggtggtgggcttcggttctgcgttggaactgatctcagcaaggttttgatggcaacattcatacactctttagttacaaaatacagttggaggacagtgaaaggaggaaacatagtccgaacccccggtctcagctttccagatggttttcatatccagctcttccctaagaactgatcgtttttttacctcggcggtttggtttttgccactaaacacaaaaatgtgtgtgcaaagatgtcgttgggtttttatcctacgtcgataattggtgatagagagcacaacttaaaagatggagtggtcatcactcacttggtcaacctctcgggttgtgtagacccgtcgaccttaagttgtggcttcgactagacctgatagactggatccaagatgcgtttgggggctgtaacaagtggccagtctgaatgaaccgatgtatgatgggagagattgttgtgggggagcataacttaggctagttttaggttatttaaggacaacagaaaaggatggaaacacatacttagtctagtgatagaatagacacatctcagatagaagtaatgtcatgttaccgagtgctacctctagtccgtgaaaaggggtttttgtaccttggtagttcgtttttcatgtggttagtcaagtcaactatccatgtgttgtactccgtatataaatcaacctatacatgtctaatgaagcaa

SEQ ID NO: 84106 - DNA, 463 bp, Oryza sativa
  Clone ID: PAT_MRT4530_83375C.1
gtacaggacaacaaaaaaaaaggggaatatatcacctctgtaatttgtacattctctttcgtttctagcgcaatccattttaattatacacatttgatttcccagagacaggatatcatatctgtatctcgaaagcagatcctctgacttaactgcacatgcagttgagtcactgacatgtgagtcccactttgctacgacccacatgtcagtgacttaactgcacagctgttaagtcaggggatccctttccctgtatctccagggatcccgcgcgacgaacctccggtttgccggcaaaaaagcaacggcccccaattctcctgcaccggaattcaacagctgagctgactgaccaatgcgctgcgccgggccaaaaccaacgaccggaagacaccacctcatcttcgggtgcgcaccgagttgagcctcccctgctcctggttcagcggcgcgcgccccg

SEQ ID NO: 84107 - DNA, 156 bp, Oryza sativa
  Clone ID: PAT_MRT4530_83376C.1
atgcagtcgatgatgttagctttggcagagggtgaggtgtcggcctcaagcttcattggctccgaggcattagtcctcggcgtcaagatcactggggatctcctctccgcggcgcctgcgtcgacctttgacctttgccataacgagcgctcctga

SEQ ID NO: 84108 - DNA, 543 bp, Oryza sativa
  unsure (1)..(543): unsure at all n locations
  Clone ID: PAT_MRT4530_83377C.1
ggccgggcggggncatccccctcttaacgacccctcccctctatataccaccaccatgaacgggaagacccgccagagagaccccaggagatctcgtccatatcaacggacttgagcgatacaaccctgaggctgttggtgctctcgagacctacctccaggaccaatgcgagcagaagttcactgactgcaatgccaaccgaacactattgaagctgtaccagctcaaccctgatcgcatcaaggatgaagtcatcaccaatgtcctggtcaagaccatgacccagttcccctccgcgcagttctctctcgctctccacctcatcaacccctcctcagttgtcactggcgacctcggtggagctatcacaaagctccgatccctcaatggccaacttgagggtgctcagtactcccgcttctgggccgacctcgacgacgacatggttgccgatctgattgccgacatccccgattttgaggaggttgtccgtcaccgtatcgtcctcctcgtttaacagggtttacgtgagatccagaccg

SEQ ID NO: 84109 - DNA, 380 bp, Oryza sativa
  Clone ID: PAT_MRT4530_83378C.1
tttttttttttttttttttttttttttttttttttttttttttttttttttttttttttttatttttttttttttttttttttttttttttttttattttttttttttttattttttttattgcaatattttttttttatagaaaacaagagacgaccacaagcaattttactaccattcccaaagaataaagatttatatctgtaagagagatagataaaaacacgttatacatattggaataaatattgttgccagaaaaaaaaacattcaatttgaaattccaaataaattaatgaggcaaccaaaaaacgtgaaaaggggagttctttattgggtactcaatatattttattttttagatggaaacagcattatcc

SEQ ID NO: 84110 - DNA, 358 bp, Oryza sativa
  Clone ID: PAT_MRT4530_83379C.1
atggcggtgcttcaacgacggcccgcggcggatggaggccgggatttcctggggaagaagatggagtggggtggcgcgctgtcggagtcggcaaaggcggtggagagaggtggtcgccagcgaggggcggcgatggggatcggcgcggggagagcgagggagggcgtggcgggcttgggaaaaatgggggaaacggataaggagagcacggggaggccggggagtggcgaatttggggcggcaacggccggcgacgcggagctcaacgtgggcggagtggggctcgatttgcgcgagggggagtcgatcgggccgagaagggagttgtcggcccgagagggaggagggaaggagagag

SEQ ID NO: 84111 - DNA, 2139 bp, Oryza sativa
  Clone ID: PAT_MRT4530_8337C.1
atggcgacggcggcgggcacggcggtgctggtgtacctcgtgctgtcgggccgcctgctgcggcgacgccgccggcgacgaggaccagacgatcaatcccgcggtgtccgcggcggtggaggcgcggaggaggcggaggaaggaggaggccggccgggcgaggaggggcggagcgcgggcgcggcgttggccggagcgcgcgcccgccgggtggggggaggccgcggcggcggccgcgcgcaccgtgcggtacacctacggcgagacgctcggcaagtggcccctcggcgagatcgccttcgggctcaagtactacatgcggcagcagttatttacagcgcgggtaatcttcagcatgagtatgctggaagcaattctcaactattggaagggcctgtggtaaaggaggagctaatctcactattaggataccttaagctatgcatgtatttctcaaagaagccatacaaagtgttcatggagttcggtggatatgacgaaagcgatgttcttataaagaaatctaaggcgaggcttatgaagccttctttcacagttgtccgcgatagaagtgcgaaatgcttcctcctttttattcggggggcgatcagcgttaaggatcggttgacggcggcaaccggagcagaggttccatttcatcatgttgtgacacaagatggtcatgtctccaaattggtgctgggacatgctcattgtggaatggtagtggcagctcgctggattgcaaatcaggccattccttgcctcaatgaagcggttgcgcaattcccagattatggagtgaagatcattgggcattcaatgggtgctggcatcgctgcaatattagcatacattctgcgtgagaatgagaagttatcatcatccacatgtcttgcatttggaccagctgcttgcatgacatgggacttggctgagtcgggtaaagacttcatcacaaccattgtcaacagaaatgacctagttccatcttttggcaaagtttctgctgccaagctccgtacagaggtcatggcatcatcctgggtacatgaccttcgtgagcaaattcagcagaccagattcttgggctttgtcaatcgctctgtgagcttcatccgatcgcacgtgccattcgtctctgatccaagatccaaggttgtagatgttgacatgctggtgcccaacagctctgaggctgatcaggtgaagccttcgtcaaattcagatgctgtggtgaagaaacgccatgcaatagcttgctggtcatgtgttgctgcacataagcattccattgactctgcaaaacatggaactcatgacatcacaaatcaaactgatgtcaatgtcaaagctgagaaaactgacatcgaaacggcacaactagtctcaatttccatggaagaacttgaccttcaagaatcagataatgacgatgataccgacagaggggagaatgagccagctctcaatgaaacagacgaagatcaggccgtggagcttctagaaaccttgaccgacaacccacacgagccgtcatcgtcgagccaaagtcaagatcccccccagctctaccctccaggaagaataatgcacatggttggattgccatcatcatcagagccaaacagtacaagtgaacaaggtgaggaggtcgttgccttgtatgagacacctcgacatctttacagcaagattcgcttggcgagatccatgataagggagcattacatgcccaagtacatcaggacaatggagctgttgatcgacaagctcgtcgccgaggaggaggacggcatcgatgacgaccacagattgggatcattgtagcattggctggtgtacagaataattgttgttgttattgttgtacagattatggaaaagaaaaaaggcagcatggttttcagattgctagtagctgtaccatagttctgatgattgttttcatggtttgtggttagcatccaggaggctgtaaactcctgatagattgtgttatgatgattcgctgtcatttccttttgacagcggccatcacaggaagggctaaagagctgaacctcgtgatggtttctgtaattcagaagcaatttgtttgtttttagctgtgaatattaatctccaaggagataggct

SEQ ID NO: 84112 - DNA, 1989 bp, Oryza sativa
  Clone ID: PAT_MRT4530_83380C.1
atcaatgatgttagaattgtgttgccatttgccatgtggattattaagaggattgatattagtatcccctttgtatatttgtgcaaaagttgtgttcctttcgtggtccagctccctcagcaggataattcatttgattgtggcttgttcttactccattacgtggaactctttttgatggatactccgagaagcttcaatcctttgaagattgactcgttcgctaactatcttagtgatgattggtttccacctgctgaagcttctctcaagcgttcattgattcgaaaattaatccataagctgttgaaagagccttctcaagattttcccaaactagtctgctgtagtgagcagctggataaaacacatgggagtgagaacgctgagctagaacaaatgagtgagaatgctgagcgagaacaagctaaagagctcccagctcagatgtgcactgatggtgaacctgattcagttggcaccattcttgaaacacagcaaccatccatatcaacatgtttcaattattctgatgaaaacggcccacctgtttctgtacacaacctacataagttggaggtatcgtctgcaaacaaggatgccattgtctgcttgtcaaatcatgatgagaaaaatgagtcacctcctgcagattcttacaatcatcttgatttgagatcatgcgactcagaagaggctgagacagccaagggatcagctggtgttgtgaaagatccgaatagtcataaggagcctttgctggattctctggataataaccaggatatttccatccaagctggagctgagatgcatgacagtatggactccaagttatgttcgatctccaataatgctgacttaatggctagcgaggaacgttcgttagacaagaacaccaatgaaaatgaggagcacaatcgaacctcagaagatatcgtagaatctgtcatgatgcttggcggcagcaaaagtgacactgaacttgatgcagaaccagaaaggactgcaggtgaagctgaggttcggaattgtgatcattctaaggacatagattatattgcattaggtgatatcaacaaagatgctgctaagcaatctttaaataggaatattgttgaagctgaggacattaaatgtgaaggtactcttgtggatcatacagtggtagaagatgcaactccatataatgtgaatgaaactagtgcaagtgccgagggggtcaatgataacgagcataatgtttcatctgagttgaaagaaggaaataacggcaatggtataaccacttcagtttcctgtgaaatggaagatagaagcattgacaatttaatggtaggtgatagcagaaacggaacagatgaaactcgtgcagatggccaagaagctcacgataactctgcaacagctgagacagttccttgcgaagacaatgcaacaaccagcataactgatgctgagatgccacacgaagatagcacatgtagcgtgaagggtgaagcaatttcggataacacagcatctgatgccaaaagacctctgcctgatagcacctacatagaagatatacctgacgacaagtgcttgcagaaagatgatggcgggggtgatgaagcaaaaacagagcggcactacaagcgacggaagtttctggtctctgaagcaacatcttgagattagattggacctgtgtaggtgctagttttcgctttgtgttatatgtattcatttttattgcctttacgcaatatccttgtcttctataggtgagtccatgaaatttgtaagttatgaatagacatagacctcagagctatatgaaactctgatgcctagctgcctgcatgaccaacttttgttaaaggtcttaacttagatttggaactgaaaattgttgtatatgggcgaactttgtcatgtgctgctaaaatttccgataccggtaatcatcataatttataggggctggcgtgttagtgagctgggctc

SEQ ID NO: 84113 - DNA, 168 bp, Oryza sativa
  Clone ID: PAT_MRT4530_83381C.1
atgtccagcttcgggggagggtcgtcatcggtacccaacgagcttcggacttcacaaattgatgatgcgccccatgtgacacagcccacacaacaagaggttggcgaaggaaacgacaatgacccgcgtagatctaaccgtgagctccatgagccaaaccgtctgtga

SEQ ID NO: 84114 - DNA, 510 bp, Oryza sativa
  Clone ID: PAT_MRT4530_83382C.1
aaaaaaaaaaaggtggtttttttcattgaactaacaccattatgaaaagctggataatataatgcattactagttccaaccaaacacatagagatacttcacaccacaataaagccatggaacttcatgaacgagcagaaactgtattgcttaataagggagggagcgagaacgccaacagcacctcatatttatgagggcaccaaacatggcctctttttatttaatgctcgaatacgtggaaagccaaaggttttgtctggcaactttagtgaatgctggaccttgccaccttttataacctcagggatacggtacaaaaacggggcctaaacaccttcttttctgatcaagctgatgattaaggtctccctgatggaggagggaccctaaaaaacccacgcgtatatactacactgtggggcttggtgaaaacgtggggagggacgatgcccactaaaaccccgtattgagggggttacgaatctctgccagaacttttttttctta

SEQ ID NO: 84115 - DNA, 2317 bp, Oryza sativa
  Clone ID: PAT_MRT4530_83383C.1
atggggcacagcgacggcgaccacggtagcgacctctccgccgacgattccccgtggagcgaggggagctggtccgacgacgatgacgagggatcgctatccttcgaggacagcggcgaaggctccgacgccgagtccgacgaaccggatgccccggcggtggaggagagcgactcttctgaggacgaggtggcgccacggaatacgataggagatgtgccgttggaatggtacaagaacgaggagcacatcggctatgacatcactggtagtaagatcaagaagcgggatagggagggccgaattgaggcctacctcaggaatgctgatgatgctaagaattggagaaagatctatgacgagtataatgatgaagaggtgcagattaccaaggaagaggctaagataattagtagattgctgaagggaaagactccacacacaaatgtggatccatatccacattatgttgattggtcttaatatgatggtaaaggccatccactttctagtgctccggagccaaagaggcgatttgtaccctcgaggtgggaacagaagaaggttgttaaacttgttagagccattcgtaaaggatggataaagtttgataagccaaaggaggaacctaacttttatctcttgtggggagatgaaactgatacagcagacaataagcggcaaggcctgagctacattcctgcacccaaaccaaatttgccaggtcatgaagagtcatataatccttctgttgaatacattccaacacaagaggagatagattcatatcagcttatgtatgaggaggacaggccaaagtttattccacgaaaatttgattgtcttagaagtgtacctgcatatgagaaggcacttagggaaggctttgatcggtgtctagatctttatctctgccctagaacacgcaagaagcgtataaacattgatcctgagtcactcaagccaaagttacccagtaaaaaggatttgaggccatacccaagaacatgattatttgtaccctattgttatattagtttagtgtagtaacagtgagttgaagcaactgggcaatggatagcatctggttcatctgatggaacaattcgtgtttgggaggttgaaactggtcgctgcattaaggtttggaatgttggtggtgttgttcaccgtattgcctggaatccttcacctgatagacacattcttgctgctgttgtagaccatgatctgctgcttcttaatgctgaggttggggatgaagacgctcaaatgaagacaaaagggctcctccaaatcgaggaactggctcaggaagaggataatggtgataagaaaccagctgtcaagtgggtcaagcatgaaaaatttgatggaatcatgttgattcatcataagctctctaagaagcattcgcatcatcctttccgtaaattgccaggccttcctattgcagcagtgtttcatccaagtcaaaagatgttctttgtggccactaagaaatttgttcaggtttatgatctccagaaggcacagttagtcaagaagttggagtcaggtgttcgtgagatttcctccatctcgatacatcctggtggtgataatgttatcgtgggcagcaaagatggtaaattgtgttggttcgatactgatctatccacgcgaccatacaagacattaaagaaccactcgaaggatatcactaatgttacttttcaccggaaatatcctctttttgcctcatcctcagaggattgtacggcctatgtattccatggaatggtctattcagatcttaaccaaaacccacttattgtaccattggaaattcttcgtggtcattcaagttcagatggaagaggagttctggattgcaaattccacccaagacagccttggttgttcactgctggtgctgactctgtcgttaggctttattgcgactaaaggtgctttcgaaaaaaaaaacaatagatggttttacaaggcaatgcaatatgtctggtctttctacgggctcgtatacgatgatggatggtgtatcatgccaaacacttaactggagccagggcacgtgttgagccatctgtgctgcctaaattttggttcaaattatttgtaccctattgttattttagttctgtagtaacagtgagacatgcagagtgttccagaatcgtggcaaaggtaggtgtgtactaggataaacagataaggaacaccgagctaatctatgctattccaaaagaggttttgtgctgtcacaagcttttgtggtctctgaagctgaactgaactaaaaaagtagtgatattgg

SEQ ID NO: 84116 - DNA, 240 bp, Oryza sativa
  Clone ID: PAT_MRT4530_83384C.1
atggcaaggacattcccaactattgtaaaacgtgcaatcatgctgcctataggtcgggtgacgaggcatgcagcaatatgtttgggtaaattccagcgtattccctgtgcaatattgcaaccccactattatcttgctcttatacgtggtcgtccctacgtactctgcctcgggaaggggggctcctactccaagtcacttgcagtggcagcaggagtcctccagggttccaggctgtga

SEQ ID NO: 84117 - DNA, 447 bp, Oryza sativa
  Clone ID: PAT_MRT4530_83385C.1
atggaggaacgagaagggtggtacgatggaggaacgaggtatgttgagcaaaagctagtggagagtggagactcacccggatctacattggtggagacagggcgagcagcgcagttgttccttcgctgctcgccgccgccgtcgaacatgggaggttggaccgttggagaaatagaagggcgctggcaagcggcgcgccgcgcgccgctgccgcagccgcgtttctccctccatcacgcagctaggttggagtggaccgttggagaaatagaggggcgccggccggccagcgagcggcggcgcggcgcgccacaaccgcttttctccacagatggcgccacggctgatgaagccatcgcgcagccgtcgtcgttgcatcgagcttgtggtattggagacttggactacaggagacggcggcggtggctgggggatagggaccactga

SEQ ID NO: 84118 - DNA, 613 bp, Oryza sativa
  Clone ID: PAT_MRT4530_83386C.1
aaattatccctgccaagtggcactgtctccttttaaagctcatcccgcaaattgtttgggttttaaacttgatcgagtgaattaaagaaagcactgtatgcctctttgtcttcaacaagtctctgcaagtcatcaacacttttgtcctttaagcgagcaatgatccctgcagcctcagctggagatggctgaccatgcaatgattggggattatcagaagctctttgatgtggactaccactggacgagctgggcagggatggatgtgaagatgaaccaaggacagacggagggtaccatggttgtgtagggttgtcctggaaatttgtatcaggttgctgctgctgcgagccgaaaagaggaaatctccagctcattgtactggagcaatctagcttcgaatggggggaactggaccggggaggacaggaatcggggctgagacatgggtcaaccggttccctcggcgtacgtggggatggaacgagaataggagaggagtcccgccgcgctgtgcagcgctgtcgccggtggcctcaacccgcggtgtgccgccgccgccggacgtccgcgtgcgtgggggaggaaacgcgtgggggctcgaccttgtgtt

SEQ ID NO: 84119 - DNA, 352 bp, Oryza sativa
  Clone ID: PAT_MRT4530_83387C.1
ggcacttaatgctagtgaggacatttactgtcgtgtaggaatgatctgaaaatgactcggctttggggctttcactcttaggggaacttatctttaggaagaaatatagaatcgatgagagtctatggacactatcattagcactatttgtgattgcatacgaagaccgctaaatgtggcctgtataggaacggaacaaaatatatagctctaggtgcttactgtcccaagcctgttgactgctctgctctaaaatgaataggggtatgtgaacttattctctactcaaggaattactgtcttttgcatagtgcgttatacattattcatgagtgacttatttctcttgttg

SEQ ID NO: 84120 - DNA, 330 bp, Oryza sativa
  Clone ID: PAT_MRT4530_83388C.1
atgtgggcggcgacgcaagtggcagcggcggacgcggctggtggcgagcggcggagggcgacagcgccccggggcggtgggcggtggtgcacgggggcggacggggcggaagcgcgaggtgaggcggcgtcgcccgagacggcggcccgtggctcgcggtctgcccgtggcccgtggctcgtgtcggcggtcgagtacacgcagagccccgaggaggaggacgtggaggagaccgacgacgacgaggaggaggcggcggagctagagcccacgctcgccgtgggcaccgccgccagtgtcaagaagaggattaaaaccaccgcggattga

SEQ ID NO: 84121 - DNA, 474 bp, Oryza sativa
  Clone ID: PAT_MRT4530_83389C.1
aagcaaaaaggatgctgaagcacggttgggcgaatggcataacagcccatcacggcccggcgaacagaggagatttgaaaccaagactcagaaaaccacagcacgggtgctcagaggtaattggcgtatcttgaacaaatctgactgataaaggaagctatcaggagctatagctcaggacatacgttgggcattctgcttgagcagcagattttccctggtcttgatgttagcctgcgactcggatcccatgacggcgactgcacagttgatggtaacctcatcggatttgtggtttaacatcgacttgatagccttcaggatatggatgaactcaagcttgtcctctttgttgacattggccaatcaaaagacagatgctgttttattgtgaacaatcgagccaagactggcttttaattacacaatgcacataagggacctccatcttaatgcacagggcgtggaagccac

SEQ ID NO: 84122 - DNA, 267 bp, Oryza sativa
  Clone ID: PAT_MRT4530_8338C.1
atgggcttggctcttgccctgctgctgctgctgattttcaccttcccctcccctctcctcctcctcatccaccatctgctgctgctgctgctgataaagaagacaccgctgctgctcggcctcaacgacggcgacgagggcggtagcagcaggcagctcctgcggccatggcggctcttcttcttcttctcctctccctcgtgtgagtcgtgtcctcgtgtttgcctggttgtcacttgtatggtctccgcaactgttgcttcttgg

SEQ ID NO: 84123 - DNA, 339 bp, Oryza sativa
  Clone ID: PAT_MRT4530_83390C.1
aaaaaaaaagaaaacgccgtccttgatatagagccataaggcctgaggacttaaggcccggcccacggcacggctttttggcccggcccaagcacggctcggccgatcttgggtcgggcccgttccggcccggcctgaccgctgggctgtgcctgggcctctccaccggcacgctgggttggcccggctcgatggtccggtaggccaggcccggcacacaaagtatagagatcccgtaagtacaaccggacccggtgggtaggtcggcccgtgccggcccaacatgctagggcccaggcaggtcggggcataggccgtacggtgctgggcagtccacat

SEQ ID NO: 84124 - DNA, 334 bp, Oryza sativa
  Clone ID: PAT_MRT4530_83391C.1
agggaaaagggttaattaacaaaggggtcccgcagaaaataacaataaaaagataggatggaaataaagccggtggtccaatttaccatacccagcattttggttaccggaataccaaaaaactatctaccggtggacagggatttaattttttaaaaaaggcccagggttcagaattatgtgggaaaaaaggtttttggaacccgaaagattgggcccctttggatagccaaaccacacttaaaaccctaaaaatgcatacgggggggggccaatcggatttttagcccccaccagagggagatcaatacttggagtccttgaccggaaggct

SEQ ID NO: 84125 - DNA, 414 bp, Oryza sativa
  unsure (1)..(414): unsure at all n locations
  Clone ID: PAT_MRT4530_83392C.1
tggttggtttttttttttttttttgtttttttttagaaacaaaggaatcattaattatttttttcccatattgaatatggctcgcaggtacagcttaataataatcaattcttattgttcgtactgctaataataataattaagtaaccaattatgttaagcgtcgtgcgccagacaagctagtagcagcgcacgtacgccaagaagaacgcgacggcgtggatcgtacggcccggattgcccgagcgggtgggcggcgatgcgaccgcgtacgtacacgtgtacgcctattcagaggggactcacgagacgtccactggcttgcacaggaagagcagtgacgacggctgcggctgcctgtcggcgccggcgccggcaccggcgncgaggcgctcgtagcagtccatggagaag

SEQ ID NO: 84126 - DNA, 738 bp, Oryza sativa
  Clone ID: PAT_MRT4530_83393C.1
atggaccgagagacccggcccatcactagcttcacggctgggtggatcatgatccatctcggcccatctagccagcctctccgcaagcatgggcccaaagtagaaaaaggctggccggcctatttatcaattcgccctcatctccatgctcagctagctccggctgccttgtatatatatacgcgcgtgaaatacgtgacactcgagcgtggatggatgcagcctaatgctcgcatgtgcatctgcattctgcagcttccaccaacacatagtacgtacgaagccaagccggttacaatgggggaaatcgtggcttgtctctgttcaccacacatgcatgataaaaaggccaattgcaagggtgagctagcaatgcaatgcaatgaggctcagttaagaatatatcgatattctgagaagcagctgaagagtaatcaactgaaagttaccgcatataataaccatacgataaccacacggtattgtaaacgccggtcgttgtccggaggaaacaatatacaggaatggagggagtactacttcaccgaacaagctaagctcatcatttattctcatccacacggtacggaccccaaacgagaatccaaccgtgtgcatcgtacatatcccgatgctctgtgcgtgtgcgtgcgcgtacgaatccatccatccatcatcgcctttgcacgcgtcgcatcacacacgacacacccatctctactcactttcttcccgttc

SEQ ID NO: 84127 - DNA, 324 bp, Oryza sativa
  Clone ID: PAT_MRT4530_83394C.1
atggactacttcggcaacatggtgctctgggcgttcccgaggatgcgggtaagagacctcctctcctccagctacgccacggtggtcggcgtcatcagcgacgctgtggcgcgcgtcgacgagcgctggctagggttccggttccatgagctcgacttcggctgtgggccgccgtgcgcattcctgccacccgatgtgcccgtcgaggggatcttgatgatcttcgtgccgtcatgcgcggcgaagggtggcattgagatgttcgtggcgctcgacgacagccacgtcaaggccttcagccagatatgctactccatggactga

SEQ ID NO: 84128 - DNA, 402 bp, Oryza sativa
  Clone ID: PAT_MRT4530_83395C.1
atggactacttcggcaacatggtgctctgggcgttcccgaggatgcgggtaagagacctcctctcctccagctacgccacggtggtcggcgtcatcagcgacgctgtggcgcgcgtcgacgagcggtacatcctatcgttcatcaacttcggggaggtggccgccgcccgcacggtgctctgcccggaccttgaggtggacagctggctagggttccggttccatgagctcgacttcggctgtgggccgccgtgcgcattcctgccacccgatgtgcccgtcgaggggatcttgatgatcttcgtgccgtcatgcgcggcgaagggtggcattgagatgttcgtggcgctcgacgacagccacgtcaaggccttcagccagatatgctactccatggactga

SEQ ID NO: 84129 - DNA, 450 bp, Oryza sativa
  Clone ID: PAT_MRT4530_83396C.1
atgtgccttccctccagcttcttcgcgggacctcttttcccgcgtggcctcttctatccggccgacgctgtgtcggcggcggcagtgggcggcgtcggtgttggcggcggtgacggcggcggcgttgttggcgtcgacggcgcgcagcggcggctgtgcaggccgacgcggttggcagcggtggagtcggcgcgcggcggtggcggcggcagcggtggattcggcgcgaggtggcggcggtggagtccgcgcgcagcggtggattattccgcgcgaggtggcggcggtggagtcagcgacggcgatggcaaaagagagaatgcgagatcagaggcgcaagatttgcgccctcaccttgagggaggcgacgcgctgccggtggcgttggggagggtggctgagcgcggcgagcacgacgacgacgacggcggaggcggtggcggcgtctag

SEQ ID NO: 84130 - DNA, 124 bp, Oryza sativa
  Clone ID: PAT_MRT4530_83397C.1
atgggaagacatattcaggtcttcttcccaggagtatcactacgttcattggcatatgctaatgatcacccgtcgaggaggccgaccattttgcaaatagcccttgcagctcttggagaggatg

SEQ ID NO: 84131 - DNA, 312 bp, Oryza sativa
  Clone ID: PAT_MRT4530_83398C.1
atgctctggtggctgggaggcggcgacggcggcggccggtggtgttcccgggcggcgcacctagggagggcagtggccggcagagggggtgatggaggtcagtggttggaggcggttccagaggcggttggcggcttggccacggcgacggtggtggcgcaaggcgaaggacggttccggaggatggcaggcggcagcgcaagccgtgggcggcggctgcggcttgggcggcacgcgcgcccatggcgcacggtggttggtggcggcgcccacgggaaggagaaaggcgactgcctctcgtgctgggcctaa

SEQ ID NO: 84132 - DNA, 612 bp, Oryza sativa
  Clone ID: PAT_MRT4530_83399C.1
atgtccaatctctatagtcgactcaacgcccaggagctggttctcacctacgacctcatcgtggaggtcctgatatgcctcccgtccgtcactgatgtcggccgcgcatgcgcggtctgcgcctccttcctcggttccgctgcatcgtcaacgatcctgctttcctccgccgtgtgcgtgcgctccacccgccgacgctcctcggcttctacgactacgcctcacccgtcggggcgtcgggttccccctgccaaggagccccacccatccgccgccgccgccatctcccgtggcatgttctgtgccgccaacttcagcttctcattcgtgatatccttgacggtcgcttcctcctcggcatcatccaccgcattccccttctcaaacggcggagggcttagaagcctgtgcatggctggaaccggagggagtggagactgtgccgcgtttggggatagccgctccggagccacgaagccactccggagcttcatcgtcggcgagcgccgtcccaagagctgcacaacctgtgagacgtaccgcggctaccgccccgatctaaactcatacgagaacacaccaacattcgagaacccttatcggaattgctag

SEQ ID NO: 84133 - DNA, 1152 bp, Oryza sativa
  Clone ID: PAT_MRT4530_8339C.1
ccggccgggaccatacaagtgacaaccaggcaaacacgaggacacgactcacacgagggagaggagaagaagaagaagagccgccatggccgcaggagctgcctgctgctaccgccctgccgcggcggggagggcaagcctcgacgccttcgccacctcgtcgccgtcgttgaggccgagcagcagcggtgtcttctttatcagcagcagcagcagcagatggtggatgaggaggaggagaggggaggggaaggtgaaaatcagcagcagcagcagggcaagagccaagcccatgtcgagacctgcgctcttctcccctgtggccatggagtggcaggagtgcagcaccgagattgaagtcgatgttccctgttcagtggcttatcagtgttactcagaacgtgagaccattcctcaatggatgccatttatctcatctgtcaagatccttgaagataaaccagatcaatcacgttggactttgaagtatgagatacttggtcgagatgtagaattttcgtggctagctcgaaacatgacacctactaaaaaatctgaaggtcttcataggggtgcgttcgtttcttttgctcatcctgcagagtctgacggtggcttatgaagttcctgaaattttggcacctgttgcgtcagcactgaagccatttctggaagggctgcttatgcaaggtttagaacgtttcgcgacgtttgcgaaggaacgatatagcaagatccctcaaccttgacgggaatcaatcatttgcattcgaatactcatttctaaggattttagtctcattcaagagaagcccagcgaaggtcacaatcgatgtaaagaccagtagaccacctaatgccaccctagatgcagtggaaaattcatccaaagggaattacaagagttgactgctatgagaaataaaactgaaataaaagaatcatattgttgaccattctttttggtcattataatcaatgaaatgtaccagcattgaacatgaaactttgatagtatggcaaagccaattcatcctttgtctgagacaaattgcgctgagtcctctttgcaatataaatgcatgtttgcaggacagttctcgcaaaaaaaaaaaaaaaaaaaaaaaaaaaaaaaaaaaaaaaaaaaaaaaa

SEQ ID NO: 84134 - DNA, 740 bp, Oryza sativa
  Clone ID: PAT_MRT4530_833C.1
ccgcatctgccgaaaagaagttcgacacccggaagcccgtgacggggcacataagaggtccacgggctgcggcagggcgttccccacgcaccaggggctaggtggccacgctgccggcccccagaacaggagcaaggcagcggcggcggcggcctccgagcagggcagcagcggagcgggggccgacgggtgccacggcggcgccgacagcagcaagcatcggtgcagagaatgcggcatggagtggaagacaggtttcgcgctcggcggccacatgaggaagcaccaaactaaggagacggtgaccgtgaacgagaaggagccgaatgtcgctgagcaagcacatctctcttggaccaccacctttgccggaccttactccggccgccgctgaggtaacttcgtcggaaccacttgatcagccaccactactgtcaatggtggtgggtgcagaagttgcagcaccggcgctgcttgcgctggccaacgaggcagcggcattgccgccacaggatgatcaggcagaggaagaggcggctgcagaagccgctgcaccggccgaggcagcggcattgcgaccggttgaggcaggggcagaggcggccgatgttggagcagcaccagaagagccgctgctggcgcctattgccggcatgggaaccgtgcgtattttcggttttttggttgagaagccggcacctggagacggcagtggaggagagggttcagcgcctgcatag

SEQ ID NO: 84135 - DNA, 1050 bp, Oryza sativa
  Clone ID: PAT_MRT4530_83400C.1
atggcgaccacgcccttcttcctatgggccacgaacgccacctcctcctcctcctcctcggccgccgccgccgccgtctctgaccacgacgtcggaggtctccgcgctgaggaggagacagcggcggcggaggcgacgcagctctcgccggagctcgcggcggccgtggcgaggccgaggctgcggcggcaggcttcttcctcctcaccggcgaagcagcagcagcagcaggtggggggaggagggagcaagagggcgccgcagcgtggcctcggcgtggcggagctcgagcgcctccgctgcggcggggacccgttccgcgacctcaacgccgccgtggccgccatgggggacgccgccgccgccatccaccgccaccaccaccacctgcctctccccgccctcgacgccgacgtcgccggcgggggcggccactacgcgccgctgctggtccgcccggcacttcctccccttcctccgccaccggcggctgctcccttctgccacctccactcgtcctcgtcggccgccgccggccacaacgtggcgccgccggagctgcaattcttgagggatcggtgcatgggtggcttcgccggcgccggccagctgctgccgctcgcgccagagcacccttcaagccaaagcaacaccatctggcgcccggcgtcttcttcttcctcctcctcctgcctcccagccacccaccgctgcgacctctgctccaagacaatggtgatggccttggcggagagaggaggagcacgaggcgccgccaccaccaccaccaacacgccggactactccatctacgatctcgccgccgccatggccaccgctcgcaaggagaaggggcatggggtgttcttgggtagggagaggaagaacgacgaggcggcggcggcggcggagaaggaggtgagggagatcgagttcttcccgacgagcaccacccacgccgacgagtcggagttcgccgcggcgccgttctcctcgtcggccggtggtggctgcggcgccgtgccattggacttgtccctgaggctgtag

SEQ ID NO: 84136 - DNA, 185 bp, Oryza sativa
  Clone ID: PAT_MRT4530_83401C.1
gacgtcgctgccgcgtcgtagctggatctctgagcgccgtcgcgatcataactagtctagatcgcgggcggagctcggagctacaagtgcgaccgcgggccgcccggaatgctgaccggagctgaggcgtaccacctttccgtataggatgccatagagcttgcgtatcatgggataactggtgg

SEQ ID NO: 84137 - DNA, 1050 bp, Oryza sativa
  Clone ID: PAT_MRT4530_83402C.1
tgttcttgtctcgtgtttttcttttttttttcggcttcgcacgcctcgctttcctcctctgctatttagtgtgtgtatggagcaatcgtgccgcgaacttttggtggcgggcgccatatgcatcctctttctctcccctgatcttatcgtcgccggccaggcccgcccctccagctgatcacgctggctccccggcctcgacggctgctttaatttctacaggaatttagagagataaagaaacaaatgtttcacaaaattttgaaggcaatcaccataatgatacatataaataccccagatcaaaacgtctgctgttatgatcacctctccagcaaatcaagctggctcccctacctcaacagctgtttgaattgttcctagaatctctgatcgcaattgcatcagcaatctacccaagtatctcataccttcgccctcgcgcccaccgccccaaaataaatcgtggggcgacgcctcaacaagaacagagccagccgttgacaacagcatgtcagtcagatgggaataagttgagaacttgcgctttgtagctctgtacatcacttcaattttgatggaatcccaatctggtcgtacctgatacacatgtatcaggcctatactgttccaaccatcctggtctccctctatcacttgagtgacaagggttacgaacaattcttgaaattctctttgccgagtgcgtcctattctagcagcttcttcaggactcttagccagctttatttcttggacaatctctcttgcttgaggatcatcaacaccaataaacttgtgtgcctggtaatagtgctccactgttggccatgtgaaatagtctccattttcatcgggcatgtgaattggatggggagaaaagttagagaaggcaccaaaggtatcccaagtcttgtagaaggatataatattagtttcatatggagatacttctggatcaactgaaggcatttcatccacagatggtattacaggtgagagatcaggaataggttggatgaatccactcatgagcatgtccctatcaat

SEQ ID NO: 84138 - DNA, 780 bp, Oryza sativa
  Clone ID: PAT_MRT4530_83403C.1
atgagggaggagcgaaggatactgagaggggaaagaaggagcggtgggggtcgggtggaggaggagcagttggagcaaggcaaccgcacagcagtgaccgtgggggaagcgataagatggcggccacgagtggacgaaaccatcaagctcgagtttgacaacactggcgtgattggcgaatggaatgatggggtggggcaagccgccgcctcactcctcattgtccgcgcgccctctacacaccacctgttgtgcaccgccttgcaaaagaagatttcatcgagccatgagcccatcaacacttttgctcgccacggatgggcacgcttatggctgtatgcctgtatggttcggggaacatccatccagaactgtgaccaatatcaaagtgccgatcggcaggtgggcttgcagagccagccgaacccccacgaggagacacacacggggctgcctgcgcaggcctgcactccatgcagcatgcacacgcgcgcacgtacgaacagccccccgcgcttctgcaaccaaccaacgcaggtgcacgatccaacacgatcacaggagaaacttgacgcgctactacgtgatgaagcgtgcctatttcccggtctccttgacctgcttctccgtagcagcagctactactcctaccatgcatgcatgcacccgcacccaatgcgtgcatgcgtgaactcacagtgtgcacctctctctccctcctacatgcacggctatgacatttactccgtgcaacaacttgcaattccatctccattagaa

SEQ ID NO: 84139 - DNA, 1533 bp, Oryza sativa
  Clone ID: PAT_MRT4530_83404C.1
atggccgagttccggcagcgcggccaggtccccgaggacgtcgagagctccatcggcaccgtcctctcctacatccactttgccatccccgacgcgccggtctcctcccacgcccgcctctccgcgctcccgcccgacgacgacgacgacggtgtcgaccgcctcagcctcctccccgacgcgctcctccgccggatcgtctcccgcctccccgtcaaggacgccgcgcgcaccgccgcgctctcctcccgctggcgcgacgcctggcgctccaccccgctcgtcctcgtcgacgccgacctcctccccgccggcgtgtccgacgccgacaccgacgccgcgcgcgaggaggcccgcgcagtcaccttcgccgtgtcccgcgtcatcgccgcgcaccccggcccgttccgccgcctccacctcacctccagcttcatggaccagtaccagggtctgctcgcgagctggctccaggtgctcgccgtcaagggtatccaggagctcatcctcgtcaaccgcccgttcccggccgacctcaccctccccgccaccttcttcggcatggccaccctcacccgcctctacctcggcctctggaagttccccgacacggccgcgctcccgcgcgccgcctgcttccccaacctccgcgacctcggcttctccctcatcggcatcaccaaccacgacatggacttcgtcctcgccaggagccccgttctggagacgctctgcctccaggccaacacgcttcagcgcgtccgcgtcgccagccgcagcctccggtgcctgatgatgatggggttcgaccaggatgtcaacgtggtcaacgcgccccgcctcgagcgcctcatcatgctctactcctgtggctcctccatgctggtaaagattggccgtgctccctcgctgcgtgcaattggataccttgatctggaaacccatgtgctggagatcggcgacactattatcaaggctggaacaagggctagtccaagcaccatggttccaagtgtgaagatccttggcataattgtgtgtttcggagtccgcaatgaagccaagatgctgcccagtttcctcagatgctttcctaatgttgagactctgcacgtcgaatcccggaaaactgatgagctcactggcaagctgaacctcaagttctggcaggatgcaggcgccatcgaatgcatccagtctcacattaccgtgatgatttttcgtcgtttccgagcaacgcggggtgagattaacttcctcaaatttgtccttgagagtgcgcggatgctgaagaagctgataattgtgtctcccaaaggaacatttgcatcgacagatgaggcaaatttcagactgaagcctctgttcgccacaaaatgggctagtaaatgttgttcactagtggtccttgagagtgatgctagtgcaggagaaagcaattggaactttgagagaggatgtgatttttcacttatggacccttttgcgatcatcatccgatcttctcggcttgacatctctggaagttgttag

SEQ ID NO: 84140 - DNA, 334 bp, Oryza sativa
  unsure (1)..(334): unsure at all n locations
  Clone ID: PAT_MRT4530_83405C.1
aattcacaacaccatatttcattgatcanggtcanaacctgcacagagatacacagtgccattacagatctcaccctctctccaatactcttacatccatccactccttccacaacgaataccttacatcttatacggtgaccacgtactttacattntactgggggggggtacgacacactacacactttttcttctatagacctcccatcttaaaaaaacactaacatagcttaccttgaaggcgatgcttcgccattgcagcacatctgcggctgctctcactttccttggactaaatttgtggcctaggcccaagcttttttatttactg

SEQ ID NO: 84141 - DNA, 198 bp, Oryza sativa
  unsure (1)..(198): unsure at all n locations
  Clone ID: PAT_MRT4530_83406C.1
cctgtactagttgcgagtctaccctattcgattcacccgctcttggactacgtcgcgacgccctngtcgtggcccgtgagttcaagacttttgatagagcttgatactgttttagatgtacatatgcagatttagacgccagatgtaatatatacttacctaaagaaagtttatgtcgaatccaaaaaaaaaaaaaaa

SEQ ID NO: 84142 - DNA, 495 bp, Oryza sativa
  Clone ID: PAT_MRT4530_83407C.1
ttcgagtgggatcgtgaggcccacttatcggtagcacccggtggcggcaactcgccggagaccgaaccgctcgccggagacccccccccccccctgggcgccgtgaagccacggcgccgccagagctcgcttctaggagtcactgggttctacaccactcagtccaatcaaaccaaggcgaggggagtgccgctccgcggtggaaactcagagatcgagggaggaggaagatggccggttggtcgtcgccgccgtcgcatatcacgcgccggcggtcacgtggacaggccatggcggcgccgcccattctgctgtttgctcggctgcctggtcactgaccacctgaaactgcacctgatggtcattcaggcagtagcttcttatgatctccatgctcttcaccagcgtagaaatcgccggcttgttgtcgtggaacatattcccaccaagaaggatggaaataacctgcatattaacagtgcatcttcaccatat

SEQ ID NO: 84143 - DNA, 1152 bp, Oryza sativa
  Clone ID: PAT_MRT4530_83408C.1
atggagatcgcgctggcgccacccgccgcggcctctccagatggtgaggcgctggcctcggacaatctcgcgcagataaaaacagcattaggtggggtttgcattgaaacaaatcatcaggatgataaaatcagaagattttctgttgacaagaatgggacaagatgctgcctagactctagcagtgagtctggaccatggtactccaagaagcttaataacaagaagggagtgactggaatccttagtcaatggcacaagcagacggaacagaaagctcatgaggttgttatctacaaacgttgtactgcttctggatctgcagttactctttttcttattatgatgagcttggtttgtacggtgagaggaagcaaccatggaactgattgcgacatcggcgagtactcaacgagcattgctcaagtttgtcagtatggtgctcctcccgcagtgtgttgcgaccttttacaatccgctgtccacacttgtggcaatgctagtgttttgtgtgaaattggcagatctgtgccaattacttctagaggtttcaatgttcatgatgttatggattggcaccgagagtgcacgggtcaaccagaatcatccagtgtagatgcatcgtccatttgttatgtatcaggtgaaaggcacaaagagggcacaaaagaagagggccatcaagtaaatattttgattgagaccggtaacaaggagtgcaacgcaaggaagtcaacttctactaatccgatgtttatcggtttaggaattgggtttggatcggccatgctctttgctttcgcgctggtggtgatttggctgttcgtgagaaggcgatcacaaggaggtcctctggtgccgcagattagcttgctcgcaatcgcgcctcacttctcccaagggcttcctgcgctgcccttccaagagcatcctgcgctgacgcttccctgcgggcctgtccctgtcccgacacctcaagaagttacaacagtgcagccagccaccagtgcatatggtcagccagcgccagtgcagccagccaccactgcatatggtcagccagtgcaaccagccaccaatccaatggcgtacttggcatcagtcgtttcctatgcgattgtagacagacttactagccgccgtcgtcgctag

SEQ ID NO: 84144 - DNA, 573 bp, Oryza sativa
  Clone ID: PAT_MRT4530_83409C.1
atggcggatgaaaagcaattcgaagcagggaaaacatcaagtggaacaaaagagaagaaattgaaaatatcaaatgtcctaaagatggcggatgaaaagcaattcgaagcagggaaaacatcaagtggcaaaaaatcacagggtctgaagataatgaagcaattagcaggaacagaagagaagattttgaaaatatcaaatgatctaaagaaggctgatgaaaagcaattacaagaaggttcgcggtggaccgggtgcacggcggcggttcacaagattggacggctgggattcatccatccaaaacggacggccaagatccatcggtccacgaccggaccacggcagacggcaacaatgacgtcggcgacgaggaaaagcggcggcgacgatcgggtcaacggcggcgacggtgctccggcggtcgacagcgacggcgaagaggcggacgaggacggcaacgagacggcgatcacgacggcggcctccccgagcagtgacgacgacccaagcgacggcggcgcacggctggagcggcggcggcgacgacggcgcgaggcagcacggcgctag

SEQ ID NO: 84145 - DNA, 337 bp, Oryza sativa
  Clone ID: PAT_MRT4530_8340C.1
ttcccttttcttgtctgtcatgtaagcgatatcttgtgagagggagtgcagtcgaggagaagattaccgcctgataaagctttccataattgattttaagaacaagcgagagaaggtggctgtggtggaatgcaggggccatgatgctgctcggttgcaaaacattgaccatttgcatggttgggaagatgacattgttggtttggttgaaaagaaacatgggaatcggaaattctcgatctctttcgaatgtgagacactgaaggctgataaagctgcagatgagcacattagcaagtatatgccaaatctaagtggaatggatgccatcggtaag

SEQ ID NO: 84146 - DNA, 2472 bp, Oryza sativa
  Clone ID: PAT_MRT4530_83410C.1
atgtcttcttccgccagcccatcgggtgcgccaacagctgaatacattgagcacctttctcatcaagtcgcaattccaagtctttcgcatcgaaaccactatttccttggcccaatcggcaatctcgaccccaccgatttcattagtggtgaaaccaaccggattcctttcaggctagctaaccccaacctaggtcattggaagaacacctttaagtcctggccatctttggaaaaactttcacctgacaggagttggtccacttggtatcagcgtgtatcggctagcaagaaagttcattgggacgagatcggaatcggccaagcactcatcttaaccatagccaattctgccaaagacgaacccttaatggctgccaccacttatttttggtcaaacaccatcaatggcttcctgttcaaccaagggccgatgactccaaccctaatccatatcaccatgatcaccggattagatgtgacttcatcggccaaccccatgagcatgaacactcggaaccagttcgatttcaagactaagagcataggtggttggtccggctatgtagcaacatacatgggtcaagggtttgtcaccccccgagagcatgtagcctttttgctcatgtggctggaaaaattccttttttgcagatccagttgcggctccacaaccaactggcaatttgtagccgaagccctggagtcaaagaaagaattccctttgggaaaaattcttctcggctacctgtaccagatgttaaacaatgcatcggctagaattgccgtcggctcggcagttggagcaggtggaccctggtggttattgcagacttggttaaacctgatggttatgaaggttgtcaatcagcctcctgtgacagaagctgagttccctctgccagagccgattgtgggtgacgacggagaagaacgcacccatcgcaggtgcacatcatatggggaatatgcatccacaccaaccgatgctggagcaaagctatcggctgaactgctcaaggactggttctgtagcttctatgaaggacctcctctgggcagcattgagaacattgagttagccggtttcagaagcaaaaacttcgacagatggtggggtgaatggaagctacatgtgtttcaccaatcggccacgatgtatatgacagatcttttccctgacgtcgtaccccagacaacagaatcttcccccccccctcatcaaagtaacagcggtaaagatatcgaatatgctgcaggcttgattccaaacggaggaattatctccccctgtcatcggacatcaactctcctccatggcctcactagagaaccagcctatgcaggccaaaaaaggaagaccagagcttcaaccataagcacctcaatcctggctccaaagaaaaagaccagagtcaagagagccaaaccagatgacaagccagccgatgatctgcctgacctggatccatctatcgaacaagccttagatgaagaagcaattggagatgaagtcgatcaagccgcagctgaagtaagcgatactgaaaggacaccatcgacttcacctaagcaaacccttccaactccatctgccccagtccacttctcaaggaaaaagaagactgcagtgaaaaagaaatcggctgcaacaacatctaaaccagcccctccaccttcacctcctccttctccctcggctcaacaatcatcaagtgaccagaccccttcagccgcaggaagtcatcatgtcgaggaagaagaacaaccagccgttcctgctatcccagtcttagccgatcttttctcttttgatatcagagactatcttgatgaaggagaagaagatactacaagcaaagcattgactcccttatctgatgatgtcaagaaaactctaaaaagtatcttggatcggctagaagcatcatcgctagacagcttagtggttgactgtggcccaatcagagctcggctgcacgaaattcaaatttcaattccagatgagctagccgatatccttactcctgctgtctaccttgagcaacaccagttcaaattggagaaagcgaagttaagactagccgaacggcgagaacgcaaagacattgaatccactatccaagccaaccgacaacttgtgcatgaagaaaaatccaagcttaatcaactatctgaaggtccaatcaaatctaacattgatcggcttgaagctcgcaagattgacctcctagcacaacttgaagaatgcaacgttgagctagatatggagcgcaagaaactagccgatctccccaagtccattgaagagcagaaagccaggcttaaatcggctattaagcatgtctctgaactgaccaagtccctaaaagttattcctggaaccgacgctcaagacgctcaggccatagaggaagtagagcaaattaggcagaacgctatatcggctattcagcagtatttatcacagtaa

SEQ ID NO: 84147 - DNA, 342 bp, Oryza sativa
  Clone ID: PAT_MRT4530_83411C.1
atgagacggctacgtccgttggaagtggccaaaaagcgatgctccggttttatatctatggctctatatatgcagacgcacgggatcagaaaacgcaacctcctctctctctctccgcacgactacgcgcgcaagcgcggggcattttcgctgccgccgcctccactcctccgccgccggccccgctcctcgccggccgtcaaccgcttcgccgccggcccccacttgagccgccaccggccctccactgctcgatttgttttcttgtccatggagggtggtggcttcgatttcttctcgaaagatccaaatccaagcatctggcttcgatttttttttgtt

SEQ ID NO: 84148 - DNA, 2148 bp, Oryza sativa
  Clone ID: PAT_MRT4530_83412C.1
ttactgtgataagtattgctggatagccgacatagctttttgcctaatttgctctacttcttctatggcttgagcatcttgagcgtcggttccaggaataacttttaaggacttggttagttcagcgacatgcttaatagccgatttcagtctggctttctgctcttcgattgacttggggagatcggctagtttcttgcgctccatatccagctcagcgttgcattcctcaagttgtgctaggaggtcgatcttgcgtgcttcaagccgatcaatattggacttgattggaccttcagataattgatcgagcttggatttttcttcatgcacaagttgtcggttggcctggatagtggactcaatgtctttgcgttcccgccgctcggctagtcttaacttggctttctccagcttgaattgatgttgttcaaggtaaacagctggagtaaggacatcggctaactcatccgggattaaagcttggatttcatgcaaccgagctctgattgggccacagtcaactaccaagctgtctagcgatgatgcttctagccgatctaagatactttttagagtcttcttgacatcattcggataaaggggccaatgctttgcttgtggtatcttcttctctgggatagcaggagcggctggttgttcttcttcctcaatgtggtgacttcccacggccgaaggggtctgatcactcgatgattgttgggccgaggaagaaggaggaggtgaaagtggtgaaactggtttagatgttgttgcagccggtctctttttcactgcggtcttctttttttcggctgcggcttgatcgacttcatctccgatggcttcttcgtctaaggcttgttcgatggatggatctaagtcaggcagatcatcggctggcttgtcatctggtttggctctcttgactctggtctttttctttggagccaggattgagatgcttgtggttgaagctctggtcttccttttttggcctgcatcggccggttctctagtgaggccatggaggagagttgatgtcttaggggcatggtagccgatgacagggggagctaatccacctccgtttggaatcaagcctgcagcgtattcgatgtctttaccgctgttactttgatgaggaggggaagattctgtcgtctggggtatgacgtcagggaaaagatctgtcatatacattgtggccaattggtgaaacagatgtagcttccattcaccccaccatctgtcgaagtttttgcttctgaaaccggctaactcaatgttctcaatactgcccagaggaggtcctggtagattgagtagccgatccatcattagagtggatgtgatttggcctcgacattgaatcttgtcggcaaagaataagccgattgggagttggcctaatccaagttgcctggctgagctcattggatgataaaattcataagacacctggatgtttcttccttgatggatgccgacggggtggatgcaagggctgattgcagctataaggatttctctggatttctggaatttctcgtgatttatgtcttcgaacctgaaatctgatgggagttcaaggtctgttgagtcttcatatgggaaccagatccgagcatctttcttgaaaccttcgtagaagctacagaaccagtccttgagcagctcagccgatagctttgctccagcgtcggtaggtgtggatgcatattccccgtatgatgtgcacctgcgatgtgtgcgttcttctccatcatcacctgctccaactgttgagccgacagcaattctagctgatgcattgtttagcatctggtacaggtagccgagaagaatttttcctagggggaattctttctttgattccagggcttcggctacaaattgccagttggttgtggggccacaactggatccacagaaaagaaatttttccagccacatgagcaaaaaggctacatgctctcggggggtgacagatccttgacccatgtatgctgctacatagccagaccaaccacctatgtttttggtcttgaaatcaaatttattccgggtgttcttgctcatggggttggccgatgaagtcacatctaatccggtgatcatggtgatatcgattagggttggagtcat

SEQ ID NO: 84149 - DNA, 2604 bp, Oryza sativa
  Clone ID: PAT_MRT4530_83413C.1
atgtcttcttccgccagcccatcgggtgcgccaatagccgagtatgctgagcacctttctcatcaagtcgcaattcccagtctttcacaccaaaaccattatttcctcggcccaatcggcaacctcgaccccaccgatttcattactggtgaaaccaaccggatccccttcaggctagataaccccaacctaggtcattggaagaacacctttaagtcctggccatctctagaaaaactttcacccgacaggagttggtccacttggtatcagcgtgtatcggctagcaagaaagtccattgggatgagattggaatcggccaagcactcgccttaaccatagccaattctgccaaagacgaacctttaatggctgccgccacttatttttggtcaaacaccatcaatgccttcctgttcaaccaagggccgatgactccaaccctaatcgatatcaccatgatcaccggactagatgtaacttcatcggccaaccccatgagcatgaacacccgtaaccaattcgatttcaagaccaagagcataggtggttggtccggctatgtagcagcatacatgggtcaaggatctgtcaccccccgagagcatgtagcctttttgctcatgtggctagaaaaattcctcttctgtggatccagttgtggccccacaaccaactggcaatttgtagccgaagccctggaatcaaagaaagaattccctttgggaaaaattcttctcggctacctgtaccagatgttaaacaatgcatcggctagaattgccgtcagctcggcagttggagcagaagctgagttcccactgccagagccgattgtgggtgacgatggagaagaacgcacccatcgcaggtgcacatcatatggggaatatgcatccataccaaccgatgctggagcaaagctatcggctgaaccgctcaaggactggttctgtagcttctatgaaggtttcaagaaagatgctcgaatctggttcccatatgaagactcaaaagaccttgaacttccatcagacttcagattcgaagacataaatcatgagaaattccagaaatccagagaagtccttatagccgcaatcagcccttgcatccttcccgttggcatccatcaaggaagaaacatccaagtgtcctatgaattttatcacccaatgagctcagccaggcaacttggattaggccaactcccaatcggcttgttcttcgccgacaagattcaatgccggggccaaatcacatctgctctaatgatggatcggctactcaatctactaggacctcctctgggcagcatcgagaacattgagttagccggtttcagaagcaagaacttcgacagatggtggggcttgattccaaacggaggtggattatctccccctgtcatcggctaccatacccccaagacatcaactctcctccatggcctcactagagaaccagccgatgcaggccaaaaaaggaagactagagcttcaaccataagcacctcaatcctggctccaaagaaaaagaccagagtcaagagagccaaaccagatgacaagccagccgatgatctgcctgacctggatccatctatcgaacaagccttagatgaagaagcaattggagatgaggtcgatcaagccgcagccgaagtaagcgatgctgaaaggacaccatcggcttcacctaagcaaacccttccaactccatctgccccagtccacctctcaaggaaaaagaagactgcagtgaaaaagaaatcggctgcaacaacatctaaaccagccccaccaccttcacctcctccttctccctcggctcaacaatcatcaagtgaccagaccccttcagccgcaggaagtcatcatgtcgaggaagaagaacaaccagccgttcctgctatcctagtcctagccgatcttttctcttttgatatcagagactatcttgatgaaggagaagaagatactacaagcaaagcattgactcccttatctgatgatgtcaagaaaactctaaaaagtatcttggatcggctagaagcatcatcgctagacagcttagtggttgactgtggcccaatcagagctcggctgcacgaaattcaagcttcaatcccagatgagctagccgatacccttactcctgctgtctaccttgagcaacaccagttcaaattggagaaagcgaagttaagactagccgaacggcgagagcacaaggatattgaggccactatccaagccaaccgacaacttgtgcatgaagaaaaatctaagcttgatcaattatctgaaggtccaatcaaatctaacatcgatcggcttgaagctcgcaagatcgacctcctagcacaacttgaggaatgcaacgctgagctagatatggagcacaagaaactagccgatctccccaagtccattgaagagcagaaagccaggcttaaatcggctattaaacatgtctctgaactgaccaagtccctaaaagttattcctggaaccgacgctcaagacgctcaggccatagaggaagtagagcaaattaggcacaaagctatatcggctattcagcaatatttatcacagtaa

SEQ ID NO: 84150 - DNA, 2703 bp, Oryza sativa
  Clone ID: PAT_MRT4530_83414C.1
ctacctaatctgctctacttcctctttggcttgggcatcttgagcatcggttcctgggataactttcagggacttggtcagttcagcaacatgtttaatagccgatttgagtctcgctttctgttcttcaatagacttggggagatcggctagtttcttgtgttccatatccagctcagcgttacattcttcaagttgtgctaaaaggtcaatcttgcgagcctcaagccaatcaatgttagacttgattgggccttcagatagttgatcaagcttggacttctcttcatgcacaagttgtcggttggcttggatagtggcctcaatatccttacgttctcgccgttcggctaatgttaacttggctttctctagtttgaattggtgttgctcaaggtaaacggctggagtaaggatatcggctaactcatctgggattaaagcttgaatctcatgtagccgagccctgattgagccacagtcaaccaccaagctgtctagcgatgatgcctctagccgatctaaaatccttcctagagttttcttcacatcatcagataaaggagccaaggctttgcttgtggtatcttcttctccttcatcaaggtagtccctgatgtcaaaagagaaaagatcagctaatactgggatagcaggagcagctggttgttcttcttcctcgacgtggtgacttcccgcagctgaaggagtctgatcacttgatgattgttgaacagaaggagaaggagttggtgaaggtggtggagctggtttagatgttgttgcagccgatttcttcttcactgcagtcttctttttccttgaaaagtggactggagcagatggagttggaagggtttgcctaggcgatgctgatggtgttctttcggtatcactcacttcggctgcagcttgatcgacttcgtctccgattgcctcttcatctaaggcttgttcaatagatggatccaagtcgggcagatcatcggctggcttgtcagttggtttggttctcctgaccttggtctttttcttcggagccaagattgatgtgctcatggctgaaactctggttttccttttttggcccacgtcggctggttctctggtgaggccgtggagaagagttgaagtcttgggggcatggtagccgatgacagggggagataatccacctccatttggaattaagcctgcagcatattcgatgtctttgccactattactttggtgaggaggggaagattctgttgtctgaggtatgacgtcagggaaaagatctgtcatatacatcgtagccgattggtgaaacagatgtagcttccattcaccccaccatctgtcgaagttcttgctcctgaaaccggctaactcaatattctcaatgctgcccagaggaggtcctggtagattgagtagccgatccatcattagaacagatgtaatttggcctcggcattgaatcttatcggcaaagaataagccgattggaagttggcctaatccaagttgcctggctgagctcattggatgataaaattcataggatatttggatatttcttccttggtggatgccgactggaaggatgcaagggctgattgcggctataaggacttctctggatttctggaatttctcatgatttatgtcttcgaatctgaaatctgatggaagttcaaggtctgttgaatcttcatacgggaaccagatccgagcgtctttcttgaagccttcatagaagctacagaaccaatccttaagcagttcagccgatagctttgctccagcatcggttggtgtggatgcatattccccgtatgatgtgcatctgcgatgggtacgttcttctccgtcgtcacccataatcggctctggtagtgggaattcagcttctgctccaactgccgagccgacggcgattctagccgatgcgttgcttaacatctggtacaggtagccgagaagaattttccccaaagggaattctttctttgactccagggcttcggctagaaactgccaattggttgtagggccacaactggatccacagaaaaggaacttttccagccacatgagcaaaaaggctacatgctctcggggggtgacagatccttgacccatgtatgctgctacatagcgggaccaaccacctatgctcttggtcttgaaatcaaattggttccaggtgttcatgctcatggggttggccgatgaagttacatctaatccagtgatcatggtgatatcgattagagttggagtcatcggtccctgattgaacatgaaagcattgatggtgtttgaccaaaaataagtggcggcagccattagaggttcgtctttggcagaattggctatggttaaggcgagtgcttggccaattccgatctcatcccaatgaactttcttgctagccgatacacgctgataccaagtggaccaactcctatcaggtgaaagtttttctagggatggccaggatttaaaggtgttcttccaatgacctaggttagggttagctagcctgaaaggaatccggttggtttcaccagtaataaaatcggtggggtcgagattgccgattggaccgaggaaatagtggttttgatgcgaaagacttagaattgcgacttgatgagagaggtgctcggcgtactcagctgttggcgcacccgatgggctggcggaagaagacat

SEQ ID NO: 84151 - DNA, 455 bp, Oryza sativa
  Clone ID: PAT_MRT4530_83415C.1
agaacagagaagaattgaattagatggggaattctgtttttacatcgttcaattcacatctcttctctgcggatccttatatagcaatgtgccattggatctctctcccttacatgtggcccagtcagtcactattaggtccactcactcccgtgataggccggattgggccgccgttcacgacgcgactttctgagcccatcttggtgcgccgaagaagcttcatcgcttgtctaatcaggaacagaaggtgacgatgccgtgacattctccccccgttgagacgaagcttgtccccaagcttcagccaatggaaagcgatgacgtaattcttgagcattctcctaggtgatcacctgaacatctggtccagaccaagcaacctgaacaaactccaccattttggctcccttgcgaatgaagcgccgatccaaaatgcggagaggagttggtga

SEQ ID NO: 84152 - DNA, 534 bp, Oryza sativa
  Clone ID: PAT_MRT4530_83416C.1
atgggaatgggggcaaaggaaaggaagggggggggattggatggttcgagcgactcggggagggaagtggagcggaacctcccgggagataagatttgcgcggaggcatgcgtggcctacgcattggcaccgctggctttcatctgggccgtcggctttccagccgacggagttggtgtcggggctcggggcatgggaggtagcaagagagcggtgttggccatcagagaaagaggcaccggtagcggggttggcccgacggcagagcagatgctcaagctaaagccgacgatggtgatcacgagctccccgtcgtctcccttctctccacctcgagctccacttgacggtgaccaagagcttctcctcctcctccacctcctcatcgtgcgcactcctagtggacgccaccacctccgctccttcgcctcttcgttgttttcacatgcgtccctggttcgtcgtcgccgcctcctcttatctgtctcgtctgccgcccttcgttgttgtcacgggtgcccctggtcattgtag

SEQ ID NO: 84153 - DNA, 1113 bp, Oryza sativa
  Clone ID: PAT_MRT4530_83417C.1
atggcgcctagatcatctccggccattggcggcggcggcggcggccgtgtcgccgtcgacctctacccgttcctgcgcgtgtacgagggcggccacattgagcggctcgtgcgcagcaccgccgccgtggcggcgtcccacgacgacggcacggcgacgtcggcggcgtaccgcctcgcgccggagcaccccttgcccgcggcgttcgccgacgggtgggccgcgctccggtgggcggcgtcgctcgccgacccctgggtggcgcgctacgcggaccccacgcggctgttcctcgccggcgagagcgccggcgccaccatcgcgcacaacgtggccgcgcgggccgccggccccgacggcgacgacgtcgacatcgagggcgtggcgctgctgcagccatgcttctggggcgcgcggtggctgccgtcggaggaggcggcggcggccggctggcgcgacgatgagccgccgatgctcgcgccgggcaggctggacgcgctctggccgtacgtgacgggcggcgccgccggcaacgacgacccgcggatcgacccccccgccgaggacgtgtcgtcgcttccatgccgccgcgcgctggtcgccgtcgccgagaaggacgtcctgagtgagcgcggccgccggtacgccgcccagcttcgcggcggcgggcgcgaggtgacgctggtggagtcggagggcgaggaccactgcttccacctgtaccggccggcgcgccccagcgccgtggagctcatggaccgcgtcgcgcagttcatctcgccggcgagcagctgcctgcaggcggaggagctccatctccatggccgccaccgcacgctgtgtcatggcaacgcgacggctgcggcggcaacacgatcaggtgcaccgagacgtcagctcgtcgtgtcagggggacctactactgctaagttaggcaggccaaaaacgaaagtttgtggcgggcctgcttgtaaggcccaaactgctctgtgcttgggcccacgaggaatggggaaggcccagcgtcatggatttgtgggcatgggtggcccaatgccaagtgggaccaacaaatattccgtttcgtcagctgctctacgggtgctgtgctga

SEQ ID NO: 84154 - DNA, 1632 bp, Oryza sativa
  Clone ID: PAT_MRT4530_83418C.1
atggctaggaggaaggggaggaaaggtgcgttctaccggcgccgccaccgggatcccgcgacctacggagacgccgctgggaggaagggggcggcggcggcgctgtactgtctccgtcgacgccggacacccgcggcggcgccctgcgacggcgaccgcatcagcgacctctccgacgacgtgctcctcctcatcctgcggcgtctcgacacccgcgccgcgctcgccgccgcgatgctctccacgcgctgggccccgctccgtcgcgagctcgacgccctcgatttcgtggtcggcgacgtactcccgccgcgctaccacaggtccgtccaactccacaaaaccatcgcgtacaacggtgacgccaaggctctcgtcgccaccatcaagcggcaagagcgcctcgccatgcgaaacatggccgcctccatcggctgcttcctcgacgcggatgacagccatgaccgtgccggccgagctcgtcgtcgtcgtcgtcggatcggcaggctgcgggtggagttctttgccactcactacaccgatcttatgaaccgattgatcaccaaggcattggacgcttggggagtcgaggatcttgaggttttcgccaaatctgcttattggtctataccgccggatgtccacagatttcctcaccatggtctctgcaatcagaagtcccgcctgagaagcctgaagctaggaggctgcatcattccgccattgcaggggtttcaagctctcaccgaattgaccttgcaagacttgcaaaactccatgcccaaatcatcctacgaagccgtgatcagctcatgccctcagctgcaagttctacacctcaaatcatgccgctgggtgggtcagggaattctggtcatcgacgcccccaggtcagggatcaagcagcttaccgtggagttctgcagcgtcatcgcgctacactctcttgggatgctcgagagaatagctatcagggagacctgggtgagttacaaacatcactcctccttctcgcgtgttatgcacataaacctgaacttacgccatggttacattaatcgtctgcgtgatttatgtattggttgggacttgaacatcgagaggtttcttggattcaccaagaacataacgaacctggtcctacgattcactggatatgggagatggttcgtgccatcttgcccctcattgttgctggctaatctcacaaggctcctgattgctgatgtgccttcatcatgggatgtctcttggcctcgactcctgctcgaagcagcaccatgcctggagagccttcacatccatattaccccttgggatgatgagcattgtgatgaaatcatttggaaaccatccactttgcagcatgaaaagctgaaggagctggttgtagttggcttcgagggaacagagagacaggtttactttgttaactttgtgatggaagtatcaacggcattgcagcttgttgctctgtttagatatgggcgtgttgaagaaatggggcgttgggactggaaaatcgtgaggctccaacaccattggagtgatgaggagagatcccagattctgaaccagtttgcccatagagattcttgctccacaacttcagttcaagtagttctagagtga

SEQ ID NO: 84155 - DNA, 163 bp, Oryza sativa
  Clone ID: PAT_MRT4530_83419C.1
gaaccacggaacaacaatattatagtaaaatacaatacagtgaataagtgtgagacgcaacacaccaaattgtgacatggaaaagtggagcttgttggcactacagataggtctcatgaggggactcccaaacattactaaaaggcggacaagttagaagcgg

SEQ ID NO: 84156 - DNA, 311 bp, Oryza sativa
  Clone ID: PAT_MRT4530_8341C.1
agaagtcacacacctaattccatgttaacaaagtactataagtttactaaatgatgatattgaagttgataaatcgattagctaggaacatgtcgatctcagagactcccaaaagccagaagttgtgcttgaagacgctttacttctgagaaaggtctaactgctcatctaccttcttgcacttcaagctcacattcaccacacaaagtatatattcttctcaatttctgatgttttctaggcactgcaactgtgccaaaatggcttttgttgctttggcctctgcagcggtttgtgctaattgaaagttg

SEQ ID NO: 84157 - DNA, 471 bp, Oryza sativa
  Clone ID: PAT_MRT4530_83420C.1
atgggtgttccggcggaggcgctgagaccggcgaggcagacgtcgctggcgatgtgggtgggcgagatcggcacgggcgacagagcggacgagaatgagcagcggcggtgggcgacgattaggcggcagcgccatcaaccccactccgatgttattcccaagctggatcaggggatgaggctgcgactagcaatggagtgcttcggagaggcccctgcccacaaggaaaatatagtcgtcgctgtcaaagaagatagtgatggcaagcaggaaatggagagccctcctggagcccccgcgcactctcacactctgaaacactgccgcatgtggaagaagacgtgggcgtgggcgtggacgatgggcggtggcgggggcgcaacggtgtgggtcaccgtcgaccgggaaagctccgacggatgccgcatcgttcgtcgttcgcaggcgctacagcgtggcggccacgggtga

SEQ ID NO: 84158 - DNA, 375 bp, Oryza sativa
  Clone ID: PAT_MRT4530_83421C.1
atgggttcttccaccatccttttctactgcgtcgctctgtccgtggtcgccgccgccgccgtcgtgtcgtccgccgccgaggaggccgaggggccccaagacgaagcaggccgcttcctatcagagccgtgcccggtggagttcgagcaggtgaaggggttcggagaacttggggccaagtgcaacgacaagcagacgatgaaggagtgctgcgagctgttcaagaagatcgcgtgcccctacaaccatctgctcaacgacatcaccaacgtctgcgcgaacgaattcttctacctcatccacaccaagggcaagctgcagcccggaaccatcttggagaactgcaacgagggccctatggggatcaactgctga

SEQ ID NO: 84159 - DNA, 432 bp, Oryza sativa
  Clone ID: PAT_MRT4530_83422C.1
atggggaggccgctgcctatcagaagagccaccaaaacaagtcgaatcagaagaagacggaagctgctcagagtgggcgacatgcttgttcagcaggcagctggcctgctttgtgatcgagctcacgaacaaacgatacaacctgtctgttttaccgtgcgtgccgggaagccactgatgtcaaataacgccagacaagaagagtcaagatgtgcgaggatttttcaactggttgaactcttcagcgctttgctctcctatggaatagcagtacttatcaaacgtggaatggctcttttactcccgatttgcaaccttttagccccgggtgcaaaccgggacacccaatccgggactaaagattatcgtcaccctcaaatccccacaaatcatccacaattgcccatccaaaaaatcatccgcaatccacaa

SEQ ID NO: 84160 - DNA, 649 bp, Oryza sativa
  Clone ID: PAT_MRT4530_83423C.1
ggaaacttcagttaagctacagctttgcaagtcaaaagcgagcttacacagcaggagctcacgtggtacatggcagttacataagcttagctgtcttacaatttagcattagcatgtagagaagtggccatttacctctacccaagcttactactcgttgagcatctaatacaacttcagttcaaaattacaaattgcatcgaatctacacttttgtttcagtagatagagatatcgcacattatcgttggtagcttagtggctcaacagctgttctgaagagaagaatgtataacttgtcaacagagaagtacaagaaacctcccaaggagtgagtaacgtaggaaccgaagcttgtgccgacaatgcagtgccaagcaggcccatatgttgtatcaaattctaccttcgcctccttctccttctccttcttctccttcgccgccttcacctccttctcctccaccaccttaccgcccttcccctcaccgccaccgctctccttcgccgccacctccctctccctctccctctccggctccggctcaggctccggctccggctcgggcgggtcggcgagcttggtgcggcggacgagcgaactgaggtagcggctgcggcgctccagctcctcggaggcccggtccat

SEQ ID NO: 84161 - DNA, 516 bp, Oryza sativa
  Clone ID: PAT_MRT4530_83424C.1
atgcataccgagattgatctcgggatgctgctgctgctgcggaagatccatggctcggccgggcagacgagtggtgtggctagagtccaacgggtcggcccgtggcccaagcccacgaaggagctcaacagtggaggggatgaactctacgcagctccgccagcacttggaggggacgagctcgagctcgccggcagcgtcgggtgctgggggcgggcgccagcggcagtgggcgctggatcgctgggggagaggcggagatcggcagcggtgggcgctcgatctcccggcggcggcgggcgtggggggattggcggagaccggtggcggcgggcgcccgatctaacatcggcgggcactggcgggggagaggaggagaccgtcggcgacgggagctggcgggggagaggaggagaccggcagcggcgggagctggcgggggagaggcagataccggcggcgacgggcgctcgatctcccggcggcggcggtggctgggggagagtggggaattga

SEQ ID NO: 84162 - DNA, 396 bp, Oryza sativa
  Clone ID: PAT_MRT4530_83425C.1
atgccgggtaacaaggttcgacggttatccctacacagtagcaatccagagcatgcgaaggatgccatagaaagaatgaactcgtcacatgtacgatcgttgacagcattcgagagtttagaacaatttcagtcttttacattcaagtttgggatactgcaggtgttggatcttgaaggttgcaagggcttgactaccagccatctggacaaaatatgcaagatgtttcatttgaagttcttgagcctgcgcaaggcacacgtcaagaagctcccgtcagacattggaaagctgcagtatttggaaacgttggacataagggagaccaatgtgcaggagctgccaccatcagttgcagatctcaaacaaatggcacatctacttggtgggaattag

SEQ ID NO: 84163 - DNA, 515 bp, Oryza sativa
  Clone ID: PAT_MRT4530_83426C.1
gtaggtcgtgctggagaagatgagccgggtgctggcccagggtgtccctgcattcacccctgccaccactgttgatgctgacctaaaggacctcagcctggtgatggaccacaacatgtcggtggccagctttaacgctgcccccgcttacctgcccaagccggcgcctgcaaggtggtgcgtgctacccccgcacccaagaaggagtgaggttgcccccccggcaaagaccgtcgaggaggcccctaaggctgcccctgtgcagcagtacttcccggcacccccccccaacgtggcgggcgcagctgccatctcgattgccatgcagtcggctgcctcgaagctggccggccccctaagggctgctgcaaccacccagatcaaccggctgcgcggaagcgccgggcgcgctggcatgccgatgattgctcccaggtcacccctcgaaaggtcgaacgtcaccgtgaacaggactctggtgcctctatggaggccaagagcacgacgacgatgct

SEQ ID NO: 84164 - DNA, 158 bp, Oryza sativa
  Clone ID: PAT_MRT4530_83427C.1
atggacaagattaaatactggatagatgcatggatggaattcaaaatgttcggtgctcaaggaatcattggcgccgttatgcatgatgctcgggagagctgtgaccagaagaacaaccccttgtttgacaagttcctgcaggaactgttggagacctg

SEQ ID NO: 84165 - DNA, 343 bp, Oryza sativa
  unsure (1)..(343): unsure at all n locations
  Clone ID: PAT_MRT4530_83428C.1
gctggctctctcctggagcncgccgcgattctgctggatcgcggccttcatcccatgtggatcgccgaaggttatgagttggcctcatgggtcgcttttgatcaccttgagcacatctcccgcgcgtttgaggttagggctccctctgtagagcctctggtgctgacctgcctgacgtccctgtcctcgagcattgttatccgtggcccgaggactcttgctgagattgctgtgggtgcggtccttgctgtggctgctttggggcggatggctgctttcttggtcttgctcctcgtggcgggtttggttcgcgggattcttgaggctcctgagcttgtttctg

SEQ ID NO: 84166 - DNA, 294 bp, Oryza sativa
  Clone ID: PAT_MRT4530_83429C.1
atggctgcggctggcggtggagggagcgtcggcgcggcggcgctggaggccgtgatggccgtggaggggcaggaggccacgccctcggcggagggcggcatgcggggggccggcgtggtggaggcgcggctggcggctcgaccaagagcccgtctttgccattgtttacgaggtatgtcggagctgctcgttgatggggtgcggcgatgctcgacaacgatgacatgctgcagtctcttctatggagttggtgctagccgtgtgaaggaagtggctccttggtggcttggctga

SEQ ID NO: 84167 - DNA, 2469 bp, Oryza sativa
  Clone ID: PAT_MRT4530_8342C.1
atcgaagcgaaaaaaaacagagcaaaatcgtcccagcgcgagcgaatcagaagagcaacaacacaactcgatcgttcatcagcggagagcttgatttgatttgatcggaagagaagaaagatggcgggcaacaagggagagggccctgcgatcggcatcgacctcggcacgacctactcgtgcgtcggcgtgtggcagcatgacagggtggagatcatcgccaacgaccagggcaaccgcaccacgccgtcgtacgtggccttcaccgacaccgagaggctcatcggcgacgccgccaagaaccaggtcgccatgaaccccaccaacaccgtctttgatgcaaagcggctgatcgggcggcgcttctcggacccgtcggtgcaggcggacatgaagatgtggccgttcaaggtggtgcctggcccagccgacaagccgatgatcgtggtgacgtacaagggcgaggagaagaagttctcggcggaggagatctcgtccatggtgctcaccaagatgaaggagatcgccgaggccttcctcagcaccaccatcaagaacgccgtcatcaccgtcccggcctacttcaacgactcccaacgccaggccaccaaggacgccggcgtcatctccggactcaacgtcatgcgcatcatcaacgagcccaccgccgccgccatcgcctacggcctcgacaagaaggccgccagcaccggcgagaagaatgtcctcatcttcgacctcggcggcggcaccttcgacgtctccatcctcaccatcgaggagggcatcttcgaggtcaaggccaccgccggcgacacccacctgggaggcgaggacttcgacaaccggatggtgaaccacttcgtgcaggagttcaagaggaagcacaagaaggacatcaccggcaacccgagggcgctccggcggctgaggacggcgtgcgagagggcgaagaggacgctgtcctccaccgcccagaccaccatcgagatcgactcgctctacgagggcatcgacttctacgccaccatcacccgcgcccgcttcgaggagctcaacatggacctcttccgccggtgcatggagcccgtggagaagtgcctccgcgacgccaagatggacaaggcccagatccacgatgtcgtcctcgtcggaggctccacccgtatccccaaggtgcagcagctcctgcaggacttcttcaacgggaaggagctctgcaagagcatcaaccccgacgaggccgtggcgtacggcgccgccgtccaggccgccatcctcagcggcgagggcaaccagagggtgcaggacctgctcctcctcgacgtcacgccgctctcgctcgggttggagacggccgggggtgtcatgaccgtgctgatcccgaggaacaccaccatcccaaccaagaaggagcaggtcttctccacctactccgacaaccagcccggcgtgctcatccaggtgtacgagggcgagaggacgaggaccaaggacaacaacctgctcggcaagttcgagctcaccggcatcccgccggcgccgaggggcgtgccccagatcaacgtgacgttcgacatcgacgcgaacggcatcctgaacgtgtcggcggaggacaagacgacggggaagaagaacaagatcaccatcaccaacgacaaggggcggctgagcaaggaggagatcgagcggatggtgcaggaggccgagaagtacaaggccgaggacgagcaggtgcggcacaaggtggaggcccgcaacgcgctggagaactacgcgtacaacatgcgcaacacggtgcgcgacgagaagatcgcctccaagctccccgccgacgacaagaagaagatcgaggacgccatcgaggatgccatcaagtggctcgacggcaaccagctcgccgaggccgacgagttcgaggacaagatgaaggagctcgagagcctctgcaatccgatcatctcaaagatgtaccagggcggcgccggtggtccggcgggcatggacgaagacgcccccaacggcagtgccggcaccggcggtggcagcggcgctggccccaagatcgaggaagtggactaagcgagtggactgagtatatgacatgttgagcgggacgaagaaggagcgatgcattctgggacgtcatcatcatctttagagtttcatgcggtcaagccgaataatgtcacttgagttgttactggttgtgacagttatatcttgttaaggttctatgatccgatgtaggttgagagagatatatatatatatattattactactacggagtgataggtttagcggagtaaataagtgtgaactgtcatatgtggttcttttagttatctctggtgttctgctttgaactcgggagttcagaagtataatgttcttttatattcgttgcagtgtctatgattactccgtacttttatgattactccgtaaaaaaaaaaaaaaaaaaaa

SEQ ID NO: 84168 - DNA, 1274 bp, Oryza sativa
  Clone ID: PAT_MRT4530_83430C.1
gcgatcaacacaaaaagcttctctttcccttctcctcctcggtgatctgtctcgccggggcatctcgaaaagcatccgactccgacgccgccgcgcgccaccacccggccgatcgccgacgccgcagccgctggaagcagcagggacgacggagaatcggagatggacatcgaggcgttcatccacggcggaagcgggggcggcgacgccgacgccgaccacccgctcggcatcttctccgccgccgacctctccggcttcggcttcgcggactcgagcaccatcacagggggcattcccaatcacatatggccccagtcccagaacctgaacgcacggcatcctgcggtctccacgacaattgagtcgcagtcatcaatctgtgcagcagcaagtcccacatcagctaccaatctgaacatgaaggagagccaaactctgggaggcacaagtggttcggattctgaaagtgaatcgctgttggatatagagggtggtccatgcgaacaaagcacgaacccgttggacgtgaagagagtgagaaggatggtgtccaatcgggagtctgctcggcgatcgaggaagagaaagcaagctcacttagctgatctcgagtcacaggttgaccagctccggggcgaaaacgcatcgcttttcaagcagttgacggatgccaaccagcaattcacaacttctgtcacggacaacagaatcctcaaatcagacgttgaggccctccgggtcaaggtgaagatggcggaggacatggtggcgcggggggcgctgtcgtgcgggctcggccacctgggcgggctgtcgccggcgctgaacccccggcaggcgtgccgcgtccccgacgtgctcgccggcctggactacgccggcgacgaccccttcacggccgggctgtcccagccggagcagttgcagatgcccggcggcgaggtggttgacgcctggggctgggacaaccaccccaacggcggcatgtccaagtgaaactactggtcctacttctatgtcagctcagctacgtttgaaacgtgatgtgtccaagtgaacggacttgagtttttcagagtcctcgtgtcgaagtgtcatgcactcttccctattcctgtaatagaactgactagctaagagactgaaagtctgaaactacgaagtataaatgtggtggaatttggaactaaaaaaaaaaaaaaaaaaaaaaaaaaaaaaaaaaaaaaaaaaaaaaaaaaaaaaaaaaaaaaaaaaaaaaaaaaaaaaaaaaa

SEQ ID NO: 84169 - DNA, 868 bp, Oryza sativa
  Clone ID: PAT_MRT4530_83431C.1
ccggccggggctctcgcggccctttctccccccgccagctcatgcctcgcctccgtgcgccgcgctcctcgccctcgctctcgctcgtgcagtgacatgtcacgcgccgccgccttcacctcctccaacggtccattgacgatgaagacggaaagagagagggcgagagctagaggggatggggagaggaaggcacgcagcgagttcccctccttccttcgtagcaattggtgcttccaccagcaagctttctataacgtggagtgtcgccgaccacggccgcagcctccttcctctggattggactccactgggaactcctccgacatatcaagtgtgcctgtccaccttctacctctgaggcaaagattggatcaagcaagctggatctgactcagcaccttgatctgctcaacaaccggagcccccacctccttatacatcccaaagatggatatgcatcttctgtattcagttaggataaggcttccaaggtctgcataaagcaaccgtgagactcacatgctacaaaattttggtttcacatgatgtttatgactgaaagtaatgcagtatcaggcatgcaaaaatagaagtttagttgatctactggtgcttcatctgcaaacaccatggatcagttcatgacagcatgaccataaggttgggagggacaagaacaaggtgtccattaaagttatggagataatgctgttcaggccggtccagtgaaaagagattaaagaggattaaattgtttgcaggtcaacgttttattagttcagtgcaatcattccctgatggtcatatttagtcataaattgattgtacatttgtacaaatcgttgaagtagttctatttagattt

SEQ ID NO: 84170 - DNA, 302 bp, Oryza sativa
  Clone ID: PAT_MRT4530_83432C.1
aagggacgcacctgtcattcaacatttaatgagttaggacttttggatcctcactgcgccgggaaacgggaaccctaccctaaccgggttaggcaagccgtctccggctgtgatgagaggctaagacctctcatcatcatggctgatgggacagggcaggacgcacgccgcctgacacacgcggtagtgctcctggcactctgggtcccatcggtcaatcaaccggtcacaggccggttgagtgcactgcacgctgcattaaatacggcgtggcacagctggtcaggtcgccataaatgcag

SEQ ID NO: 84171 - DNA, 5676 bp, Oryza sativa
  Clone ID: PAT_MRT4530_83433C.1
atgcttctcccgctcagcccattggccgaacgggcagtggcgcacaatctctctccgagcactagcggtgaagacggggagcagaacccgcgccgtcgagctcgtactccactgtccccctctcgccgaagtcttgggcgggaggaggcgctcgaggaggtcgaaagatccgcgacttcgccgcacgcgggcgatggagaaggacggcgagacggggagcgtcgtctcctcgtctacggagatggcagcacgccccagggcgcgctccaggctgcgggcgcactcctgcgtcacccgcccgtcatccctgatccagagactccaacccgacgttggctagatgacgtggccaatttggtcatgacggcgcagcagcgcttaggcgccggctggcggtcctccgccaccaaggccactggcgttgctactgctggctccgtgtcgtcgaggcggagggcgcggcgagcggcggccgctacccgccgttcgtccgccattccctcgtcaacgcctccaacccaagaagatgtgcgtagggggccagatgcccgcttcaatatcgagcgccggcgcaatgatcgccgtgctgcccatgcatcggagggcgcttcctcgtccggagcgccacttcggtccgggcacgggggccagccccccgtgtccccggttggcggtgccggctgtcgagcctttgtggcgagccttcggaacgtccgttggcccccaaggttccggcccaccatcaccgaaaaatacgacggaagcgtcaaccccgccgagtttctccagatctacacgactaggatcgaggccgccgggggtgacgacagggtcatggcgaatttcttccccatggccctgaaaggacaggcgcggggttggctaatgaacttgccacccgcgtcggtccactcttgggaggatttgtgccagcagttcaccatgaacttccaaggcacatatccgcgcccaggtgaagaagcggacttgcacgcggggggcgtgcgccacaaccgcatgctcgagaagatcgcctccaaggagccccagaccaccgcggagctttttcagctcgcggaccgtgtggctcgcaaggaggaggcctggacctggaactcctcctgttccggtgtggcagcttcggccgcccccggatccgccgctcggtcagggcgacgggacaggaggaggaagaagaggtcggcccattccgacgacgagggtcacgtcctcgccgtcgagggcgctttgcgggccacccgaaaggggaggcctgcgagcgacaaaaagaaggaggccggcgctcctagcagggagcgcccgaccggcaagtggtgcaccgtgcacaacacctccctccacgacctcgcggactgccgcgcggtcaaaagtttggctgagcggacgaggaagtgggaggaggagaggaggcaggagcgccgtgagggcaataccccggcggctcccgccggcaaccggcgaggtgaggccaagcagaaggcccccgccgaggacatcaacgatggcgacgatgacctagggttccaggagcctgaggccactgtcgccaccgttgatgggggagcgtgtgctcacgcttctcgccggagcctcaaggccatgaagcgagagcttctggccgtggcccctacccatgaggtgacgcggcgggcgcggtggtcggaggttgccctcaccttcgaccagaccgaccacccaccgtgcgttgcccggggaggacagatcgcgatggtggtttcccccaccgtttgcaatgtgaagttggggcgtgtcctcgttgacgggggtgcagccctcaacatcctttcccccgctgcctttgacgccatcaaggccccggggatggtgctccggccgtcccagccgatcatcggtgtgacgccggggcacacttggccgctaggccatatcaacctcccggtcaccttcggtggttccgccaacttccgcacggagcgggtgaacttcgatgtggcggacctcagtctgccctacaacgcggtcctggggaggcccgcgttggtgaagttcatggtggcggtccactacgcctatctccagatgaagatgccgggccccggtggccccatcaccgtccatggcgacctcaaagtcgcgcttgcttgcatggagcagcgcgcggaccacctcgccgcggcatccaagcccgcgggtggtgacgagaggctcagcacctccgtcccagccgccccgaggcagcggatgatcacgtgcgacgaggtcccgatcaagcaggaagacgcgctcgtctccttcctacgggcaaacgccgacgtcttcgcctggagaccggcggacatgcccggggtccccagggaggtgattgagcaccgtctcgccgtacggccgggcgcaaggccggtccggcagaaagtgcggcggcaggccccggaacgtcaagccttcatccgcgaggaggtggcgcgacttctggaggccggattcatccgagaagtcatccatccggagtggctggcgaacccggtcgtcgttcccaaggcgaacggcaagcttcggatgtgcatcgactacaccgaccttaacaaggcatgtcctaaggacccttaccccctgccacgcatagatcagattgtcgactccaccgcggggtgcgaccttttgtgttttctagatgcatactctagttatcatcagattcgcatggctagggaggatgaggaaaaaactgcattcattacccgcataggaacttattgttatacgacaatgcctttcgggttaaagaatgcaggtcctacttttcaacgtactactcgaatttctttgggtagccaaataggacgtaatgttgaggcctatgttgatgacttggttgtgaaaacacgcaaccaggagaccttactctcggatctagcggaaactttcgaaagtctccgcaccgcccgcataaagctgaaccccgacaagtgcgtgttcggcgtgcctgcgggcaagcttctcgggttcttgatctctgcccgaggcattgaggccaaccccgagaagatacgagctatagagcggatgcgcccccccagcaagcttagggatacggaggaggctgaacgggccctcactcagttgaaggcgtacctcagttctcccccagtcctggtcgccccggagccagatgagccgttgctactctacctggcggcaactccgcaggtggtcagcgcggcgttggtcgtggagcgcgacgaggacgaccctcgctccgcgcatccccaccctgtgtcgactcgacccgggagagagcagggaggagaggcccccgagccgaatggtggcccgaggcccccaacgaccggaactggccctctgcccgcttgtccgacggtgccaggcgcccctgatccccaggatggccccggggccactgcgggaaggccgcgcctgtcgccctctgaccccgaggtcgtcggcacagaagccgagtgcgccccgtgcggcctctcggacgaagagcaccctgtatcgactcgacccgggagagagcagggaggagaggcccccgagccgaacggcggcccgaggcccccgacgaccggagctggccctctgcccgcttgtccgacggtgccaggagcccccgacccccaggatggccccggggccactgcgggaaggccgcgcctgtcgccttccgaccccgaggtcgtcgacacagaagccgagtgcgccccgcgcggcctctcggacgaaaagcgccctggagatgcggcccctggcgaagaggatcggccccgacaaaaggtgcaacggcccgtctactttgttagtgaggccctccgggacgccaagacccgataccctcaggcccagaagatgctttacgctattctgatggcttcgaggaagttgcgccattatttccaggcgcatcgggtcacggtggttacgtcctaccccctcggccaaatcttgcataaccgagagggtactggacgggtggtgaaatgggcaatcgaactctctgagttcgatttgcactttgaaccacgccacgcgatcaagagccaggccctcgccgactttgtggcagagtggacaccggctcccgagcccgtctccatccccgaggccagctcgggcccttcgcagctgcctcacaccgcctattgggtgatgcagttcgacggctccctgtctcttcagggcgccggtgcgggggtcacgttgacctcgccgagcggagatgtccttaaatacctggtccgcctcgactttcgggcaaccaacaatatggcagagtacgagggactccttgcgggactcagagtggcggctggactggggatccgccgcctcctggtgttaggcgactctcagttggtcgttaaccaggtctccaaggagtaccagtgctctgacccgcagatggatgcttacgtgcgccagatcgctgagatccaggcgtacctcgcagataagactctacctgaggaccacgaagggagtgaacgcgtacagtgcatctccaagcgctacgtgctggtggaagggaccctctatcggcacgcggctaacggagtcctcctgaagtgcattcttcgggaacaaggcgtcgagcttcttgccgatatccatgaaggcgagtgcggagcccactctgcctcacgcaccttggttggcaaggcctttcgccagggtttctattggccgacgactctcaacgatgcggtcgacctggtccggcggtgcagggcgtgccagttccacgccaagcaaacccatcagccggcccaggccctgcagaccatacctctttcatggccgtttgctgtctgggggctcgatatcctgggtccgtttagacgggccccgggcgggttcgagtatctgtatgtcgctatcgacaagttcactaagtggcccgaggcttatccggtcatcaagatcgataagcactccgcacttaaattcatcaggggtatcactgctcggtttggggtgcctaaccgtatcattacggataacggcacccagttcactagtgagctcttcggtgactactgcgaagacatgggcattaagctctgcttcgcctctcccgcccaccccagaagcaatggccaagtggagcgcgccaacgcagaaatcctcaagggcctcaaaaccaagaccttcaacatcctcaagaagcacggcgactcgtggattgaggagctgccagcggtgctctgggcgaaccgaaccacgccaagccgagcaaccggggaaacgcctttcttcctcgtctacggcgcggaggcggttctcccatccgagctcaccctgaggtcccctcgggccaccatgtactgcgaggctgatcaagatcagcttcgcagagatgacctcgactacttggaagaacgaaggcggcgcgcggcccttcgagccgcgcactaccagcagagcctgcggcgctaccatcagcgtcacgtccgggcccgatcactctgcgtcgacgacctcgtcctacgccgtgtccaaacgcgtgctggactgagcaagctctcaccaatgtgggagggtccgtatcgagtgatcggcgtcccccggccgggctccgttcggctggccacgggcgacggcacagagctgtctaacccgtggaacatcgaacaccttcgtcacttctacccctag

SEQ ID NO: 84172 - DNA, 1287 bp, Oryza sativa
  Clone ID: PAT_MRT4530_83434C.1
atgtcgcggcaggcacggaaggaggcggcggcggcggcgcaagatatgctgaagttggatgtggcttggatgcgcaagccagctgcattgcaatctcgaaaggatgcggcggcgccgatgcggaaggcccagggagggaggagctcgggcggcgtcgatggcgtgtaccatgttcttgttatcgcgtatggcaaattggcaactgctcttgtgatatttctggtgccggaatggatcaaccatctttactggagcatcagagcaccgtttctttccaccgctctctcccgaataaatccgtccgccattaacgccaccaccaccaccacccaccccttcccttcttccatcctccgcctcgcctcgcctcgccgcgccagaatcctctccgatgagccggagccggagatgaggtgcaagctccacccctacgccaacgccgtcggcgtctgcgccccctgcctccgcgaccgcctcctcgacctcgccgcccagcgcgacgccgccgccgacgccgccgaagccgacgaccaccaccacagcagcagcagcagggcctcctcatccctcttcgcgcgctccgtctccccctacgccgcggcgcgccgctccgacgcctgcgcctacgcgtcatcctcctcctcctcggccgccgccgcccaccaccaccaccaccaccccaacctcctcttcttccgcacgccgcaggtcggccccgcccgcgcggcgggtggcggcgatgagcccgagccgcgcggcaagaaggtcgcgcgccgcaggtccttcctcgccgcgatcttcggcggcggcggcagggggcgacacgcccggggcgacgacgacgtcgtccgcggcggtggcgtgagcgcgaaggatcctccccgacggtccacctcctggctctcctcgatagtccgacgcaagcggcggccggaggccgcggcgacggcggcggagtcgctgccgccgccgctggacgaggcgcccgactcccccggaggcagtaccaccagtagctggtggttcccttccccctcgccggcgaggcagcaccgccgcaggcacaccggcgtgggcgccagcggggacgggatctcggggttcgccgtgtgcctcagcccgctcgtccggcccacctccggcggcggcggcggacgccggcgatgccagccgccggatccgtcccccctgggcgacacccaccggcgcaacctgtcggccggcggcgccgcctcgttcggccgcaacacctcccggaagctcgccgacatgggtaggttccgatga

SEQ ID NO: 84173 - DNA, 5817 bp, Oryza sativa
  Clone ID: PAT_MRT4530_83435C.1
atggccgaacgggcagtggcgcacaatctctctccgagcgctagcggtgaagacggggagcagaacccgcgccgtcgagctcgtactccactgtccctctctcgccgaagtcttgggcgggaggaggcgctcgaggaggtcgaaagatccgcgacttcgccgcacgcgggcgatggagaaggacggcgagacggggagcgtcgtctcctcgtctacggagatggcagcacgccccagggcgcgctccaggctgcgggcgcactcctgcgtcacccacccgtcatccctgatccagagactccaacccgacgttggctagatgacgtggccaatttggtcatgacggcgcagcagcgcctaggcgccggctggcggtcctccgccaccaaggccactggcgttgctactgctggctccgtgtcgtcgaggcggagggcgcggcgagcggcggccgctacccgccgttcgtccgccattccctcgtcaacgcctccaacccaagaagatgtgcgtagggggccagatgcccgcttcaatatcaagcgccggcgcaatgatcgccgtgctgcccacgcatcggagggcgcttcctcgtccggagcgccacttcggtccgggcacgggggccagccccccatgtccccggttggcggtgccggctgtcgagcctttgtggcgagccttcggaacgtccgttggcccccaaggttccggcccaccatcaccgaaaaatacgacggaagcgtcaaccccgccgagtttctccagatctacacgattgggatcgaggccgccgggggtgacgacagggtcatggcgaatttcttccccatggccctgaaaggacaggcgcggggttggctaatgaacttgccacccgcgtcggtccactcttgggaggatttgtgccagcagttcaccatgaacttccaaggcacatatccgcgcccaagtgaagaagcggacttgcacgcggtacagcgaggggacgatgagtctcttcgctcgtacattcagcggttttgtcaagtccgcaacaccataccgtgcatccctgcacacgcggtgatctacgcgttcagggggggtgtgcggcacaaccgcatgctcgagaagatcgcctccaaggagccccagaccaccgcggagctttttcagctcgcggaccgtgtggctcgcaaggaggaggcctggacctggaactcctccggttccggtgtggcagcttcggccgcccccggatccgctgctcggtcagggtggcgggacaggaggaggaagaagaggtcggcccattccgacgacgagggtcacgtcctcgccgtcgagggcgctttgtgggccacccgaaaggggaggcctgcgagcgacaaaaagaaggaggccggcgctcccagtagggagcgcccgaccggcaggtggtgcaccgtgcacaatacctccctccacgacctcgtggactgccgcgcggtcaaaagtttggctgagcggacgaggaagtgggaggaggagaggaggcaggagcgccgtgagggcaataccccggcggctcccgccggcaaccggcgtggtgaggccaagcagaaggcccccgccgaggacatcaacgatgccgacgatgacctagggttccaggagcctgaggccaccgtcgccaccgttgatgggggagcgtgtgctcacgcttctcaccggagcctcaaggccatgaagcgagagcttctggccgtggcccctacccatgaggcgacgcggcgggcacggtggtcggaggttgccctcaccttcgaccagaccgaccacccaccgtgcgttgcccggggaggacagatcgcgatggtggtttctcccaccgtttgcaatgtgaagttggggcgtgtcctcattgacgggggtgcagccctcaacatcctttcccccgctgcctttgacgccatcaaggccccggggatggtgctccggccgtcccagccgatcatcggtgtgacgccggggcacacttggccgctaggccatatcgacctcccggtcaccttcggtggttccgccaacttccgcacggagcgggtgaacttcgatgtggcggacctcagtctgccctacaacgcggtcctggggaggcccgcgttggtgaagttcatggtggcggtccactacgcctatctccagatgaagatgccgggccccggtggccccatcaccgtccatggcgacctcaaagtcgcgcttgcttgcatggagcagcgcgcggaccacctcgccgcggcatccaagcccgcgggtggcgacgagaggctcagcacctccgtcccagccgccccgaggcagcggatgatcacgtgcgacgaggtcccgatcaagcaggaagacgcgctcgtctccttcctgcgggcaaacgccgacgtcttcgcctggagaccggcggacatgcccggggtccccagggaggtgattgagcaccgtctcgccgtacggccgggcgcaaggccggtccggcagaaagtgcggcggcaggccccggaacgtcaagccttcatccgcgaggaggtggcgcgacttctggaggccggattcatccgagaggtcatccatccggagtggctggcgaacccggtcgtcgttcccaaggcgaacggcaagcttcggatgtgcatcgactacaccgaccttaacaaggcatgtcctaaggacccttaccccctgccacgcatagatcagattgtcgactccaccgcggggtgcgaccttttgtgttttctagatgcatactctggtcctacttttcaacgtactactcgaatttctttgggtagccaaataggacgtaatgttgaggcctatgttgatgacttggttgtgaaaacacgcaaccaggagaccttactctcagatctagcggaaactttcgaaagtctccgcaccgcccgcataaagctgaaccccgacaagtgcgtgttcggcgtgcctgcgggcaagcttctcgggttcttgatctctgcccgaggcattgaggccaaccccgagaagatacgagctatagagcggatgcgcccccccagcaagcttagggatgtgcaatgcgtcactggctgtggtcagcgcagcgttggtcgtggagcgcgacgaggacgaccctcgctccgcgcatccccaccctgtgtcgactcgacccgggagagagcagggaggagaggcccccgagccgaacggtggcccgaggcccccaacgaccggaactggccctctgcccgcttgtccgacggtgccaggcgcccccgaccccaggatggccccaaggccactgcgggaaggccgcgcctgtcgccctctgaccccgaggtcgtcggcacagaagccgagtgcgccccgcgcggcctctcggacaaagagcaccctgtatcgactcgacccgggagagagcagggaggagaggcccccgagccgaacggcggcccgaggcccccgacgaccggagctggccctctgcccgcttgtccgacggtgccaggagcccccgacccccaggatggccccggggccactgcgggaaggccgcgcctgtcgccttccgaccccgaggtcgtcgacacagaagccgagtgcgccccgcgcggcctctcggacgaaaagcgccctggagatgcggcccctggcgaagaggatcggccccgacaaaaggtgcagcggcccgtctactttgttagtgaggccctccgggacgccaagacccaataccctcaggcccagaagatgctttacgctattctgatggcttcgatgcgccattatttccaggcgcatcgggtcacggtggttacgtcctaccccctcggccaaatcttgcataaccgagagggtactggacgggtggtgaaatgggcaatcgaactctctgagttcgatttgcactttgaaccacgccacgcgatcaagagccaggccctcgccgactttgtggcagagtggacaccggctcccgagcccgtctccatccccgaggtcagctcgggcccttcgcagctgcctcacaccgcctattgggtgatgcaattcgacggctccctatctcttcagggcgccggtgcgggggttacgttgacctcgccgagcggagatgtccttaaatacctggtccacctcgactttcgggcaaccaacaatatggcagagtacgagggactccttgcgggactcagagtggcggttggactggggatccgccgcctcctggtgttaggcgactctcagttggtcgttaaccaggtctccaaggagtaccagtgctctgacccgcagatggatgcttacgtgcgccaggtgcggcgtatggagcgccattttaacgggatagagcttcggcacgtgcccagacgggataacgcggtcgccgacgaactctcaaggctcgcttcctcgcgagcccagaccccaccaggcgcctttgaagaaaggcttgcccagccgtcggcgcgacccgaccccctaggggagacggacgcgcctgaacggcccccgaggcccgtcggagtccaggcctcgggacccgaggggagcgctcccagctcccttagattgattgcttggatcgctgagatccaggcgtacctcgcagataagactctacccgaggaccgcgaagggagtgaacgcgtccagcgcatctccaagcactacgtgctggtggaagggaccctctatcggcacgcggctaacggagtcatcctgaagtgcattcctcgggaacaaggcatcgagcttcttgccgatatccatgaaggcgagtgcggagcccactctgcctcacgcaccttggttggcaaggcctttcgtcagggtttctattggccgacggctcgcaacgatgcggtcgacctggtccggcggtgcagggcgtgccagttccacgccaagcaaacccatcagccggcccaggccctgcagaccatacctctttcatggccgtttgctgtctgggggctcgatatcctgggtccgtttagacgggccccgggcgggttcgagtatctgtatgtcgctatcgacaagttcactaagtggcccgaggcttatccggtcatcaagatcgataagcactccgcacttaaattcatcaggggtatcactgctcggtttggggtgcctaaccgtatcattacggataacggcacccagttcactagtgagctcttcggtggctactgcgaagacatgggcattaagctctgcttcgcctctcccacccaccccagaagcaatggccaagtggagcgcgccaacgcagaaatcctcaagggcctcaaaaccaagaccttcaaattcctcaagaagcacggcgactcgtggatcgaggagctgctagcggtgctctgggcaaaccgaaccacgccaagccgagcaaccggggaaacgcctttcttcctcgtctacggcgcggaggcggttctcccatccgagctcaccctgaggtcccctcgggccaccatgtactgcgaggctgatcaagatcagctttgcagagatgacctcgactacttggaagaacgaaggcggcgcgcggcccttcgagccgcgcgctaccagcagagcctgcggcgctaccatcagcgtcacgtccgggcccgatcactctgcgtagacgacctcgtcctacgccgcgtccaaacgcgtgctggactgagtaagctctcaccaatgtgggagggtccgtatcgagtgatcggcgtcccccggccgggctccgttcggctggccacgggcgacggcacagagctgcctaacccgtggaacatcgaacaccttcgtcgcttctacccctag

SEQ ID NO: 84174 - DNA, 4926 bp, Oryza sativa
  Clone ID: PAT_MRT4530_83436C.1
atgacggcgcagcagcgcttaggcgccggctggcggtcctccgccaccaaggccactggcgttgctactgctggctccgtgtcgtcgaggcggagggcgcggcgagcggcggccgctacccgccgttcgtccgccattccctcgtcaacgcctccaacccaagaagatgtgcgtagggggccagatgcccgcttcaatatcgagcgccggcgcaatgatcgccgtgctgcccatgcatcggagggcgcttcctcgtccggagcgccacttcggtccgggcacgggggccagccccccgtgtccccggttggcggtgccggctgtcgagcctttgtggcgagccttcggaacgtccgttggcccccaaggttccggcccaccatcaccgaaaaatacgacggaagcgtcaaccccgccgagtttctccagatctacacgactaggatcgaggccgccgggggtgacgacagggtcatggcgaatttcttccccatggccctgaaaggacaggcgcggggttggctaatgaacttgccacccgcgtcggtccactcttgggaggatttgtgccagcagttcaccatgaacttccaaggcacatatccgcgcccagcggttttgtcaagtccgcaacaccataccgtgcatcccagcacacgcggtgatctacgcgttcaggggggcgtgcgccacaaccgcatgctcgagaagatcgcctccaaggagccccagaccaccgcggagctttttcagctcgcggaccgtgtggctcgcaaggaggaggcctggacctggaactcctcctgttccggtgtggcagcttcggccgcccccggatccgccgctcggtcagggcgacgggacaggaggaggaagaagaggtcggcccattccgacgacgagggtcacgtcctcgccgtcgagggcgctttgcgggccacccgaaaggggaggcctgcgagcgacaaaaagaaggaggccggcgctcctagcagggagcgcccgaccggcaagtggtgcaccgtgcacaacacctccctccacgacctcgcggactgccgcgcggtcaaaagtttggctgagcggacgaggaagtgggaggaggagaggaggcaggagcgccgtgagggcaataccccggcggctcccgccggcaaccggcgaggtgaggccaagcagaaggcccccgccgaggacatcaacgatggcgacgatgacctagggttccaggagcctgaggccactgtcgccaccgttgatgggggagcgtgtgctcacgcttctcgccggagcctcaaggccatgaagcgagagcttctggccgtggcccctacccatgaggtgacgcggcgggcgcggtggtcggaggttgccctcaccttcgaccagaccgaccacccaccgtgcgttgcccggggaggacagatcgcgatggtggtttcccccaccgtttgcaatgtgaagttggggcgtgtcctcgttgacgggggtgcagccctcaacatcctttcccccgctgcctttgacgccatcaaggccccggggatggtgctccggccgtcccagccgatcatcggtgtgacgccggggcacacttggccgctaggccatatcaacctcccggtcaccttcggtggttccgccaacttccgcacggagcgggtgaacttcgatgtggcggacctcagtctgccctacaacgcggtcctggggaggcccgcgttggtgaagttcatggtggcggtccactacgcctatctccagatgaagatgccgggccccggtggccccatcaccgtccatggcgacctcaaagtcgcgcttgcttgcatggagcagcgcgcggaccacctcgccgcggcatccaagcccgcgggtggtgacgagaggctcagcacctccgtcccagccgccccgaggcagcggatgatcacgtgcgacgaggtcccgatcaagcaggaagacgcgctcgtctccttcctacgggcaaacgccgacgtcttcgcctggagaccggcggacatgcccggggtccccagggaggtgattgagcaccgtctcgccgtacggccgggcgcaaggccggtccggcagaaagtgcggcggcaggccccggaacgtcaagccttcatccgcgaggaggtggcgcgacttctggaggccggattcatccgagaagtcatccatccggagtggctggcgaacccggtcgtcgttcccaaggcgaacggcaagcttcggatgtgcatcgactacaccgaccttaacaaggcatgtcctaaggacccttaccccctgccacgcatagatcagattgtcgactccaccgcgggccaaataggacgtaatgttgaggcctatgttgatgacttggttgtgaaaacacgcaaccaggagaccttactctcggatctagcggaaactttcgaaagtctccgcaccgcccgcataaagctgaaccccgacaagtgcgtgttcggcgtgcctgcgggcaagcttctcgggttcttgatctctgcccgaggcattgaggccaaccccgagaagatacgagctatagagcggatgcgcccccccagcaagcttagggatacggaggaggctgaacgggccctcactcagttgaaggcgtacctcagttctcccccagtcctggtcgccccggagccagatgagccgttgctactctacctggcggcaactccgcaggtggtcagcgcggcgttggtcgtggagcgcgacgaggacgaccctcgctccgcgcatccccaccctgtgtcgactcgacccgggagagagcagggaggagaggcccccgagccgaatggtggcccgaggcccccaacgaccggaactggccctctgcccgcttgtccgacggtgccaggcgcccctgatccccaggatggccccggggccactgcgggaaggccgcgcctgtcgccctctgaccccgaggtcgtcggcacagaagccgagtgcgccccgtgcggcctctcggacgaagagcaccctgtatcgactcgacccgggagagagcagggaggagaggcccccgagccgaacggcggcccgaggcccccgacgaccggagctggccctctgcccgcttgtccgacggtgccaggagcccccgacccccaggatggccccggggccactgcgggaaggccgcgcctgtcgccttccgaccccgaggtcgtcgacacagaagccgagtgcgccccgcgcggcctctcggacgaaaagcgccctggagatgcggcccctggcgaagaggatcggccccgacaaaaggtgcaacggcccgtctactttgttagtgaggccctccgggacgccaagacccgataccctcaggcccagaagatgctttacgctattctgatggcttcgaggaagttgcgccattatttccaggcgcatcgggtcacggtggttacgtcctaccccctcggccaaatcttgcataaccgagagggtactggacgggtggtgaaatgggcaatcgaactctctgagttcgatttgcactttgaaccacgccacgcgatcaagagccaggccctcgccgactttgtggcagagtggacaccggctcccgagcccgtctccatccccgaggccagctcgggcccttcgcagctgcctcacaccgcctattgggtgatgcagttcgacggctccctgtctcttcagggcgccggtgcgggggtcacgttgacctcgccgagcggagatgtccttaaatacctggtccgcctcgactttcgggcaaccaacaatatggcagagtacgagggactccttgcgggactcagagtggcggctggactggggatccgccgcctcctggtgttaggcgactctcagttggtcgttaaccaggtctccaaggagtaccagtgctctgacccgcagatggatgcttacgtgcgccagggtttctattggccgacgactctcaacgatgcggtcgacctggtccggcggtgcagggcgtgccagttccacgccaagcaaacccatcagccggcccaggccctgcagaccatacctctttcatggccgtttgctgtctgggggctcgatatcctgggtccgtttagacgggccccgggcgggttcgagtatctgtatgtcgctatcgacaagttcactaagtggcccgaggcttatccggtcatcaagatcgataagcactccgcacttaaattcatcaggggtatcactgctcggtttggggtgcctaaccgtatcattacggataacggcacccagttcactagtgagctcttcggtgactactgcgaagacatgggcattaagctctgcttcgcctctcccgcccaccccagaagcaatggccaagtggagcgcgccaacgcagaaatcctcaagggcctcaaaaccaagaccttcaacatcctcaagaagcacggcgactcgtggattgaggagctgccagcggtgctctgggcgaaccgaaccacgccaagccgagcaaccggggaaacgcctttcttcctcgtctacggcgcggaggcggttctcccatccgagctcaccctgaggtcccctcgggccaccatgtactgcgaggctgatcaagatcagcttcgcagagatgacctcgactacttggaagaacgaaggcggcgcgcggcccttcgagccgcgcactaccagcagagcctgcggcgctaccatcagcgtcacgtccgggcccgatcactctgcgtcgacgacctcgtcctacgccgtgtccaaacgcgtgctggactgagcaagctctcaccaatgtgggagggtccgtatcgagtgatcggcgtcccccggccgggctccgttcggctggccacgggcgacggcacagagctgtctaacccgtggaacatcgaacaccttcgtcacttctacccctag

SEQ ID NO: 84175 - DNA, 530 bp, Oryza sativa
  unsure (1)..(530): unsure at all n locations
  Clone ID: PAT_MRT4530_83437C.1
ncaagaagcaattcttnagctcaatcagcaacaacatctatctccttcttncttagttaagtccttcgccctcccaagaagaagaagatgtcttgctgcggcggcaactncggctgcggcanggctgccagtgcggcggcggctgcggcggntgcaagntgttccctgatgtggaggccacagccaccaccaagaccttcgncctcgntnctccatccaacaaggcgagctctggaggaatgngnggatngcgnttnaagagcgncgagaacggcggctntcgggctngcaacaccttgcaagtgttngcaccanctancagcgtctgctnctggnttnctnctgcaacttgaatcttatcgtcgtacgttgaccnggntngcatnagngtttnatcgtatgggatantactacttgttcgatnagaagttttngatcngaggccttaaatttngttngnatttngtancccagtttantattttaggcaaggcctngccttttggtnttncggctnaaanaaaancntt

SEQ ID NO: 84176 - DNA, 5835 bp, Oryza sativa
  Clone ID: PAT_MRT4530_83438C.1
atggccgaacgggcagtggcgcacaatctctctccgagcgctagcggtgaagacggggagcagaacccgcgccgtcgagctcgtactccactgtccccctctcgccgaagtcttgggtgggaggaggcgctcgaggaggtcgaaagatccgtgacttcgccgcacgcgagcgatggagaaggacggcgagacggggagcgtcgtctcctcgtctacggagatggcagcacgccccagggcgcgctccaggctgcgggcgcactcctacgtcacccgcccgtcatccctgatccagagactccaacccgacgttggctagatgacgtggccaatttggtcatgacggcgcagcagcgcctaggcgccgggcgcttcctcgtccggagcgccacttcagtccgggcacggggccagccccccgtgtccccggttggcggtgccggctatcgagcctttgtggcgagccttcggaacgtccgttggcccccaaggttccagcccaccatcaccgaaaaatacgacggaagcgtcaaccccgccgagtttctccagatctacacgactgggatcgaggccgccgggggtgacgacagggtcatggcgaatttcttccccatggccctgaaaggacaggcgcggggttggctaatgaacttgccacccgcgtcggtccactcttgggaggatttgtgccagcagttcaccatgaacttccagggcacatatccgcgcccaggtgaagaagcggacttgcacgcggtacagcgaggggacgatgagtttcttcgctcgtacattcagcggttttgtcaagtccgcaacaccataccgtgcatccctgcacacgcggtgatctacgcgttcagggggggcgtgcgacacaaccgcatgctcgagaagatcgcctccaaggagccccagaccaccacggagctttttcagctcgcggaccgtgtggctcgcaaggaggaggcctggacctggaactcctccggttccggtgtggcagcttcggccgcccccggatccgccgctcggtcagggcgacgggacaggaggaggaagaagaggtcggcccattccgacgacgagggtcacgtcctcgccgtcgagggcgctttgcgggccacccgaaaggggaggcctgcgagcgacaaaaagaaggaggccggcgctcccagcagggagcgcccgaccggcaagtggtgcaccgtgcacaacacctccctccacgacctcgcggactgccgcgcggtcaaaagtttggctgagcggacgaggaagtgggaggaggagaggaggcagaagcgccgtgagggcaataccccggcggctcccgccggcaaccggcgaggtgaggccaagcagaaggcccccgccgaggacatcaacgatggcgacgatgacctagggttccaggagcctgaggccactgtcgccaccgttgatgggggagcgtgtgctcacgcttctcgccggagcctcaaggccatgaagcgagagcttctggccgtggcccctacccatgaggcgacgcggcgggcgcggtggtcggaggttgccctcaccttcgaccagaccgaccacccactgtgcgttgcccggggaggacagatcgcgatggtggtttcccccaccgtttgcaatgtgaagttggggcgtgtcctcgttgacgggggtgcagccctcaacatcctttcccccgctgcctttgacgccatcaaggccccggggatggtgctccggccgtcccagccgatcatcggtgtgacgccggggcacacttggccgctaggctatatcgacctcccggtcaccttcggtggttccgccaacttccgcacggagcgggtgaacttcgatgtggcggacctcagtctgccctacaacgcggtcctggggaggcccacgttggtgaagttcatggtggcggtccactacgcctatctccagatgaagatgccgggccccggtggccccatcaccgtccatggcgacctcaaagtcgcgcttgcttgcatggagcagcgcccggaccacctcgccgcggcatccaagcccacgggtggcgacgagacgctcagcacctccgtcccagccgccccgaggcagcagatgatcacgtgcgacgaggtcccgatcaagcaggaagacgcgctcgtctccttcctgcgagcaaacgccgacgtcttcgcctggagaccggcggacatgcccggggtccccagggaggttattgagcaccgtctcgccgtacggccgggcgcaaggccggtccggcaaaaagtgcggcggcaggccccggaacgtcaagccttcatccgcgaggaggtggcgcgacttctggaggccggattcatccgagaggtcatccatccggagtggctggcgaacccggtcgtcgttcccaaggcgaacggcaagcttcggatgtgcatcgactacaccgaccttaacaaggcatgtcctaaggacccttaccccctgccacgcatagatcagattgtcgactccaccgcggggtgcgaccttttgtgttttctagatgcatactctggttatcatcagattcgcatggctatggaggatgaggaaaaaactgcattcattacccccataggaacttattgttatacgacaatgcctttcgggttaaagaatgcaggtcctacttttcaacgtactactcgaatttctttgggtagccaaataggacgtaatgttgaggcctatgttgatgacttggttgtgaaaacacgcaaccaggagaccttactctcggatctagcggaaactttcgaaagtctccgcaccgcccgcataaagctgaaccccgacaagtgcgtgttcggcgtgcctgcgggcaagcttctcgggttcttgatctctgcccgaggcattgaggccaaccccgagaagatacgagctatagagcgaatgcgcccccccagcaagcttagggatgtgcaatgcgtcactggctgtatggccgccctaagtcggttcatatcgaggctaggagagaaggcgctacccctatttaagctcctcaaacgctccgggccgtttatctggatggaggaggctgaacgggccctcactcagttgaaggcgtacctcagttctcccccagtcctggtcgccccagagccagatgagccgttgctactctacctggcggcaactccgcaggtggtcagcgcggcgttggtcgtggagcgcgacgaggacgaccctcgctccgcgcatccccaccctgtgtcgactcgactcgggagagagcagggaggagaggcccccgagccgaacggtggcccgaggcccccaacgaccggaactggccctctgcccgcttgtccgacggtgccaggcgcccccgacccccaggatggccccggggccactgcgggaaggccgcgcctgtcgccctctgaccccgaggtcgtcggcacagaagccgagtgcgccccgcgcggcctctcggacgaagagcaccctgtatcgactcgacccgggagagagcagggaggagaggcccccgagccgaacggcggcccgaggcccccgacgaccggagctggccctctgcccgcttgtccgacggtgccaggagcccccgacccccaggatggccccggggccactgcgggaaggccgcgcctgtcgccttccgaccccgaggtcgtcgacacagaagccgagtgcgccccgcgcggcctctcggacgaaaagcgccctggagatgcggcccctggcgaagaggatcggccccgacaaaaggtgcagcggcccgtctactttgttagtgaggccctccgggacgccaagacccgataccctcaggcccagaagatgctttacgctattctgatggcttcgaggaagttgcgccattatttccaggcgcatcgggtcacggtggttacgtcctaccccctcggccaaatcttgcataaccgagagggtactggacgggtggtgaaatgggcaatcgaactctctgagttcgatttgcactttgaaccacgccacgcgatcaagagccaggccctcgccgactttgtggcagagtggataccggctcccgagcccggcgccggtgtgggggtcacgttgacctcgccgagcggagatgtccttaaatacctggtccgcctcgactttcgggcaaccaacaatatggcagagtacgagggactctttgcgggactcagagtggcggctggactggggatccgccgcctcctggtgttaggcgactctcagttggtcgttaatcaggtctccaaggagtaccagtgctctgacccgcagatggatgcttacgtgcgccaggtgcggcgtatggagcgccattttgacgggatagagcttcggcacgtgcccagacgggataacgcggtcgccgacgaactctcaaggctcgcttcctcgcgagcccagaccccaccgggcgcctttgaagaaaggcttgcccagccgtcggcgcgacccgaccccctaggggagacggacgcgcctgaatggcccccgaggcccgtcggagtccaggcctcgggacccgaggggggcgctcccagctcccttagattgattgcttggatcgctgagatccaggcgtacctcgcagataagactctacccgaggaccgcgaagggagtgaacgcgtccagcgcatctccaagcgctacgtgctggtggaagggaccctctatcggcacgcggctaacggagtcctcctgaagtgcattcctcgggaacaaggcgtcgagcttcttgccgatatccatgaaggcgagtacagagcccactctgcctcacgcaccttggttggcaaggcctttcgccagggtttctattggccgacggctctcaacgatgcggtcaacctggtccggcggtgcagggcgtgccagttccacgccaagcaaacccatcagccggcccaggccctgcagaccatacctctttcatggccatttgctgtctgggggctcgatatcctgggtccgtttagacgggccccgggcgggtttgagtatttgtatgtcgctatcgacaagttcactaagtggcccgaggcttatccggtcatcaagatcgataagcactccgcacttaaattcatcaggggtatcactgctcggtttggggtgcctaaccgtatcattacggataacggcacccagttcactagtgagctcttcggtgactactgcgaagacatgggcattaagctctgcttcgcctctcccgcccaccctagaagcaatggccaagtggagcgcgccaacgcagaaatcctcaagggcctcaaaaccaagaccttcaacatcctcaagaagcacggcgactcgtggatcgaggagctgccagcggtgctctgggcgaaccgaaccacgccaggccgagcaaccggggaaacgcctttcttcctcgtctacggcgcggaggcggttctcccatccgagctcaccctgaggtcccctcgggccaccatgtactgcgaggctgatcaagatcagcttcgcagagatgacctcgactacttggaagaacgaaggcggcgcgcggcccttcgagccgcgcgctaccagcagagcctgcggcgctaccatcagcgtcacgtccgggcccgatcactctgcgtcgacaacctcgtcctacgccgtgtccaaacgcgtgctggactgagcaagctctcaccaatgtgggagggtccgtatcgagtgatcggcgtccctcggccgggctccgttcggctggccacgggcgacggcacagagctgcctaacccgtggaacatcgaacaccttcgtcgcttctacccctag

SEQ ID NO: 84177 - DNA, 5223 bp, Oryza sativa
  Clone ID: PAT_MRT4530_83439C.1
atggagcgaggaggaagaacggagagagacatcaccgagaagaggaggggcgctgtgacgagaggccggcggcgcgggagtaatctctccggcctcgggccggggaagaggaaggagagggcgcggccgaagtccccttccgcgtcctcgaacgcaccggctctcccggcgcttggcgaaggacggcggaggcgagacagagcacgggggcggcggcaacgggggggcgtgcggcacaaccgcatgctcgagaagatcgcctccaaggagccccagaccaccgcggagctttttcagctcgcggaccgtgtggctcgcaaggaggaggcctggacctggaactcctctggttccggtgtggcagctccggccgcccccgggcccgctgctcggtcagggcggcgggacaggaggaggaagaagaggtcggcccattccgacgacgagggtcacgtcctcgccgtcgagggcgcttcgcgggccacccgaaaggggaggcctgcgagcgataaaaagaaggaggccggcgctcccagtagggagcgcccgaccggcaagtggtgcaccgtgcacaacacctccctccacgacctcgtggactgccgcgcggtcaaaagtttggctgagcggacgaggaagtgggaggaggagaggaggcaggagcgccgtgagggcaataccccggcggctcccgccggcaaccggcgaggtgaggccaagcagaaggcccccgccgaggacatcaacgatggcgacgatgacctagggttccaggagcctgaggccaccgtcgccaccgttgatgggggagcgtgtgctcacgcttctcgccggagcctcaaggccatgaagcgagagcttctggccgtggcccctacccatgaggcgacgcggcgggcgcggtggtcggaggttgccctcaccttcgaccagaccgaccacccaccgtgcgttgcccggggaggacagatcgcgatggtggtttcccccaccgtttgcaatgtgaagttggggcgtgtcctcattgacgggggtgcagccctcaacatcctttcccccgctgcctttgacgccatcaaggccccggggatggtgctccggccgtcccagccgatcatcggtgtgacgccggggcacacttggccgctaggccatatcgacctcctggtcaccttcggtggttccgccaacttccgcacggagcgggtgaacttcgatgtggcggacctcagtctgccctacaacgcggtcctggggaggcccgcgttggtgaagttcatggtggcagtccactacgcctatctccagatgaagatgccgggccccggtggccccatcaccgtccatggcgacctcaaagtcgcgcttgcttgcatggagcagcgcgcggaccacctcgccgcggcatccaagcccgcgggtggcgacgagaggctcagcacctccgtcccagccgccccgaggcagcggatgatcacgtgcgacgaggtcccgatcaagcaggaagacgcgctcgtctccttcctgcgggcaaacgccgacgtcttcgcctggagaccggcggacatgcccggggtccccagggaggtgattgagcaccgtctcgccgtacggccgggcgcaaggccggtccggcagaaagtgcggcggcaggccccggaacgtcaagccttcatccgcgaggaggtggcgcgacttctggaggccggattcatccgagaggtcatccatccggtgtggctggcgaacccggtcgtcgttcccaaggcgaacggcaagcttcggatgtgcatcgactacaccgaccttaacaaggcatgtcctaaggacccttaccccctgccacgcatagatcagattgtcgactccaccgcggggtgcgaccttttgtgttttctagatgcatactctggttatcatcagattcgcatggctagggaggatgaggaaaaaactgcattcattacccccataggaacttattgttatatgacaatgcctttcgggttaaagaatgcaggtcctacttttcaacgtactgctcgaatttctttgggtagccaaataggacgtaatgttgaggcctatgttgatgacttggttgtgaaaacacgcaaccaggagaccttactctcggatctagcggaaactttcgaaagtctccgcaccgcccgcataaagctgaaccccgacaagtgcgtgttcggcgtgcctgcgggcaagcttctcgggttcttgatctctgcccgaggcattgaggccaaccccgagaagatacgagctatagagcggatgcgcccccccagcaagcttagggatgtgcaatgcgtcactggctgtatggccgccctaagtcggttcatatcgaggctgggagagaaggcgctacccctatttaagctcctcaaacgctccgggccgtttatctggacggaggaggctgaacgggccctcactcagttgaaggtgtacctcagttctcccccagtcctggtcgccccggagccagatgagccgttgctgctctacctggcggcaactccgcaggtggtcagcgcggcgttggtcgtggagcgcgacgaggacgaccctcgctccgcgcatccccaccctgtgtcgactcgacccgggagagagcagggaggagaggcccccgagccgaacgatggcccgaggcccccgacgaccagagctggccctctgcccgcttgtccgacggtgccaggcgcccccgacccccaggatggccccggggccactgcgggaaggccacgcctgtcgccctctgaccccgaggtcgtcggcacagaagccgagtgcgccccgcgcggcctctcggacgaagagcaccctgtatcgactcgacccgggagagagcagggaggagaggcccccgagccgaacggcggcccgaggcccccgacgaccggagctggccctctgcccgcttgtccgacggtgccaggagcccccgacccccaggatggccccggggccattgcgggaaggccgcgcctgtcgccttccgaccccgaggtcgtcaacacagaagccgagtgcgccccgcgcggcctctcggacgaaaagcgccctggagatgcggcccctggcgaagaggatcggccccgccaaaaggtgcagcggcccgtctactttgttagtgaggccctccgggacgccaagacccgataccctcaggcccagaagatgctttacgctattctgatggcttcgaggaagttgcgccattatttccaggcgcatcgggtcacggtggttacgtcctaccccctcggccaaatcttgcataaccgagagggtactggacgggtggtgaaatgggcaatcgaactctctgagttcgatttgcactttgaaccacgccacgcgatcaagagccaggccctcgccgactttgtggcagagtggacaccggctcccgagcccgtctccatccccgaggccagctcgggcccttcgcagctgcctcacaccgcctattgggtgatgcagttcgacggctccctgtctcttcagggcgccggtgcgggggtcacgttgacgtcgccgagcggagatgtcctcaaatacctggtccgcctcgactttcgggcaaccaacaatatggcagagtacgagggactccttgcgggactcagagtggcggctggactggggatccgccgcctcctggtgttaggcgactctcagttggtcgttaaccaggtctccaaggagtaccagtgctctgacccgcagatggatgcttacgtgcgccaggtgcggcgtatggagcgccattttgacgggatagagcttcggcacgtgcccagacgggatagcgcggtcgccgacgaactctcaaggctcgcttcctcgcgagcccagaccccaccgggcgcctttgaagaaagacttgcccagccgtcggcgcgacccgaccccctaggggagacggacgtgcctgaacggcccccgaggcccgtcggagtccaggcctcgggacccgaggggagcgcttccagctcccttagattgattgcttggatcgctgagatccaagcgtacctcgcagataagactctacccgaggaccgcgaagggagtgaacgcgtccagcgcatctccaagcgctacgtgctggtggaagggaccctctatcggcacgcggctaacggagtcctcctgaagtgcattcctcgggaacaaggcgtcgagcttcttgccgatatccatgaaggcgagtgcggagcccactctgcctcacgcaccttggttggcaaggcctttcgccaggatttctattggccgacggctctcaacgatgcggtcgacctggtccggtggtgcagggcgtgccagttccacgccaagcaaacccatcagccggcccaggccctgcagaccatacctctttcatggccgtttgctgtctggggctcgatatcctggttcactaagtggcccgaggcttatccggtcatcaagatcgataagcactccgcacttaaattcatcaggggtatcactgctcggtttggggtgcctaaccgtatcattacggataacggcacccagttcactagtgagctcttcggtgactactgcgaagacatgggcattaagctctgcttcgcctctcccgcccaccccagaagcaatggccaagtggagcgcgccaacgcagaaatcctcaagggcctcaaaaccaagaccttcaacatcctcaagaagcacggcgactcgtggatcgaggagctgccagcggtgctctgggcgaaccgaaccacgccaagccgagcaaccggggaaacgcctttcttcctcgtctacggcgcggaggcggttctcccatccgagctcaccctgaggtcccctcgggccaccatgtactgcgaggctgatcaagatcagcttcgcagagatgacctcgactacttggaagaacgaaggcggcgcgcggcccttcgagccgcgcgctaccagcagagcctgcggcgctaccatcagcgtcacgtccgggcccgatcactctacgttgacgacctcgtcctacgccgcgtccaaacgcgtgctggactgagcaagctctcaccaatgtgggagggtccgtatcgagtgatcggcgtcccccggccgggctccgttcggctggccacaggtgacggcacagagctgcctaacccgtggaacatcgaacaccttcgtcgcttctacccctag

SEQ ID NO: 84178 - DNA, 324 bp, Oryza sativa
  Clone ID: PAT_MRT4530_8343C.1
gcgaggcgtttttttgcgaaacaccgataagtgcggagtcggcgcgtaatctcgagaaagaaccctgcggtttttccttccttgcagaagcagaatcccgctcctgcaccctgggtcccaaatgggggtagttttggcatgcccgccgagaaacttagcccggccggcaacaggctcgagcgaatctgggcccgggcatcattaggtggccggggggtgcactcggcagacccacgagagcgacggggtgcccatcaggcacaggcccctcccgtatagtgccagtgctaaatctcaacgctacccctctttggcccccaggct

SEQ ID NO: 84179 - DNA, 6074 bp, Oryza sativa
  Clone ID: PAT_MRT4530_83440C.1
atggccgaacgggcagtggcgcacaatctctctccgagcgctagcggtgacgacggggagcagaacccgcgccgtcgagctcgtactccactgtccccctctcgccgaagtcttgggcgggaggaggcgctcgaggaggtcgaaagatccgcgacttcgccgcacgcgggcgatggagaaggacggcgagacggggagcgtcgtctcctcgtctacggtgatggcagcacgccccagggcgcgctccaggctgcgggcgcgctcctgcgtcacccgcccgtcatccctgatccagagactccaacccgacgttggctagatgacgtggccaatttggtcatgacggcgcagcagcgcctacgcgccggctggcggtcctccgccaccaaggccactggcgttgctactgctggctccgtgtcgtcgaggcggagggcgcggcgagcggcggccgctacccgccgttcgtccgccattccctcgtcaacgcctccaacccaagaagatgtgcgtagggggccagatgcctgcttcaatatcgagcgccggcgcaatgatcgccgtgctgcccacgcatcggagggcgcttcctcgtccggagcgccacttcggtccgggcacgggggccagccccccatgtccccggttggcggtgccggctgtcgagcctttgtggcgagccttcggaacgtccgttggcccccaaggttccggcccaccatcaccgaaaaatacgacggaagcgtcaaccccgccgagtttctccagatctacacgactgggatcgaggccgccgggggtgacgacagggtcatggcgaatttcttccccatggccctgaaaggacaggcgcggggttggctaatgaacttgccacccgcgtcggtccactcttgggaggatttgtgccagcagttcaccatgaacttccaaggcacatatccgcgcccaagtgaagaagcggacttgcacgcggtacagcgaggggacgatgagtctcttcgctcgtacattcagcggttttgtcaagtccgcaacaccataccgtgcatccctgcacacgcggtgatctacgcgttcagggggggtgtgcggcacaaccgcatgctcgagaagatcgcctccaaggagccccagaccaccgcggagctttttcagctcgcggaccgtgtggctcgcaaggaggaggcctggacctggaactcctccggttccggtgtggcagctccggccgcccccgggcccgctgctcggtcagggtggcgggacaggaggaggaagaagaggtcggcccattccgacgacgagggtcacgtcctcgccgtcgagggcgcttcgtgggccacccgaaaggggaggcctgcgagcgacaaaaagaaggaggccggcgctcccagtagggagcgcccgaccggcaggtggtgcaccgtgcacaatacctccctccacgacctcgtggactgccgcgcggtcaaaagtttggctgagcggacgaggaagtgggaggaggagaggaggcaggagcgccgtgagggcaataccccggcggctcccgccggcaaccggcgtggtgaggccaagcagaaggcccccgccgaggacatcaacgatgccgacgatgacctagggttccaggagcctgaggccaccgtcgccaccgttgatgggggagcgtgtgctcacgcttctcaccggagcctcaaggccatgaagcgagagcttctggccgtggcccctacccatgaggcgacgcggcgggcacggtggtcggaggttgccctcaccttcgaccagaccgaccacccaccgtgcgttgcccggggaggacagatcgcgatggtggtttctcccaccgtttgcaatgtgaagttggggcgtgtcctcattgacgggggtgcagccctcaacatcctttcccccgctgcctttgacgccatcaaggccccggggatggtgctccggccgtcccagccgatcatcggtgtgacgccggggcacacttggccgctaggccatatcgacctcccggtcaccttcggtggttccgccaacttccgcacggagcgggtgaacttcgatgtggcggacctcagtctgccctacaacgcggtcctggggaggcccgcgttggtgaagttcatggtggcggtacactacgcctatctccagatgaagatgccgggccccggtggccccatcaccgtccatggcgacctcaaagtcgcgcttgcttgcatggagcagcgcgcggaccacctcgccgcggcatccaagcccgcgggtggcgacgagaggctcagcacctccgtcccagccgccccgaggcagcggatgatcacgtgcgacgaggtcccgatcaagcaggttgccctgggcgacggccccgtctccttcctgcgggcaaacgccgacgtcttcgcctggagaccggcggacatgcccggggtccccagggaggtgattgagcaccgtctcgccgtacggccgggcgcaaggccggtccggcagaaagtgcggcggcaggcccaggaacgtcaagccttcatccgcgaggaggtggcgcgacttctggagaccggattcatccgagaggtcatccatccggagtggctggcgaacccggtcgtcgttcccaaggcgaacggcaagcttcggatgtgcatcgactacaccgaccttaacaaggcatgtcctaaggacccttaccccctgccacgcatagatcagattgtcgactccaccgcggggtgcgaccttttgtgttttctagatgcatactctggttatcatcagattcgcatggctagggaggatgaggaaaaaactgcattcattacccccataggaacttattgttatacgacaatgcctttcgggttaaacaatgcaggtcctacttttcaacgtactactcgaatttctttgggtagccaaataggacgtaatgttgaggcctatgttgatgacttggttgtgaaaacacgcaaccaggagaccttactctcagatctagcggaaactttcgaaagtctccgcaccgcccgcataaagctgaaccccgacaagtgcgtgttcggcgtgcctgcgggcaagcttctcgggttcttgatctctgcccgaggcattgaggccaaccccgagaagatatgagctatagagcggatgcgcccccccagcaagcttagggatgtgcaatgcgtcactggctgtatggccgccctaagtcggttcatatcgaggctgggagagaaggcgctacccctatttaagctcctcaaacgcttcgggccgtttatctggacggaggaggctgaacgggccctcactcagttgaaggcgtacctcagttctcccccagtcctggtcgccccggagccagaggagccgttgctactctacctggcggcaactccgcaggtggtcagcgcagcgttggtcgtggagcgcgacgaggacgaccctcgctccgcgcatccccaccctgtgtcgactcgacccgggagagagcagggaggagaggcccccgagccgaacggtggcccgaggcccccaacgaccggaactggccctctgcccgcttgtccgacgtgccaggcgcccccgaccccaggatggccccaaggccactgcgggaaggccgcgcctgtcgccctctgaccccgaggtccaccctgtatcgactcgacccgggagagagcagggaggagaggcccccgagccgaacggcggcccgaggcccccgacgaccggagctggccctctgcccgcttgtccgacggtgccaggagcccccgacccccaggatggccccggggccactgcgggaaggccgcgcctgtcgccttccgaccccgaggtcgtcgacacagaagccgagtgcgccccgcgcggcctctcggacgaaaagcgccctggagatgcggcccctggcgaagaggatcggccccgacaaaaggtgcagcggcccgtctactttgttagtgaggccctccgggacgccaagacccaataccctcaggcccagaagatgctttacgctgcgccattatttccaggcgcatcgggtcacggtggttacgtcctaccccctcggccaaatcttgcataaccgagagggtactggacgggtggtgaaatgggcaatcgaactctctgagttcgatttgcactttgaaccacgccacgcgatcaagagccaggccctcgccgactttgtggcagagtggacaccggctcccgagcccgtctccatccccgaggtcagctcgggcccttcgcagctgcctcacaccgcctattgggtgatgcaattcgacggctccctatctcttcagggcgccggtgcgggggttacgttgacctcgccgagcggagatgtccttaaatacctggtccacctcgactttcgggcaaccaacaatatggcagagtacgagggactccttgcgggactcagagtggcggttggactggggatccgccgcctcctggtgttaggcgactctcagttggtcgttaaccaggtctccaaggagtaccagtgctctgacccgcagatggatgcttacgtgcgccaggtgcggcgtatggagcgccattttaacgggatagagcttcggcacgtgcccagacgggataacgcggtcgccgacgaactctcaaggctcgcttcctcgcgagcccagaccccaccgggcgcctttgaagaaaggcttgcccagccgtcggcgcgacccgaccccctaggggagacagacacgcctgaacggcccccgaggcccgtcggagtccaggcctcgggacccgaggggagcgctcccagctcccttagattgattgcttggatcgctgagatccaggcgtacctcgcagataagactctacccgaggaccgcgaagggagtgaacgcgtccagcgcatctccaagcactacgtgctggtggaagggaccctctatcggcacgcggctaacggagtcatcctgaagtgcattcctcgggaacaaggcatcgagcttcttgccgatatccatgaaggcgagtgcggagcccactctgcctcacgcaccttggttggcaaggcctttcgtcagggtttctattggccgacggctcgcaacgatgcggtcgacctggtccggcggtgcagggcgtgccagatccacgccaagcaaacccatcagccggcctaggccctgcagaccatacctctttcatggccgtttgctgtctgggggctcgatatcctgggtccgtttagacgggccccgggcgggttcgagtatctgtatgtcgctatcgacaagttcactaagtggcccgaggcttatccggtcatcaagatcaataagcactccgcacttaaattcatcaggggtatcactgctcggtttggggtgcctaaccgtatcattacggataacggcacccagttcactagtgagctcttcggtgactactgcgaagacatgggcattaagctttgcttcgcctctcccgcccaccccagaagcaatggccaagtggagcgtgccaacgcagaaatcctcaagggcctcaaaaccaagaccttcaacatcctcaagaagcacggcgactcgtggatcgaggagctgccagcggtgctctgggcgaaccaaaccacgccaagccgagcaaccggggaaacgcctttcttcctcgtctacggcgcggaggcggttctcccatctgagctcaccctgaggtcccctcgggccaccatgtactgcgaggctgatcaagatcagcttcgcagagatgaccttgactacttggaagaacgaaggcggcgcgcggcccttcgagccgcgcgctaccagcagagcctacggcgctaccatcagcgtcacgtccgggcccgatcactctgtgtagacgacctcgtcctacgccgcgtccaaacgcgtgctggactgagcaagctctcaccaatgtgggagggtccgtatcgagtgatcggcgtcccccggccgggctccgttcggctggccacgggcgacggcacagagctgcctaacccgtggaacatcgaacaccttcgtcgtttctacccc

SEQ ID NO: 84180 - DNA, 425 bp, Oryza sativa
  Clone ID: PAT_MRT4530_83441C.1
ctgatcacctgggccgagtccttaagccgtgctcgagcaggttaagccgtccacgatcgaacccttcccctcctcctcgaactcgaacctctctctgttgttaccgccgagtccgagaagagagaccctccgtcgamgacccctccggtaacgttagaagtcagaggtccagaagaaggaggtccytccgtgggaagtaccagtcccgtctccggtgagggggacggttcgttccacgactgtccgtcgacaccaagcgtaggttcgtcagggactcgatggaccyaccgtgcgaaggccctctgaagcccaagctgggcgaccccgatagcctgggsctccctgggscacccaatagctcggtgccaccgaaccgatgccgctccacaagttgccggcstgccgctaataaccgcagcagccgt

SEQ ID NO: 84181 - DNA, 561 bp, Oryza sativa
  unsure (1)..(561): unsure at all n locations
  Clone ID: PAT_MRT4530_83442C.1
aaaaaaaaatctgagctagatctccaaatcaatcaataaaccgaacatccaaaatcaacacgaaaataccaaatttaatctcgacctcgtgaatttgatcccaacaagaaacctaatacccatgtattacctccctcccaatccgatccatctaagcgaggaggtcatggtacaaagacagcaggaggcacgtcgggttgcaggcgacgtgcggcagcgaaagtgcttggcgcggtcatcgggctagtggacgagctcgacgcagaacggcgacagggacggcatcagtccttgcggagggaagacagcttccttcttgggcgtcggttgaaggccatcggtcttgagggcagcgtcggcggtgtactcatcgtaggtcccaaggggaggcggcgcttcgagagatctcgtgggcggcgacgctttctaggcgggcggcggcttcaaggcgaccagcgcattcggtggtggcgtggaggacggtgaggcggcgcgactccggagcccttcctcccgccggatctgacggggggagggcggctcccagcanctggcgggggc

SEQ ID NO: 84182 - DNA, 394 bp, Oryza sativa
  Clone ID: PAT_MRT4530_83443C.1
aacacaaccgtttgggtctttggaccggtttcggggagcctctgttaggtgcaggttgcgacttttgtatgatcgtatattaaagggtagtggaatagctctggctttgcaatggactctttggccgttgatcgtagaaacttattgcctggtggctattcacatgatcaaatcacaggaaaaggataaatcagacctggcttttcttgtccgagaggtgaaagacttgttagctggaaatagggagattagaattgtcaagggccatcgtaaccaaaatcgtgtaagccataccttagcaaataaggcacgatgtgagtctatgtctaaattttggcctaagaatagttgtaatttcatctcacacattgattgtgaggagtaatatattccc

SEQ ID NO: 84183 - DNA, 190 bp, Oryza sativa
  Clone ID: PAT_MRT4530_83444C.1
gcacgagggcagctttgggtgaggtggaggtaggaggcggcgtgcgctcccaggcggtccttcacctccatctatctccaagctcgatcttctgctgaatagagaggagatgggtgacgtggccaaggacctgacggccggcacggtgggcggggcggcgcagctggtcgtggggcaccccttcgacacc

SEQ ID NO: 84184 - DNA, 3294 bp, Oryza sativa
  Clone ID: PAT_MRT4530_83445C.1
atggctccggcgatcgggtcgcggcggctcacggtgctgcgggagttccgcccgcacgggctcgcggccgaggaggccgacggcgagggcggccccggggagcggccgccgcaggactacgactacttcctcttcgacccggccctcgccgcctccccggccccggagcccggggaggaggccgcctcctcctcctccggcgccgacggcgaccacgagctcttcatccgtgggaatcggataatatggagtgccggctcacgtgtccacaaaagatacctctcaccaaatacagtcataatggtcgatactttatctatatacaatgtaaatggcgaggttgccagtattccactaccatatgctgtttcatcaatatggcctcttccttctggccttctacttcagaaatctactgatggaggccatatggtattatcctcaacttcactgctaaaatcgagggatttaattcgtcctaacaaggaatttggattgaattacaatgtttcatcccaagtcaatactttggagactgtcagtaaagctgatggggctattttttcgtctcacctcatcttgaaacatccacttgaagagcctcaggcaacatattttgaagaatggggcaggttggatatgatgaaagattttgatgaaaaaactatatggacaagtgatatagtacctctaatggcatcatatcacaaaggaaaatttcagcactctgtttggcaaattgatggtacaacttaccaggaagaaatcaatgacaatgcagtgcccccaattccatgtgatatttctatgcataagtttgcattccgtaagatatggcaggggaaatgctcccaatctgctgctagtaaggttttcttggcaactgacatcgatggtacaccaataatttgttttttacttcatgagcaaaaaatattgcttgctgtgagatttcaagttgacgagaataatggagaatcctttggagatattaaacctcacatgagctggaacattcctgcattagctgctgcaccagttgtcgtaactcgcccaagagcatgggctggagtccttccctttacggacatcctcattctaactcctgacaatgatctacttctttattctggaaagcagtgcctctgcagatatactcttcctactgaattggggaagggtatattttcaaattatgagctaaattctggggttacagagttttactctgatatggagatcacaagcataacggatgctgttgaaggtcgtataaatgtgacatgcagcaatggtctgatttcaccagctaattcatccgaatcgccttgcacagcttgggactttctgatcaacagcaagcaccacgccaagtacggcaaacaatcccgaacctctttgcctatgtcatataatacaagcagcatgagtttccactctttcccccaagacggaaatagtgcagatgtttcattttatattcggtttataagtgaaactttggacacattgcatgccctatatgagaacctgaagctgaatattttgaggaaacaagaactcaggggagccttgcctccagaggtgtgggtgttatgtgatagagccacagatatttacaacatacatgctgctaatcagtggacatctaagttcttgaaagaaattttgaattccgaggatactgattctgtttacagatctgtagaagatggaatggaacacatcttcacctcaacaacacaactgcgatatggtcgtgatttacgtctgaatgaggttagacgcctcttatgctcagcaagacctgtggcaatacagacacccaataatcctagtgtgtctgatcaggatctacaacagcaacaactatggaactttgcacaaagaacaacagctttaccttttgggcgtggggcttttactttagctacaacttacacactgttaacagaggctctggttttcccaaagcttgttttggctggtcggttgcctgcacaacagaatgcaacagttaatcttgacctaagtactagaagcgtctcagaattcaaatcttgggctgagtttcacaatggtgtcgctgctgggctcaggcttgctccttttcaggagaaaatgttaagaacctggatacaatataatagaccttttgaaccaaattttactcatgctggtctgcttcttgcatttggtttgcatgaacatctacgagttttaactatgaccgacgcttaccgatatctctcccagtcagcagcagtgatgggaattggacttctctatgaagggtcagcacatgcattaaccatgaaaattcttctgggtgagattggccgaagaagtggtggtgataatgtgctagaaagagaaggctatgctgttgctgcaggctctgcattaggacttgttgcattaggtcgtggaagcaatgctttcggattcatggacactttcctggaccggctttttgaatacattggcagtaaagaagtctaccattacggaaagaagggagataacaactatgctcaatgggatgacaagggttctgtgcatcttgtcacctttggcagagtggaaaaacacttaaatgcagcaatagctgctgatgagcaaagtggcaacaccggacagatgatggaaggagcacaaataaatgttgatgttactgcacctggagcaataattgctctagccttgatatttctgaaagcagagtcagaagaaattgcagctagactcagtgttcccaatagtcactttgatctgcagtatgtgagacctgattttgtaatgcttcgcattgtagcacggaatttaatattgtggaacagaatacaacctaccaaagattgggttgagtctcaagttccttcatttgtcaactttggtgtttccaatacgagtcaagaggctatggacagtgatgaattggatagcgaagctctgtttcaagcttatgttaatattgtcactggagcatgcattgcacttggtctcaaatatgctggcagtagaaatagtgatgcccaagaactactctacgcttatgccgtccattttctcaatgagatcaaacacatatctattcagactgcaagcatattgccaaagggattgttgcagcatgttgatcgtggaactcttgagctctgcttgcatcttattgttctctctctatcactggtaatggcaggatctggacatttacaaactttccgcttactgcgttatctgaggggaagaagttctgcagaaggacaagtaaattatggactgcagatggct

SEQ ID NO: 84185 - DNA, 423 bp, Oryza sativa
  Clone ID: PAT_MRT4530_83446C.1
atggcggcgtctcttgcctgcgctttcttcttcgacgccgagccggtgggcgagcagggcaggcacgcgctggacgcctgcgcgctctgcaccaagcagctcacgagggacagcgacatcttcatgtacaagggggacacgcccttctgcagcgaggagtgccgctacgagcagatgcagctcgacgcggtgtacgcgagatgcgtcaagcgtctccgcatcactaggtgtgtgcttctgtacatggcgtgcagcaccaacatctgccatgattcccgtcgtttggaggaggagcttagctccacgattggcctattctggaatctggacacaccgttgcagtgtgcgtgcctaaccatgtggtgctgccgtctgattcgtgggcaaaaggctggccatctaggtgccctactcaatttttag

SEQ ID NO: 84186 - DNA, 5458 bp, Oryza sativa
  Clone ID: PAT_MRT4530_83447C.1
gctgcagggattcgcctccagggggagcgtctgcgtggctccaggttccttctttccgttttgagaaacaaaatgtgctctattatagctcaattcgtaaccaccagtttattgaaaccggtcggcatacactgggaacccatgttgcattgagcccaaatgtagcagttatcaaaggctcaaactaggctcactcattcggtcattcctattctaaagccaaaatggacacttacatctaaatgcaacaggatcatagggtacaatatcagatggcaatatgagcattgcaaggtaggatcacatgattgaggcctccacacaaagccttggcattccagcacttaggtatgatccttactagtagataagaacaatgagccctgatactattcagtccagtcacaatcggctcactcgttgctaaacgtttcttgcattttcagtgcaaggtcaagccctcgtgaccatgagtcatgtgaagcttctcaatctccatgagccccacgagatgtgtggttggcagcaggagccgaagaagcgggagcatggacaagctggtccgagttctgggcttcaccttttcaattgcggatgacacaatatggggaggtgggatgctgtaccactggagataccaagaaaggagcactgcttcgttttgtgcatcaggccatttgcctttgttcaggtaattgatgaagctgtcatgcaggttcggcaattctgcgaagatgtactctatgcgcttcataagtgattccaaaaatgtggactgaataatgcctccagttgtaattctaccatcaatcagtgcttcattataggctgatgcaaccttcaagctggaaaggaaaagagaatcagagaaaggaaaatgtccaatctttagatgctcccacattgtctcaattattgtgtaaaaacttatatacactaactgatcgactctaagtgaactacgagtagcactgtttgcctgattactgcagctcgtggatggtgtatcacaaacctcatgcattgctcgagaaagcaaagattggcatccaattggatcatctgagtaggaacaagatccaactttccgttttatatagagtactccaccattgaatgggtcagtcctgtctccagatttccaccatggcttatcttcaggtgtaagtgtaatcacctgagaccaatatctgggtccacaaactcgaatgttcttcagctgcaacagaaatagccttttcagattgtgcaattcattggagagaaacccagtctgggtgtaaaccactgagcgctctggcagaagacaaggtgtcacttcacagtaattagtctcgtcataatactccgtttcagcaactgtcacttcaagaggacaatacaccggaagtcctgtgtcaacatctactgtctgaatccatcgaggttctgtagctattacatacagatgcctgaatgcctgcattgtagacaagacaggtaaatgcacagatagacctacacatcgtaaatgacctgccggagctatagccatctgcagtccataatttacttgtccttctgcagaacttcttcccctcagataacgcagtaagcggaaagtttgtaaatgtccagatcctgccattaccagtgatagagagagaacaataagatgcaagcagagctcaagagttccacgatcaacatgctgcaacaatccctttggcaatatgcttgcagtctgaatagatatgtgtttgatctcattgagaaaatggacggcataagcgtagagtagttcttgggcatcactatttctactgccagcatatttgagaccaagtgcaatgcatgctccagtgacaatattaacataagcttgaaacagagcttcgctatccaattcatcactgtccatagcctcttgactcgtattggaaacaccaaagttgacaaatgaaggaacttgagactcaacccaatctttggtaggttgtattctgttccacaatattaaattccgtgctacaatgcgaagcattacaaaatcaggtctcacatactgcagatcaaagtgactattgggaacactgagtctagctgcaatttcttctgactctgctttcagaaatatcaaggctagagcaattattgctccaggtgcagtaacatcaacatttatttgtgctccttccatcatctgtccggtgttgccactttgctcatcagcagctattgctgcatttaagtgtttttccactctgccaaaggtgacaagatgcacagaacccttgtcatcccattgagcatagttgttatctccattctttccgtaatggtagacttctttactgccaatgtattcaaaaagccggtccaggaaagtgtccatgaatccgaaagcattgcttccacgacctaatgcaacaagtcctaatgcagagcctgcagcaacagcatagccttctctttctagcacattatcaccaccacttcttcggccaatctcacccagaagaattttcatggttaatgcatgtgctgacccttcatagagaagtcctttgcccatcgctgctgctgcctgcagaagagtaggtaattccaactctggcgtagaagatggatgccgggaagggacatgaaaatagagcatctttgaaattgccgggtgcattgtccccctattagatgcagccaaaccaagtagcaaaccaagtctagttatatcatgctcctgggagagatatcggtaagcgtcggtcatagttaaaactcgtagatgttcatgcaaaccaaatgcaagaagcagaccagcatgagtaaaatttggttcagaaggtctattatattgtatccaggttcttaacattttctcctgaaaaggagcaagcctgagcccagcagcgacaccattgtgaaactcagcccaagatttgaattctgagacgcttctagtacttaggtcaagattaactgttgcattctgttgtgcaggcaaccgaccagccaaaacaagctttgggaaaaccagagcctgttgtagatcctgatcagacacactaggattattgggtgtctgtattgccacaggtcttgctgagcataagaggcgtctaacctcattcagacgtaaatcacgaccatatcgcagttgtgttgttgaggtgaagatgtgttccattccatcttctacagatctgtaaacagaatcagtatcctcggaattcaaaatttctgatggagggacatccaatgcagtcgtcagtacagttacaggttgcaaatgtagcatatatgggactgatattgatgtcagattatcattgttccaaaacccattttctctccttcctgaccccatccttgccatagctagatcatccctcccaacaagaacataagcaggtgcaggccagtcatctggaggagactcacggcatttgtccagtgcagcagaacttttttccttgcacattagagcaggaatatcatctgaagtcttcaaatcacagccatgacggagacagttttcaagccaacgaaataagcatggtggagctcttaaggcagtagcagatgatagggaatggaattcaaccaagttgtcaggaaagtctcggcaatagtaatctacataactgttttcaccaagggacgaagcaactctacataacaaggaagcaagactagctagatcctgtttcctcaaaatattcagcttcaggttctcatatagggcatgcaatgtgtccaaagtttcacttataaaccgaatataaaatgaaacatctgcactatttccgtcttgggggaaagagtggaaactcatgctgcttgtattatatgacataggcaaagaggttcgggattgtttgccgtacttggcgtggtgcttgctgttgatcagaaagtcccaagctgtgcaaggcgattcggatgatttagctggtgaaatctgtccatattttgcacaaatcttttctacttcataactaaatgattcccattctgaatccacatgagagctcgaacaaaggtaagcagcatcactatcaccccagagaagagaaacaaaatgactgtaaaagcagctctgcaagccctctgccattgcggttatgcagtcaccaaccagagaagaggaagggctcttgcgtaatgaacatcggagcatcagaccattgctgcatgtcacatttatacgaccttcaacagcatccgttatgcttgtgatctccatatcagagtaaaactctgtaaccccagaatttagctcataatttgaaaatatacccttccccaattcagtaggaagagtatatctgcagaggcactgctttccagaataaagaagtagatcattgtcaggagttagaatgaggatgtccgtaaagggaaggactccagcccatgctcttgggcgagttacgacaactggtgcagcagctaatgcaggaatgttccagctcatgtgaggtttaatatctccaaaggattctccattattctcgtcaacttgaaatctcacagcaagcaatattttttgctcatgaagtaaaaaacaaattattggtgtaccatcgatgtcagttgccaagaaaaccttactagcagcagattgggagcatttcccctgccatatcttacggaatgcaaacttatgcatagaaatatcacatggaattgggggcactgcattgtcattgatttcttcctggtaagttgtaccatcaatttgccaaacagagtgctgaaattttcctttgtgatatgatgccattagaggtactatatcacttgtccatatagttttttcatcaaaatctttcatcatatccaacctgccccattcttcaaaatatgttgcctgaggctcttcaagtggatgtttcaagatgaggtgagacgaaaaaatagccccatcagctttactgacagtctccaaagtattgacttgggatgaaacattgtaattcaatccaaattccttgttaggacgaattaaatccctcgattttagcagtgaagttgaggataataccatatggcctccatcagtagatttctgaagtagaaggccagaaggaagaggccatattgatgaaacagcatatggtagtggaatactggcaacctcgccatttacattgtatatagataaagtatcgaccattatgactgtatttggtgagaggtatcttttgtggacacgtgagccggcactccatattatccgattcccacggatgaagagctcgtggtcgccgtcggcgccggaggaggaggaggcggcctcctccccgggctccggggccggggaggcggcgagggccgggtcgaagaggaagtagtcgtagtcctgcggcggccgctccccggggccgccctcgccgtcggcctcctcggccgcgagcccgtgcgggcggaactcccgcagcaccgtgagccgccgcgacccgatcgccggagccat

SEQ ID NO: 84187 - DNA, 981 bp, Oryza sativa
  Clone ID: PAT_MRT4530_83448C.1
atggacgtcaatatggtcctcttcgacgacgacgacgattactgggacaaggaggaagaggaggatgacgagagggtggaggtgccgaagagcggcggcgtgtacggctacgacgtcccttttccgaatatggatttcctggatgacccggaggagaacgacctctacctcttcaaggttggcatcacccactgcgacggcggcggccatgagcactacatcatcgccgcactcatgttcgacagcagccgtaagatgtacgatctccaccgtttccactccaagaacggtagctggagcacaaaggcgctccatctcgggacaatggagccatctccaggattgaccttcttcttccatgacacatacaaggtcatcacgctcggtggcggcttcatggcctgggtcgacctgcggcggggaatcctgctctgcgacgtgctcctcgacgaccctgagccccacttcatccccttgccgccgccgctcaaggctgacaaggagctcatcggcgatgcccgagaatttcgggacattgccgttgtccacggttacatcaagtacgttgagatccaaagctacatttcagatggttgggttgctgcaacatggagcaggaagattacactggaggattcttgggagggagattggcgcaaggactgtgagctccatgtttctgatatctccggatcactgcctgagctgcttggtgatgaggaggctagaacagctcaactgaacttgcagagtctccacacaggcaatcctacaatcagcttgcaggatgatgatgttgtgtacttcctggccaaggttggcctcagagatgacaaatcgtacgtgcttgctgttaatatgaggagcaaaacactgcaaggagcggcctgttttggtgctgaaagagtgttggacatgaatttcacatgtacacaaagtaggatctcccattatctcagaaacactccaggaaaaagttaa

SEQ ID NO: 84188 - DNA, 429 bp, Oryza sativa
  unsure (1)..(429): unsure at all n locations
  Clone ID: PAT_MRT4530_83449C.1
gggcggctcggcgacaccgtgcggcagcgtcgacggcctgcagcggcggtcttctccgtcgccgctcaccgcgccggcttgctcgcccctcgccgcttgccgcgccgacctccgtttccatcactgccgggtgtgggagcggtggatctgccggcgccgtggctgccaccagcagaccaaacaaccctactgctaacggaatctccatctctatgtgttactatgttatgcgtgtatcgtcttaattagctaagtagctgcggtgcgaccgtgagtctgactgaactgatctttggtctggtggtacctggcggtgcctaaaggtttcttttcttgattatacttgngctgtgtagatatttcgagtttcgcttctgtagggctggttctgatgcaatttgcaatagatggcgtcatctctgttcatta

SEQ ID NO: 84189 - DNA, 486 bp, Oryza sativa
  Clone ID: PAT_MRT4530_8344C.1
atggtgagtgagagccatgtgtcaacgtccaactcttttgccacatcacaatcggcgactgcaaggcgggggaggtcgtgccccgctcatcactgcgcgtgcaccgcggacgccagccgcacaggatcttcgcctaaaagtgatcagtgccgtcgccaagagatacaaaccactgcacgcctacatcacacactcgccatgagggacaccaccgcccgcaccttcgatcgatcactcgtggtaagtgaatacctggggtgttacatctacgactatgatgtcgtcgacaacaccgatgacctggccacgcacgacatccctagggcgcggacccccttggctcctaaaggcgagcgtgtcgtagggaaaacggcgcgaacagcttcctacgaaaccgcgatctcgctcagacagcccgagaatacaaccgacgacgcggacgaggaaacaccaacagcagcagcagcagcggaaccaacggtctaa

SEQ ID NO: 84190 - DNA, 333 bp, Oryza sativa
  Clone ID: PAT_MRT4530_83450C.1
tggactcgtgggcacaacccccggattttggggaggggaaagtgcacaaaactatcctcctcctctgtctctcctccactcccccacgccaccgctcgccgccgccgccggctcagcttctcctcctcctccgccgccgccgccgtcgtcctcgggtgaagcagcgcacttcggaggagggaggcggacgggggtttgttcaccaacctaacctcctccctccagctccccaactcttctctcccggtctttgcgagatgaactcttagggatcccagctgctccaggcaagactggcggaaccttcaacaattctagaacgggtggctgctg

SEQ ID NO: 84191 - DNA, 155 bp, Oryza sativa
  Clone ID: PAT_MRT4530_83451C.1
atgcctctcggtcatgatttttgtcaacctccatccatcaggaacactaatgcccgttcaaagtgggcggtgaagacaagcttggaggatgtcggtgacgctcttggatacacgcggactcatggtaggagcagtcggaaaatagaatgggagaa

SEQ ID NO: 84192 - DNA, 387 bp, Oryza sativa
  Clone ID: PAT_MRT4530_83452C.1
atggaggtcgggcatgggctggcggcgggcggccggtggcggcgggatgaaggccgggcgcgggctagggctggcggcgggatggcggccgagcgcgggttgaggctggcggctgtgccggcctggctgctggtgcgatcgatggccggcacggcggagtcgccggcgagctcgtgcgtgtcgtcggacgcggaggaggaggcggcggtggcgaagccgatggtggtggccgggtgcccgcagtgcctcatgtacgtgatgctctcggaggacgagcagcagcccaagtgcccacggtgcaagagccccgtgttgctgcacttcctccacggcgccgccgccggcgccggcgccgccgccagcagcaagccgccctccaagacctag

SEQ ID NO: 84193 - DNA, 198 bp, Oryza sativa
  Clone ID: PAT_MRT4530_83453C.1
atgtcggcggcgaggacggaggggaagttgtgtattgtggtcggggttggcgcattgtggggccacgacgaagatggcgacccatggcggcgtggagggtgtgagggagagctctgcactgccgagctcggcgtcggttttgtagcggcgagcatggcccacggcgctgccggcgaggatcccattggaggcgcgtag

SEQ ID NO: 84194 - DNA, 2348 bp, Oryza sativa
  Clone ID: PAT_MRT4530_83454C.1
tttttttttttttttttttttttcaagcaacaataccagttcattaacacgataacacgaaacattacataacatcgaaaatgcagaggaagcacgccatatttacagttgttccttcccatcagcaccgctacatatttacacggcctaaatacgtgccagcccttcaccactaggccatccatcagacccttcagcaccagggcgaccagacacaccgatacaagcaggactgacgtacagatcactcgagcttgttcttgtgggaatatgtacatttgtcctgctctaagcaggtggatatttacatgtggacacatgtgcagctaccagattactcgggccgcacactgacgagattgggcagggcagccaactggagcttcttgatctcaatcgcggtcaccttgcaggactccagagacaaggacctcaggttctggagtggcttcagatggtggagcccagaattcgacacccgagagttcgacacgttcagggagaccaaggcagtgaggcgggaaatcagctctaaggatttgtcagtgaggttgccattttgagataggttaagcagcgtcagagctttgaggtctttgatattcttcactccagcatctgtaattaacccaccgcagacctcaagggactgtagattcttgaaatatttcaagcagtttgtcccagcatcagttatacgagctccaaatagatcaaggtgtgtcaacccagtgagaccttgagaggaaaggaacaccatccagagagatgacgaagtccattgctcccaacttctgtgtctgaaagttccaagcttcttagtttcagaagtctgcatgaggcttattgtgtgattctccgccttcagtgttttatgaaatactttcaaatgtgctagcccctcgtcaccaatcttgcatgagtccaagttcaaacactccaaattgatcagttcttttagatgaaccaagcaggcatctgtaatatagttgaaccctaaattgagaaccttcaacttgacaagaccttccaaatgctcacagccttcgtcatatactccacatctactaagattcaacaataccaatgaagccaatcctgaaataacctccaaacaagcagcagttactgcacagccctccaggtttaggtgagctagcttcgatagacctcttagataagaaacaccaagatcacttattttgcagcaagaaagttgaagctctctcaaatttgtaagatctgataaatgtttcatatcagaatctgtgatgccattacaatacctcaaatttagcttttccagttttctcaagccttttaaatgaacaagtccaccatgaatcttcggacatcgctcaaggtccaagctacccaaattaaccatgtttgcaaaggctttagctccttcagcagtaacagcagaacattttttaaagctcagggatgtcacatttgagaggcctgacaatgttttaagtccatgctccgatatctgatcacagtaattgcatgacaaactttgcaagttgatgcaatccttgagttgattcagtccaccatcagtcacatcagagcaagagatatcaacagataacaatgattgcccttgagaagccgctacttccatccaagcatccctcaccccagggtagtctgccaaacagatgtcctgcaatgcacaatcacgaaaagctccaagcaactcttcagtgagaatgttccactccaccagttcattaaatacctgctgactaagatctctaggcagcagcgagaaatcagaatacttcccaatatcctcgcggactttggccacacagagctccattagcgatgggcaccgcgcaggcactggtccctgcaccttcctgtgtacatcagagccgctgcggggcaaggtgtgcagtagccacttgaagctgctgctcttggagaaccttgcactgtagagatcttcctcatcgacaagcagctggcctctcttcctagagcaagcacttcccatggcgacgatgcgagcaccgatcacaaaccaatcacttcttcttgatggactaaaaagtgcatatcattctagctcgcgactgtgtgattctttgtcatccattcccagcacgattacgacttggcatagacttcgctctctttggccccattccgattggatatggaaattctcacagggacgcaaatccaccaaaccccaggccaagcaaactcccggattagagttaaaccaatctatcgcgattaaattacctctaatcacacagccaatcctcgccgagaaagagagagggggggggcggcctcgtgccgaattcctgcagcccggggatccacta

SEQ ID NO: 84195 - DNA, 1023 bp, Oryza sativa
  Clone ID: PAT_MRT4530_83455C.1
atggggaggggacgagcgccgtgctgcgccaaggtggggctgaacaggggttcgtggacgccgcaggaggacatgcggctcatcgcctacatccagaagcacggccacgccaactggcgagccctccccaagcaggccggattgctgcggtgcggcaagagctgccgcctccggtggatcaactacctgcgccccgacctgaagcgcggcaacttcaccgccgacgaggaggacaccatcatcaagctgcacggcctactcgggaacaagtggtccaagatcgcgtcgtgcctgcccgggaggacggacaacgagatcaagaacgtgtggaacacccacctgaagaagagggtgtcgcagagagagaagccaggtgacaccaagaagaagggcaaggccgcggacgccagcgacgacgccgacgcgcattccccgtcgtcgtcggcgtcctcctcgacgacgacggcggccaataacaacaacagcggcgacacggccggcgagcagtgcggcacgagcaaggagcccgagaacgtcgacgtgtccttcttcgagcaagacatcgacatctcggacatgctggtggacgcgcccacggaggcgccgctggtcgcggcgccaatgccgccgtccccgtgctcgtcgtcctccctgacgacgacgacgtgcgtcggcgccgtgtcggacgagctgctcgacctgccggagatcgacatcgagccggatatatggagcatcatcgacggctacggcggcgatgagcccggcgacggcgatgcaacagtgccatgtaccgccagcccgggagaggagggagcagagtggtgggtagagaatttggagaaggagctcggcctgtgggggcccatggacgagtccctggcccatccggacccacccggacaggtttgttacccgggcccactcacggaaacagagggggacccagtctccacctacttccagtccgggcccaccgcctctccgctccaggagatcgcatcacccgccgttctctcatga

SEQ ID NO: 84196 - DNA, 411 bp, Oryza sativa
  Clone ID: PAT_MRT4530_83456C.1
atggagcagagcgaatcacttaccagtggaagggagggcgacggcgagcgaggaaggaggcgcgtggaagcctgcacgcctggagcggcgcctcgcacggaccgcacacggatggctgacgcacagggagaagaagccgagggcggaggccgggttgggggagaaggcgagggcacggagcgtggtgttgagcatgaaggaattgggggcgcaggggagggaggcgaggagacggagcacggcgtcgggaggggagagcgcggcgtagacggcttgtggagcggcggcaagcagcggcgggagcatgacgagcgcggtgtagaggcgcttggcaatgccgtcccggcgcgcgcggagggcgtccgggtggtcggcggcggcgacatggatggcagcgtcgatggcgtctag

SEQ ID NO: 84197 - DNA, 499 bp, Oryza sativa
  Clone ID: PAT_MRT4530_83457C.1
tttaatatagtccttaaaccctctaaaaatgccatcgtgaccatggttgctattgatataaccattgctcacatcatggatcaacaagaattcatcacgatcaagtcatctaagtgctggaatctgattcggccacctactacgctgacttcaaacggccactccgttttcgggccgcgagtacttgatgaaaagctctcggagtcctctttccaatggatccagccacatctccaaattctatctcagtcagctgtaatcgtataaacaaggtgttacgtcacttataatgggcgtatgaacttgtaactttatttgggaccccggcccatgtggggtgcgccccaaccaggtggagctcgactctggagaccccttgatcgtcctcccacctccttaaatagctaggaataaggttgatctgcaccggcaagatcaacaacccatggagggctgtattgatcgctaaggcggaacaccacaacatctcatacgattg

SEQ ID NO: 84198 - DNA, 1080 bp, Oryza sativa
  Clone ID: PAT_MRT4530_83458C.1
atgatccggcgattcctgtatatggtcgacatcttcgacaaatcacacggccctatctcccgcaggctacgccgcatcaacccatcacatctcttctaccccaatgatgcactgcccgtgccccaatcgtcgtcgtcggcgacggtggtggaggacgcccccctgcctccaatagacatgaccttctgcgggtcgactgagttcatgcgtaggagcgacgacaagatcgtcagcgtcgacaggactactcgccgcgccatcctctacgaccccgccgagcacaccgtccgcgtcttgccctccatggtggagtacaagttctggaccaagtcgttcgccgtcggcgacgatctctacgtcatggagacgataccgctgcctgacaaggtggatctcggccgcgatgcacggccgggccgttctttcgaggcgctcatccaccgtgaaccacgccccgtcgatggcgacaggatagaggacgagtgctactggcgaccactgccgccgcctccgtacgtgcacgccgccggcataagaaccgacggccagatctgcgggtacgcggtggtcggcgagtcccacatcttggtgtccacccacagctacggcgcctactccttcgacacggcgagcgccgcttggagcaaggtcggcgactgggcgctgcccttctgcggccgcgccgagttcgtccccgagcacggcctctggctcggcctctccgtcgcggacgacggcgtcctcggcgcgtgggacctgtcctccaccatccaccaccagcagccgccgccggtggcccaccacgggtgtaagggctttgcggtgccggaggtgccatacgcctcacacgtcgtgcaccttggcgccggcaaactgtgcgttgctaagctgttcatggtcgctcaccaccgggagacctgcagccattcttgttgcgactttgacagtgataaaaggtacttcgccattctcaccggtgtggaggtggtgcgctgcaatggcgacaaggttgacatcatcaagcacaagtcctgccgttatagctttggtgaacactacatccccatttatctactctaa

SEQ ID NO: 84199 - DNA, 234 bp, Oryza sativa
  Clone ID: PAT_MRT4530_83459C.1
tctcacgcgttcgtccacgcgtgcaggcgcgatcgtttgctatgacgtatcaacacatactgtaagatgaccatgttctaacccgaatccatttgcaataattcattttgtcacgatttgttcttgcatgtctgagagagagagagatagagtgtctgatacattgctcttacttcaggtcaagtacagtccttcacgcgctcacgactgtctgatgctgttgattgattcttc

SEQ ID NO: 84200 - DNA, 1635 bp, Oryza sativa
  Clone ID: PAT_MRT4530_8345C.1
tgcctgagcaacccgatgatacctctgtacagcggaggcgtcataaaaaacagcgagttcaacgtaggcctgacggactggaccgtgcccttgggcgtccaggccaccgtgaacagctcgtcgtccggcaacaagttcgccgaggcgcggaccgacggccagccgtcgcgcaccgtgtaccagacggtccagatacagcccaacacccactattccctctcagcgtggttgcaggtgtccgccggcacggccaacgtgatggcggtggtcaggactcccgacggccagttcgtcgccgccggcgccaccgtcgccaagtccggctgctggagcatgatcaagggcggcatgacgtcctactcctccgggcaaggccagctctacttcgaggccgacgcagcggtggccatctgggtggacagcgtgtcgctgcagccgttcaccttcgacgagtgggacgcgcaccgccagcaacaatccgccggcagggcgcggcggagcaccctcggtgtcgtcgtcgcccgcggcaccgacggcgcgccggtgccgaacgccacggtgaccgccgagctcctccgccccggcttccccttcggcaacgcgatgacccgggagatcctggacaacccggcgtacgagcagtggttcgcgtcgcggttcacggtggcgacgttcgagaacgagatgaagtggtacgccacggaggggaggcaggggcacgaggactaccgcgtcccggacgccatgctggcgctcgcggagcggcacggcgtcagggtgcgcggccacaacgtgttctgggatgaccagagcacgcagatggcgtgggtcaggtcgctggggccggacgagctgcgggccgccatggacaagcggctcaggtccgtcgtgtcgcggtacggcggcggcagggtgatcggctgggacgtggtgaacgagaacctccactggagcttctacgacggcaagctcggcccggacgcgtcgccggcgatctaccaccaggtggggaagatcgacggcgagacgccgctgttcatgaacgagttcaacaccgtggagcagccggtggacatggcggcgatggccagcaagtacgtcgccaagatgaaccagatacggtccttccccggcaacggcggcctgaagctcgccgtcgggctcgagagccacttcggtgccaccccaaacatccccttcatgcgcgccacgctggacacgctcgcgcagctcaagctccccatctggctcaccgagatcgacgtcgccaatggaacaaaccaggcgcagcatttggaggaggtgttgagagaagggcacgggcacccgaacgtggatggcatggtgatgtgggcggcgtggcacgccacggcgtgctacgtgatgtgcctgacggacgacgagttcaagaacctcgccgtcggcgacgtcgtcgacaagctcatcgccgagtggaggacgcaccccgtggccgtcgccacgacggacgccgacggtgtcgtcgagctcgacctcgcgcacggcgagtacaacgtcacggtgacccacccgtcgctcgtgtcgtccgccgtgcgtacgctgaccgtggacgcatcgtcatcctcgtcggagaacgccatagacatcagggtgtag

SEQ ID NO: 84201 - DNA, 1145 bp, Oryza sativa
  Clone ID: PAT_MRT4530_83460C.1
gcacgagggacacatcccacacgctaggcacaatgcgccacctccgcctcgccgccgcgctcctcctcgtcgtcctcttccccctcgccgtctccgccgccgacggcaaggcggcggcggcgccggcgaaggcgaaggcgcccgcggcgcccccgccagccccgccgaacatcacggcgtcgatggcgaagggcggctgcaaggcgttcgcggcgctggtggcggcctcgcccgacgcgctgtccacgttccagtcggccgccgacggcggcgtgacggcgttctgccccaccgacgacgccatgagggcgttcatgcccacgtacaagaacctcaccgccgacggcaaggcgtcgctgctgctcttccacgccgtcccggtctactactcgctgcggagcctcaagtccaacaacggcgtcatgaacaccctcgccaccgacggctccgccaagaacttcaacttcacggtgcagaacgagggcgacaaggtgaccatcaagacggacgcctccgacggcgtcgcgcggatcaaggacacggtgtacgacaaggaccccatcgccatctacgcggtggacacggtgctcgagccggtggagctcttcgagcccgccgagtccccggcgccggcgcccgccccggtcgccgacgcgcccaaggcctccaagtccaagaaggcgtcccaccggcacgtggcggacgcgcccgggccggccggcgacgacgcgccgcccgccgaccagaggaagagctccaagaagaacgacgccgccgccggcgcctcgtgcctgcggtggctcgccgccctgcccgtcgccgtcgccgtggccgccgccttggcttagcggcgctcacatttcgaggtggatctgcaggagagggtggcggcggcgcgcggagtgtcggtgggcggtgtcagtgcgtgttctagtggcgtgtgcgtgtgagacttgtgtttttttttcttggatggaaactgcataaaaatttgtttgtttttcttctttgttctttcttactgctccattgatgttgttagcatgaaaaagaaaaatcaaatattgatgtggcatggatattcgaaccgtttgatcagaatttgggaaactcaaaaactcgagactagttctctctctctctcc

SEQ ID NO: 84202 - DNA, 1340 bp, Oryza sativa
  Clone ID: PAT_MRT4530_83461C.1
atggcgagcagcagcggcgaggggaagggtgccggcggcgcggggtaccagtacgcgccgtacggcgggtcgtactacgacgaggagcggcggtggtggccgtggctcgtgccgaccgtgctcgtggcctgcatcgtggtgttcctcgtcgagatgttcgtcaacgactgcccccgccacgggagcccgctccgcggcgagtcctgcgtcgccggcttcctccaccagttcgccttccagccgctccgggagaacccgctcctcgggccctcctccgccactttatttattttgatagtgttaagaacaaggggggttcttagtgctaacaagttgtttgctccattggccagtttggagaagatgggagcactagactgggcgaaggttgttcatcagcaccaagcatggcgtctcattagctgtatctggctacatgctggcctaatccacctgattgtcaacatgctaagcttgctattcatcggactccgtcttgagcagcaatttgggtttgtgcgtattggaatcatctacttgctatctggctttggcggtagcgtgctgtctgtgctgtttttacgtaataactacatctccgttggtgcctctggagctttgtttggcttacttgggtctatgctctccgagcttattatgaactggactatttattccaacaaggcagcggcaatcataactctcctgtttataattgcaatcaatttggcgatcgggatactacctcacgctgataactttgcacacattggtggatttgtgactggattccttcttgggtttgtcctgctggcaagacctcaatttggttggatggaacgtcatgagttgcctcagactaatcaaccacgaaagtacagagcataccagtatgttttgtgggctgttgcactcttcttgctgctagttgggtttgtgattgccctggtgatgcttttcaaggggaagaatggaaacgatggttgtcactggtgccactacctgaactgcataccaacatccagatggaagtgcagtacttagatgcttcagaattccgttagctcttctccaaattacaaatattcttcgggaaccattttcaagcttgtgtgcttgtagatatctacaagaaatttgccacagagtcgaattctgccctttccaaagtgtagtacaattttctgctttgtaatttgagattgtaacagctgtttatttcagcccaactccatactgcattgctcaaaaaaattgtgatgttcaattggattctcttatatcatctaaagttcgaaacaaagataatggttatggagtctaaacattcttctttcaaa

SEQ ID NO: 84203 - DNA, 265 bp, Oryza sativa
  Clone ID: PAT_MRT4530_83462C.1
caagagaatacaaaaatgtctctattcccaacatgctagacaggacgaagtttttagatttggcctggaaatactgtgacgtctctgccacttttttttcaagtacacatcatatacacaggaccacagctttgttggattctcttgaggtgtagtggacggcggtaaaaaaaaaatagtggtgattgccaaggaaaatcatctcccactactacaagttaagcatcttattgctcccctttgtttcttatcttacttacacccc

SEQ ID NO: 84204 - DNA, 518 bp, Oryza sativa
  Clone ID: PAT_MRT4530_83463C.1
ccacgcgtccgcctccccccgctcctatcctctcgcagaaaacaacgccgtccgccatcgccgcccatcgctctccaccgcgtcgccgtgcctccgccctccctctttcaggtcgccgacccaacatcaggtcgccgccctcgccgatttgttccattccctcgcgattcccaaccctaacctccgccgccccgcaggtcaccgtcgctcacggcgcgcttgcctcgcaggtcgtcgtcgctccgccgccacccggtccccatcgaccgtcgcccacggcgcctccacaccatccccgcatctccgtccgcatcgcctccctcagcactcggccctcgcacatccccgcgctctgcggccccgtatcgccgccctcgccgcatctccctcatattctggttttgttcactggcgccgccttgcaagtcgctggcaatccgccgccattcagtcttcatcgtcgagtccccttcgccgcgcacatccgtcggtggagcgagcatcatcgtcagaatgat

SEQ ID NO: 84205 - DNA, 388 bp, Oryza sativa
  Clone ID: PAT_MRT4530_83464C.1
aaaataaactaatccgacataactcactcccgtaatgtctaacataaaaagaggcgccaatgcgaaaggccgaggcgcggacagcgccgcggacgagcaagtctggcaagactgctgccggcagctcgtcgccgacgacgacagctgttgcatgtgccgggatcttgagcacatgctgccaggcatctacagggagctcggcgccaccgaggccggtcaccccatggacgaggtgtacaatagctgcccgataggggacttggagcgcacggcggcgagcctcccagaattctgcaacctggacatccccaatgggactggtggagtctgctactgccttgggtatcctatgaccccaagaaccgttcactaggctactatagttagc

SEQ ID NO: 84206 - DNA, 115 bp, Oryza sativa
  Clone ID: PAT_MRT4530_83465C.1
agaaggtgacgacaacggtcctccagcaagccccctcctctaccgtcaacttccaggttagttctttctcccgcaccctcaccgtgccactgcccgatctcaccggcgtcggaag

SEQ ID NO: 84207 - DNA, 129 bp, Oryza sativa
  Clone ID: PAT_MRT4530_83466C.1
atgcatacggcgctcaaaattgtaaaaatgtataccaatgggccgttagctcattgggccgcaccagaaggtgcaggtggcccatgcacgctcgcgcgggtggagcttgctacttgggtccgtgggatg

SEQ ID NO: 84208 - DNA, 300 bp, Oryza sativa
  Clone ID: PAT_MRT4530_83467C.1
atggcgacggaggagtggcagagcgtggggaggatgcggcagcggtgggcagcgccgaggtggggggatgaggaggacgacggaggaagcgagcgcggtgaggcggttggcggggggacgatggcagaggaggcgagcgcggttgacggcagaggcggttggcggcgaggcgagcgtggcggcagaggaggcgagcgcggcggcggaggaagcaagacggcagcggcggcgaggcggttcgcgacgaggacgacgctcaggctgtgcccgctcttccgacgcgccatgagctatcagtga

SEQ ID NO: 84209 - DNA, 3303 bp, Oryza sativa
  Clone ID: PAT_MRT4530_83468C.1
gcccccgggcccagcctacccgttgaccgcccactagagcgccccgggactcctgcagttggagcgctctggacagccacagaacgtcacagcacacactcctctatttcttggatgtgcctacaggggtctggccaacgggtggtggcttcgatagagctggtgaagatgttgtgattggctttgtggagtcaggaattgacccccaacatccgtgcttctatggacccaccagttctccggttcccgatgttccttattagtcgatgacatgagtcatggacccagtacaactcaagacttctgggggtcgaacaccagctactgccatgcaggtcccacatccggcgattggtgccgaaattctgtggtgtggcaattcggatattgctgaagatgaaggcgcttgagctcgcgtgtttgcttcttatcattgtaccacaagtggttcttggaacacatgatgtgtacattgttacaatggaaggcgaacctgttgtcagctacagaggtggagttgaaggattccctgcaaccgccatagatttggatgaagataaggtaattacctgttgtggttgaaacatgacaatcttgaatatgttccaatttactgatttcagtgaggctgtgacttcatactcactccacctacgaaggtaccatgacaagcttctagactcacttttggtagaaggaacttatgagaagctttatagctaccatcatcttattaatggttttgcagtacacatgtcacccttacaggctgaattcctaaggaaagccccaggagtaaagcatgtggagagagatatgaagatacagaaattgacgacacacactccacaatttcttggattgccaacaggggtatggccaacgggtggtggcttcgatagagctggtgaagatgttgtgattggctttgtggattcaggaatttacccccaacatccaagcttctctgcccacaaaactgatccttatgggcctgttcctcattacaaggggaaatgtgagatggatccagtaacaagaagaagcttttgtaatgggaagatagttggtgcccagcattttgcaaaagctgcaattgctgctggagcgtttaatcctgatgtcgattttgcatctccattagatggcgatggccatggaagtcatacagcagcaattgctgctggaaataatgggattccagtacgaatgcatggtcacgaatttggcaaagcaagtggtatggctccacgtgctaggatagccgtgtacaaagtcctttacaggctttttggtggttatgtatctgatgttgttgcagccattgatcaggctgtgcaggatggtgttgacattctcaacctttctgttggcccaaatagcccgccaactgctacgcggactacatttttgaatccttttgatgctgcacttctttccgctgtgaaagctggggtgtttgttgcccaagcagcaggaaatggaggaccatttccgaaaacactggtatcattcagcccatggataaccactgttgctgctggagttgatgaccgcagatacaaaaatcatttggtgctaggaaatgggaaacttcttcctggacttggtgtatcacggtgtgttcggaacccctggttcccaacactaagtgcccgcacggaaacggagcagcgattagcggctgcaacccatgagaataaatcattcagcctgatttctgcggctgatgctctgctgggttcatctgccaccaagtacagtgcattagattgccaaaggccagaactcttgaataagaggaaaattcagggcaaaattcttttgtgtggatattctttcaactatatttctgggacagcttctatcaagaaagtgtcagagactgctaggagtcttggtgcagctggttttattgttgctgtggagaatagttacccaggaacaaaatttgatcctgtacctgtcagcatgcctggtattctcatcacagatgtcagcagaacaaaggatcttatagactactacaactcttctacaataagagattgggcaggaagggccacgaccttccaagcaacagcagctattgcagatggtttggcaccaactctatacaactctgccccccaggttgccttgttctcttctcgaggaccggatgtaaaagattttagctttcaagatgctgatgttctaaagcctgatatactcgctcctggcaatcttatatgggcagcatgggcgcctaatggaactgatgaagccaattatgctggggaaggatttgcaatggtttctggaactagtatggctgcaccacatattgctggtatcgcggcactaataaaacagaagaaccccaagtggagtccctcagcaataaaatctgccttgatgactacatctaatacattggacaaggggagccatcctttaagagcacaacagtactctacatcagaaattatgacacttacacgggctacgccgtttgattatggcagtggtgcggttaacccaaaagccgccctggatcctggccttgttctggatgcaactcatcaagattacatcacatttttgtgttcgatccccgacgtggaacacagtgaagtatcaaacataactggttcaacttgcagctccagctccaaggtgcagcagcgcccctatgatctcaacatcccctcaatcaccatctcccagcttagaggcacgcagacggtgaagcggacagttacaagcgtggccgccgaggccgaaacctacaccatcatgacaagaatgtcgccggagatcgcgctggaggtctcacctccagcgctgacagtgctccccggcgcatcgagagagataacggcgaccctcacggccaggtcagtgactggcacctacagttttggagagatcaccatgaaaggggaccgaggtcaccttgtgagaatcccagtggtagctatgggatttaagtagactaatgtaagtggctccaggtgagctagagctatgtctgcctctgaaagcttcaagctgaggaatgctgtaattttttgtagcttagtagaaagaaaataatagtcagtacgatgctgtatttccatgttgttatacttgtgctccaggctgtaaaatatatgtgggctttgaagcctctatgaaatgatctggagttaatgtgtccaaatctgaatgcatgggctactcacacgactcgatagtcgataatgaatacttcaacgtctagaacaaaaaaaaaaaaaaaaaaaaaactcgagactagttctctctctctctctctcc

SEQ ID NO: 84210 - DNA, 2696 bp, Oryza sativa
  Clone ID: PAT_MRT4530_83469C.1
ctcacacaagagtcattccctattgcattatgtggtgttacaatacttggttctcataatgtgttggtagctttagatgagaccaggtcagatctatttcttattgagctcaagggtgagagcatcagctacaacaaggtccatatttcagatcttgttcaagacttatctggaacagtcaaacttctacctttaatgttcaatggtgtcatagcttttgcaagcatcttctactgtttcccttctgaaacttaaaggaatcgatgggttggaagtaattcagagctttgaacaaccagctgctgtgagtgatgcgttgacaatcacagaaaaagacgaagcttttgccgttgtgcagcatacaggttctgaaatcgaatttgtcgtcaaatttacaagtgatgtcaccggtgaagttattagagaaaaaattaatatagatcaacataggggcaatattcaaaaggtcttcttgaataactatatccgaacagataaatcacatggttttcgagctttggttgtaatggaagatcattcactcttgttggtccaacaaggggaggttgtttggagcagagaggatggacttgcatcaattgttgatgtaacaacttctgaattgcctattgagaaggatggtgtctcagttgctaatgtggaacataatctctttgaatggctgaagggacacatgctgaaactcaagggaactctaatgcttgccaatgctgatgaacttgctgcaattcaagcaatgagactgaaaagctctgagaaaaataagatgacaagagaccataatggatttaggaaacttcttattgtattgacaaaggctggaaaagtgatagccctgcacactggagatggacgtattatctggtcaaacttgttgcagtcccttcgttcctccaagtctggtgaaatgccttctgccttaagaatatgtcaatggcaggttccccatcatcgtgtgatgcatgagaacccatccatacttatcattggtagatctggagcagatagtgctgctcctggtgtcctatctattcttgattcatattctggagaagaacttaactctctgaagttagaccactctgttgtccaaattatcccattgacagtgaaggattcatctgaacatcggcttcaacttattgttgattctcactcccgtgctcatctctatccaagatctccagatgccatgaatgtatttcttcatgaaatgccaaatacatatctctacactgtagatattgagacaaatgttatcagggggcattcattacaaaagtcatgtgacaattcagctgatgagtactgctttagcacaaaggagttgtggtctattgtttttccttctgatacagaaagaattgctatctccgaaacacgaaagatgaatgaggttgtccatgcacaagcaaagatcatagctgatcaagatgtgatgtacaagtacttatcaaagaatttggtttttgttgctactgtgtctcctaaagcttctggtgaaatcggatctgcggcacctgaagaagcttggcttgtggcttatcttattgatgctgtaaccggacgtatattgcaccgtgtgactcatcatggagctcaaggccctgtacatgcagttgtaagtgagaattgggtcgtatatcattatttcaatctccgagcccacagatttgaaatggcagtgattgagatatatgatcaatctagagcggacaataaagatgttatgaagctgatacttgggaagcataatctgtcagcaccaatcacttcttatactcgtccagaagtaatggtgaaatctcagtcatacttctttaccttttctgtcaaagcaattgcagctacacaaacagctaaggggataacttccaagcagcttcttattggcacgatcggtgaccaggttctggcacttgacaaacgttttgttgacccacgtcgttcagtaaatcccacccaacaagagaaagaagagggcattataccactaacagatgctttgcctattattccaacgtcctatttgacacactctcttcaagtggaagctctgcgaggaattgtttctattccttcaaagttggagtcaactactcttgttttcacatatggtgtagatcttttctatactcagcttgctccctcaagaacctatgactcactaactgatgagttcagctacgcgcttctactcatcacaattgctgcattggttgctgccattgttgttacttggatttggtctgagaaaaaggagttaagagataagtggaggtaagtgaggcctcaacacgatgcagatggatttcgggccctagtcagcatcccttttcttttgccatttttgtttgtagtggtagcctctgctagggtccatgtcacttttgactaggcctttctttatgtaaccatcttctgggatgacactcttttaagtcttatagaaagcctcctgtgcgattagaaatgctgcgaatggcattgaaaaactggtagagtgccaacggcaggcatggattgcttatgagttgtaaaattttaccgcagcaactaaactgtttagcagaatattagttattgttgtccatagaacatcaatctcttgtaacttatttcaacttggcatgttccatcattatacctttttctgaaaaaaaaaaaaaaaaaaa

SEQ ID NO: 84211 - DNA, 225 bp, Oryza sativa
  Clone ID: PAT_MRT4530_8346C.1
atgaaccaggttcggcattggaatcaaagtggattcggcaaagagctagattcgaagaacagagtatgcatcggctgcgaaggcatcggctggggtctgcatcggctgagatggagcgcacagaggacagccgatacaaccgatacagccgattctgttgaggacagttgtagaactgcttctagaatcgatcaacgtgctacacaaggattgccacgacggaga

SEQ ID NO: 84212 - DNA, 162 bp, Oryza sativa
  Clone ID: PAT_MRT4530_83470C.1
atggacatggtgcctaccaacaacatctgggatggttggctcaagaggggaagatatggtaacggctacggcggaaatggctctccaattgtgatcctggaattttgcacagttcagaatgtagactggatgaagcaagttcagactccaattgtaatttag

SEQ ID NO: 84213 - DNA, 239 bp, Oryza sativa
  Clone ID: PAT_MRT4530_83471C.1
tcgtttctgctgctcgcggcgccccggagcgtctcctttgggggagaggagaggcgaggagaggagaggggggtgagccatgatggagtcgtgggtcccgtcctgcgtcttgtgcggggactactcgcaccccgtctgccgtgcctgcattctcgcgctctgcaaggtctgcctcgtctaggactccgcctagggacgcaccacctgcgcgcgctgttgtctggagtacggtgcgccct

SEQ ID NO: 84214 - DNA, 478 bp, Oryza sativa
  Clone ID: PAT_MRT4530_83472C.1
cttttggaagagatgcttttggatctgttcagttaggctgttggctgctttcagagtttcaggtttccatggcacaatacacttgcttcccccttatttagtttttgatttttcttaggtacttctcagcttgtaatgtttcttcgttggttcataaggtcaaaagtttttttttttttttggtttgctgaagcagtggttgacgagttttttagttgagtcgccgtgcttgaggtatagagcaagttgtaaattttgttagtttagatcaggtccgtagattaaattcttttagaacgagaaagggcatcccataggttgtaagtctttggcggaatgtataaggagtatagtggctctctatttgttggaatttctcagttgaaggcatttaagtctgtacatcggggaaatagtaccctgccaacatttgtattggtcattggagaataaatgaagtgtgtccttctgagttttg

SEQ ID NO: 84215 - DNA, 469 bp, Oryza sativa
  unsure (1)..(469): unsure at all n locations
  Clone ID: PAT_MRT4530_83473C.1
gaacacttcgccggcgacggcggcggcggcatggcttctggcaggcgcgggacttcctcttctgcggcgtgtgcggcaccctcctcaaattcgctccgtccgctccgctcctgcccctctgcgcttcaagcgaaggcaagatatcgagggaagagcgcgtacacgtcacgctgagntattagagagactaaacttatccatatgtgattcttaaacaacactgaaggaggagcgaattgtcgaaggctacagtaaataaagagtgtaaaatgcaaaatctgactnagtattcacaagagttacgtcagcagtgagggcaactgtttctataagncgaactcaggatgagtcaatggaccagtagnactagatgantttttatcatctcgtttggctaaaatgcatcttgcatgcaagtgtttgaatatttttatgcttctgatatgcagatgggttcggganggttaga

SEQ ID NO: 84216 - DNA, 273 bp, Oryza sativa
  Clone ID: PAT_MRT4530_83474C.1
atggtggtgccagtgttggcgcggcagccggtcggctcaaaaggtggcgcaagcgtcggcggtagctggttaacgggggaagctctgaccgccgacacgacgccatccaggccgggttctcctttggccaaatatggcgaggaggccagcgagtggcgggacggaggaagcctgggccagcttccaagggtggcggcagggaacaacaacaagtgtgaaagtgaaaaccacatctcccatagatggacgatggcggcgtccttgatgtcgtga

SEQ ID NO: 84217 - DNA, 310 bp, Oryza sativa
  Clone ID: PAT_MRT4530_83475C.1
gggtgggcccttaaccaaaacaattttgtttattttttttattttgtaaatacagagttcattacgaacgggaacaaaaaaggaaaaagaaaaaacaatttgggaaaaaaaatatagggtgcggaaaaaaaaatttgggaaacaaaggtgttttaaaggtggaacaggttcgagggaattagaatacaaaagggaaacagtaatggaatttgtgagaaactgaacatcaaaaaaaatattggttgccaaataaaacaaaatgggtttaaaaagaaaaatggcctgaccaaaaggggtgaccctggaaaaa

SEQ ID NO: 84218 - DNA, 1602 bp, Oryza sativa
  Clone ID: PAT_MRT4530_83476C.1
atgccgtcggggtcggcgacgcagttccggtacacgcagacgccgtccaaggtgctccacctccggaacatgccgtgggactccctctaagtctcatctccagccgcgctttctctctctctctagctcccagcctcgacttcacccaaaccctagccctattgcgcgcgggagacccgccggcgaggcgcgcgcacggagcgagccggggggcgggagggccagccgccgccgccgccgcctgcagcagcgaggatgccgtcggggtcggcgacgcagttccggtacacgcagacgccgtccaaggtgctccacctccggaacatgccgtgggagtgcaccgaggaggagctcgtcgagctctgcaagcccttcggcagggtcgtcaacaccatgtgcaacgtcggcgccaaccgcaaccaggccttcgtcgagttcgcagatcaaaaccaggcaatttcaatggtttcatattatgcttcttcttcagaacctgctcaagttcgtggcaaaactgtatatatccagtactcaaacagacaagaaattaccaacaataaaggaactggtgattcctctggcaatgttcttcttgtcacttttgaaggtgtccagcctaatgatattagcatagatgtcattcatttggtattttccgcatttgggtttgtccacaagatagcaacctttgagaaggctgctggtttccaggcacttatccaatatactgatgctccaactggactagaagcaaaaaattcgttggatggaagaagcatcccgagatatttacttctcgtcatactgatctcaatgtaaaggcacatgatgagagaagcagagactacactgtttcatcagatcctagtgcacaaatgcaagctgcagcgcaagccccaggtcctagcactccaggagtggcatggcaaaacaccgcacccagtgcttccttttatggcagcactgcggcagcgactcctgttggacaagtgccagcttggaatccaaacatgcaggcaggtgcttttggatcggcatcgtctgcatacccaacccaaccaatgatgccaggatcagttccacactatccaggaattggatccagttccggagcactgccagtatcgttccaggcctcacatcagatgccacagtatggtgtacccccagctgctccacaccatgctccaccggctggccaaccaatgtatttcccgaaataatctatctttatccgatgtacaagcaattagagcaattgcaaatgttgcctgcaatactcgggtctgggtatcttctcttcaaattttgggttgtaactcgtctatgcagctattcatattgtaactcagtgagctccctgtcgcaaatgtgcctctgcgtcagtcgctgtctgtaaactgtccggcaattagaaattcccatccttagcatgcctggtattgttcagctcgaaactgaaatcttttcttcgtgccctaaatgtcaccggtccaaatatgtcccccgccggccctccccatgatgacctgccaaaaacgtcccaaatatgttactcacatacttacacctaataccttctagcaccaatataagcatatt

SEQ ID NO: 84219 - DNA, 1881 bp, Oryza sativa
  Clone ID: PAT_MRT4530_83477C.1
atgggccagtcagaacgggtgcttggctggtcagaccgggctatctatagccgtcatgctactccacatatccctaatgcttacaatgatcctaatagaggatattctcatgacaccgggcacaaatacaatgaatatgttgctgattatattgagaggtttagagatattaaaagccgatgttttagtttgaaaataactgacaaagatttggccgacattgcatatgatggattgcttgattctattaaagagagattgaatggccaaatatttcttgatgttgatcatgtgttgcataaagctctggatcaggaaagccgagtggatgataatagcttaaatgctagtttagatgatagtgcaatatcatgtatagccaaaccaagcgatggttcgaattgtgttaatagtttggacgatgatgctataacgagtatagtcgaatcaagtgttggttcagattgttttattaacttcgatgataacgcaataaccaatatagccgaaccaagtgatggttcggattgtgttactagtttagacgatgatggaatagccgtaccaagtgatggttcggattgtgctgttagtttagagaatgacaccattgaaaatatagccgaactaagtgacggttcggattatatcacaagcgaaagtgaaatagcgttgtcacctaagaccgagtcaaaaattgatcatgtggatgttggaaaatatgataataatgtcttgcgggatagtagtgaaatagaatccaaagaagctatgcatacatatcaaaggccgtatcttgaacacgtagattcggtcccatacctgcaaggatttgaggtgcccaacttcacaaaattcacaggtgaggatgctagaacaacaatggagcatatcggccaatttattgatcaatgtggtaaggccggtagtaatgatttgcttaagttaaagttgtttcctctttctttgtcaagttttgcatctatatggtttagtttacttgctcctagctcaatttctacatggtcacaaatggagcatgagtttcctgattatttcaaagatgcaagcttgatggagcaaagaccgattgatacttcatcggtcacttgtgagactatttcggttacgcttatgcctaagaccggaattgttagtaatcctctccctattagtactattgatgatgataaaatgaaagggaaaaatgttattattggggatcctcggcccgagacaattcggatcaataatgcaaaggccgaagatcgtaaggttacaaaggatgagtcatctagttccatagagactaaaaagctgaagctcacttttgagatgcttatggctaagtataagaaaggattagccagtcaacgatttgataatcaaactagtgattcaaaaagaccaagatcatctcgtaggaagagatttggtcaaacatcaaagcaatcagagccatcaactataccaactccatacaaacctccagttgtgatgccatggtatccatatccaatgtcaccatttggttatccttttatgtattacatgccatggatgcatcaaccacctataccgtattatcaagagtggaaggaatcacctaggtcaataccaaatcattcatctaattcaagacaaaaccgtttctcacaaaagaatcggtccggtggatcaaagatgaaaaaagtaaagaaggtgtgggtgcgaaaagaagccaaagctccggaggtcgttactattaaggaggagtctcaagatgttcgagtacctactggagatgcggcgaaaactatacaagcggagaagactgaagccgacgccgttactgtcaacatcggcggcctgaccaaaatagctggccggtctaaccgctag

SEQ ID NO: 84220 - DNA, 2055 bp, Oryza sativa
  Clone ID: PAT_MRT4530_83478C.1
atggacgaaataggagaaaattgccaaagtttgaaaagtgacgagtttccttcacagggctggtcagatgacagctatatgcccgaaattaatcaagaaatttcttcatcaattatgaccgagcacgaagttgatccaagcgatatcatgcctatcacattggaggatctaaatgaggagcaacgtcaagacatggagcagcacatgaagacaatacgagaggaggcattggtgagaatgttcatcaagacccatcaaggagtggtttgtcagtctgatcctcctctcaaactcgtctctgatgataaggtaacctccgattcgcccaacccatccctagctattcaaaaagtcaatgatcattatgtagatgtatctgctacttctagttttgcttctatacaatatgcttataatgctatggagggatcaatcggtgtttatacagccgactgcatgggaatcggctatatgcagaaccgagctgatgactgtgcccaccgtagccggtcagaccgtgccctatcctggccagatcgggcctcctgtggccggtctgaccgcaccactgaccaccggtcagaccgggtgcttggccggtcagaccgggctatctatagccggtcagaccagttcccatggaatttctctaggttttcataccattattcatcacctgttaatactgttagtcaagctactccacatatccctaaaggttacaatgatcctaacagaggatatcctcatgacactgggtatggccaatataacaatattgcgccgcaacaaccaccttttaggccaccaaacccaccaccaaatgcacataggcctgaaaatatagagttgattagtatcattattagggataaatttgggattgaagcatggaatcgtgctagggagtaccaaaagtcgtatcctaattattatgacaatatcccgtaccctcgtggttatagagtttccgaatttaccaaatttagtggtgaggatagtaggaccacatgggagcatgcaggtcaatttttagcgcaatgtggtgaggctagtaatgtggaaacatataaactgcgcttgttttctttatctttgttcaatgctgcttttacatggtttacttctttaccgacaaattgtattcatacttgggctcaattagaacaaaaatttcatgattatttttacactggtaaaactgagcttaggttgtctgatttaacatcggttaggcacaaacacgatgaatttgttactgattatattgagaggtttagagatgctaaaagccgatgttttagtttgaatataactgacaaggatttggccgacattgcatataatggattgcttgattctattaaagagagattgaatggccagatatttcttgatgttgatcatgtgttgcatgaagctctggctcaggaaagctatgtgtatgacgatagcttaaatgctactttagatgataatgaaatagcaaccgaactaaatgacggtttggatagtatcataagcgaaagtgaattagtattgtcacctaagaccgaatcacagatcggtcatgtggaggtgaggatgctagaacaacaatggagcatattggctaatttattgaacaatgtggtaagtttacttgctcctgattcaatttctacatggtcacaaatggagtgtgagtttcatgattattttaaagatgcaagcttgatggagcaaagaccgattgataatttatcggtcaattgtgatactatttcggttacacctatgcctaccagaattgttagtaatcctccccccattagtcctattgattttgacaacaagaaagtagtgactcggccttgtcaagccgaatccacaaaagggaaaactgttattattggggatcctcggcccaagacaattaggatcaataatgcaaaggccgaagatcgtaaggttacaaaagatgagtcatctagttcccaaaagactaaaaagccgaagctcacttttgagatgcttatggctatttacagaaaggatagctgggtccacgattga

SEQ ID NO: 84221 - DNA, 2808 bp, Oryza sativa
  Clone ID: PAT_MRT4530_83479C.1
atggacgaaataggagaaaattgccaaagtttgaaaagtgacgagtttccttcacagggctggtcagatgacagctatatgcccgaaattaatcaagaaatttcttcatcaattatgaccgagcacgaagttgatccaagcgatatcatgcctatcacattggaggatctaaatgaggagcaacgtcaagacatggagcagcacatgaagacaatacgagaggaggcattggtgagaatgttcatcaagacccatcaaggagtggtttgtcagtctgatcctcctctcaaactcgtctctgatgataaggtaacctccgattcgcccaacccatccctagctattcaaaaagtcaatgatcattatgtagatgtatctgctacttctagttttgcttctatacaatatgcttataatgctatggagggatcaatcggtgtttatacagccgactgcatgggaatcggctatatgcagaaccgagctgatggtatgactggtcgtgacaccggtctaactgcaccatatgtctgtcagactgtgcccaccgtagccggtcagaccgtgccctatcctggccagatcgggcctcctgtggccggtctgaccgcaccactgaccaccggtcagaccgggtgcttggccggttacaatgatcctaacagaggatatcctcatgacactgggtatggccaatataacaatattgcgccgcaacaaccaccttttaggccaccaaacccaccaccaaatgcacataggcctgaaaatatagagttgattagtatcattattagggataaatttgggattgaagcatggaatcgtgctagggagtaccaaaagtcgtatcctaattattatgacaatatcccgtaccctcgtggttatagagtttccgaatttaccaaatttagtggtgaggatagtaggaccacatgggagcatgcagccgaactaaatgacggtttggatagtatcataagcgaaagtgaattagtattgtcacctaagaccgaatcacagatcggtcatgtggaggtgaggatgctagaacaacaatggagcatattggctaatttattgaacaatgtggtaagtttacttgctcctgattcaatttctacatggtcacaaatggagtgtgagtttcatgattattttaaagatgcaagcttgatggagcaaagaccgattgataatttatcggtcaattgtgatactatttcggttacacctatgcctaccagaattgttagtaatcctccccccattagtcctattgattttgacaacaagaaagtagtgactcggccttgtcaagccgaatccacaaaagggaaaactgttattattggggatcctcggcccaagacaattaggatcaataatgcaaaggccgaagatcgtaaggttacaaaagatgagtcatctagttcccaaaagactaaaaagccgaagctcacttttgagatgcttatggctaattacaagaaaggattagctggtcaacgatttgataatcaaactagtgattcgaaaagatcaagatcatctcgcaggaagagatttggtcaaacaccaaagcaattggagccatcaactataccaactccatacaaatctccggttgtgatgccatggtatccatatccaatgtcactatacgtttatccttttatgtattacatgccgtggatgcctcaaccacatatgtcgtgtcatcaagaatggaagcaatcacctaagacagtaccaagtcattctagctcaagacaagaccgtttcccacagaagaatcggtccagtggatcaaaggtgaaaaaggtgaagaagatacctagaggtcgatctgaccggggggcattagagatgagtgggaaagttgagagcaacacaagagcttccacttcaaccgaaaatatcaagaatcatcatttagctcttggaacacaaccacagccgaattacataccttctggcttatcttgctctcaaaagaggaggctacaacgtcttcgggtcattggtcaaaaagaaaaagaggccgaagatgtggagaacaaaacatgtaataatttagagcctcggacagcaagtaagcgagtgtggagaccaaaagagtgcggtattcatcttgccttcgaaatcacgcaatcaagaaagccgatttttcttggggggcaagacattaatatgcttatgagaaaatcaagagagatgaacagcgatgggtacaacatcacatctttgagccgccgtttgttggatgctaaggcaagaaataagtttgaagtacacccaaagaagtggcataaggtgctttcagaagcattatgggctcataggatatctaaacatggtgctaccaaagtcactccttttgagttggtttatggacaaaaagccgttttgccagttgaggtaaatcttggctctcttcggtataccaggcaagacgacttgtcgattgaagattacaagaccttgatgggaggcaattttgaagacgttatcgacaagcgtttgaagacttttaaagagatggagacacttcaaggacaacatttttcacagagcactcaatgggaaatacttgaagaaatactttcctacggtttggcaagatgcttaggaagtctcgtggccgattcacgatgttcatcaaaaaggcagggggacatgtgtttacaaccaaatttggcacctatgggcgaaataggggaaaagtgtcaaagtttcaaaagcgacgggtttcgttcacaaggccggtcagaccacaggttggacgtggagaagggcctgtag

SEQ ID NO: 84222 - DNA, 3834 bp, Oryza sativa
  Clone ID: PAT_MRT4530_8347C.1
atggccgacatagcatttggcgctgtcaacttggtgctgggcctcatccaggacgaggcccggctgcttggcagggtccgtgaggacctgcagttcatcatgcaagagatggagagcatgaacaacgtgctccgccacatcgtggccaacaaggggagtaccactgccggtgactaccagctccgcccgtggatgaagcaggtcatggagcttgcattcgattccagaaattgcgttgagctctacacgcagtctggtagcgcgcgttgcggttggctgccctgggaaatggtagctcgccaccgggtcgtcacccggatccgcgagctcaagatccaggcacgcgaaattagtgagaggcaggcgaggtacggcattgccgtttctcatcaccagcttcccgtcgaggtgaccaccacaatggagcccagggatgctagtgtgaggccgcgcaaccagaggcgcaccaatgctggcagctggaacaatccttcccggcgtgccatactcgaggatggctggtatggcgactacggcagcgtggatgaggctctctcgcggctcaagccgttcacagaatatctttacgttgaggtgaagccaccggaggagttgaacagcgacgacaagcagcagccgcagcctctgttggatggcggcaacaagcatgatgacaaggagcagccaccgccgcctgtgcaatcgggaggctgtgtcaagctgcagccaccactccagtctgacggcagcgacaagcaggatgacaaggtccagccactgccactgcagtcagatggcggcaacaaggagcagccgccgcctctgcagtcggagggtggtgacaaggagcagccgctgcctctgcagtcggagggtggtgacaaggagcagccgctgcctctgcagtcggagggtggcgacaaggagcagccgccacctctgcagtcggagggtggtgacaaggagcagccgccgcctctgcagtcgggaggcggcatcaagcagcagcagcaactgccccagtcggatggtgatgaccagcagccgctgctgccccagtcggacggtggcaacaagcagcagcatatcagggtcgtcataatcagtgtgcaagatggcatggatgaagctgctgttggagagaccatgctcaagcgttacaagagtcactggcgtaatccatggactgatgaggagctccacgttgctctccaacgacctccgattctctcggagattacaaaggccatggttgacaagctgagacacccgaaagaaagggagacagacaatgaggcagaagacaggcagaggcttgccaagaaattgagcaatgaaaatgtgctgcttgttctttccggtttgaattacccagtgttatggcatcaggtcctggaattgttgagctcgacgggttgctctgacagtgcagtaatactctgcacaaatgatagtaagatggcaaaatattgctgtgactctgccaaatgtgggcctccggtaatctactctctcgttgatatttacctcaacaaagcgctcgccctgcttccccacagatacgatgacagacacttgaaaggaattttgtgcaatatcctcacccaatgctgccctgatgtcttctgcatgaagatgttcctccatgccctctactacaatcctgaaacgacggaacaccagttgcaggtcctgaatacaagccttggtaaagaatatacagatcatgggaggcaggacagaataatggccttctgctaccaagcactgccaaataattacaagaactgcttatggtattcaaccgttttcacccgtggaatcagcatgcccgatggcgtccgaagagcaagtttactaagacgatgggttgcccaaggcttgattacccaagtggatcagtcgagtgcagagattgaagctgggcactgtttcgaagccatgctcagacagaagcttattgttccttctggactcagcggtgcacgtaaggtaaagagctgcactgtgcatcctgtggttgccgatttgatagacagggagtcttcgacagttgaggacctattgctcaacaaccagttgccacttgacttggatctcctctactcaatccggaacggcatgcaactccatccggctaactctaatatcacaaggttcttgaactcactttccagcacttcaaggttgctgctgactgtactcgatttggaaggtcgtaagggcctcaaggcaaacgacctccataccgtatgcaagattcacaaactcaagtatctaagtctccggaacacagatgttgcccaactgcccaagcaaataggtcagctgaggctcttagagacacttgacatccgaggaacaagggtacaggtgttccacacagcgctgccaatgctaaagcacctgcttgctgggtgcattattgtctgcccaggcaaagacattgtcaagtccaaggaattcttctccactgtctgcgtgcctcgtgctgttgcaactatggaaaagatggagatattgtcccatgtcaaagtttccaacagtgctacagaactgaacaacattggtgacaaactcgagcacctgaagaagctgggtgtggttctatctggcacgaaagctagcttgatagatttattccttcaggttgacaaactccatagaggtcttctgtccttgtcaatccgaatggatccaccgggtaactgggatgctattgatgctattttactgagacctccaaagcttctggagagcctacacatctgtagcatcagaagcaggttgcctcccaggatcaaggagctccatcaccttgccaagataactctacgtgacacctttttgaatcagggcgccctcgatgtacttagcaggctcgatggcatacgctatctcaggctttgctaccattcatttgcagaaggcgctctccggttctggagttttgggaatctcatggaccttatcattgaagatgatattattatcagcgtcacctttggttaccgaaaccctgataagcttgaaaagatagtttggtccttcactcacatggagaagctttcaggggtccgtaagctgcagagtctcacacacctcgaactcaaggggggaacgtgcaacccgcagaatctggaaaaactgaaaagaaaagtcagtgaacacagcaatggtattactttcacgctcaaactacctgagaatcaaagtcagtgaacacaacaatggtggtattactttcacgctcaaattaccttcgatcgtcaaggataaggattgttgatgctgctcctcctgcttgggaggtatttctattacagtgcttctactatgaataaagatgaaaggaacttgggaggtatttctattacagttgcttctactatgaataaagatgaaaagatggtacagttgcttctactatgaataaagatgaaaagatggtacagttgcttctactatgaataaagatgaaaagatggtatttctattacagtttcttctactatgaataaagatgaaaagatgatgaaataaggccttcatgttcttcctacttttatgtattcagtgtattcagtgttgatggcaacattgtaatcttgtgtgcatttttgtttttaagattgttttagttgcatcctgcatttctgttcctgcgtgtgttaattcggcatgccgagctgatcactccaaacgtggtgggatggcacgagtttggtgaatcttgtgtttaattcggcatgctttgtatgtaaaatctccagctttggagaatagtaaaaaaaagagaaaaaaaacagaaaatgctgcagcttcacgcagcac

SEQ ID NO: 84223 - DNA, 931 bp, Oryza sativa
  Clone ID: PAT_MRT4530_83480C.1
ttaggtgctggatctgtcgccgcctcttcctccgccgtcaacatcttcccttctccgccctaggccaccgccgtaccatcttctcttcttctccctatgctgccgcttctgccgttgcacgggtgtaggggcgtcgcgcggggccacgccccctcccaatgcgtcgcttgccccgtccttcgccccacgccggtatgttctcttccccctctccctcagtctgtccgttctcctcccctcccaagctcgcccctcctcctcctcgatccgcttcgacgctccacttaggcactcacctccccccgtgcgacgacctcctctactgctgccgctgcgggcgcttctctctccacctctccttgtggtggcggcccccttcgccggcagcggtgacgacctcctctccatccccctcttccagtgttgggccggcacaggagcatgcggcggttggagcgggtgctgcagcggcgaacacgacggcgacgagagctgtcgtgggtggcggtggtgggctcgctgaggctcctccatccccctcctttttttgtgcagttttttctcctttttgattttgattttcccctttgttgtgattgaatctgtgatgaatcggttgcccgacaaggcgagtctgtgatgaataggctgcgaatctgtgggttgtttattgggttgatcttttttttcctctttttaatttactcttttcttgtgattgaatttgtgatgaattggctgcccgatgaggtgaatttaagacgaatcggctgggaatccatgcgtgttttattggatttcaattttaattttgttgtttactttaggcttttcccccttcaatttcgtttatttttttctctagttttactgtttccaatcttaaatattgaagtgcctcatctatcttaaaaaaaaaaaaaaaaaaaaa

SEQ ID NO: 84224 - DNA, 1764 bp, Oryza sativa
  Clone ID: PAT_MRT4530_83481C.1
atggagtatgagtttcatgattattttaaagatgtaagcttgatggagcaaagaccgattgataattcatcggtcacctatgatactatttcggttacacctattgttaagaccggaattgttagtaatcctctccttgttgctcctattgattctgacaacaaaaaagtgttgattcggcctagtcaagccgaatccacaaaagggaaaaatgttatttttggggatcctcggcccgagacaattaggatcaataatgcaaaggccaaagatcgtaaggttacaaaggatgagtcatctagttccataaagactaaaaagccgaagctcacttttgagatgcttatgactaaattcaagaaaggattagcaggtcaacgatttgataatcaaactagtgattcaaaaagaccaagatcatctcgtgggaagagatttggtcaaacaccaaagcaatcggagccatcaactataccaactccatacaaacctccggttgtgatgccatggtatccatatccaatgtcactatacggttatccttttatgtattacatgtcgtggatacctatgccatattatcaacagtgtaaggaatcacctaggtcagtaccaagtcattcatctaattcaagacaagaccgtttctcacaaaagaatcggtccggtggatcaaaggtgaaaaaagtgaagaaagtgtgggtgaggaaagaagccaaagctccggaggtcattattattaagaaggagtctcaagatgttcaagatgttcaaaaacctactggagatgcagtggaaactatacaagcgaagaagactgaagccgatgccgtgattgtcaacgatggcgccgaagtggataccttctggcttatctcgttttcaaaagaggaggctacaacatcttcgagccatagttcaaaaaaggaggtcggagatgtaaaggataaaacatgtaacaacttagagcctcgaacaacacctaagcaaatgtggagacccaaagagtgcggtattcatcttgccttcgaaatcatgcaatcaagaaagccgattttgctcggggggcaggacattaatatgctcataaagaaatcaagagagatgaacgggcgatggatacaacatcacatctttgagcagccgtttgttggatgccaaggcaagatgccagttctaagtagtggaattggtaaattggcatataatttgtttaaaaaaagccgatgcttgatttttaaatctttgggcaaaattggcaaagtaatagaccacgggcggtctgactggcattgcatggccggtctgaccggtggtagcctgcggtctgaccagctctgcatggccggtctgaccatgcagacagggcggtctgaccggcattgcatggccgggcattggttcgagctagttgcatcgaattacttcactaagtgggccgaaaccgtgccattgaagaatattacttacacggaggctcataggatacctaaacatggtgctaccaaagtcactccttttgagtttgtttatggacgaaaggccgttttgccagttgaggggggcatgtgtttacacccaaatttggcacttgtggacgaaataggggaaaattgccgggtttccttcgcagggccggtcagaccacaaaaaagaaaacagcagcggaataacggtctagcgaagctccggctccactcccacaggcagctcaactggggtataagccaaacgtcttctccttcgcaacttgtcttcaactga

SEQ ID NO: 84225 - DNA, 678 bp, Oryza sativa
  Clone ID: PAT_MRT4530_83482C.1
gggataggggcgtcgcacgagagcaacgcccccccctccaatgcgtcgcttgccccgtgcttcgccccatgcctgccaaattctaacaaagaacgtgtagcttcatttggctccgtgcttaagcgaggattcagattgggtgcagctctaattgcaactgctcctgacgactgcggccgtgtttttgttctttttaaaaaacaatctaatgctttgcaacccgtcgtccttatccatccaccagagcagcatcctcctaatccacgtatccacccacagagcaaccggtatgttctcttccccatctccctcagtctgtccgttctcctcccctcccaagctcgcccctcctcctcctcgatccgcttcgacgctccacttaggcactcacctccccccgtgcgacgacctcctctactgctgccgctgcgggcgcttctctccgagcctgagcgggaggtggagatgaagatggtgggcgaatcgggggggaggggggagggggggcgctccggtcagccaccagctcaaccccgtccacctctccttgtggtggcggcccccttcgccggcagcggtgacgacctcctctccatccccctcttccagtgttgggccggcaaaggagcaggcggcggttggagcgggtgcttgtcacgcccagaaatttccgaatag

SEQ ID NO: 84226 - DNA, 342 bp, Oryza sativa
  Clone ID: PAT_MRT4530_83483C.1
tctgtctgacagcgattgtgagtgatgctctacttagtgagctcttgaccgacgaggatcaaaagatgttcaagcccctggagtctgtcaacatgcatgatcttaaagacgtcaagtaaggctagttcataactgttacctactctaagaacccgcactaagaagacaaagagcttacgacgacatatgcctatgctgatgacggaacagccacaatagatgcttctagcgtccagtgcatagacggtatggaaattgcagatgggaatgccaagactaaagggagcaagccaccattgattgaggaaagaatgttcacctggtttactgatacagagcaca

SEQ ID NO: 84227 - DNA, 1008 bp, Oryza sativa
  Clone ID: PAT_MRT4530_83484C.1
atgagtgggaaagttgagagcaacacaagagcttccacttcaaccgaaaatatcaagaatcatcatttagctcttggaacacaaccacagccgaattacataccttctggcttatcttgctctcaaaagaggaggctacaacgtcttcgggtcattggtcaaaaagaaaaagaggccgaagatgtggagaacaaaacatgtaataatttagagcctcggacagcaagtaagcgagtgtggagaccaaaagagtgcggtattcatcttgccttcgaaatcacgcaatcaagaaagccgatttttcttggggggcaagacattaatatgcttatgagaaaatcaagagagatgamcagcgatgggtacaacatcacatctttgagccgccgtttgttggatgctaaggcaagaaataagtttgaagtacacccaaagaagtggcataaggtgctttcagaagcattatgggctcataggatatctaaacatggtgctaccaaagtcactccttttgagttggtttatggacaaaaagccgttttgccagttgaggtaaatcttggctctcttcggtataccaggcaagacgacttgtcgattgaagattacaagaccttgatgggaggcaattttgaagacgttatcgacaagcgtttgaagacttttaaagagatggagacacttcaaggacaacatttttcacagagcactcaatgggaaatacttgaagaaatactttcctacggtttggcaagatgcttaggaagtctcgtggccgattcacgatgttcatcaaaaaggcagggggacatgtgtttacaaccaaatttggcacctatgggcgaaataggggaaaagtgtcaaagttcaaaagcgacgggtttcgttcacaaggccggtcagaccacaggttggacgtggagaagggcctgtagagggcaagaccaacccctatttaagggacaaggccggtttaattgtaatcccaagaacatacaatatatttga

SEQ ID NO: 84228 - DNA, 1257 bp, Oryza sativa
  Clone ID: PAT_MRT4530_83485C.1
atgtccgaccaccaccacctcaccggcgaccaccacccctccccggcgagcgccgccaccaccgctctaggtcccctgctcctcctcccgtcggagctcctccacgacatcctcatccgcctcgccctcccggagctcctccgcgtccgctccgtcgcgcgcccgctctcccacgtcatctcctccccggacttccgccgcctgtaccacctctcctccgccgcctccgggccaggccccgcggccgcgtggctcctcgtcttcaagaagctccgcccccgcgacgccgcgctccgggggttccatgggccgtccggccgctggttccgcatccccgtctccgccatcctcgcgcccgcggtgccacccggcgaggacctctacttcctggccgcgtccggcagctccttcctcttcgccgccaacggccgccgcgagctcgtcgtcgtcgacctctcggcgcacgccgcccgccgcctcccgccgtccccgctcggcccccgcggcacctcctcctggcgccgcttcggcctcaagctcgtcgccgatccccccgggtcgagccagtttaggtttctgttcgctgagctggtgaacaacacgccactcctcttcgagtaccagtccgagacggacacgtggcagtcatcggaggcggtccaggcggagggggcgtcgacggcggccgggacggaggggacgttcctgtgcgcggcgcacgccgggccggactgcgtgatggtgtactccgggccgggcgtggagcggccggtcttcttccggccgcggttcccgcacaacccgaacggcggcggcgacaggctccacgtgtacggcgacgggagcgccgcggtggtccggtcgacggtgatcgacgagccgggcaggccgcgggtgaaggtggtggccggcgtggacctgtacgggttcgggtcggtcgtcggcggcgactggcagctggcctccaccgtgccgggcgagctggtggaggggttccggaagccgtacgccgtgatgaccgggctgctgtcggagcgggagggcgtggtccggctcgtcctcatctccaactgccgtggcgcctgggacatcgtgtggctgtcgtacgaccgcgcccgcggcgagtggtggtgggtgcccgtgccggactggggcaccaaggggctcaacgtggccggaatcgccgtctcctccaccttctcccgcctctggccgccggccgccgcctcgtcctgcaccaccaccacctcccagtga

SEQ ID NO: 84229 - DNA, 279 bp, Oryza sativa
  Clone ID: PAT_MRT4530_83486C.1
atggtccactgtgccaacgggctcgccgttgaagagacaggcagtgagattcgtggcatcgatgaccgttgtagcgagaagagcgccgccgaggagcgccacaaatgcgatgatatcacgaagatacatgcgatgagctctgcagcatcgaatattgttgtggcgccacagctcactgggtcacggggaggtccgacggtggtggccggcgacgcaacagccgccgccggcggcgagctcctcctctcggcgcagccgtgcagctgcgcgcgtttttga

SEQ ID NO: 84230 - DNA, 594 bp, Oryza sativa
  Clone ID: PAT_MRT4530_83487C.1
cggcgaccatgcgggagtaccaccaccaagaccagtggtctacaccccgggcaccagctctggtcaagcaggaatgggctacccgatgtaccacagctcaccagcagttgcacagggcattggtgaagcagccagtgcagtcagccagtggcacagcacaccagcacagccgagcaggtcacaggcgagactgctgccaggcagctcagcacagcacagtcgacagacaagctggtgcaggtgcgaggcagatcaagccacatgctgggaggcatctacagggagctcaggcgcaccacacagatgtcaggacacacaccatgtcacgaggtgttccagcagtctgtccggagagggtacttggagcagcgcggcggcgagcactcccggcgttctgcaaacgtggacatccaccaacaggcggagtggtgtctgctactggctggcgagatctggctactagctaggctactgtagctactggcatgtatgtggtgtggttactaaaataattagtgttttccttttgttgggaaacaatatgtgtggtgaataaatgatgactccgatggttcctcttcttataaaaaaaaa

SEQ ID NO: 84231 - DNA, 475 bp, Oryza sativa
  Clone ID: PAT_MRT4530_83488C.1
cccgggctgcaggaattcggcacgagggctgccgccatatgccatagttttgccattgacaagatccatttgtggaacctcggtttcaagtgctaatcatttatctacaattcagattgtgttttttttcttgttcttgtagtttttccaattgcttgtagggataaaaccttcatggttaggtcaactacatgagaacataatttacaacaattagatgtgtgggcgtagctgttgcgaggtgatgatcgtatatcggaagcctcaaaacatgaacgtcgtcacgtcgctatcctactttgtacacataggctcatcactatcctactttgtacatatgtgcacatctctgattgaggacaagctacgccaccgtcgctgcctattgccacccacctcacaaagccatggtagtctagcaacttgatagaatagcaataagaacacacagagaatcgcttgactagatgggtat

SEQ ID NO: 84232 - DNA, 612 bp, Oryza sativa
  Clone ID: PAT_MRT4530_83489C.1
atgtcagcccctctaatttcttgtcctcttcgtcccgacgatcctttacaacgaccggcgcggcgcgtagagcagtgcgtctgggtcaagctcgctcgccgtgttgaacatggcggcacgcgcgtccttgccgagcttgtcttggtagaaggagccgtgcagcatctcgttgttgacatcgtagtgccggaacttgccttgtaccggcatcacgcgcgacgccggcttggactcgacgcggaacgacccgccgatctcgtaccaccgctcgtccagcgccaggacctgcccgccattgagccactggctgtcgacggcgacggcgacgttgatgttctgcggcttgcggtggcggtggacttgccggtgcttcccgatgacgcggaggagtgcgtcggcgtggcggagcgcgctctgctcgcggtgggtgcgtcgccgccgctgccgccaacgtcgcaggtgggagcgaacggtacgacggcagcatgcgacgtgccattctgctactgccaggtgaggctgaggcagccggcatgcgcggcgctggcggggagggcgatgaggaggctggagagggagtgctcgcggccaggggtatttcagtacttttaa

SEQ ID NO: 84233 - DNA, 186 bp, Oryza sativa
  Clone ID: PAT_MRT4530_8348C.1
atggcggcggcctggttcacggtgagggaggcgcacgcggggacggcgctggggtttgggagggggagcgccacgcaggccagcgggaggaggaagaagggggatgccgagatggacagcggacggcagcgacattcaccggggcagcacacggggattcaagggagggtgagggcaccggagtga

SEQ ID NO: 84234 - DNA, 4886 bp, Oryza sativa
  Clone ID: PAT_MRT4530_83490C.1
atgcctagagggccccgagtggaggatccagtactggaggaggtacagccatgggagacagcggtggatgagcttaggctaagcatgatggatttgcaaaggaaggtggaagaagaccacaagctggtccaggagcagcttcagaaccaggcggttcaggctcaggtatacaaggatgaggttatgcaaaacttgttgtcaattcaacagatgttaggtgggacaactagttgcatggggcaggaaatcaagggcacaccgaaaacacctggctttgcacaatctgtcgtaggagggggaaaagcagtggacactaatgcagcaagtaccagcagacatcctcttttcgattatagaaaccttagttgcccaatgaccacccaagccatagaaaccacagacctaccaccaactgtttttactcccaaacctgtctccacccctccatctgaatggaatacctcggtttacttcactacaccaacagttccaccaccaattccaccagtaccaccacctccacctaaccaaaacaatttacctcaaaaccaaaattacaatccttacaatatgaactaccagtatacaccattctattaccctccctaccctccctataacacaccttggaaccttccacagtacaactacccaccaccatcccatacaccacctaaccaaccgtttcttccccaaaattgggatcgtcgatttgggccctaccacgatcctaatggccgagaaagaacccagtatgctgagaatgctcatagacgatcaaagcatgttgatttccccattttcgatggtgaatgccctgaatcttggataaggaaggctgaaaagtattttgctttgaatcaaactcctgaagaagaaaaagtcctagtggctgaaatctatatcacaggtcgtgctgatcagtggatctcgagttctgatgttctcactgaacaactaacttggcctgaatttaagtccatgatttgccaacgctttgctgctaagtccaacattgaagtcattgatacttttcgaaatctgaaacagtatggttctgttgatgtttatatcgacaaatttgaagaagttatggctctagtgaaacgaaataggcccaacctaactgagcagtactttttggattactttatctctggccttaaggatcatatcaaaagaccactgaaatctttacacattcagtccttggttgatgcttatgaacatgcaagaaattatgatgtgcctcctcgaagcagtcccactgtggcagtatctcagagtaaggagatgcctaaattaccggttaaaccggcattgaaggatgacaagccatcaccttttacagcaccaaagtcgtttggcagatgcttcaagtgccaagagccttgggtacctggacatggtcgagtttgtaaggccactaaacaaatttatttggtaaccttagatgatgatggagaagaaatgcctgataatgctgcggcccagtttactacaccaccaggtagtcctgctcatgaggctactacccatacagacttgtctttgcatgctctcgagggaaccaattctgttgctacaacttttactatccatgtgtgcattgggaagatgtctgctactgctttgattgatagtggcagcacctcaactttcatttctcccaaatttgtcagtaaggctggcttggagattgttaacaatgaccctattcctgttaaggtagcaaatggaggcactttatatactggtgctaggtgtgttgatgtaccttatatgattcagcagcaccaattcatatctacattcagacttcttaatctgaaaggctatgatatcgtccttgggtgcgattggatttatcaccatagtccattgacactcaacctgaagaccagggaattaaccattcataaagatggactgctggaattgacattacctgacatcaaaccagtggcactccctcctcaacgtgactgtgatcacacaattcccttgataccaggagctaaaccagtaaatgtccgaccttatagactgccatatcagaagaaaaatgctcttgaggagttggttcagcagttgcttacctcccaaaccattcagcccagcatgagtccatattcttctccagctatattggttaaaaagaaagatggcacatggcgtttgtgtgttgactatagacaacttaatgcttccacaattaagaacaaataccccattcctgtcattgaggatctcttggatgagttgcagggagctcaaattttttccaaaatcgatctcaggtctgggtaccaccaaattcgcatgcatgcagctgatgttcataaaacagcttttagcactcatttgggccattttgaatacttggtgatgccttttggattaactaatgcgccagccacatttcaagcactcatgaacaagatattagcaccctatctccgcaaattcgtgttagttttctttgatgatattctcatatatagcaagtcagccaccgaacatgcgcagcatttgagcctagtactacagttactgagacatcaccagttattcgccaaaccaagtaaatgtgtctttgggcaagatcaagtggaatatttggggtatattattagctcctcaggagttgctactgaccctgttaaggtgcaagcagttcaaaactggcctactcctacttctatcactgaactaaggggttttctaggtttagctggctactaccgaagattcattaaaaactttggtatcatctgccggcctatgtttgatgctctgaaaaagaacaacttccattggcaagaagttcagcaacaagccttcgatgccattaagcttcagttagctcaagcacctgttttggccatgccagatttctcccttccatttattttggaagccgatgctagtggacatgggatcggagcagttttaatgcaaaatggtcgaccacttgcttatctcagcaaagcaataggacccaaagctgctgccctctccacctatgataaggaagccctagctatcttggaagctctaaagaaatggaaacattactttttaggcacttctctcattatcagaacagatcaagctagcttgaaatacattaatgagcagcgaatcactgaaggtgtccagcacaaattacttatcaagttgttaagctatgactataaaattgaatacaaaaagggccaagagaacaaagctgcagatgcgctgtccagaatgcagcagcttaatgctttaactactactgtcattgttccccagtggataactgaagtggctgctagttacagtactgacccaaaatgccacgaattggaatctcacctgcacattgcaccgcaatctcaccctccttatactttgaaaggaggcattctcagatacaaagatcatattgtagttggggccggcaacacactacgagagcaattattagtttcttttcatgactcagctctaggaggtcattctggtgaaagagcaacttatcagaggatgaaacaactgttctattggcctggtatgaaacttgctgtcactcaatttgtcaaagcttgccctgtctgccaaaagaacaagactgaacataacatgccagctgggttacttcaacctctccctcttcctgaaatggcttggtctcacattacaatggattttgtcgaaggcttacccaagtctgaaggcaaggatgtgatctgggttattgttgataggttcaccaaatatgcacacttcattcctcttagccatcctttcactgccgaccaaattcttactcaattcttggagcacttttacaaattacatggcttgccgacagtgattgtgagtgacagagatcgcatcttcactagttccacctggaaagaagtttttgaaaaggctggcgtcaaactccacttcagcagcgcttatcacccgcaaactgatggtcaatcggagcgagttaatcaatgcttggaaaattatcttcgctgcatgacatcgtccaaacccaggaaatggaaagctcttctacctcatgctgaatggtggtacaatacaaccttccatacatctctgggcatgtcaccatatcaggccctacatggcattaaaccacccctgttggctgaattactcctacctggttccttattggaaggtgaacgtaacaaacaggaagccaaagctgctctgttggagacaataaaatctcatcttgtcaaggctcaagcccgtatgaaatactttgccgatcaacatcgccaagaacgcacacttgaagttggcgatatggtctaccttaaaatgcaaccatatcgacataattcactgggtcttcattcttccttgaaacttcactccaggtactatgggccattcagagttctggagcgcattggttcagttgcttacaagcttttgctacctgttactagccaaatacatcatgtcttccatgtcagccagttaaagaaacatctgggctctcgtgctgtccctgaacaaggtcttcctttgattgatgctgagggcaggattctctctaccccattggcagtgctcgatcgtcgccttatacctagaaacaatgaaccagtggtgcagtggaaaattcattgggctaacctaccagaatcagctgcaacctgggaggatgctgcgtttattaccaaagtatttccttctttcactccatgaggacatggatcttaaggggggagaattgtgagacctgaagaagattcagacttaaagttcagagttaagagatagctggaatagattcaacggtcgagattgcgagataccgattcgcgagaaggttatgaagatcgtgtggcccagattcgccgcgacgagct

SEQ ID NO: 84235 - DNA, 373 bp, Oryza sativa
  Clone ID: PAT_MRT4530_83491C.1
cgctttatttgaactgtccccaccctccgctcctgacgacgatgccgttgccccctttcctcccgccgccggccatccgcctccatcccggtcatgggcaacccttacttcgacctctccccgtaatccacccgtaacgatgacgatgttgtcgcccccttcctcccgtcgctggtcgcgcgcctccatcttcgacaagggcgacccctcctccgatccctcgccgcgctccactgccgccaatgacgacgctgctcccttcccgcactccttcacctccactagcatgatggggacgtgcttggtttccaaggatgacagcgacgatgcttgggagcttcgcgcatggtcagtgatcagtggtcattggtga

SEQ ID NO: 84236 - DNA, 576 bp, Oryza sativa
  Clone ID: PAT_MRT4530_83492C.1
ccttgggatccggattaatgatttaataggcacacctcggggcatttcgtatgtcatagtcaagaggggaaattcttttggatttattgaaagacgaaccacttgcgaaacgcctttgccacaggaaggtttccattaatcaagaacgaaaattgggggctcgaagaactccccttattacgtggccttgcccgtgagatagttgatgtggcccaatagctgtgatgcggatgctgcgagggatggaagcccgacggtgtctgaaagaatataattagggccagatggagattggcagcttgttgactccctcgtgttgccccccgaagagccacagcggggttacccgttgcctctaactaaaggcctcctgctttatatgcggcatgtgaaacttatagattgatggagtgactatgcacagcccaaataattaagcatgatgcacagctgtcgttggtgggatggctgttggccatagttgttgatggtgactttggtttgtgccaagaaccaaatttaaaccaaactgagttcatgaatcccttttttttccaaaaaaaaaaaaaaaaaaaa

SEQ ID NO: 84237 - DNA, 852 bp, Oryza sativa
  Clone ID: PAT_MRT4530_83493C.1
atggggaaagcgtcggcggtggtgaagatcgatttggcgccggcgaactcagagagaaagggagattcggcgagttgtcactccaaacagcgctgccgctgctccgcctggctccgcgaggactaccgccggttgggtggggaggagaggcaccgcccaggggtgtcggccgagaaaggggaggagaggcgccagccgggggcgctagccagggcaccagccaggggaggagatcgaggcgctgcccgggcggcggaatggcacgtcgcatgctgccgtcgtaccgttcgctcccacctgcgacgttggcggcagcggcggcgacgcacccaccgcgagcagagcgcgctccgccacgccgacgcactcctccgcgtcatcgggaagcaccggcaagtccaccgccaccgcaagccgcagaacatcaacgtcgccgtcgccgtcgacagccagtggctcaatggcgggcaggtcctggcgctggacgagcggtggtacgagatcggcgggtcgttccgcgtcgagtccaagccggcgtcgcgcgtgatgctgtacgtcatccaggtgcgcaagcgcgatgtggtggtgaaggtgaaggcggccgacgcgtggagtgcagcagtgggtgaaggcgcttcccgccgacgagctcttcgccgccgtgagcagccgcatcaacgtcctgctcacccggtacaaggcaagttccggcactacgatgtcaacaacgagatgctgcacggctccttctaccaagacaagctcggcaaggacgcgcgtgccgccatgttcaacacggcgagcgagcttgacccagacgcactgctctacgcgccgcgccggtcgttgtaa

SEQ ID NO: 84238 - DNA, 336 bp, Oryza sativa
  Clone ID: PAT_MRT4530_83494C.1
atgacatcagcgaggggggcggtgccgacatgcgggacccacatgtcagtggctccgaggcgccggtccacggtggaccgagcccacggaaccggggatgggagcaccacgtggtgccgacgtggcgccaacgtggcggccacgcaggctgccacgcgagcgggccacgcggggctgccacgcgagcggcaaatggacgcggcacccggccgagcgcacgggcggctttacccggcctggcggccatggctatttgcggcccggcccggcgctaacggccgccggcgcaaggcggcaaacggcggcggcgcaaggcggcgaacggcggcgacgtga

SEQ ID NO: 84239 - DNA, 295 bp, Oryza sativa
  Clone ID: PAT_MRT4530_83495C.1
gaaggatccacacagaaaccgatgacctggctcaaaagaatggtacctgtgacaatctgcgcgtacgttccataccagacataatctgtgattaaatgatgttgtgcaaaaaagaaactgacactatcttgcagagacttatgggcttatggctctaccaatgtctgcatgaatacgcatgaggagctgtatgcaacatatgatttgacaaattcttgtggaattcaataccagaaacagtgctattgttgtactcacttatgaactgatagtgtgcatggggggagaaaataaa

SEQ ID NO: 84240 - DNA, 1032 bp, Oryza sativa
  Clone ID: PAT_MRT4530_83496C.1
cccacgcgtccgcccacgcgtccgcttatttggtttggtgaaggatatttcacggtttcgaccagatctaaagttgctcatttcaagtgcaacccttgatgcagaaaaatttagtgactactttgattcagctcctattttcaagatacctgggaggcgatatcctgttgaagttcattatacaaaagctccagaagcagattatatagatgcagccattgtcactgttttgcagatacatgtgacgcaaccccctggtgatattcttgtattccttacaggacaagaagaaattgaaacaattgatgaaatccttaaacacagaacaagaggcttaggcacaaagattgcagaactacttatctgtcctatatatgcaaatctgccaactgaacttcaagctaagatatttgagcccaccccagagggtgctcggaaggttgttctggccactaatatagcagagacttcattgaccattgatggtataaagtatgtcgttgatccagggtgtttgtaagatcaagtcatacaatccccgaacagggatggaatctctacttatcaaccctatctcaaaggcatcagcaaaccagagggcaggaagatctggacgcactggaccaggaaaatgcttccgcctgtacacaagttataattacatgcatgaccttgaggataatactgttccagagattcaaagaaccaaccttgcaaatgttgtgcttacacttaagagtcttggtattcatgacttggttaactttgattttatggatccacctccatcagaggctctattaaaggccctggaacaactctttgctctcagtgcactcaacagtcgtggagaattgaccaagactggcagaagaatggcagagtttccattggaccctatgttgtcaaagatgatagtagcttcagagaaatataagtgctctgatgaggtcatctccattgcatccatgttgtcagttggcaattctatattctatcgtccaaaggataaacaagtgcatgcagacaatg

SEQ ID NO: 84241 - DNA, 759 bp, Oryza sativa
  Clone ID: PAT_MRT4530_83497C.1
atgatgaaaagggcaatcacggggcgccgggcttccgagtttggcgccgctaacaacttcgtcccaatcttcgtcatcaccatcaccatcgccatcgccgccaccgcccgagggacgagctccaccgtagcccgcgccaaggaggccgacaacgacttgacgactgccatctcgtctagccggtgtgcgagcgccggcctggtggtcggcagcttctcgtcccagccgttcgatgacgtcatggaggaggccgggccccacatcgttggcaagatgaagggccacgatctccccagcccgctcggacacccgctccgccatcgtggcgcgctcggcccgagcgttctccaggtggcggctctcccaaccggtgacggcttcctcacgcttggtgagttggtcgcccagccggcacgccgcagcctcgtgacgggcgacctcagcctcgcgctccacgagcgaggcgtcccgcctctgccatgtctcctcctggagccgcaactcctctgcgcgacgggccaccgcggcctcagcggctgcggtggtttgggtgtgctcggcggcggcctcctcgcagagatggagggcggactcagcctcggccacccaagacggatagcttgttggaaagcttatggagtctactttcagattgttttggtcccacatcaaaattcctaccgagctgacgggaatcttgtttcctataggtgatcttagacccattaggtgggatgaattaattatcatgtttgccat

SEQ ID NO: 84242 - DNA, 2795 bp, Oryza sativa
  unsure (1)..(2795): unsure at all n locations
  Clone ID: PAT_MRT4530_83498C.1
atgccattctcctacgccgccgcggcctctggctccgcgtcctcttctcgcaagccggttcccgtcgccgcggccgccgcccgccgacccgcgccctcgccggcagcggcggcggcacccgcgccctcgccgtcaaaccctagcgcggtctccgattccgacccctcctcgtactcctcctccggggaggagaccgacctcaccgcctccgatccggcggccgcctccgtcatctcctcctacctctccgttgcgggggatggcgccgacctctccaaggtcgggatcttcctcagctccgcggcgcgccgccgatcgccgccgtgcctgatatgcttcgatcccatccgcccctccgaccccgtctggtcctgctccgcctcctgcttcgccctcctccacctccactgcatccagtcatgggcacatcagtcatcctctgccgcgccttctcccacctggggttgccccaaatgccgcttcccctatcccaaatcccagactcccacctcctacctctgcttctgctccaagacggtagacccagctccggacccctggatcctcccccactcctgcggcgacgtctgtggccgacgtctcaatgcagaccgtgactctggctgtgagcacaactgcctcctgctttgccaccctgggccatgtccaccgtgcccggcaattgttccaaatgctatgtgcttttgcggctcacatcgtgagacgcgtcgatgctcacatcagcgttattcttgctcggggaaatgcaataaacgcctcggctgtggaatccaccggtgtcctgtggattgccatgatgggccttgcccgccttgtgcggtgcgaggaaagcacaaatgtgagtgtggagaaacaatggaggagaggctatgctctgaaagggtgttccagtgcaagagggagtgtggtgggatgttgcagtgtgggaagcatagttgtgagaggggttgccatgctggaaagtgtggaggatgcccactccaagggcgacgaacttgcccatgtgggaagaaagattatccaagtttggactgtgatgcagaggctgccacatgtggatcaacttgcgagaaggtgcttgggtgcgggcggcacaaatgcccagagcggtgtcatcgtggttcatgcgttgagacatgtcggcttgtgatcacaaaatcgtgccgctgtgggggtctcaagaaggaggtgccttgctaccaagaattgacatgcgaaaggaagtgtcagcgtttgcgaaactgtggccgccatgcttgtagacgacgttgctgcgagggtgattgtgcaccctgcccagaggtttgtgacaagaggctcagatgtggcaaccataaatgcctatctccatgccacaggtgtcatggccccattgctcctccaaatcctgagttcacactgaaaccaataaaaaggaaaaagggaaagcatatagactctacacctggaacaccatgcccgccatgccaagaagttgttttggtgccatgctttggacatcatcttggccaagaacgtgcaatactttgctccaaaaggaggcagtttccatgtcagaatttatgtggtaaccctctcaactgtggcaatcattattgtacgaaggcttgccatgtgttacagattccattgagtcagcctgaaggagatcaatcggctatactgtctcttgctagtgcaagtgcattcgctgagccttgcgaagaatgtaacctgccttgtcaaagggtcagggagcctccatgttcacatccctgccctttgccatgccatcttaacgattgtccaccttgcaaagcccttgttaaaagaccatgtcattgtggtgctatggtacacgcttttgagtgcatgtattataacaacttaaatgctacaaaacagcagaaagtaaggtcctgtggtggcccatgtcatagaaaattaccgaattgtccccatctgtgctcagaaatatgtcaccctggtcagtgcccatcagttgatcagtgcatgaaaaaggtcaatgtccgttgtgcatgcaacaaccttaaaaaagagtggatatgtcaagatgttctgaaggaataccgtcagtctggtcgtgacccaaaacaaatacctaaaaatcaatatgcagttggcctacttgcctgtggtgaagattgtgttaaaaaggttaaagctgcagattctgagttgcatctccggaaaattcaggagatcaagacccctgctgtggaagttgaaaatgtgcccaagcgcaggaagaggcgtaaccgtggccaagaaagtgttgaaagctcaaaattccaggaaatcaaagctgttgcgttgaaatttctcctggttatttttctgtgcataatcgttgtagctggattgtaccttttgtggaaaggtgtttaccggctttctgattggatgaatgacatggaggagcagagggccaggcagaggcatttgaagcctggaagattgtaaattaaagactacggagggtgtttgtggaatattcacaactgagatgtgcatcggttcaccgtcagggattggtttcggatatatggtagtgaaagatgtcatcattttgttattggagccaagccccggagtttgtaactagtttggtctcttgtccgaagntactggttaatggaaactaaagttatccgtgtcaaaagaaagatatcattttgttctttgtttgccaaacaaaatgtaggaactcaacaaccttgtactgtagtttacatgcatactgtgttcgagtgaaaaaaaaaaaaaaaaaaaaa

SEQ ID NO: 84243 - DNA, 1388 bp, Oryza sativa
  unsure (1)..(1388): unsure at all n locations
  Clone ID: PAT_MRT4530_83499C.1
gcaggagtcgcctcgcctcctccttaagacgctcctgatgcgccgcgggggtcgcctgagataactttacaagttgcaaacttattatcatgtgcttggtagcagtgagattgttaagggcactatccactgcgtgcacgcgggtcacggcctcacctctgcgactggaagtgcttatggactaaaccctgatgtccatggattccatattcatgcacttggtgacacgtccgcaacaacacacagcaacaggcctaccatatcgcgagaaggcccccagcgtcgcggagccgaaggatcaggattcactccgccctcgccgacctcgtcgccggccgccgcatcaccaccgacacctccccccatcgccgccggcgagagttgggtggtggagcgagcgtggccgcgaggggacgcggaggggcggcggcggcggcgattgttcgcgggatgagcagcttcggcggcaccagctccgtcgcctccggtggtgggaagaggctcgagtacgggcggacgcatgtcgtgaggcccaagggcgcgcacaaggccaccatcgtctggctccacggcctcggggacaacggagccagctggtctcaactactggaaacccttccccttcccaatataaaatggatttgccccaccgcgcctacaaggccagtggcagtttttggtgggttcccatcaactgcatggtttgatgttgctgatctttcagaagacgctcctgatgatgttgaggggttggatgcctcagctgcacatgttgcaaacttattatcaactgagccagctgacatcaaacttggtgttggtggctttagcatgggcgcagctaccgccctttactctgcaacctgctatgctcatggaaaatacggaaatggcaatccatatcctgtgaacttaagtgtgtctgttggtctcagtggctggcttccttgtgccaggtctttgaagaacaaaattgaaagctcacaggaggctgcacaaaaggcttcatccatacctcttttgctttgtcatggaaaagctgatgatgtagttctctacaagcatggtgagaaatctgctgacgcactgaagacaactggattttcaaatgtggtgttcaagtcctacaacagacttggacactacactgttccggaggagatggatgaagtctgcaaatggctcaccgcgaacttgggggtcagcagctcatcgtcggcttgattgaagaattgagctgtccgaataatacctgtggttgttccaaacaaaattgagaggtaaatggttgaatgaatagcgaagaacttggggcttgggtatacggccatggagtagcctggcgtgtcatcatgcggacatgcctcacngcatcttaactagaactc

SEQ ID NO: 84244 - DNA, 801 bp, Oryza sativa
  Clone ID: PAT_MRT4530_8349C.1
atgggccatgatgggccacagaatcgtcatcgtgagattccatctctgcagcaaagccagcgggaggcaacagcggcgaggcagacgcgaaggtttgagggatctgctggccaatgcgacccacatcctgagattgcatggctccgtccaggaatggaccacggctgggctaccagagtaccagtgcagccacgaccttgggatgttgccggccatcgagacgacgtccacctggtcctcttcctcgtcagtgatgtcagcttcgccgacatgtggctgacctccacctccgccgaattgatacccatcgaggaaacatatatcaactgtgctgggattggattactgctgagtcgagccgtgcggcgatcggcggcggatggtttcagcgctccagccaggaacggacctcccggaggcgatgagcagcgctccacgccctccggatcagggtatgcagtaggtggtgacatgtcaacctacggagatgtttatagctttggaataattctctttgaaatatttttacgaaagagaccaacagatgatatgttcaaggatgctgtgagcaatgtttacatatttatacaaggatgtacaaggggaaattatatcgctaccctaatcgctgatctatctaggcggctggctggtgggccagctttagggctctttggtaagctcctcggtgacaggagggctgcgcccattaagggagcgccgccgattcccaagggcgcctgctattacccgggtaaagacgtgctccgggtaatagcgtgcgctgtctgccctcgttag

SEQ ID NO: 84245 - DNA, 796 bp, Oryza sativa
  Clone ID: PAT_MRT4530_834C.1
cggacgcgtggggcaaacatgttgattataggtgtagtggcccatgctcaacaacattggcaatccaaggataaaataacttgcagaggctataccttgtcataactaactagctagcattatattcaaagttttccccttttaactaaaacccaccgcttcaaatgtttcaaatgatctgttaaaagaagcatagacagtcaagtttcttgattactcaaattttgaagtgatgcatgcccaagatatagcgacagctgataagatgggaatatatgttttgttgtttgaggttaatggaagttggtaatagccgataagatgcaggatcctatgtttggggtctgagtttaatggaaattggtagtaccatgatgcgttgtgaggtggagtgacagcagtaatcagcaagtctttcttcattggtggagtgacagcaggaagatggtgcctagagctaagggacgtggttatgacacaatcatcattctcgcagcttggccgatttggaaagaacggaataaccacatcttcaacaatcaacaagaacatggatggaggtggctgctgcagctgcagaggaagctgcactctggcattcaaccggggtgccaatctggctctcgctggcacggaaactgtggtcacaaaatagatgccgtgagaattagacctttaaccgcataatcagtttttttttcttttgtttctcattttagggatttgtaacttgagctgctgtacaaacactccatcttaatccaaaaatacgcagttcttatgcgtattcccaggg

SEQ ID NO: 84246 - DNA, 300 bp, Oryza sativa
  Clone ID: PAT_MRT4530_83500C.1
atgttcaccgccggcgtcggcaacaaggcatccgccatctggaggtgttcaaggccatcggctgagagtagcaaggagggcaacagcttcgttcttgacttaattagagacagggtggtcaacattgagggatctgttttcacagaagatgagattaaacggattactagcaacttcagcattccgatcggacaaggcggctttggagaagtgtataaagggactcttgatgatgactatgatcttgttgcggtgaagagatatattagcaaagatttaaggaaagagtttatggaagaa

SEQ ID NO: 84247 - DNA, 325 bp, Oryza sativa
  Clone ID: PAT_MRT4530_83501C.1
tgcgggctcaacccaaaagcaagaactcgtcgaaacaaaacgaaagtaaaagggtggcgatgcgccgagattgtattgaacgtaactctatccatgggtggcaatcctcatgaagttcgttagctcaacccgacaacgcataccgcgtcacgttgccggattcggctcgatcggctaacctcgtccgactcgaactctgcctaccccaaccgcagccgattcggacttcagccgatccgtactctgttttcatgacgatttccatctcgaattccgcttcaatcccatcctcatctccgatacttagattactaaatttggttat

SEQ ID NO: 84248 - DNA, 346 bp, Oryza sativa
  Clone ID: PAT_MRT4530_83502C.1
attttcaagcgggagatcaggcggttcaacggcgagctggaggcggcgctagatgattcaatacggcggatcagggagatcgccgactaggggaggtctacagacgcgacctacagcaggggggtgctggctctgcttctgtcggggatggaggacaaggagacgaatgcaggcacgctacgaggacagttcagctacgacggaacagatgatgagcgacgagtgtaaaaccttacttgttaaccaccactagcacgtgttgactgctgctcacgtgggcgcaacatggtgattaccaccaaccctgcttggaccgagaaggccccccccgaggcaccttgcatgc

SEQ ID NO: 84249 - DNA, 251 bp, Oryza sativa
  unsure (1)..(251): unsure at all n locations
  Clone ID: PAT_MRT4530_83503C.1
tccctagtctacccacgctttttttactctccccctgcgaagaaagaaaaagctttttctttttcctcccggcaaaccctagatcggcgccgccggagccgncactagagacgccaacacacatggccagggcctttacaacccttccacatatattttgctgtgcaacattggaaatgcttttgcaaaaccggtgagcaatcccaactacctgtctttttaagggaagcaaaaattgctgttgaaagccg

SEQ ID NO: 84250 - DNA, 253 bp, Oryza sativa
  Clone ID: PAT_MRT4530_83504C.1
ggatgcacattttacatgatcattacattgtccattacacatgctctacgcatttgttgcgcgggggagtattgattcgcgtgattagtttatgagacagattggccggggacctggtacaggacgccgatgtttttgaggagggggactattttgtcccccatgagggggcccatggtgggggagggctttttgtttgcgacccttaacacgctggggttctcgggttggactccgaaaaagcgcgcggggg

SEQ ID NO: 84251 - DNA, 748 bp, Oryza sativa
  unsure (1)..(748): unsure at all n locations
  Clone ID: PAT_MRT4530_83505C.1
ccggccgggattctggaacccggccgggctcttcctgtgacccacaacactccaaccagacaggcagaaagcaagcaaaaggataggaaggagccaagaacaccaagaacttgttggagctgagacagcagcaccaagcaagaaaccggatccaatccatccatccatccatagtttccaatggctggcaagtacatcgccgctggtcttgttggttcctttgccatctcatatgtttgtgatcattttatcgctgagaagaagatatttggaggcaccacaccacataccgtgtccgacaaggaatggtggcaagcaactgacaagaagtttcaagcctggcctcgcactgctgggccaccggttgtcatgaaccccatcagtcgccagaacttcatcgtcaaggatctcgagtcctaagattgtagtgggagcatatatgctgaaggttgcgccgtgactaagatggcgatggctgtggctacaaactacctacctatgccgtactcccgaaccagtacgtgagtacttggtctcaataaaacagaactattttgcctagtgcagcctgaacagaacctgaagcatatctgctttagacattgtcatcttggtgattgttcttatgcagtaacaacctctactttgtgcttgtgctattgtgagtgaatggaactatctgtctgtcacaaaaaaaaaaaaaaaaaaaaaaaaaaaaaaaaagaaaaaaaaaaagaggccnnnnnnn

SEQ ID NO: 84252 - DNA, 758 bp, Oryza sativa
  Clone ID: PAT_MRT4530_83506C.1
ccggccgggaacactccaaccagacaggcagaaagcaagcaaaaggataggaaggagccaagaacaccaagaacttgttggagctgagacagcagcaccaagcaagaaaccggatccaatccatccatccatccatagtttccaatggctggcaagtacatcgccgctggtcttgttggttcctttgccatctcatatgtttgtgatcattttatcgctgagaagaagatatttggaggcaccacaccacataccgtgtccgacaaggaatggtggcaagcaactgacaagaagtttcaagcctggcctcgcactgctgggccaccggttgtcatgaaccccatcagtcgccagaacttcatcgtcaaggatctcgagtcctaaggtagcactaatcgcgcaatatgcgccgttgcacccctcaatcaaaacaagagcccatttgaagccacgtttcatctttcatttgaggtgctgatgctaaagctcctttgcttgttcagattgtagtgggagcatatatgctgaaggttgcgccgtgactaagatggcgatggctgtggctacaaactacctacctatgccgtactcccgaaccagtacgtgagtacttggtctcaataaaacagaactattttgcctagtgcagcctgaacagaacctgaagcatatctgctttagacattgtcattcttggtgattgttcttatgcagtaacaacctctactttgtgcaaaaaaaaaaaaaaaatttgcggc

SEQ ID NO: 84253 - DNA, 228 bp, Oryza sativa
  Clone ID: PAT_MRT4530_83507C.1
gtggaggcggcaccggcgtcggcgccagttggaggccaggagctcggtgttgccgcctccttcgccggagataagcggcccatcgagccaaagatgaagacaacgccactgcccaacgccatcgagaagccccgccatcgatcgctgcttatctccagtcgacgacgagctactgcatccccacctggcctccccttgacagccccagcaaccatgaacccgggggct

SEQ ID NO: 84254 - DNA, 192 bp, Oryza sativa
  Clone ID: PAT_MRT4530_83508C.1
atggatgtaattttgaattccagagacatgtatagggtacaactccttacacgaacacggatgcgggggggtgttcgcggcaacggtgaggcgacggaatttgaaaaaccgaagccccacgaagattccagcgacgagtcagatctgaattgcgagggaaccctagaacaaggacgaaccgcgcccaaaccc

SEQ ID NO: 84255 - DNA, 3057 bp, Oryza sativa
  Clone ID: PAT_MRT4530_83509C.1
atgaacgtggagcgcctcgtccccggcggcgccggcggcggcggcggccgcttccggtacgagcggatgccggctaggggcccggcggatgacggggagggggaggaggagggggaggagccggtggtgccggatcagcggccggaggtactggtcgcgtgggagtcgttacgccgctcgaagggtgcacaggtgttcgaggtgctttccagggaatcgatcgccgccttgacgcacccagacgccaggtatatcatcccgatgttgcggtcgtgcaccgacgaggtgcactgcaagcagagctacttacatgggcacactcagttcaaggtcaaaaaataagctaacttaaagcatatttcaaatatctattttagttcgttgtttgggtggcgtctataatagaaaacctccaactttcacagtaaacattttgtattgaagaggcatgaatttcttaaagaattccattatactcaagaataggtaagaggttggttctaaaatctgggaattggggagctcatgctagtaggtcatgatgaatgttaagctgacggtgtgaatgttcctgctcaggcttaagataactctactcaacaaattaatgatccttcaagtgcggttttgcctgtcattcgcccctatcaggggcgtcaacactcagcttctgaccgggcaaacgtagccatgcaagaatatctgaaccattttttggggaacttggacattgtcaactcaccggaggtttgcaaatttttggaggtatcatgtttgtcatttttaccggaatatgggcctaagctaaaggaagattatgtatctgttggacacttgccaaaaattcagaaggaccataaagaaaactgttgttcatgtgggttgtttagctgttgcaaaagcagctggcaaaaggtttgggttgtcctgaagccaggattcttagctttactcaaagatccttttgatccaaagcttttagatgtccttatctttgatgcactgccacatatggatataagtggagagggccaaatatctctagcaaaagagatcaaggaacgaaacccgttgcatttcggactccagatatttattactggctggtggctctgcccagaattgtttctccgacgccctttccaacatcatgggtcatctaggcttgatgctctactggaagctagagctaagcagggtgtacagatctacattcttttgtacaaggaagttgctcttgcattgaaaatcaacagcttgtacagtaaacaaaagctacttaacattcatgagaatgtaaaagttctgcgatatcctgatcatttctcaagcggtgtatacttatggtcacaccatgagaaaattgtgatagtagataatcaagtatgctatcttggaggtcttgatctgtgctttggtcgctacgataattctgcgcacaaactttcagatgttcctcctgtgatatggccagggaaagactactataaccccagggaatctgagccaaattcctgggaggacacaatgaaagatgagctggaccgaacgaaatatcctcgcatgccttggcatgatgttcagtgtgctctctacggtccaccttgtcgggatgttgcaaggcattttgttcagcgctggaattatgcaaagaggaacaaagctcccaatgagcaaggaattcccttgctgatgcctcatcaccacatggtaattccacattacaagggcataggccaagaaattaatagtgaggctgatggtaaacaaaatcatgacaaggattgtgatgttaaaaaaccagtctctgtggactcacgggagtcttgtcaggacattccattgcttttacctcaagagcttgaaccaccggcattgcccaatggagatttaagagtgaacgatttagacgccaaccactctgatcacctacacaaaacaagcttcaatcagcctttgctcaaccggaaggcaaagttggattcttcccgacaggatttgcccatgagaggtttcgtagacaatataagttcccttgagtcatcatctattaggcattttgattcttccaaagaagaaaagtatcacatggataagaactggtgggagatgcaagaaagaggagatcaagttgcttcagtacttgatatagggcaagttggtccaagggcaacttgtcattgtcaggtaattagaagtgttggtcaatggtcagctggaaccactcaaatcgaaggaagcatccacaatgcctatttttctcttattgaaaaggcagaacattttgtatatatcgagaatcaatttttcatatcaggcctttcaggagatgaaacgataaaaaatcgtgtattggaagcattatacaggcgcatacttcgggcagagagagaaaaaaagcgcttcaaagccatcataataatacctctgttacctggttttcagatttatgtccacagtaagttgatgataattgatgaccgcatcacattgattggatcagctaacataaatgatagaagcttgcttggatcaagagattctgagattgccgtggtcattgaagataaagaagttgttagttccaaaatgaatggaaaaccttgggaagctgggaagttttctctaagcctacgtctctctctctgggcagagcaccttggccttcatcgaggagaggtcagccatattatggaccctatcgatgactcaactttcaaaaatatctggatggccactgctaagacaaataccatgatttaccaagatgtcttctcatgtgtacctaatgatcttatccattcaagggcccaatttcggcagagctttgctcactgcagggataaaatcggtcacaatacaatcgatttgggggttgcccaagagaagctggaaacctaccaggacggcgatctcaagggtacggaccctatagaaagattgcagatgatcaaaggtcaccttgtttctttcccgttggatttcatgtcccaagaggacttgagaccatatttcagtgaaagtgaatattatacgtctccacaagttttccattag

SEQ ID NO: 84256 - DNA, 1372 bp, Oryza sativa
  Clone ID: PAT_MRT4530_8350C.1
ccacgaggcccggcgcgtcgccggccccgcccccggccgccgcccccccgcccccctcccccccccccccccggacgccgccgcccccccctcccccgcctccctcccgctccccgccgccccggtggcccacccgtcggccccctccccctcctcctcctcgtcgcggccccccctgcccctcgccccggccgcctccttcctccccctcctcctctcccgcctcccgtcccgcttcgccccgatgcaaaaacaaaccgcgaaaaagaaaggaacgaaattggcgcccccggggccgcagggcgcctccgcctccctctccctcgcgctcgcgcccgacgaggtcgcgcgcgcgctcaccggcacccccgtcttcaccgtctgcaactccagcaacgagttcgtgctcgtctccgaccccgccaccggcctccgctccctcggcctcctctgcttccgctccgaggacgccgacgctctcctcacccacgtgaggatgcggcagccggtggtagggagaggggcaaaagtggtgccgattacgcttgatcaggtttacatgttgaaggctgaaggtattgcatttcggttcttacctgaccctcttcaaattaagaatgcgttggaggtaatactcatgtctgtattatttactgaaaaatatacttttatggaaagcattgagacataccctttgcgattattaaattcagacctattggttgttaagaaacagaagaagcgttactgtccgatatattttcaaaaggtcttcaccattttcgccttcttagctcaggaggacatagaaagagaacttacaaaggcttctaaaacttctagaggatctgccttatctaagcaaatcatggttgggagtttggaggatgtcttgaagaaaatggagatgaatgagaggaattctggttgggatgacttgatctttataccccctgggaaaagcctcaaccaacatattaatgaggtatcagcataattttgttcttgcagtgatacccccgggtttgagcacacatacacttgctcacttcaaatgctgtgatggccagcccatccatagtgtcaagttgctgcctgagcttctttttaatactttcttgctagtggttcttgtaaccaaaaagttcaggattaaagtgaaaaaatatgtgtgtggttttttcattgtttcaaccttccaacatccaatacacagctccccttgaagctggcgaagtgtatgaggcgccaaatcatctctgttgcaggaaaattattgttccccagaaaaattattgttatgtgctagattacagtcataaaagaaaccataattaacgttgccatgatccaaaaaaaaaaaaaaaaaaaa

SEQ ID NO: 84257 - DNA, 472 bp, Oryza sativa
  Clone ID: PAT_MRT4530_83510C.1
cccgggctgcaggaattcggcacgagggcgggcaactcgggggaaccctagcgccgccgccgccactttctcctcctctcctctccctcccctcgccgccgccggagctccgcgcggccagccgggatggcggcggtgaggcttggcctcgatggcgccccgtctctgcgcgtggagggcgggctggcgcgcggaggatgccccgagatcgcggggtggaggcggcggatccggcgccgccgcgaccggatccggcctccccgcgggtggatccggtgccccccacggccggatctggccggagcaaagccgctcccgggcggcgttgacgggaggcggaggtggcgtctggcgtctggcggctggcggcgatggacgacatggaggcgcgcgcggaggccgcggttgcggcgcgtcgatccgtggcgccgccggcaggtctcggcacggccttgtcatccctcgtcatccc

SEQ ID NO: 84258 - DNA, 252 bp, Oryza sativa
  Clone ID: PAT_MRT4530_83511C.1
atggcgagaactcttacacgaccagatcttacatggtctttcgtctctgaaggatccgacaaggccttatcggctctgggcgttcccagccaaagttccctcaggttcctcggaggccttgtcaagacggcgcagcggcattaccgaggttaccaaaaatcagtttatgatgtcgcttctgaagagatggagatcggagacctcctagttgataatatcaagtcactgttctccgcggcggcaacgtcttga

SEQ ID NO: 84259 - DNA, 1243 bp, Oryza sativa
  Clone ID: PAT_MRT4530_83512C.1
ctcctctccttctccttcccatcgccaccagcttctccggccgtccgccatcgctgctgaccgcagcatccgcagccacagcttctccgacgccggcgacggccgtttcccccccggagaatacgaatacggaagagtgtgaatcatgagcggaggcgtcgagccggagaccccgccgggtagcagcagcggcggaagcacgccggtgggcggcaagccgccgcgccaccacctcacgtccatccgccactgcgccagcagcgctcgcatcgccgccgcaaccgcagaattcgacctgggtgcggggacgctgagcttgatctcgcccacggacattcgccctggcttcctgccggtgttccgttccgggagctgcgccgatatcggtaccaaatcgtacatggaggacgagcatgtgtgcgtcgataacctcatcgagcacctgggagtgcgtacacctgtgatccctgcaccgggtgccttctacggggtgtttgatggtcatggtggtacggacgctgcttgttttgttcggaagaacttactgaggttcataattgaggatggtcacttccccagcagcatagagaaggcaatcaggagtgcatttgtgagggctgatcatgcaattgcggattcccattctcttgaccgcaattctgggactacagcattgacagcacttatttttggcaggacattgctcgttgcaaatgcaggagactgtcgagcggtattagggaagagaggccgagctgttgagttgtcaagagaccataaacccagctgcagaagcgaaaagatcagaatcgagaaccttggtggtactgtctttgatggctatctcaatggtcagctgtctgtagcaagggcgattggtgattggcacgtgaaaggttccaaagggtccataagccctctcactgcagagccagagtttcaggaggttagactcaccgaagaagatgagttcttaataatcggctgtgacgggctttgggatgtgatgaccagccagtgcgctgtcacaatggtttttgggagcgcaaggcgcgactactcactgttcgtcaacatcaacttcaccttcaccaacatgtcaaacactagagacaaggagaaggagactcccgtcaacaccaacggaggcaatactgcctcaaactccagcagaggaccattgttgggtttttctactgcttatatggatattgatcctgttgatattgcttcatggcaatga

SEQ ID NO: 84260 - DNA, 339 bp, Oryza sativa
  Clone ID: PAT_MRT4530_83513C.1
ttattttgcatgatgagcgattggtcatttgtagagctgcaagtaaccaacaagctcatccaggtacatctcctgctgctccctatctccaacaatgtcgctcaactccttggccttgcgtgccaataccttcccctcctcttccaccatcacccgccgcacggccgccgcaacatcgtccctgtggaataacccatcgtcattccttgcaacctccacaccgatccccctcgctgccatcgcctccgcgattaggccctggtcaacaatgaaaggaagcatcacgagtgggtgaccgaactggaagctctcgatggtggagccccagccacagtgcgt

SEQ ID NO: 84261 - DNA, 324 bp, Oryza sativa
  Clone ID: PAT_MRT4530_83514C.1
atggccaagccaccagcgagcggcggcagcggcggccggcgctcgtcaccgggtataagccgttccccggccgccgcgtcgacgcccatcgcgttcaacgccaccgacctcgccgccgacgagagcacctccaccgggaaggtgtggctctacggcaagctgcagctgcctcacgggatggagacggtgaaccacatctggcaggtcgggtccacggtcaccggcggccttcatgtctatcatgttatagtaattgcaatccgcctgcccatctcaggcgatcaatgcaatagaaccatggacatcaagatgctttgtgtatga

SEQ ID NO: 84262 - DNA, 154 bp, Oryza sativa
  Clone ID: PAT_MRT4530_83515C.1
tctttatctaacaagcgaaccaggcgggcgatagcttccactttttcgtccaatctgcatcgtggcgcaaatagtcctcctatgcgttgaaaatgctatgaatgtaatgtctggatcaacaaccatcgcctcagcaatatgtttcagtaccaga

SEQ ID NO: 84263 - DNA, 339 bp, Oryza sativa
  Clone ID: PAT_MRT4530_83516C.1
atggcgttgatggcgggcggcaagagaggaggcgtcggtgtcggggagatccggtggccgacgtcggccccagtgacgtgcgctgggtgctgcgcctctccgccacgcccgcctcgccgatgcttccgcttctccgccattgccgcaccgtgtgggccgactgctggcccgcccccgcgcgcggctacatgcctttgcctccgcctccgctgccgactacacaagcgcgccaccggcgcccgagcgagccccgcctctcccactggccgctcgcgctacctccttctctgctccgccgacggccgcccgagcaacctccgcctccgctgccgctactag

SEQ ID NO: 84264 - DNA, 200 bp, Oryza sativa
  unsure (1)..(200): unsure at all n locations
  Clone ID: PAT_MRT4530_83517C.1
tcgtgttctttgtgttagctgctctgcanagcttgccagccntggcggnaaagcaagcggcttttctaagatattntcnctaaactgtnttttggggtgaaagtnttgcttctngnaaaaaaaaaaaaaaaanaaaaaaaaaaaaaaaaaaanaaaaaaaaaaaaaaaaaaaaaaaaaaaaaaaaaaaaaaaaaaaaaaa

SEQ ID NO: 84265 - DNA, 765 bp, Oryza sativa
  unsure (1)..(765): unsure at all n locations
  Clone ID: PAT_MRT4530_83518C.1
catccatcatcccctacctctcgctctctctctcctctcctctcctcttattatcatcgcatccatcccgcacttctctctctttggtggtggtgctcgctctcgctcaccctgctttgacctttggatttttatttttaaggatccaagaaagtgctgtttcttgggttgcttggaggtggaggagtttgggagattgtttgtgtttgattgattggttgattgattggaggaagatgacggtggaggagaggcaggggagggtgggaggccatggtgtgagcggcggcggcggcgggagagaccagttcccggtcggcatgcgggtgctcgccgtcgacgacgaccccacctgcctcaagatcctcgagaacctcctgcttcgatgccagtatcacgtgacaacaactggtcaggcggccacggccctgaagctgctcagggagaacaaggaccagtttgacctggtgatcagcgacgtccacatgccggacatggatggcttcaaactccttgagcttgtcggcctcgagatggacctcccagtcattatgttgtctgcgaacggngaaacacaaactgtcatgaagggtataacccatggtgcatgtgactatcttctgaagccagtgcgtcttgagcagctaaggacgatatggcaacatgtgattaggcgtaagaattgtgatgctaagaaccgtggtaacgatgatgacgctggtcagaaggcacagggaatgaacaatgaggtgagagtattggtgc

SEQ ID NO: 84266 - DNA, 2054 bp, Oryza sativa
  Clone ID: PAT_MRT4530_83519C.1
ctagcagtagctagttgggttgttcatgtcggggcagtcaaagtggtggtagccgatgtggacggcggtgtggataaggccgcagatggcggaggattccatccgccacatccccagccccaccgtcgacatctcgtgccgatgacttgaacgacagcaaacgacgacggatgacgacggcggcgaggttggagtggcgacggggtactgatcgacggtggcgatgactttccggcgatctttggcggagaagaggtggtggacggtcttctgcttgcagttgcgaatccaacggaggtggcggtgaagcttggcgatgacggaaggagcagcagggcctcgccggagatcaaaacgcgacggcaaacttcgggttgacggcgacgatggagctccagtggatttcagcttcggggaagtggaggacgatcttctcctcctcctcgcaaacccaacgacggcagcggcgaccgaaggcgacgaccacagcgacggcgcggtccttaaactcgcaaatcgaccgttcaggttctcaaacttgttcgactgtatcatttcggtcccatcaacactcagtgccaccgccgctagcaccgcgctcccctgtgccgttgtgccaccgtttccgatggcccccacctccatgccaactagatccggtggccaccgacctccacactgctggatccgccggcggccaccgaagacaagtggaggggagaggagagggcggtcgtagctaccgccgaaggaggagctgctgccgcgcgtggtggctggatccggcgcgacacggctcggagacggcgaggaggaggggcggcgtggctcgtttccctcagggtagatcccaccgtcatctatgcctcctaaccactccagatctaacgccccacgtctgccggccatccctctaagtcttgggaaacccctcttcacccaacttaaatcctctccaaattgactcccatccaagtttctctgtcggagttttaacatcgtcaccaccagcaggatgtcacgggtctggatccccatatcatcaatctcgtcaagcgtcaaattagcaaccaaggtctctgcaacctcatccaaccctcttattaggatcatacacctcagcatgttatactctactgcctttgtcttaaacctaggttcaagaaagtatgccacaacaagagtaagatttgacctcttccagtacttctcaaccttcttattcattgaggtggccattgttttgatggcaacatcatcacttgtcatccatggagtaattaaagccttgatttcacgaaagttgtggtaaaataaatttgcagttggataagaagtacctgtatgtttcaaccgatgttgtaccggaacccttatccattttgagttactgctatcctggaaccacattgtgggtttttgtgtggttcaagaacacataagtaccatttcctgctattgcgcctagctaaataggcacaatatttgaacttggcccactctttttaaccatctagccatttatcttaaccaccttataaacaatattgtagtgttcccaagctggcgaggatctcttctttgctttttttgctatatgttcatcattagtttcatggtctcaatccccatctgcaccattgttatccacatgaacaacaacaatagtgttggttgccactgccccctggttgctgagttccttacgacaacctgtcctggccatccaaccggggctaaatacggaggagtaccctccccagggaattaacttaggattatataccggcggcgcggaggaatacccgtactgagctatcaccatcagcagcccacctctactctcccacatcatatacttaataatctagacaccacgtagtgatacttaataatctagacaccacgtccatattattaaatactactctatatcccccgagatgacatagagcaaccgagtattcggacactaaacccacacaattgcacctctctgataggctagctacacaactatattgatacaagtataaagtaaagtcggtactcag

SEQ ID NO: 84267 - DNA, 1291 bp, Oryza sativa
  Clone ID: PAT_MRT4530_8351C.1
ggatatattcccccctctcctcggcatggagcagataatctgtttcaaaaatcatgctccttctctaatctctccatcaccaccatacaatctcatgttttattctcaacttattatctactccctccatttcataatgcacactggcacagttgcacatggattaatggccgacggtgaggatatccagccacttgtatgtgacaatggcactggaatggtcaaggctggttttgctggtgatgatgcccccagagcagtgttccctagtatagttggtcgccctcggcacactggtgtcatggttggaatgggccaaaaagatgcctatgtgggtgatgaggcacaatcaaaaagaggtatcttgaccttgaaataccctattgagcatggtattgtgaacaactgggacgacatggagaaaatctggcatcacaccttctacaatgagctgcgtgttgctcctgaggaacatccaattttgctgacagaagctcctctgaacccaaaggctaacagagagaaaatgacccaaatcatgtttgagacattcaatgcaccagcaatgtatgtggctattcaagctgttctttcactatatgccagtggtcgtattgtgcttgattctggtgatggtgtgactcacacagtgccaatctatgaaggatatgcacttcctcatgctattcttcggttggatcttgctggtcgtgatctgactgactgcctaatgaagatccttacagaaagaggttattcctttacaacaactgcagagcgggaaattgtgagagacataaaagagaagcttgcatatattgctcttgattatgagcaggagctggagactgccaagagcagctcctctgttgagaagagctatgagttgccagatggacaagtcatcacaattggcgcagagaggttcaggtgcccagaagtgctgttccagccctcgctgattgggatggaagctccggggatccatgagaccacctacaactctatcatgaagtgtgatgtagatatcaggaaggatctctatggtaacattgtgcttagtggaggaactaccatgttccctggcattgctgacaggatgagcaaggagattactgcccttgcaccaagcagcatgaagatcaaggtcgtggcacctcctgagagaaaatacagtgtctggattggaggttctatccttgcctccctcagcacattccaacagatgtggatatctaagggagagtatgatgaatccggcccttcaatcgtccacaggaaatgcttctaa

SEQ ID NO: 84268 - DNA, 4930 bp, Oryza sativa
  Clone ID: PAT_MRT4530_83520C.1
atgctgccgaccacctgccgcgcgccgccgtgcccgtggccgcggccgctcgccgccggtagagccaggggaggctatggcctcggccgcgctcgcggggtgaagaggagagcggcggcggcgcgcgggatggtggtgcggtgcgggctgctccccgtggacccgtgggcgcccaccatggactcccagagcgtggcgtcgcagctgttcgccgtctcgctcttcccctacctcggcttcctctacttcatgaccaggtccaagacggggccgggactcgcgctgtgaggattctacttcggcctcgccttcgtcggcgccttcgtcggcgccaccacaaaagtgcattcctggaacgtcgttgttgaaggtcgactggctggccgggagtgcagaatccgtagttactcttagcaaataatctatcgtggtggggttaaggctagccttgaggaaatcgaagaacactaacgagtgcgcttctgaagaatcccaggacattagggggagaggttctatctactgacgttgtctttgatttctatcatcacagctgaagtcccatttggtgaggtagaatctgtctctcatctcatcaaaatcgtgtttaacaccgccctccagtgaaacaggaaaatgagaagggcaggtctgatgaggcgcagaggcagaagatcgagaccccggcgatctctcgacggatcggtgaccttcctgaccagcttcttcccttacctccccgaatgggaggccgtgtactacctgctcctcgccgacgccgacgtgctcgtcgcggcgcgcctcgtcgtgcaggcccgtggcctgagaagattcgggttcacctcgggcaccaccgccgccgccgtcaggttggccctcagatgcgccgcgctggccgtgaagcatccgcatcccgaccggctcgtccacgcgtggatgtccctgtctcgccgcctcgacgaggccgtgtccgcgctcgccaaccgcgacgtgcgcggcctcgtcgcgctggtcggcgacgaggcgcccgcgccggcggccgacatggagagagcgtgggagctggcagagtctcgcttgcgcggccggggcatcgccgcgcggcattactggcacgccatgcctctccagatggcgctcctccacgcgatccaggggttctacctccgggcgctcgcccggctgccctccggcgagctgcggtctcgctaccaccggagcttggtgctggccggccattgctacggccccatggaccccgtctccaacatcatcctcaacgtcgtctggtacgacgccgcgcacccgccggcggaggagctcgagctggccatgatcccgcccatgagcatgttccgcgtcgccacgcgttcgttcctcggcctcgtctccttcctctgcacccgctaccccgacctcccgctccatgacgccatttggtgtttgcttgccgcggacggcgaccttggcgccgccgcaagagaagccgagcggcggcagcaccgtccctcctgcactgtccaggaggcctacgccgccgccgctgccgcggcccggcaccccaaaccggacgaacaagtggagctcctcagctcgagcagggccatcacgacgacgacgacgacgtcgctgctcctgcagaacggcggccagctctcctcggaagacgttcgccgcctcgccgccggcttactgtccccgaatccctccgccgccgtctcaccaacgcagcgcaaaccaacgaaaccacggcagcgcgggaagctgaaactgcagtcgcagttcatccgtgatcagaacaaaatctgcaagaaggggaaggctgcattgcacagatactcgctgcaaaacaacgaacccggtggatacgagctccatgtcatctgtggcatgaacaatctcgtatcaggacccgtgtattgcactgacgatgacatcgtcagttatacacctctcatatactttcgttgtcatgtcaacttcttggctcgccggagacactctgatccatctgccattgccggcgatggagctcttcaactcttctttgcagaatgcgaacaagtgcgttgcctttactgcgagcatcaagggattaggattgtgcatccatcggtggagaatttccatgggcgtgaggtggaatttgagaagatggtatgtggaaaagatccctgtgaagacgattttgatcttttagttgatgaagaaccgttttacaccaacgatggtatcgtcaacaacctcgagtatgcaggtgctatggatggttcgaagaggacttcatttatcgagatagcgatgaaggcaccgacgaggaagaaggaaactctgatgatgatatcgattttgtgtgagttcaagaagggtctaagcaagagatggcaatggttccccgtcctccgattccctgcggggcaggtttgtttcagcgtccctcgtccccgctctccgtggaggcccgacataatagttccccacgccggcgccgactcccgatctcgcaaggccaccgtgcgtctgccgcgtcggcacccgtgcagggttgccgactcgccacgccctcgcccgcgcagggccgccggctcgccgcgcccgcgctgtcacgtcccggcgcgcccgcaccgtcaggtcccgttgcgcacgcgcagggccgttggctcgccgtgccgccacgtcccggtgccgccccaccaggaattccccgttgccatctcctccgtggaggcggccgccatggacatagacgacgacgcccgccaccgccgcgtcatcatgtcaagggattgccggagtcgcacgccgtcttccaggacgcaagacaagaacagatcgttgctccttgacaaggttcgtgcctcccacgcggaggcgctggaacggctgcggccggcggcggacctcgacgccggcctctgcttcggcttgctggatcccgtctccaacgccatcgtcaacgccgccgtcttcgccgaagcggaagatgggaacgacaggacggggcgatctctcgacggcgcggtcaccttcctcaccacgttcttccctcacctcccggactgggaggccgtgcgctacctgctcgacgccgacgctgacgtcctcgtcgcggcgcgcctcgtcgtgcgggaccgtggactgaggagattcgggttcgcctcggacaccgccggcgccgccgtaaggttggccctcagatgcgccgcgctggccgtgaagcatccgcatcccgaccggctcgtccacgcgtggctgtccctgtctcgccgcctcgacgaggccgtgtccgcgctcgccaaccacgacgtgcgcggcctcgtcgcgctggtcgtcgacgaggcggaggcgccggcggcggccaacatggagagggcgtgggagctggcagcgtcccgatttctcggccgggacaacggcatcgccgcgccgccttaccggcacgccatgcctctccagaggacgctcctctacgcgatccaggggttctacctccgggcgctcgcccggctgccctccggcgagctgcggtctcactaccaccggagcctggtgaaggccggccattgctacggccccatggaccccgtctccaacatcatcctcaacgtcgtctggtacgacgccgcgcacccgccggtggaagagctcgagctggccatgatcccgcccaagagcatgtccagcatcgccacgcgttccttcctcggcctcgtctccttcctctgcacccgctaccccaacctcggcctccatgacgccatccggtgtttgctcgacttcgacggcgacctcaacgccgccgcaagagaagcagatcggcggcagcaccgtccctcctgcactatccaggagtcctacgccgccgccgccgcggcggcccggcaccccaaaccggacgaacaagtggagttcctcagctctagcagagccatgacgacgccgctgctcctgcagaacggcggccagctctcctcggaagacgttcgccgcctcgccgccgccttactgcctccaactccctccgccgccgtctcgccaatgcagcgcaaaccaacgaaaccacggcggcgaagacagctcaaactgaaggcgcagatcatccgtgatcagaacaagatctgcaggaaggtgaaggctgcattggacagatacgcgttgcagaacaacgaacccggtggttacgagctccatgtcatctgtggcatgaacaattgcgtatcaggacccgtgtattgcactgacgatgacatcgtcagttatactcctctgatatactttcgttgtcatgtcaatttcttggctcgccggagagactccgatccatctgccattgccggcgagggagctcttcaactcttctttgcagaatgcggtaactatcgcctcaaccacgacggcatttgctgcccaaacaagtgcgttgcctttactgcgaacatgaaggggttgggattatgcatccgtcgataggaatacgacgaccatatcgctagatgcggccattggattcgtcttcaccactcgcggggatggaggctccacggagataaattacctgcacggaggtggtgatggtgaaagatcttgccccgtttgcatttcacggggatggcgatggagaaaattcttctggcgtggatgcatgactgatggtgtaacctccgactaggaattccccgatgccatctcctccgtggaggcgactatgcgggtgtaaatctccagccagtaatgcccgatgctatctataggctgaacatattaagaaatagaacagactccctcggtcccatgaaccacgaatgtagaattagatacgaatctagaattacatatgacatattatagtacaggtgtgtttagattcggactattaggatgagctttgcatcagatatatcttgttgttttttatgacacagggagtatg

SEQ ID NO: 84269 - DNA, 156 bp, Oryza sativa
  Clone ID: PAT_MRT4530_83521C.1
atgcgggcgaagggattaggcccgggcgaacttgacgcgtgggttgcagcggcgcaccagctcatgagaaagattccccccaagaatcacacggagagggaagccaacaaacgcgctagccaaggagaccaactcatagtcccccccggttactag

SEQ ID NO: 84270 - DNA, 903 bp, Oryza sativa
  Clone ID: PAT_MRT4530_83522C.1
ctccgaggctttttccttccggccgggatcacaatccaatacaagttcacaacataagcatagtacaggtcattgagacttgagagagcatggcagggaacaaaaagcgtggtggcaggaacatggatcaggtcaagaaggcggcagtgagatcggatggggtgggaggtagtgcgaccaacgccgagctgccgatggccaacctcgtacgcctgataaagaaggtgctcccagggaaagcgaagatcgggggagcagccaagggtctcacccatgattgcgcggtggagttcgtcgggttcgtcggcgacgaggcctccgagaaggccaaggcagagcaccgccgcaccgtagcgccggaagactacttgggctcattcggcgaccttggcttcgatcgctacgtcgaccccatggatgcctacatccatggttaccgtgagtttgagagggctggtgggaataggagggtggcgccgcctcctccggcggcagctacaccgctgacgcccggtggaccgacattcactgacgcagagctgcagtttctccggtcggtgatcccctccagaagtgatgatgaatatagcggctcatcaccagccataggcggctatggctatggatatggctatggaaaaaatatgtgaacaacttgatgcatgtgtgtgtgtacactgcatgcatgcgtggagggtcaaacagagtcaagactcttgtggtggtttcaataagtctctagtgacaatataagttgtgtatcgttgtttcctttgtaaaaaaaaacgtcatgtatcgttgtgtgtcctcatccggtaatcctttacgtgggtgggttatgcgagaaaaagaaaatgacgttgcatcaaataaaatgcttgatgtttgcgtatttactgtatc

SEQ ID NO: 84271 - DNA, 1489 bp, Oryza sativa
  unsure (1)..(1489): unsure at all n locations
  Clone ID: PAT_MRT4530_83523C.1
tccatccccgccccgcacgccacgctcagccccaccggggccgccctcccgcaacgtacggcggtataaagcggccgggggaaaggccggcttcgcctcccctttcctccaattctcatcgccatcgatgccgctcttctgcaagcacggcgccggctttcttgccgtcgccgtgtctacatccatcgtcttcctcctcctccttcacgccttctcgctgccggcctcggcgctctccttcgggctagcgcgccgccaccggaaagacgccgccgtgagctgcgacgtcttcagcggcagctggcgccgaagatggcgttcaacgcgacccggtgcagcgtgacggatgggtactgggcgtacgacaggtccaagaaactgccttacacggaccagacgtgcccatacgttgacaggcaggactcttgccagaggaacggcaggccggacagcgactacctatactgggattggcatcttgatgactgccttctcccgaggtttgaccctgtgtccatgctggagaagctgcgggggaagcggatcatgttcgtgggcgactcgctgcagctgggccagtggctctccttcgtctgcctcgtcaactccgccgtcccggacaccccgggcgccaagtccatggagcgcagccgcaccctctccgtctacaccgtcaaagagtacaacgcgtccatcgagttctactgggcgccgttcctggtggagtccaactcggaccggaacatcgcgctgggcgcgggcggccgcgtcctgcacgtcgacgccatcgaggagcacggcaagcactggcgccgcgccgacatcctcgtcttcgacagctacgtctggtggatgaccggctacaggatcaaatcggtgtggggatcgttcggggacgatgggtacgaggagctggacgcctgggtggcgtaccggctgggcctcaagacgtgggccaactgggtcgactccaacgtcgatcccgccaccacccgcgtcttcttcatgtccatctccaccacgcacaccaggagcgaggactggggaagggaaggaggaatcaggtgctacaacgagacgtggccgatcacgcagcggggctaccgaggcagcggctccgaccgtcggatgatggaggtgatgtccgacgtgctgggcaggatgaggacccccgtcacgctgctcaacatcacccagctcacggagcaccgcgtcgacgcccacgtctccgtctacaccgagaccggcggcctcctcgtcaccgacgaggagaagaccgatccgcagcgctacaccgactgcatccactggtgcatccccggcgtgccggacacatggaaccgactcctctacgcccacttgtagcnctnntctcggctctcacaagtcacaagcacgcaacgcaacgcaagcccactagtgactagtggtagcagctagcggacaaaggatacggataatgacagcgaaaaatgaggagatatattaa

SEQ ID NO: 84272 - DNA, 597 bp, Oryza sativa
  Clone ID: PAT_MRT4530_83524C.1
atggccagcgccagcgtcgtcggaggaggagcgcgccacggcggcgagcggcggcgccgggtgctggtgttcccgctgccgttccagggccacaccaacccgatgctgcagctggccggcgcgctccacggccgcggcggcctgtgcgtcaccgtgctccacacccgcttcaacgcgctcgacccgtcgcgccacccggagctcgcgttcgtcgaggtcgccgacggcatcccgcccgacgtcgccgcgcgcggtcgcgtcgccgagatcatcctcgccatgaacgccgccatggaggccacggaggacgagagcggcgccgcgtcgccgtccaacatccgcgaggtgctcgcctcggtggtcgccgccggcgaggggcagcccagcgtcgcgtgcctcgtcatagactcccatctcctcgccgtgcagaaggccgccgccgggctggggatccccacgctcgtgctccgcaccggcagcgccgcctgccttcgctgctacctcgcctacgacatgcttcttcaaaaggctatctgcctcccaaaggttaggactaaacaatcgcatattttcatacacccccgtctcaaactataa

SEQ ID NO: 84273 - DNA, 2287 bp, Oryza sativa
  unsure (1)..(2287): unsure at all n locations
  Clone ID: PAT_MRT4530_83525C.1
cccgcccaccccacaacacccgccaagcgcgcccgcgcccccaccacgccaccnagccggacgcgccgcnagccacaccacaccagcgcacgacccacccccacacaaaaaccccacccnntgncnncccccgccccnttatgtcccncncccccccccagngtgcaacaaangggnngngganataccnnngcnnncnccncnnccnnncnncgcccccccncccnncncnccccnnccccaaaagtgtggaaccaaggcggcgcaaacagaaaacaccggcgcgcgggcgagggcgggggccncacccacaaaacaccacacgccagcacggcgcggcgcagagcagcagcgnaccccacccacccggcacgacaccgcaccgcgcccaccagacgcacaccccagacccagccacgcgcgccgcccngccccgccgccagcgagacaccacacagacgacaaacgaacaccgcgccacgcgcaggaccgcgcggccgcccgacacaccgcgacggcgccctctccccaacagcggtggggtggncacaccaccgcgncggggcggcgcgcccccaccggccgaaccancgcgaacgcaacagcgcgccacgcacgcccaccacaccgcccacagagccgaaccccaccagcacaacggcaaccgaacgacagcgcagcaacgagaganacaccangacaacaccncncacgcgccgcgccgcgaccgccccacggcgcacacacgcgccgaccacgacccaccaccccaacacgcgcagccgaacgacgcaggccaccgcccacgaacaacagacccacgcacgcacaccccaccccaccaccacgcgccccaaccacccaccagccaccacgcgccgacacgcacagcaagcacaccccacaaccgcaccccaccacacgcgagacgcagcaacgaggcgaccagcgcaacccaccccaccaggagcacacccgagaacgaacccacaacgcgaancgccacccaccgcgacgcgcgacccgccgccgccgcaccaccaacnacacacacgcaanaccaccgcacggacaccagcgcagaaccgacgcgnccaccacacccgccacagccnccgcgcacacncaccgccgcgacgccaccgcaccgcacgcacgccgacccgccacngcacgacccaggcagcccacacgccaccagcaacgcaccacacgcgacgacgccaccgcncgaacacgnancgcaacgagcacacgcacccncagccgcgcgcgcagccgcacgcagccgcacgcgcacacacagccgacagcgacgcccgccgcacccagcccacgacgcgcccacgacacacagcagcancagccgcgcacacaccncgcccnacgcaccccncccgacccgcacgcacagcacgcacacacgcccgacncgcccagcgcagcaaccacaccgacaccccacncngccaccgcccgcgncgcgacgccacacgacacgcacacgacacgcgccagacgcacacccaccccgcagcggaccacagcgaccacggccacgcacgcccgcgcacacccccagccaccgcaccacnccaccccgcccacncgccaccaccaccaccacgccccgcgcgccgcacacagaaccncacgcgccgcacancagcgaccacaccaccgcgagccaccaccaccacacggcgacacgacaacagagacaccagcgangncgcaccgcgcacgccagacgcgagangcgagcgccgcagcaccgcacaacgcgcagcagcacaancgcacgcagcgcgacgcgcacacaggcgagcacgccacagcanacgccaaccacgacgcgcacgcacaccgcaaacacgagcgccganagacgacagcaccgcacagccaccacagcgcagangacacacgcgcgacgcacaccagacagcgacacagcggcagcgcgcgncacacgcgcgcagcgccgcaacagnangaccacggcagcacccnacaccacacacacgcacccaccacagcaaccacancacagacgaacancaccgaggacacgcgccacgcnacanagagacacgcncgcacgcacaacacaccgcacacaccgacacaccaagacacnacagacccacacgccccccacacgcaccgccgccncgccgcaccaccaccccacgagccacgagnacccagacggcagacacaagcgcacagaacacaacacacaaacacgcancacgccaccccccgccgcggccgccacgcgaca

SEQ ID NO: 84274 - DNA, 749 bp, Oryza sativa
  Clone ID: PAT_MRT4530_83526C.1
ccagtatgcaacggaggccccgggccatgctcatcaacccgcgggcggacgaggaaattcgtcaacttccaggagatccccgcggcggtggtggcagcaggtttcgaggtggtcccggtggagccgcgtcgtgacctgagcatcgaggagttctcccgggtggtggactcatgtgacgtgctcatgggcgcgcacggggccggactcaccaacttcttcttcctccgcaccaacgcggtgatgctgcaggtggtgccgtggggccacatggaacacccatccatggtgttctacggtggtccggccagggagatgaggctgcgcgacgtcgagtacagcatcgccgccgaggagagcacgctctacgacaagtacggcaaggaccacccggcgatcagggacccggaatctatacacaagcaagggtggcagttcgggatgaagtactactggattgagcaggatatcaagctcaacgtcaccagatttgctcccacgctgcagcaggtgcttcaaatgctcaggggatagaccttactccgatccgatccttcctatacaggcaggcttagagatacatccgtagaaacaaacaatttctttattttttgacgtttcgacttagcatgccgtggcgaattcgcgcgcctccgtttgttaggttgcactatctggatgtttacacaaataaatagtagagtgaaccaaaaataccataaaaaaaaaaaaaaaaaaaaaaacccgtggtc

SEQ ID NO: 84275 - DNA, 732 bp, Oryza sativa
  Clone ID: PAT_MRT4530_83527C.1
atggggttccggcggcgccgcgccagggagaggccagcttcccaggctcctagtggcggcgggctgccgctgacatcagcaagagaagccggcgccgacacgcgggccccgcacgtcagcggctccaaggggagggcacacggtggaccaagtccaccgcggcctaggcggcaccgtggagcaggagcacgggcggcgtcggcggcacatggccggacggccactggctgcggcggcgcgacgcggcggcgaaaagaggggaaagggagaggagacggagggggtcctcaccgaggggcgcaggcaacggaacgacgacggaaggcggtcggcggagctcgggcggagagggggcggcggcgctccggcgatgggcggcgccaacaaaggggcggccaaggggtgcgccgtgacctgaggaaggtgatggatgggttaggcgagcgcggggtggccgggaaccacgaggaagggcagctggaggcaacaagcacggcgacggagctcacctcgcgtggggcaaatggcgttccggcgggggatggcgacggtgaggaggcagccaagggactcctcgtccttgcagagctgaaggaggcgacggcgcatcgcgaggtggttggcggtggggatggtttttcggtgatggttgaagggagaggagcggctgccggggtggagctcagcatggagatgctgacggcggcggcggcgcagcgcagcggccactag

SEQ ID NO: 84276 - DNA, 252 bp, Oryza sativa
  Clone ID: PAT_MRT4530_83528C.1
tagtcaaaaggaaatctaaggaggatcggatgtgatgaagaggaagttggctataaaccaatcatcagaggaatgtccaagtacggtgcttcttgtccaatctgttaaataatttgttagtttttccactggttatcaacggcttttggtcttctcgtgctgtcgtgcagctacaatcctgcaaaattcgttggtagagatgaagatgacagagacatcgagcatagcagcatacaatggaagagagaagac

SEQ ID NO: 84277 - DNA, 162 bp, Oryza sativa
  unsure (1)..(162): unsure at all n locations
  Clone ID: PAT_MRT4530_83529C.1
taccctccgaggccacctgtagcccagtgtgtcgtccacagttacaggttgagatcganggacaaagttaaactatacgcattaatgaatttcctggagaacatacgtggttcatcagtattcaccccatcttttctcgagcgttgatataaaaaaaaaaaa

SEQ ID NO: 84278 - DNA, 1481 bp, Oryza sativa
  Clone ID: PAT_MRT4530_8352C.1
cggcttatctcctcccccctccccaccaccaccaccaccaccatggccacagccgcttccctctccgccaccgcctcctccctcctcgcccccgcccccgccaccaccggcgccgcggcggcgcagtgctgctcctcctcgtccaccgcgctgttccccacccccgtcccgtcgctgcgcgcctactacccgcgcctgctcctcgcgttccgccgccccgccgtcgccgccgtcgcagacccgcagggcgccgtgctcgaggaggagcagggggagcagcaggacgaggggccgggcgagtacgacgacgacgactacgacgacgggtacgagggcggacgcggccccgcgttcacgccccccacccgcccgcgcaccggcaaggccgcccttccgctcaagcgcgaccgcacgaggtcgaagcgattcctggagatacagaagctgagggagagcaagaaggagcacgacgtgcccacggccatctcgctggtgaagcagatggccagcgcccgattcgtcgagtccgctgaggcgcacttccgcatgaacctcgaccccaagtacaacgaccagcagctccgcgccacggttaatttgcccaaggggacgggccagtcggtgaagattgcggtcctcacacaaggtgagaagatagatcaagcaagagctgcaggagctgatattgtcggtggagatgacctgattgaccaaataaaaggaggatttatggaatttgacaagctgattgcatcacctgatatgatgcctaaggtcgccggattgggaaagattctaggaccgagaggacttatgcctaaccccaaagctgggactgtttctccaaacataactcaggctatcgaagagttcaagaaaggtaaagttgaatacagagttgacaagacagggattgttcacattccctttgggaaggttgattttcctgaagaagaccttattgcaaacttcatggctgttgttcgctctgtcgaaaggaacaaaccatctggtgcaaaggggatatactggaaaacggcatacttatgctcatcaatggggccttcaatcaagttaaacatcaaagaaatgcttgactatggctcagaatcatcagactaaatgccacgaaaagcaccagttaagaaatctggtgtttgctaccaccttcacaaaattaaccatccacccttagcgataaatgaaccgggaaacatggtgggggaaggcaagggaggtgcttaggtacagtttttttttcagtctcacctgcatccatccagcagttacacgatgcccaagtcgacgaaggggtgatattgttggccatttgtacttacgagcaaattatttacggacttatagatgtgttttctgagatgtttgttgtaatgatcaatattttgtccatagtcatccttgagcttacgacaaaaaaaaaaaaaaaaaaaaaaaacccgcgactcggggaccccctcggc

SEQ ID NO: 84279 - DNA, 585 bp, Oryza sativa
  Clone ID: PAT_MRT4530_83530C.1
atggcggaggtgcaggtagatgaggtagaaggaggcgaacggcggcggcggcggccgctggcggagtacgcggcggagctggaggcggtgagcttgagcgtgcgggcggcgccgccgctgcggctgaaggcgctggtgcgggcgtgccaccacgcgctggccttgttcgacctcctcggcgtggaggccgggttctggaagacggaatacgcggagcggctggtggcgctggagcgcgcggcggaggccatggacagcgcggaggagctcgtcgaccgcgacgtcgccgccggccgcgtcagggccaccggcacccactccaacaacctcgtccgcgtcaagcgcggcatcgagctcaagcgggcgctcttccagctcatgctcgcgcagctgcagcagcagcgaccaggaggaggaggagtctccttcgacggggtggtgtccatggcgtacgccgccgtgttcgcccggtaccacgacaagaacgtgcagagcaccgtcgccgactccatctgcgccatccccgtcaagtccatttccgacttcttcgccaccatcaatgagaccggttgtttcttgtactaa

SEQ ID NO: 84280 - DNA, 552 bp, Oryza sativa
  Clone ID: PAT_MRT4530_83531C.1
atggcttgtggctatttgcataaaggggaagccggcgccgacacgcgggccccgcacgtcagcggctccaaggggagggcacacggtggaccaagtccaccgcggcctaggcggcgccgtggaccaagagcacgggcggcgtcggtggcacaaggccggacggccaccggcggcggtggcgcgacgcagcggcggaaagaggggaaagggagaggagacggagggggtcctcaccgagtggcgccggtgacgccggaggcaacaagcacggcgacggagctcacctcgcgcggggcagatggcgttccggtgggggatggcgatggtgaggaggcagccaagggactcctcgtcattgcagagccgaaggaggcgacggcgcatcgcgaggtggtctgggacagcaacaggaggcggcaaatgcggcggcggcctcaggttggtggtgggggtggtttttcggtggtggttgaaggaagacgagcggctgccggggtggagctcggcatggcgatgctgacggcggcggcggcgcagcgcagcggccattag

SEQ ID NO: 84281 - DNA, 957 bp, Oryza sativa
  Clone ID: PAT_MRT4530_83532C.1
atgtcagcaggggaagccggcgccgacacgcgggccccgcacgtcagcggctccaaggggagggcacacggtggaccaagtccaccgcggcctaggcggcgccgtggaccaagagcacgggcggtccacaggcagcgcccaaaatcggcaacggagggagctggcttgccaggcgtcggtggcacaaggccggacggccaccggcggcggtggcgcgacgcagcggcggaaagaggggaatgggagaggagacggagggggtcctcaccgaggggcgccagtgacggtacgacagagctcgggcggagagggggcggcggcgctccggcgacgggcggcgccaacagaggggcggccaaggggcaccgtgacctgaggaaggtgatggatgggttaggcgagcgcggggtgggcagccggaggcaacaaagcacggcgacggagctcacctcgcgcggggcagatggcgttccggcgggggatggcgatgttgaggaggcagccaagggactcctcgtcattgcaaagccgaaggaggcgacggcgcatcgcgaggtggtctgggacggcaacaggaggcggcaaatgcggcggcggcctcaggtcggggtggagcttgatgcggcgaagccatcggtggaaacggcacagcacggcggcgacgagaatggcggtggtgggcggctgaacgatgccggcgagcggcggaggttggtggcgcggtggggcggctttccggtggctattggggaatatggagtggctgctgaggtgtggcaaagagcggcgaacgcgatggcgcaagcggcgcggcgcggggacggcggcagcggccggctggagggtcgccggtttgataaggaaagggatgtggtgctgcaattgcagggtttggatcttgttgatcggaagccggatcgtgtgcgttatgtttctgccaaatcgagtgtccgttag

SEQ ID NO: 84282 - DNA, 1524 bp, Oryza sativa
  Clone ID: PAT_MRT4530_83533C.1
atggcccatccaaactccatcacgctcacccttgcctggatgcgtcagctaagaggaaagctacactacaagcccagccgttgcccacgctggcttgtgcaagagaagccggcgccaacacgcgggcctcgcacgtcagcggctcgaagggaagggcacacggtggaccaagtccaccgcggcctaggcggcaccgtggaccaggagcacgggcggtccacaggcagcgcccaaaatcggcaacggagggagctgactcgccaggcgtcggcggcacacggccggacggccaccggcggcggcggcgcgacgcggggaaagggagaggagacggagggggtcctcaccgaggggcgccgggtggccgggaaccacgaggaagggcagccggaggcaacaagcacggcgacggagctcacctcgcgcagggcagatggcgttccggcgggggatggcgacggtgaggaggcagccaagggactcctcgtccttgcagagccgaaggaggcgacggcgcatcgcgaggtggtatgggacggcagcaggaggcggcaaatgcggcggcgtcctcaggttggcggtggggatggtttttcggtggtggttgaagggagaggagcggctgccagggtggagctcagcatggcgatgctgacggcggcggcggcgcagcgcagcggccacttgggcggtagtggtggccggctggatgcgacgggaggcagtggtggctcggatgcacggtggaatggtgttttggtgcacggcggcgatgggaacggcggtggtgggcggctgaatgatgccagcgagcggcggaggttggtggcgcggtggggcggctttccggtggctattggggaaaatggagcagctgccggggtgcggcaaagagcggcgaacgcgatggcacaagcggcgcagcgcggggatggcggcagcggccagctggagggttgccgacgagcggcggcgcttgggctcgcgtggggagcacgggagaggacgcgaggagctcggggaggaaggagcaggtggaggggaaccgatttcactcggtttgggcgcgagggcacgagtgggagggccggaatcggcggcgacgtgggcggcaacgggcggcatggcggcttcgggcggttgttggccgggatggggatggacctgacaaccgacaagccccccatctccaactccctcgtggccgtccttgataaccccatagtcagtcgcgtctttgccgaggccggattccgcagcggggacatcaaggtcaccatcctccgctcggctccacccatgccgctctttggccgcctccccacgcgcacccacccgccgcctctcttcctttgtagcttcgtcgccatggacgacgctgacgtcccttcgctggccgggaatcttgccggcgccggggagaactgcgaagctgtcgacactcggggggcaattcaggcatttcgaaaaaattctcaccactttcatcacgaaaatgataaaataatgtgtccggtgttctag

SEQ ID NO: 84283 - DNA, 4644 bp, Oryza sativa
  Clone ID: PAT_MRT4530_83534C.1
atggctgagaaaccaccactgtctccgtcgtcgggcagcccgggtaaagttaaggaaaagactcagaagttcggtttgactgacgtccatgaaggaaacgttgtgcccattgatccagagaagctcactcccgaacagaagaaagacttcaatgcaatgatgcagcaagcacgggatcaatttttaagctcgttcatgcaaactcgcaacgacacatttgttcagaagtacaaggtgaaggtggttcctgaggatcttgggatcggttcgtctaaagagggagaaaagaaacaagttccagatggatcagcccagccgagtgacaaaagtgttacagatgggtcgactcaggagagccagggtgactactctcatggagtacatggagttcaaggtgacggcactcagggattgcaaggggggaatcttaatcagaatgacaatgcattccaagattttttcaataactttcaagatcgggtcgactatgctgtgtatattgctttgatcaatcaatctggagtattaactaatactttgtcaaatatgatgaaatcggtagccgatggttcaatagctgaacatcaggctgcaggcccagtctatttgcaagggggtacttttccaaattatcggactttgattaccgatgttcatccacttacccggggaactcctccagctcaatcgacggtaccagcatcggctccagcacctgcagcaccgtcatcggctccaggtcaattaatcaatccccaattattgttctacaaccagtttgagcctacaccacaacaacctcaaggatcacctcagcagcgaccatgggccgatgtgatagctgatgtaatgagggagcaatttgggcttaaaccaaatgagactgggaatttgtaccgacaaccttatcctgaatggtttgaaagagttcctttacctaaccggtttaaagtactagacttctcaaagttcttaggacaggatactacatcgacttatgaacacatcagccgattcttagctcagtgtggtgaggcatcgacagtagatgctttgagggttaggttactccggttgtcattagctgggtcggcttttacttggttttcttctctgccacatgggttgattaacagttgcgccgatttagagaagcagtttcatagttatttctatagtgggattcacgtgatgaagctgtctgatctcacgtcaatcaagcaaaagcatgatgagccggtgcatgagtatattcaaagaagatcggatgatgaggatgatgattccgaaatagcggcagccgagtgggtcaggagcaaaaaggtcttcaggcagcaaatccaaacggctattgagggaggaaaaatcaagtttgatgattcgaagaaaccaatgaaggtcgatgctggccaatcagccgatagggtctgtgcaaagggttttcaagtgagttcggctaagataatcaacaaatatcagaggaagtatgacaagcagcaggagaagcattatgaagaacacgatgatggttttgatcctcattggggttgtgagttctttagattctgctggaatgaagggatgaggttaccgtccattgaaaactgccctgggtgtagtgatatcattgggagctcaagccggtcatataataggagtaatcggctgaggcaggaaagagtgtctgttcatcaaagattgggcccagtgaatcaaggtcatggtcaggaggatgagatagttaggacaaatcaatggtgtccttctgccgaattcgggattgatcaggccgatgtagacgaggtagaagaggaatcggctaagttggttttgtcaccggagcgagcaatgttcaaaaagcctgaggggacagagaatcggcatcttaaaccattgtatataaacggttatgtcaatgggaagccgatgtctaagatgattatcgatggtggggctgcagtaaacttgatgccttatgctacgttcaggaaattgggtaggaacgctgaagacctcattaaaacgaacatggtgcttaaagactttggtggcaatccatcagaaaccaaaggggttttgaacgtggagctgacagtcggcagtaaaacaatccctataacattctttgtcatcgatgggaagggttcttatagcttgttgcttggaagggattggattcatgctaattgttgtattccttcaaccatgcaccaatgcttgattcaatggcaaggcgacaaggtagagatcgtgccggctgacaagtcagtcaatgttgctagtgctaatttagctctttgggagatggatggccttgattttttatctggaaagatggagaacccaagctattattttgagggcgtcgtagagggttcgaacgtctacaccaaggatacagtagatgatcttgatgacaaacaaggtcaaggttttatgtcggccgatgatctggaggaaattgatataggtccaggcgatcggccaagaccgacatttattagtaaaaatttatgtgtagaattcagaactaagttgatagagctcttaaaagaatttagagattgctttgcttgggaatattatgaaatgccaggactcagccgatcgattgttgaacatcggctacctatcaaacccgggtggatttctagtatagttcctgttaccaagaaaaacggcaaggttagggtatgcattgattttagagatttgaataaagctaccccaaaggacgaatatccaatgccagtagtcgatcaactggttgatgctgcatcagggcataagattttgagttttatggatggaaatgctggatacaatcaaatttttatgactgaagaagacattcataagacagcttttaggtgtcccggtgcaatcggattgtttgagtgggttgtaatgactttcggcttgaaaagtgctggagcaatgtatcaaagagctatgaattatatataccatgatttaatcggctggttggttgaggtctacattgatgatgtggttgttaagtctaaagagatagaggaccacatagccgatttgaggaaggtttttgagagaaccaggaagtatggcttgaagatgaatccgacaaaatgtgcttttggtgtgtcggctggtcagttcttgggatttcttgttcatgagaggggaattgagattacccaaagaagtatcagtgcgatcaagaagattaagcctccggaggataaaacagaattgcaagagatgatcggcaagattaatttcgttagaaggtttatttctaatttatctggaagattaaagccttttacgcgattattacaattaaaggccgatcagcagtttacttggggggcagagcagcaaaaagctttggataatattaaggaatatttgagttctcctccagttttgatttctccacagaaaggagtaccttttcggttatatttgtcggccgttataatttcgcctcggggggcatgctttgagtttgcttatagtattaaaccttatgcgacgaatcaagctgagtatgaagcagttcttaaagggttgcaattgctcaaggaggtcgaagccgatgctattgaaatcatgggagattctttgttggttatcagtcagttggcaggagaatatgagtgcaagaatgatacgttgatagtttataatgagaagtgccaagaactgatgaagaagtttcggctagtgactttgaagcattcggcttctaggaagttaagatataaggcgttgaaatatgttttattgaatgatgagctttattatcgaacgattgatggagtattgcttaagtgtttgagcgctgatcaagctaaagttgcaatcggcgaagttcatgagggaatttgtggtactcatcaatcggctcataagatgaagtggttactttggcgtacggggtatttttggccaacgatgttagaagattgtttcagatattataggggctgtcaagattgtcagaaatttggtgcaattcagagagtgccagcgtcggctatgaatcctatcattaaaccatggccattcagaggatggggcattgatataatcggcatgattaatccaccatcgagtaaagggcatatgtttatattagtggcaactgattatttcaccaaatgggtagaggcgattcctttgaagaaggctgattctggagatgcaatacagtttgtccaagaacatataatctaccgatttggtattcctcagactattacaactgatcaaggttcaatctttgtgtcttatgagtttgttcagtttgccgatagtatgggtatcaaattattgaatttttcaccgtattatgcacaagctaatgggcaagccgaggcatctaacaaaagtttgatcaggttgattaaaaggaaaatttctgattatcctcagcagtggcatacccgtttagccgaagcattgtggtcttatcggatggcttgtcatggatcaatccaagttcctccttataagcttgtttatggacatgaaactgttttaccatgggaagttcaaatcggctcaagaagaacagagttgcaaaatgatttgacagccgaagagtactataatcttatggccgatgaaccggaggacttggttcagtcgcaattatga

SEQ ID NO: 84284 - DNA, 417 bp, Oryza sativa
  Clone ID: PAT_MRT4530_83535C.1
gccactcgtacggctgctcgcacgatgaccgcatcgatgtacaagtcggaaaagaggaaggaagtggacaaggtcgtgtgcaggatcctaggtaactgcagcgatcaatggagcgacttgatgagcgcttgcaccagcgctctctcctttaagctgtcctatataatgtgctatatcacatgacggaacaaaagagggaaagagagggccggtgagaaatgcatgcattatttgatgcattctattacccatgccattcaaactgactggtggagaaaatgatatttacaatgattcttaaacggaataacatactgctcactatatgactgactcattgtacaatacatgaaacttgtaaaggcaaatgttattggattatatgagagactatttattgatgtggtagttcatgat

SEQ ID NO: 84285 - DNA, 821 bp, Oryza sativa
  Clone ID: PAT_MRT4530_83536C.1
tcgtttagttatgatgcctatcctagcaccaaagttgggtgagcagaagctactgattatagcacttttggggggctgcgtgcatgtaagaactaacattgcttgctttcatactcatgttaagtgctttttgttaattttctgcaagaataatttgatgtcatcttgtgcatgctgctgcaggcattcatatatagcatagcatggacgccatgggttccttatcttggtgcaagctttgtgattgtaagcattttggtcaacccttctataaggagcattgtatccaaacgagcagggccttttgagcagggaatggttcaagggtgtctcactggaataagctcaactgcaaatgtgaaatcgcctatagttttttctcctctcactgcttggttcctatcagaaactgcacctttcaacttcagaggtttcagccttgcttgtgctggatttgcaatgttgatagcactcgcggtgagcattaatatgagcccagcagagcttcagccagatagcaaatagaagagctaagcactctatgtttgtggtaaagaacaagaatatagatgtacatatgtagttgctaatgttgtctctctttgtaagttaatccctggccctgctgatcagttgtaggtacttacacccaacgtgcagtatggcatagtagactaagaggaccaatgtacatagtgatgcaaaatatcagaagtagagaacactaatgaggcttgtgttatgttgtactgtaacaatagagttatcccctagtgttcccccaaaagaaaaatggctcatgtatttaatatatagcagat

SEQ ID NO: 84286 - DNA, 303 bp, Oryza sativa
  Clone ID: PAT_MRT4530_83537C.1
ctcgttctagttcgcgtgcggacgccctggttgatttgtgtttttggcgccgtctatgcctcctcctcctggttgttacgaccctacccatctccatagattgaccgctgacgatctggttatctgcctccgatgccagcgcgctagaggcgcacgcgccatcgaggacgtcgtcggacaacgtccgacacgctcgcgacactattgggaggaggaccggccggatcgaccgtcgccgggcagataagggccgtgctgcaccctaggtctgtcgcactccttgcggttcacctgcactctact

SEQ ID NO: 84287 - DNA, 366 bp, Oryza sativa
  Clone ID: PAT_MRT4530_83538C.1
atggccgctgcgctgcgccgccgccgccgtcagcatcgccatgccgagctccaccccggcagccgctcgtcttccttcaaccaccaccgaaaaaccacccccaccaccaacctgaggccgccgccgcatttgccgcctcctgttgctgtcccagaccacctcgcgatgcgccgtcgcctccttcggctctgcaatgacgaggagtcccttggctgcctcctcaccatcgccatcccccaccggaacgccatctgccccgcgcgaggcaccagtggcgagggtgggcgtaatggagttgggtcggccggggtgtccggttgtccagctgccggattcaccgtggcgcatgaggggactgcccgctga

SEQ ID NO: 84288 - DNA, 5964 bp, Oryza sativa
  Clone ID: PAT_MRT4530_83539C.1
atggctgagaaaccaccactgtctccgtcgtcggccagcctgggtagtggtaaggaaaagacccagaaattcggtctgactgacgtccatgaaggaaacgttgtacccatcgatccagagaagttcactcctgaacagaagaaagacttcaatgcaatgatgcagcaagcacgagatcaatttttaagttcattcatgcaaacttgtaagggcacatttattcagaagtacaaggtgaaggtggttcctgaggattttgggatcggttcttctaaagagggagaaaagaaacaaattccagacggatcagcccagccgagtaacaaaggtgctactgatggctctccaggaaatcaaggcgatgaccctcaaggggtccatagagtgcaaggtgacggagttcacggagttcaaggtgacggcactcagggaccgcaagggggaaatcttaatcagaatgacaatgcattccaagattttttcaataactttcaagatcgagttgactatgctgtgtataatgctttgattaatcaatctggagtgttgactaataccttgtcaaatatgatgaaatcgggagttcctcctgttgcatcatcagctcagccgacggcgccagcatcagctccagcacctgcagcgccatcgtcggctccaggccaattaatcaatcctcaattattggtaagagagcaatcacagtatcctggaccgaatgtgactcagctaacacaagaccaggttgcatctatgtttctacctcctcagaatgccattaattcggctcagcagcagccgattcagcaaacaccgtccaggcaacaggttgtgcagcctattcaacaagcatccccaattcagcaggccgtgcaaccagttcagcagacgccaccaaagcaaccggatttacagccgattcagcagacaccgttgagacagcaggtcattcagccgattcagcagcaagcctcaatgaacgcatcggctgggtttacaatgcctggtggccagcctgtgcagtacattgcaaatcaggtggtcccggaacacttggttcatcatgtgcaaccggatggttcggtggtgcctcaagttattcctgagcatttggcgcgtggtattcggccgaaccttcacaattgccgggggtaccaccaggcaggatcggtgcagcctcaattctacaaccagtttgagcctacaccacaacaaacacctcagcagcgaccatgggctgacgtgatagctgatgtaatgagggagcaatttgggcttaaaccaaaagagactgggaatttgtaccgacaaccttatcctgaatggtttgaaagagttcctttacctaaccggtttaaagtaccagacttctcaaagttctcaggacaggatactacatcaacctatgagcacatcagccgattcttagctcagtgtggtgaggcatcggctgtagatgctttgagggttaggttattccggttgtcattagctgggtcggcttttacttggttttcttctctgccacatgggtcgattaacagttgggctgatttagagaagcagtttcacagttatttctatagtggggttcatgagatgaagctgtctgatctcacgtcaatcaagcaaaagcatgatgagccagtgcatgagtatattcaaaggttcagggaaatgaggaataaatgttacagcttgagtttgactgatgcccggctagccgatttggcgtttcaagggatgattgctccgatcaggaaaaaattctcatctgaagatttcgaaagcttgtcgcatctcacacagaaggtagctttgcatgaacaaaggttcgcggatgctaggaagaactctaggaagattaatcatgtctattcttatatgtatggatcggatgatgaggatgatgattccgaaatagctgcagccgagtgggtcaggagcaaaaaggttataccatgccgatgggtgaagagctcaggaaaagaggaaaggtatgactttgacataactaaggttgataagatatttgatttgctacttcaaaaaaaacagattcaacttcctgccggacatataattccatcggctgaagagttgggcaagaagaggtattgtaagtggcataattctgggtctcatgcgactaatgactgcaaggacttcaggcagcaaatccaaacggctattgagagaggaaaaatcaggtttgatgattcgaagaaaccaatgaaggtcgatggtaatccttttcctattaatatggtacatacggccgatagggtccgtgcaaagggttttcaagtgaattcggataagatgatcaacaaatatcagaggaagtatgacaagcagcaggagaagcattatgaagaacacgatgatggttttgatcctcattggggttgtgagttctttagattctgctggaatgaagggatgaggttactgtccatcgaaaactgccctgggtgcagtgttatcattgagagctcaagccagtcatataatatgaataatcggctgaggcaggaaagagtgtctgctcatcaaagattgggcccagtgaatcaaggtcgtggtcaggaggatgaggtagttaggacaaatcaatggtgtccttctggtattttcacgaagaaccagaagagaagggttcagaggttgaggaacagggagcattttcaagaagttgaacaggaaattaaccatcggctaaagaaagcaaagccaagacaggaatggcgtgttaagaaccaggttcctgtagccgatgatgttgcagccgaagaggcaaaaaggatggcaaaagggaagagtgttgtaacagcaccaattaacatggtctttacattgccagccgaattcgggattgatcaagtcgatgtagatgaggtagaagaggaatcggctaagttggttttgtcaccggagcgggcaatgttcgagaagcctgaggggacagagaatcagcatcttaaaccattgtatataaacggttatgtcaatgggaagccgatgtctaagatgatggtcgatggtggggctgcagtaaacttgatgccttatgctaccttcgggaaattgggtaggaacgccgaagacctcatcaagacgaacatggtgcttaaagactttggtggcaattcatcagaaaccaaaggggttttgaacgtggagctgacagtcggcagtaaaataatccctacaacattctttgtcatcgatgggaagggttcttatagcttgttgcttggaagagattggattcatgctaattgttgtattccttcaaccatgcaccaatgtttgattcaatggcaaggcgacaagatagagatcgtgccagtcgacagccaattaaagatgaagaacccaagctattattttgagggcgtcgtggagggttcgaacgtctacaccaaggatacagtagatgatctcgatgacaaacaaggtcaaggttttatgtcagccgatgatctggaggagattgatgtaggtccaggcgatcggccaagaccgacatttattagtaaaaatttatgtgcagaatttagaatcaagttgatagaactcttaaaagaatttagagattgctttgcttgggaatattatgagatgccaggactcagccgatcgattgttgagcatcggctacctatcaaacccggggttagaccacatcagcaaccgccgagaagatgcaaagtcgatatgctggaacctgttaaggctgagattaaacgcttatatgatgctggttttattcgtccttgccgatatgctgagtggatttctagtatagttcctgttatcaagaaaaacggcaaggttagggtatgcattgattttagagatttgaataaagctaccccaaaggacgaatatccaatgccagtggccgatcaactggttgatgctgcgtcagggcataagattttgagttttatggatggaaatgctggatacaatcaaatttttatggctgaagaagacattcataagacagcttttagatgtcccggtgcaatcggattatttgagtgggttgtaatgactttcggcttgaaaagtgctggagcaacatatcaaagagctatgaattatatatatcatgatttaatcggctggttggttgaggtctatattgatgatgtggttgttaagtctaaagagatagaagaccacatagccgatttgaggaaggtttttgagagaaccaggaaatatggcttgaagatgaatccgacaaaatgtgcttttggtgtgtcggctggtcagttcttgggatttcttgttcatgagagggggattgaaattacccaaagaagtatcagtgcgatcaagaaaattaagcctccggaggataaaacagaattgcaagagatgatcggcaagattaatttcgttagaaggttaaggcattatctgttgtccaatgaatgcattgtcatatgtaaggccgatgtggttaagtacatgttgttggctccaattttgaaaggaagggttggaaaatggatattttccttaactgaattcgatcttcggtatgaatcaccgaaggcagtcaaagggcaagctatagccgatttcatagttgactatcgtgatgattcaatcggctcggttgagattgtgccatggactttattttttgatggatcggtttgtgctcatggttgtggtatcggcttagttataatttcacctcggggggcatgctttgagtttgcttatactattaaaccttatgcgacgaataatcaagctgagtatgaggcaattcttaaagggttgcaattgctcaaggaggttgaagccgatgctattgaaattatgggagattctttgttagttatcaatcagttggcaagagaatatgagtgcaagaatgatacgttgatggtttataatgagaagtgccaagaactgatgaaaacgtttcggctagtgactttgaagcatgtgtctcgagagcaggatattgaggccaatgatttagctcaaggggcatcgggatataagccgatgatcaaagatgttcagattgaaattgctgccatgacggctgatgattggagatatgatgtgcatcagtatttacaaaatccatctcaatcggcttctaggaaattaagatataaggcgttgaaatatactttagtggatgatgagctttattatcgaaagattgctggagtattgcttaagtgtttgagtgctgatcaggctaaagttgcaatcggcgaagttcatgaaagaatttgtggtactcatcaatcggctcataagatgaagtggttacttcggcgtgcgggtatgggtatcaaattattgaattcttcaccgtattatgcacaagctaatgggcaagctgaggcatctaacaaaagtttgatcaagttaattaaaaggaaagtttctgattatcctcggcagtggcatactcgtttagctgaagcgttgtggtcttatcggatggcttgtcatggatcaatccaagttcctccttataagcttgtttatggacatgaagccgttttaccatgggaagttcgaatcggctcaagaagaacagagttgcaaaatgatttgacagccgaagagtactatactcttatggccgatgaacgggaggacttggttcagtcgcgattacgagcagttgctaaagttactagggataaggaatgtgttgctcggcattataataagaaagtggtacctaaagatttttcggaaggagaacttgtatggaaattgattttgccgattggtactcgtgatagtaaattcggcaagtggtcgccgaattgggaaggaccattccaaatccataaggttgtgtctaaaggagcatacatgttgcaaggacttgatggagaagtttatgggcgagcgcttaatggcaagtatttgaagaaatattacccaagtatttgggttaacgcataa

SEQ ID NO: 84289 - DNA, 237 bp, Oryza sativa
  Clone ID: PAT_MRT4530_8353C.1
atggctgcgggcaagcggccgaggcgccgagcgctgcagcgggagcgggaggctgtggtcgcttggctggccaagagcaccagagcggagatggctgtggaatgtcctgcagaaggcgccacgaggacggcgtcatcaacagagaatgaagaaggtattactctgaagagccgaaatgctgtccatcagggtgttggagtgaagcaaattcatagatgttataagggtgctacttga

SEQ ID NO: 84290 - DNA, 225 bp, Oryza sativa
  Clone ID: PAT_MRT4530_83540C.1
aattttgaagcttggctcggactggaggaagaagaagacatatataaagatcactactggccctcaccgtcgccgtcgtcgaaggtggagaacaatgccaagggacgccggccatggctatgcggctgtgggacatggcggcgacaagaagccacggaatggcgccagcgcggttcactcgttgtcttcccggttccgatggaagcaccggtgaccgccaacaac

SEQ ID NO: 84291 - DNA, 5754 bp, Oryza sativa
  Clone ID: PAT_MRT4530_83541C.1
atggctgagaaaccaccgttgtcaccgtcgtcggccagccctagtaatgttaaagaaaagatccagaagctcggtttgactgacgtccatgaaggaaacattgcgcctattgatccagaaaagctcactcctgaacagaagaaagacttcgatgcaatgatgcaacaagcacgagatcaatttttaaattcattcatgcagactcgcaagggcacatttgttcagaggtacaaggtgaaagtagttcctgatgatcctgggaccggttcttctaaggagggagaaaagaaacaagttccagatgactcggcccagccgagtgacaaaggtgttacagatgggtcgacccatgagaaccagggtgaccactttcatggagtacatggagttcaaggtgatggcactcagggaccgcaagcgggaaattttaatcagaacgacaatgcattccaagattttttcaataactttcaagatcgggttgactatgccgtgtataatgctttgattaatcaatctggagtattgactaataccttatcaaatatgatgaaatcggtagccgatggttcaatagctgaacatcaggctgcaggcccaatttatttgcaagggggtacttttccaaattatcggcctttgatcaccgatgttcatccacttactcagggagttcctcctgttgcatcatcagctcagccgacggcaccagcattggctccagcacctgctgcgctgtcgtcggctccaggccaattagtcaatcctcaattattggtaagagagcaatcacagcatcctggaccgaatgtgactcagctaacacaagaccaggttgcatctatgtttctacctcctcagaatgctgttaattcagctcagcggcagccgattcagcaaacaccgcccaggcaacaggttgtgcagcctattcaacaaacatccccaatccagcaggtcgtacaaccagttcagcagacgccaccaaggcgaccggctttacagccgattcagcagacgccgttgagacagcaggtcgttcagccgatccagcagcaaggctcaatgaatgcgtcggctggttgggccgatttagaaaagcagtttcatagttatttctatagtgggattcatgagatgaaactgtccgatctcacgtcgatcgagcaaaagcatgatgagccggtgcatgagtatattcaaaggttcagggaaatgaggaataagtgttacagcttgagcttgactgatgcccagttagccgatttggcttttcaagggatgattgctccgatcagggaaaagttctcatctgaagatttcgaaagcttgtcgcaccttacacagaaggtatctttgcatgaacaaaggttcgtggaagctaggaacaactctaggaagattaatcatgtttatccttatatgtatggatcggatgatgaggatgatgattctgaaatagctgcagccgagtgggttaggagcaaaaaggttataccgtgccaatgggtgaagaactcaggaaaagaggagaggtatcactttgacataactaaggctgataagatatttgatttgctacttcgagaaaaacagattcaacttcctgccggacatacaattccatcagctgaagagttgggcaagaagaggtattgtaagtggcataattctgggtctcatacgactaacgattgcaaggtcttcaggcagcaaatccaaacggctgttgagggaggaaaaatcaagtttgatgattcgaagagaccaatgaaggtcgatggtaatccttttcctgttaatatggtacatacagttggccaatcagccgatagggtccgtgcaaagggttttcaggtgaattcggctaatataatcaacaaatatcagaggaagtatgacaagcagcaggagaagcattatgaagaacacgatgacggttttgatcctcattggggttgtgagttctttagattctgctggaatgaagggatgaggttgccatctatcgaaaattgccctgggtgcagtgatatcgttgagagctcaagccggtcatataataggagtaatcggctgaggcaggaaagagtatctgttcatcaaagattgggcccggtgaatcaaggtcgtggccaacaggatgaggtagtcaggacaaatcaatggtgtccttctggtattttcacgaagaatcagaagagaagggttcaaacattgaggaacagggagcgccttcaggaggttgaacaagaaattaaccatcggctgaagaaagtaaagccaagacaggagtggcgtgttaagaatcaggttcctatagccgatgatattgcagccgatgatgaggcaaagaggttggcaaaagggaagagtgttgtaacggcaccaattaacatggtctttaccttgccagccgaattcgggattgatcaagccgatgtagacgaggtggaagaggagtcggctaagttggttctatcaccagaacaagcagtgttcgagaaacctgaggggacagagaatcggcatcttaaaccattgtatataaacggctatgtcaatgggaacccgatgtctaagatgatggtcgatggtggggctgcagtaaacttgatgccttatgctacattcaggaaattgggtaggaacgccgaagacctcatcaagacaaacatggtgctcaaagattttggtggcaatacatcagaaactaaaggggttctgaacgtggagctgacagtcggcagtaaaaccatccctacaacattctttgtcatcgatgggaagggttcttatagcttgttgcttggaagggattggattcatgctaattgttgtatttcttcaaccatgcaccaatgcttgattcaatggcaaggcgacaagatagagatcgtgccagccgacagccaattgaagatggagaacccaagctattattttgagggcgtcgtggagggttcgaacgtctacaccatggatagagtagatgatctcgatgacaaacaaggtcaaggttttatgtcggccgatgatttggaggaaattgatataggtccaggtgatcggccaaggccgacatttattagtaagaatttatctgcagaattcagggccaagttgatagagctcttaaaagaatttagagattgctttgcttgggaatattatgaaatgccaggactcagccaatcgattgttgaacatcggctacctattaaacccggggttaaaccacaccagcaaccgccgagaagatgcaaagccgatatgcttgaacctgttaaggctgagattcaacgcttatatgatgctggttttattcgtccttgtcgatatgctgaatggatttctagtatagttcctgttatcaagacaaacggcaaggttagggtgtgcattgattttagagatttgaacaaagctaccccaaaggacgaatatccaatgccggtggccgatcaactggttgatgctgcgtcagggcacaagattttgagttttatggatggaaatgctggatacaatcaaatttttatggccgaagaagacattcataagacggcttttaggtgtcctggtgcaatcggcttgtttgagtgggttgtgatgactttcggcttgaaaagtgctggagcaacatatcaaagagctatgaattatatataccacgatttaatcggctggttggttgaggtttacattgatgatgtggttgttaagtctaaagagatagaggaccatatagccgatttgaggaaggtttttgagagaaccaggaaatatggcttgaagatgaatccgacaaaatgtgcttttggtgtgtcggcaggtcagttcttgggatttcttgttcatgagagggggattgagattacccaaagaagtatcaatgcgatcaacaagattaaacctctggaggataaaacagaattgcaggagatgatcggcaagattaattttgttagaagacttatttctaatttgtctggaagattagagccttttacgccattattacgattgaaggccgatgagcagttcacttggggggcagagcagcagaaagctttggataatatcaaagaatacttgagttctcctccagttttaattcctccacagaaaggggtaccttttcggttatatttgtcggctggcatccttgacggcagcgacgaaaccaacctcttcgagacatcttcaactgagaaggacttcaactctggtgtgggggaaaagagagcaagactgagtactacccactgtactcagcaagtcataccggaagaggagcaaggagaggaacttcagggcgtgacattgaggcattatctgttgtccaatgaatgcactgtcatatgtaaagccgatgttgttaagtacatgtcggctccaattttgaaaggaagggttggaaaatggatattttctttaactgagtttgatcttcggtatgagtcaccgaaggcgatcaaagggcaagctatagccaatttcatcgttgattatcgtgatgattcaatcggctcggttgagattgtgccatggactttattttttaatggatcagtttgtactcatggttgtggtatcggcttagttataatttcacctcggggggcatgctttgagtttgcttatactattaaatcttatgcgactaataatcaagctgagtatgagacagttcttaaagggttgcaattgctcaaggaggttgaagccgatgctattgaaatcatgggggattctttgttggtaatcagtcaattggcaggagaatatgagtgcaaggatgatacgttgatagtttataatgagaagtgccaagaactgatgaaggaatttcggctagtaactttgaagcatgtatctcgagagcagaatattgaggccaatgatttagctcaagaggcatcgggatataagccgatgatcaaggatgttcagattgaagttgctgccatgacggccgatgattggagatatgatgtgcatcaatatttacagaatccatctcagtcggcttctaggaaattaagatataaagtgttgaagtatgctttattggatgatgagctttattatcgaacgattgatggagtattgcttaagtgtttgagtgttgatcaggctaaagttgcaatcggcgaagttcatgaaagaatttgtggtactcatcaatcggctcataagatgaagtggttacttcggcgtgcggggatgacttgtcatggatcaatccaagttcctccttataagcttgtttatggacatgaagcagttttaccatgggaagttcgaatcggctcaagaagaacagagttgcaaaatgatttgacagccgatgagtactataatcttatggccgatgaacgggaggatttggttcagtcgcgattgcgagcacttgcaaaagttactagcgataaggaacgtgttgctcggcattataataagaaagtggtgcttaagactttttcggaaggtgagtttgtatggaaattgattttgccgattggagctcgggatagcaaattcggcaagtggtcaccaaattgggaagggccattccaaatacataaagttgtgtctaaaggagcatacattggtgtagagggagcagagcgcgacgcctcttgcggtggcggcggcggacatctccttggcgatgatgcaggtgcacctgccgacgttgaaagggagagggcggcagaggagggcgcggttggggagcgtcgcccatga

SEQ ID NO: 84292 - DNA, 804 bp, Oryza sativa
  Clone ID: PAT_MRT4530_83542C.1
atggtaatccgcatcgagctcgggactcaggagggcagtgtggtgccgactgccgacagccacggcgtgcggctcaatgcaatctgcctatctcgccgcttgacatggcatcccgacgccggtggcgattcgtgggttcgctgcctgccttccgccgccggtggccaccccgtaacgcatagagccgccggtcacctcctcggcgcgggcgaggcggtcgcagtgcttctcctccgctacgcaacggccggcctccacgaggttcctcctgttcgggagcacgggcggtccacgggcagcgcccaaaatcggcaacggagggagctgactcgccaggcgtcggcggcacacggccggacggccaccggcggcggcggcgcgacgcggcggcgaaaagaggggaaagggagaggagacggagggggtcctcaccgaggggcgccggcgacggaacgacgacggaaggcggccggcggagcccggcggagtgggggcggcggcgttccggcgacgggcggcgccaacagaggggcagccaaggggcgccgtgacgtgaggaaggtgatggatgggttaggcgagcgcagggtggccgggaaccacgaggaagggaggcgacgacgcatcgcgaggtggtctgggacggcagcaggaggcggccggaggcggaaaatgcggcagcggcctaaggttggcggtggggatggtttttcggtggtggttgaagggagaggagcggctgccggggtggagctcagcatggcgatgctgacggcggcggcggcgcagcgcagcggccactag

SEQ ID NO: 84293 - DNA, 6030 bp, Oryza sativa
  Clone ID: PAT_MRT4530_83543C.1
ttgtaggatcaaatcaactggcacgctcgtacatccgaaggtgagttttggacctgcattggagttaagcagatctcccaggcctcgtgttttccatcaacacgcttttggcacgcccggtggggctgattagaagtcagaagaacagcttccttcatggctgagaaaccaccactgtctccgtcgtcggccagcccgggtagtggtaaggaaaagacccagaaattcggtctgattgacgtccatgaaggaaacgttgtacccatcgatccggagaagttcactcatgaacagaaaaatacttcaatgcaatgatgcagcaagcacgagatcaatttttaagttcattcatgcaaactcgcaagggcacattttttcagaagtacaagttgaaggtggttcctgaggattttgggatcggttcatctaaagagggagaaaagaaacaaattccagacggatcagcccagccgagtaacaaaggtgctactaatggctctccaggagatcaaggcgacgaccctcaaggggaccatggggttcaaggtgacggcactcagggaccgcaagatcgagttgactatgctgtgtattgtgctttgattaatcaatctggagtgttgactaataccttgtcaaatatgatgaaatcggtagccgatggctcaatagctgaacatcaagctgcaggcccagcttacttgcaagggggtacttttccaaattatcgaactttgatcaccgatgttcatccacttactcagggagttcctcctgttgcatcatcagctcagccaacggcgccagcatcagctccagcacctgcagcgccgtcgtcggctccaggccaattaatcaatcctcaattattggtaagagagcaatcacagtatcctggaccgaatgtgattcagctaacacaagaccaggttgcatctatgtttctacctcctcagaatgctattaattcggctcagcagcagccgattcagcaaacaccgtctaggcaacaggttgtgcagccgggtttgcaatgcctggtgtccagcctgtgcagtacactgcaaatcaggcggtcccggaacacttggttcatcatatgcaaccggatggttcgatgtaatgagggagcaatttgggcttaaaccaaaagagactgggaatttgtatcgacaaccttatcctgaatggtttgaaagagttcctttacctaaccggtttaaagtaccagacttctcaaagttctcaggacagaatactacatcaacctatgagcacatcagccgattcttagctcagtgtggtgaggcatcggctgtagatgctttgagggttaggttattccggttgtcattagctgggtcggcttttacttggttttcttctctgccacatgggtcgattaacagttgggccgatttagagaagcagtttcacagttatttctatagtggggttcatgagatgaagctgtctgatctcacgtcaatcaagcaaaagcatgatgagctggtgcatgagtatattcaaaggttcagggaaatgaggaataaatgttacagcttgagtttgactgatgcccagctagccgatttggcttttcaagggttgatttctccgatcagggaaaaattctcatctgaagatttcgaaagcttgttacatcttacacagaaggtggctttgcatgaacaaaggttcacggatgctaggaagaactctaggaagattaatcatgtctatccttatatgtatggatcggatgatgaggatgatgattccaaaatagctgcagccgagtgggtcaggaataaaaaggttataccatgccaatgggtgaagggctcaggaaaagaggaaaggtatgactttgacataaccaaggctgataagatatttgatttgctacttcaagaaaaacagattcaatttcctaccggacatacaatcccatcggctgaagagttgggcaagaagaggtattgtaagtggcataattctgggtctcatacgactaatgactgcaaggtcttcaggcagcaaatccaaatggctattgagggaggaaaaatcaagtttgatgattcgaagaaaccaatgaaggtcgatggtaatccttttcctattaatatggtacatacagctgatagggtccgtgcaaagggttttcaagtgaattcggctaagatgatcaacaaatatcagaggaagtatgacaagcagcaggagaagcattatgaagaacacgatgatgggatgaggttaccgtccatcgaaaactgccctgggtgcaatggtatcattgagagctcaagccagtcatataatgggaataatcggctaaggcaggaaagagtgtctgttcatcaaagattgggcctagtgaatcaaggtcgcggtcagaaggatgaggtagttaggacaaatcaatggtgtccttctggtattttcacaaagaaccagaagagaaggaaagcaaagccaagacaggaatggcgtgttaagagctaggttcctgtagccgatgatgttgcagtcgaagaggcaaaaaggttggcaaaagggaagagtgttgtaacagcaccagttaacatggtctttacattgccagccgaattcgggattgatcaagccgatgtagatgagatagaagaggaatcggctaagttggttttgtcaccggagcgagcaatgttcgagaagcctgaggggatagagaatcggcatcttaaaccattgtatataaacggttatgtcaatgggaagccgatgtctaagatgatggtcgatggtggggctgcagtaaacttgatgccttatgctacattcagggaattgggtaggaacgccgaagacctcatcaagacgaacatggtgcttaaagactttggtggtaatccatcagaaaccaaaggggttttgaacgtggaactgacagtcgacagtaaaacgatccctacaacattttttgtcatcgatgggaagggttcttatagcttgttgcttggaagagattggattcatgctaattgttgtattccttcaaccatgcaccaatgtttgattcaatggcaaggcgacaacatagagatcgtgccagccgacagccaattgaagatgaagaacccaagctattattttgagggcgtcgtggagggttcgaacgtctacaccaaggatacagtagatgatctcgatgacaaacaaggtcaaggttttatgtcggccgatgatctggaggaaattgatataggtccagaattcagaaccaagttgatagagctcttaaaagaatttagagattgctttgcttgggaatattatgaaatgccaggactcagccaatcgattgttcaacatcggctacctatcaaacccggggttagactaaatcagcaaccgccgagaagatgcaaagccgatatgctggagcctgttaaggctgagattcaacgcttatatgatgctggttttattcgtccttgccgatatgctgagtggatttctagtatagttcctattatcaagaaaaacgatttgaataaagctaccccaaaggacgaatatccaatgccagtggccgatcaactggttgacgctgcgtcagggcataagattttgagttttatggatggaaatgctggatacaatcaaatttttatggttgaagaagacatttataagaccgcttttaggtgtcccggtgcaatcggattatttgagtgtgttgtaatgacttttggcttgaaaagtgttggagcaacgtattaaagagctatgaattatatatatcatgatttaatcggctggttggttgaggtctatattgatgatgtggttgttaagtctaaagagatagaggaccacatagccgatttgaggaaggtttttgagagaaccaggaaatatggcttgaagatgaatccgacaaaatgtgcttttggtgtgccggctggtcagttcttgggatttcttgttcatgagagggagatcaaaattacccaaagaagtatcagtgcgatcaagaaaattaagcctccgaaggataaaacagaattgcaagagatgatcggcaagattaatttcgttagaaggtttatttctaatttgtctggaagattagagccttttacgccattattacgattaaaggccgatcaacaatttacttggggggtagagcggcaaaaagctttggataatattaaggaatatttgagttctcctccggttttgatttctccacagaaaggagttccctttcggttgtatttgtcagccggtgagaagtcaatcggctcggttttgatccaggagcttgaaggaaaagaaagggttgtgttttatttaagtcgtagactcttggatgcagagactagatattcttctgtggaaaagttatgtctatgcctatatttttcatgtacgaggttaaggcattatctgttgtccaatgaatgcactgtcatatgtaaggccgatatggttaagtacatgttgtcggctccaattttgaaaggaagggttggaaaatggatattttcattaactgaattcgatcttcggtatggatcgccgaaggcagtcaaagggcaagctatagccgatttcatagttgactatcgtgatgattcaatcggctcggttgagattgtgccatggactttactttttgatgggttggtttgtgctcatggttgtggtatcggcttagttataattttgcctcgggaggcatgctttgagtttgcttatactattaaatcttatgcgacgaataatcaagctgagaatgaggcagttcttaaagggttgcaattgctcaaggaggttgaagtcgatgctattgaaattatgggagattctttgttagttatcagtcagttggcaggagaatatgagtgcaagaatgatacgttgatggtttataatgagaagtgccaaggactgatgaaaacgtttcggctagtgactttgaagcatgtgtctcgagagcagaatgttgaggccaatgatttagctcaaggggcatcgggatataagccgatgatcaaagatgttcaggttgaagttgctgccataacggccgatgattggagatatgatgtgcatcaatatttacgaaatccatctcagtcggcttctaggaagttaagatataaggcgttgaagtatgctttattggatgatgagctttattatcgaacgattgatggagtattacttaagtgtttgagcactgatcaggctaaagttgcaatcggcgaagttcatgagggaatttgtggtactcatcaatcggctcataagatgaagtggttacttcggcgtacgggatatttttggccgacaatgttggaagattgtttcagatattacaagggttgtcaagattatcagaaatttagtgcaattcagagagcgccagcgtcggctatgaatcctatcattaaaccgtggccattcagaggatggggaattgatatgatcggcatgattaatccaccatcgagtaaaggacataagtttatattagtggcaactgattatttcaccaaatgggtagaggcgattcctttgaagaaggctaattctggagatgcaatacagtttgtctaagaacatataatctaccgatttggtattcctcagactattacaactgatcaaggttcaatctttgtgtctcatgagtttgttcaatttgccgatagtatgggtatcaaattattgaattcttcaccgtattatgcacaagctaatgggcaagccgaggcatctaacaagagtttgatcaggttgattaaaaggaaaatttctgattatcctcggaagtggcatacccgtttagccgaagcattgtggtcttatcggatggcttatcatggatcaatccaagttcctccttataagcttgtttatggacatgaagctgttttaccatgggaagttcgaatcggctcacgaagaacagagttgcttaatggcaagtatttgaagaaatatcacccaagtgtttgggttaacgca

SEQ ID NO: 84294 - DNA, 2049 bp, Oryza sativa
  Clone ID: PAT_MRT4530_83544C.1
gtcccggatgcgggtggcgaaggcgatcggttgggcggacgtcgccgacgcgctgcgggagcacctgcaactctgctgcatctccctcggcctcctcctgattgccgccgcctgcccgcacatcccggtgctcaactccgtcaggcgtctgcaggatgcgctaatcgccgtagccttcccacttgtcggggtttctgcagcacttgatgctcttgtaaatattgcagacggaaaaataaatatccatgtcctcatggccctggcagcatttgcgtctatattcatgggcaactcattggggggcgctgaagaacactttacaagcaagtcaatgaaagatgtgagggaactgtaagaaaatcatccagactttggactattattagaaacatgtggagaccagtcagcacagtttgcaaatttatgttacaccaaggttcctgtgcatgacctggaagtgggttctcatattttggttagagcgggcgaggctgtgcctgttgatggagaagtttaccaaggttgatggactgttaatagtgaacactggactggtgaaacaaaacccttggacagctgcatccggttggtaatgttcgaggctgacaggtactcgaaatgcatcagcattgggaagttcacctgttcgtggtggtattaaactctcaaaagaggcgtcccgttttcagatggaggacagctcaacaagcccaatttgtgaagatggctagatgtgtttggagaacactatagtagagttgttgtggccctgtctttagttttcgcacttctggctccattactctttaagtggcccttttttggcaactcagtttgtaggggctcaatttaccgtgggctaggacttatggttgctgcatctccatgtgcattggctgtagctccattagcatatgcaactgcgatcagttctcttgcaagcaagggaattttgttgaaaggcggacatgtgctggatgctctttctgcttgtcagtctattgcttttgacaagacaggaacattaacaacagggaagctcatgtgcaaagctatcgaacccattcatgggcattcagatgtgacaaatgattttagtgatcaggcttgttgtactcctaactgtgaaagtgaagctctagctgttgctgcagctatggagaagggaacaactcatcctattggaagggcagttttagatcattctgttgggaaggacctcccactggttgctgtagaaagctttgagtgcttacctggtagaggagttgttgctactttgagcggtgtaaaggctggaaacaatgaagatgaactttctaaggcatcaattggttctgtggaatacatttcttcgctatacagatccagtggtgaatctgagcagataaaagaggctgtaaaagcttctgcatttgggcctgaatttgtccaggctgctctaacagtggataaaaaggtcaccctttttcactttgaggatgaaccccgttctggtccagaggacaagttgaataaagtaaaagcagtttcaagggagggaggtggaggtctaataatggttggtgatggcataaatgatgcaccagctcttgcagctgcaacggtcaagcaaagtgtagctcttgcattgtcttgtattgtttttgcggcacttccttctgttttgggatttcttcctctttggttgacgtaactgcttcacgagggaggaactcttctcgtttgcttgaactcaatacgagcactcaacagtccgacatggtcttgggtagatgatattcggcaactcattaatagcctaagaaagtacatctcgtcaaagttacagagtacttcgtcaaactatgtagttgatgctgttccgttgtagatattatgtacagcaacagttttctgtcagctttgtatgtatggtactgttggaattttgacgaggagttctaagttgtaaccaaatttttgtaggatgtacatgtactcgtatcactatcgtgtaaagaattttttttcaagttctaacctagttgtggtacttagtttatactg

SEQ ID NO: 84295 - DNA, 402 bp, Oryza sativa
  Clone ID: PAT_MRT4530_83545C.1
atggacaagacggtggccatcgtgtcggcgatcgtcgggcccctgggggtgctgagcgccatcctggggttctccgccgagggcacaaagatcattatttcggacgtattgctgatcggcgacgagtgcctgtacccacagaacccgtcgttcgcgctggggatctgcgcggccatcttccttctgatggcgcagatcaccgtgacggccgtcggcggctgctgcggctgctgcaagtcccgcgccatcccgtccgagaccaagcggatcgtcggcatcgtctgcgccgtcgtctcatggtacatgatgcaaccggccgccgatcccacaagccggccaccgtgtcaccgtcgtcgtctcattgtttcaacggttgatacaatgctaactgcacaaccgtga

SEQ ID NO: 84296 - DNA, 4482 bp, Oryza sativa
  Clone ID: PAT_MRT4530_83546C.1
atggctgagaaaccaccactgtctcagaggagaagactcagaggctcgactcgcaagggcacatttgttcagaagtacaaggtgaaggtggttcctgaggatcctgggatcggttcttctaaggagggagaaaagaaacaagttccagacggatcagcccagccgagtgacaaagggagttcctcctgttgcatcatcagctcagccgacggtaccaacatcggctccagcacctgcagcgccgtcatcggcttcagagagcaatcacagcatcctggatcgaatgtgactcagttaacacaagaccaggttgcatctatgtttctacctcctcagaatgctattagttcggctcagcagcagccgaatcagcaaacaccgcccaggcaacaggttgtgcagcctattcaacaaacatccccaatccagcaggtcgtgcaaccagttcagcagacgccaccaaggcgaccggctttacagccgattcagcagacaccattgagacagcaggtcgttcagccgattcagcagcaagcttcaatgaacgtgtcggctgggtttgcaatgcctggtggtcagcctgtgcagtacactacaaatcaggttatcccggaacacctggttcatcatgtacaaccagatggttcagtagtacctcaagttattcttgagcatttggcgcgtggtattcagccgaaccttcacaattaccaggggggcaatttgagttatcaatatcagcctccatcaccgcaagttcagtaccaacaggcaggatcggttcaacctcagttttacaaccagttcgagcccacaccacaacaacctaaaggaacacctcagcaacgaccatgggctgatgtgatagccgatgtaatgagggagcaatttgggcttaaaccaaaagagactggaaatttgtgccgacaaccttatcctgaatggtttgaaagagttcctttacctaaccggttcaaagtaccagatttctcaaagttttcagggcaagacactacatcgacttatgagcacattagccgatttttagctcagtgtggtgaggcatcggctgtagatgctttgagggttaggttcgcggaagctaggaagaactctaggaaaattaatcatgtctgtccttatatgtatgggtcggatgatgaggatgatgattccgaaatagctacaaccgagtgggttaggagcaaaaaggttataccgtgccaatgggtgaagaactcaggaaaagaggagaggtatgactttgacataactaaggctgataagatatttgatttgctacttcgagaaaaacaggttcaacttcctgccggacatacaattccatcggctgaagagttgggtaagaagaggtattgtaagtggcataattctgggtctcatacgactaatgactgcaaggtcttcaggcagcagatccaaacggctattgagggaggaaaaatcaagtttgatgattcgaagaggccaatgaaggtcgatggtaatccttttcctgttaatatggttcatacagctggccaatcagccgatagggcccatgaaaagggttttcacgtgaattcggctaagataatcaacaaatatcagaggaagtatgacaagcagcaggagaagaattatgaagaacatgatgatggtttcgatcctcattggggttgtgagttctttaggttctgctggaatgaagggatgaggttgccgtttatcgaaaactaccctaggtgtagtgatatcattgagagctcaagccggtcatatagtaggagtaatcggctgaaaagagtgtctgttcatcaaagattgggcccaaatcagaaaagaagggttcaaagattgaggaacagggagcgccttcaagaggttgaacaggaaattaaccattggctgaagaaagcaaagccaagacaggaatggcgtgttaagaaacaagttcctgtagctgatgatgttgcagccgatgaggcaaagaggttggcaaaagggaaaagtgttgcaacggcaccaattaacatggtctttacattgctagctgaattcgggattgatcaggccgatgtagacgaggtggaagaggaatcggctaagttggttctgtcaccagagcaagcagtgttcgagaagcctcaggggacagagaatcggcatcttaaaccattgtatataaacgactatgtcaatgggaagccgatgtctaagatgatggtcgatgatagggttgcagtaaacttgatgccttatgctacattcagaaaattgggtaggaacgccgaagacctcatcaagacgaacatggtgcttaaagactttggtggcaatccatcagagaccaaaggggttctgaacgtggagctgacagtcggcagtaaaacaatccctacgacatattttgtcatcgatgggaagggttcttatagcttgttgcttggaagggattggattcatgctaattgttgtattccttcaaccatgcaccaatgcttgattcagtggcaaggcgacaagatagaccaattgaagatggagaacccaagctattattttgagggcgtcgtggagggttcaaacgtctacaccaaggatacagtagatgatctcgatgacaaacaaggtcaaggttttatgtcggctgatgagctggaggaaattgatataggtctaggtgatcggccaaggccgacatttattagtaaggatttatctgcagagttcaggaccaagttaatagagcttttaaaggaatttagagattgctttgcttgggaatattatgaaatgccaggactcagccgatcgattgttgaacatcggctacctatcaaacccggggttagaccacatcagcaaccgccgagaagatgcaaagccgatatgcttgaacctgttaaggctgagattcaatgtttatataatgctgtttttattcgtccttgtcgatatgttgagtggatttctagtatagttcctgttatcaagaaaaacggcaaggttagggtgtgcattgattttagaaatttgaataaagctaccctaaaggatgaatatccaatgccggtggccgatcaactggttgatgctgcgtcagggcacaagattttgagttttatggatggaaatgctggatataatcaaatttttatggctgaagaagacattcataagacggcttttaggtgtcctggtgcaatcggcttgtttgagtgggtcgtaatgactttcggcttgaaaaatgctggagcgacgtatcaaagagctatgaattatatatatcatgatttaatcggctggttggttgaggtctacattgatgatgtggttgttaaatctaaaaagatagaggatcacatagccgatttgagaaaggtttttgagagaaccaggaaatatggcttgaagatgaatccgacaaaatgtgcttttggtgtgtcggctggtcagttcttgggatttcttgttcatgagagggggattgagattacccaaaggagtattgatgcgatcaagaagattaagcctctggaggataaaacagaattgcaggagatgatcggcaagattaatttcgttaaaaggttaaggcattatctgttgtccgatgaatacactgtcatatgtaaggccgatgttgttaaatacatgttgtcggctccaattttgaaaggaagggttggaaaatggatattttccctaactgaattcgatcttcggtatgaatcgccgaaggcaattaaagggcaagctatagccgatttcatagttgattatcgtggtgattcaatcggctcggttgaggttgcaccatggactttattttttgatagatccgtttgtactcatggatgttgtatctgcttagttataattttgcctcggggggcatgctttgagtttgcttacactgttaaaccttctgcgacgaataatcaagctgagtatgaggcagttcttaaagggttgcaatttctcaaggaggttgaagccgatgctattgaaatcatgggggattctttgttagtgatcagtcagttggcaggagaatatgagtgcaagagtgatacgttgatagtttatcatgaaaagtgccaagaactgatgaaggagttttggctagtaactttgaagcatgtgtctcgagagcagaatattgaggccaatgatttagctcaaggggcatcgggatataagccgatgatcaaggatgttcagattgaagttgctaccataacggccaatgattggagatatgatgtgcatcaatatttacaaaatccatctcagtcggcttctaggaagttaagatataaagcgttgaaatatgctttattggatgatgagctttattatcgaatgattgatggagtattgcttaagtgtttgagtgctgatcaggctaaagttgcaataggcgaagttcatgaaggaatttgtggtactcatcaatcggctcataagatgaagtag

SEQ ID NO: 84297 - DNA, 2985 bp, Oryza sativa
  Clone ID: PAT_MRT4530_83547C.1
atgaccaaaataaaagttatagatattgatgagttatacaactttgatgttgatgactttttcagataccagggttattctggagctcggctctcggcggcgagcacggcaacagcctgctccggcggatctggcggcgccgtcgcagaggcgaaggacagcggcgcgccagaggcggagggcccgtcggccaggccggcagcgaggcggtggcggaagccgcggaggcaggccggcgtggatggggtcggtggaggtggcggcgacctggtacgacagcgggagggagtcaatgcgagggggttcaggcaagggagtcaatgcgagggagttcaggcgaggctggcggcgtggctcgcaccgcggcggctcctctcctccggcggcaaggtgctcggcgaggaggagaaggctgccaagaacatgtacatcaagcgcatatgcagtgctgctaagctcacttggaagatcttggtcatgcgacatccgactcgcaagggcacatttgttcagaagtacaaggtgaaggtggttcctgaggatcctgggatcgccgacggtaccaacatcggctccagcacctgcagcgccgtcatcggcttcaggcaacaggttgtgcagcctattcaacaaacatccccaatccagcaggtcgtgcaaccagttcagcagacgccaccaaggcgaccggctttacagccgattcagcagacaccattgagacagcaggtcgttcagccgattcagcagcaagcttcaatgaacgtgtcggctgggtttgcaatgcctggtggtcagcctgtgcagtacactacaaatcaggttatcccggaacacctggttcatcatgtacaaccagatggttcagtagtacctcaagttattcttgagcatttggcgcgtggtattcagccgaaccttcacaattaccaggggggcaatttgagttatcaatatcagcctccatcaccgcaagttcagtaccaacaggcaggatcggttcaacctcagttttacaaccagttcgagcccacaccacaacaacctaaaggaacacctcagcaacgaccatgggctgatgtgatagccgatgtaatgagggagcaatttgggcttaaaccaaaagagactggaaatttgtgccgacaaccttatcctgaatggtttgaaagagttcctttacctaaccggttcaaagtaccagatttctcaaagttttcagggcaagacactacatcgacttatgagcacattagccgatttttagctcagtgtggtgaggcatcggctgtagatgctttgagggagaagaattatgaagaacatgatgatggtttcgatcctcattggggttgtgagttctttaggttctgctggaatgaagggatgaggttgccgtttatcgaaaactaccctagggagcgccttcaagaggttgaacaggaaattaaccattggctgaagaaagcaaagccaagacaggaatggcgtgttaagaaacaagttcctgtagctgatgatgttgcagccgatgaggcaaagaggttggcaaaagggaaaagtgttgcaacggcaccaattaacatggtctttacattgctagctgaattcgggattgatcaggccgatgtagacgaggtggaagaggaatcggctaagttggttctgtcaccagagcaagcagtgttcgagaagcctcaggggacagagaatcggcatcttaaaccattgtatataaacgactatgtcaatgggaagccgatgtctaagatgatggtcgatgatagggttgcagtaaacttgatgccttatgctacattcagaaaattgggtaggaacgccgaagacctcatcaagacgaacatggtgcttaaagactttggtggcaatccatcagagaccaaaggggttctgaacgtggagctgacagtcggcagtaaaacaatccctacgacatattttgtcatcgatgggaagggttcttatagcttgttgcttggaagggattggattcatgctaattgttgtattccttcaaccatgcaccaatgcttgattcagtggcaaggcgacaagatagaccaattgaagatggagaacccaagctattattttgagggcgtcgtggagggttcaaacgtctacaccaaggatacagtagatgatctcgatgacaaacaaggtcaaggttttatgtcggctgatgagctggaggaaattgatataggtctagttcctgttatcaagaaaaacggcaaggttagggtgtgcattgattttagaaatttgaataaagctaccctaaaggatgaatatccaatgccggtggccgatcaactggttgatgctgcgtcagggcacaagattttgagttttatggatggaaatgctggatataatcaaatttttatggctgaagaagacattcataagacggcttttaggtgtcctggtgcaatcggcttgtttgagtgggtcgtaatgactttcggcttgaaaaatgctggagcgacgtatcaaagagctatgaattatatatatcatgatttaatcggctggttggttgaggtctacattgatgatgtggttgttaaatctaaaaagatagaggatcacatagccgatttgagaaaggtttttgagagaaccaggaaatatggcttgaagatgaatccgacaaaatgtgcttttggtgtgtcggctggtcagttcttgggatttcttgttcatgagagggggattgagattacccaaaggagtattgatgcgatcaagaagattaagcctctggaggataaaacagaattgcaggagatgatcggcaagattaatttcgttaaaagcgacgatggaggggcggacgaggacggcaacgcgacggcgaccacgatggcgacctccccgagcgacggcaacgactggagcgacggcggcgcacggctggagcggcggcgacgacggcggcgcgaggtctcacggggctag

SEQ ID NO: 84298 - DNA, 2601 bp, Oryza sativa
  Clone ID: PAT_MRT4530_83548C.1
atggcggcggctcggccgtggtggctcgcgtggatttctagtatagttcctgttatcaagaaaaacggcaaggttagggtatgtattgattttagagatttgagtaaagctaccccaaaggacgaatatccaatgccagtggccgatcaactggttgatgttgcgtcagggcataagattttgagttttatggatggaaatgctggatacaatcaaatttttatggctgaagaagacattcataagacagcttttaggtgtcccggtgcaatcggattgtttgagtgggttgtaatgactttcggcttgaaaagtgctggggcaacgtatcaaagagctatgaattatatataccatgatttaatcggctggttggttgaagtctacattgatgatgtggttgttaagtctaaagagatagaggaccacatagccgatttgaggaaggtttttgagagaaccaggaaatatggcttgaagatgaatctgacaaaatgtgcttttggtgtgtcggctggtcagttcctgagatttcttgttcatgagagggggattgagattacccaaagaagtatcagtgcgatcaagaagattaagcctccggaggataaaacagaattgcaagagatgatcggcaagattaatttcgttagaaggtttatttctaatttgtctggaaggttaaggcattatctgttgtccaatgaatgcactgtcatatgtaaggccgatgttgttaaatacatgttgtcggctccaattttgaaaggaagggttgaaaaattgatattttccttaactgaatttgatcttcggtatgaatcgccgaaggcaatcaaagggcaagctatagccgatttcatagttgattatcgtgatgattcaatcggctcggttgagattgtgccctggactttgttttttgatggatcggtttgtgctcatggttgtggtatcggcttagttataatttcgcctcggggggcatgctttgagtttgcttatactattaaaccttatgcgacgaataatcaagctgagtatgaggcagttcttaaagggttgcaattgctcaaggaggttgaagccgatgctgttgaaatcatgggagatactttgttggtgatcagtcagttggcaggagaatatgagtgcaagaatgatacgttgatggtttataatgagaagtgccaagaactgatgaagaagtttcggctagtgactttaaagcatgtatctcgagagcagaatattgaggccaatgatttagctcaaggggcatcgggatataagccgatgatcaaggatgttcagattgaagttgctgccatgacggtcgatgattggagatatgatgtgcatcactatttacaaaatccatctcaatcggcttctaggaagttaagatataaggcgttgaaatatgctttattggatgatgagctttattatcgaacgattgatggagtattgcttaagtgtttgagtgctgatcagactaaagttgcaatcggcgaagttcatgaaggaatttgtggtactcatcaatcggctcataagatgaagtggttacttcggcatgcggggtatttttggccgacgatgttagaagattgtttcagatattacaaacgttgtcaagattgtcagaaatttggtgcaattcagagagcgccagcgtcggctatgcatcctatcattaaaccatggccgttcagaggatggggaattgatatgatcggcatgattaatccaccatcgagtaaaggacataagtttatattagtggcaaccgattatttcaccaaatgggtagaggcgatccctttgaagaaggctgattccggggatgcaatacagtttgtccaagaacatataatctaccgatttggtattcctcaaactattacgactgatcaaggctccatctttgtgtctgatgagtttgttcagtttgccgatagtatgggtataaagttgttgaattcttcaccgtattatgcacaagctaatgggcaagccgaagcatctaacaaaagtttgatcaagttgattagaaggaaaatttctgattatcctcggcagtggcatactcgtttagccgaagcgttgtggtcttatcggatggcttgtcatggatcaatccaagttcctccttataagcttgtttatggacatgaagctgttttatcatgggaagttcgaatcggctccagaagaatagaattgcaaaatgatttgacggccgaagagcactataatcttatggccgatgaacgggaggacttggttcagtcgcgattacgagcactagcaaaagttactagggataaggaacgtgttgctcggcattataatacaaaagtggtgcctaagaccttttcggaaggtgagcttgtgtggaaattgattttgctggttggaacccgagatagcaaattcggcaagtggtcaccaaattgggaagggccgtttcaagtccacaaggttgtgtctaaaggagcatacatgttgcaaggactcgatggagaagtttttgggcgagcgcttaatggcaagtatttgaagaaatattatccaagtgtttgggttaacgcataa

SEQ ID NO: 84299 - DNA, 837 bp, Oryza sativa
  Clone ID: PAT_MRT4530_83549C.1
atggcgcagaaatacaagcgcacggatatatgggaagatcatgaacggccggaatcccacgacgccggcgttggagatggccggttttgggcaagggagcgccggttttgcgatctacagggtgcagcaactcagttaccgtggttggcggcggcgcaggcggcggcggtgaggctggcgacggcggccatgacagcggtggttccggcgaactccggtgagcgcggcggccatggtgagcatcagtggagcaaggggagcatggtggtggtggcggctcggccttgggcggcctggagcggcggcgcgccgtgcagccggcggcggccgaacagagcggcgatgccgggaggcgacgccggcgacactccggcgtcggattggattgggaaagaaagaggaaagggagaacgaaggagatacggaggcgggaagctggaggtgtcgcggcggcattcgttcgtcgttcgtcctcgtgcgagcgggaattgtccaaagtgccctccaaccgtcattgggatgcaatcctggacgtccacgccaaaacctggatccaacggcgccaggattggtttggccgaacctggtggttcggcgaacctgggctggcccaatccagcccaatttcggctggtggcctcctctattgctctactccacggaattgggctacatgatcatattgttaggatgaatgctaaggcggttgcaacacagtcagtctcagctcaagaaccagcaaagaagaaaacatctactgggcctgctccatccaagaaggccaagactccaggatcaattctcatgctgccaccatgggaatctgacaaactttga

SEQ ID NO: 84300 - DNA, 1800 bp, Oryza sativa
  Clone ID: PAT_MRT4530_8354C.1
atgaaggttgtgaatcggccatctttgtcaaatgctgaatttccaagactagagtcgatcacagatgatgatggagaagagcgcacacaccgccgatgcatgtcgtatggagaggctgcatccacaccagccgattctggatccaagttatcagctgagctgctgaaagattggttcttcagtttttatgatgatttcagattcgaagaaatcaattctgaaagatatgataagtctagagaggtcttctcggttgctatcagcccatgcattcttcctgttggcatccatcaaggaagaaacattcaagtgtcctatgagttctaccatccaatgagctcggctaggcaatttgggatgggacagctgccaatcggcttgtattttgccgacaaaattcagcgcagaggagagatctcgtcgaccttgatgatggatcggctgctcaacatcccaggacctcccttgggcagcattgagaacatagaactggcaaagttcaagagcaaggcctttgatagatggtggggtgaatggaagctacacctgttccatcaatcggcttccatgtacatgacggatctattcccagatgtcatccctcagacaacagaatcctctcctcctcacaaaagcaatagtggcaagggcatagaatatgctccaggccttataccaaacggaggtggaccatctccccctgtcatcggctaccatgcccccaggacctcaagtctactccaagggcagttgagagagccaaccgatacaggcaggaagagaaagaccagggcatcggctgctgatccatcggctatggctccaaagaaaaaggccaagaagaagaaatccatgccaaccaatgatttgcctgccttagatccatctatagaacaagctctagatgaagaagagatcgaggacgacgtcgaccaagcggcagccgaactgagtgacttaggagaaaaaacaccttcagcttcgcccaaacagactcctccaactcctgctgctctagctcacttttcaaggcctcctcctcctcctccttcacctcctgtgcagccgatgccaagtgatcgtactctatcggctgcaggcagccataacatcgaggaagaagaacaaccagctgctcctgccatcctagattactttgatgaagaggcagatgaagaaacaacaagcaaagcttcagcccctctgaccgatgatgtcaaaagaactcttgaagacatatctcatcagctagagtcatcattagacaacttggtggtggactgtggttcaatccgggcaagatttgcagaaattcaagccctagtcccggatgatctggcgaataccatctctccagctatgtacctcgagcaacatcaattcaagctagaaaaagccaagcaaaggatagccgatcggcgagagcgaagagatattgaagccactattcaagccaatcggcaaaccgttcatgaagaaaaagctaagctagatcaactctctgttgggccgattctaaccaatatagatcggcttgaggctcgaaggatagatctcatagctcaactggaggaatgcaatgccgaactggctcttgagcagaagaagctagccgatctcccaaaggctgttgaggagcagaaatcgagactcaaatcggctatcaggaacgtggccgatttgactaagtctctcaaggtcattcctggaaccgatgcccaagacatccaagccatcgaagaagcagatcaaattagacaacgggctgtgtcggctatccagcgttatctgtctatgtaa

SEQ ID NO: 84301 - DNA, 1095 bp, Oryza sativa
  Clone ID: PAT_MRT4530_83550C.1
atggccgacggcgcagggcgtgatcgctccggcctcgggccggggaagaggaaggagagggtgcgcccggagtccacgtcacgcgtcctcgctcgtgccggctcctccgacacgcatgacgacgaacggcgacggcgaacagggcagggcggggcaatggtgagggcgaaaatggggaggattggtttggggaggggctcggattgggattcgagatcagggattggcacggagactgacaacaggcaaagaaacagatttcgtgtcacgaccggaaataacccaacgggcgttccttacgtgcgtgtattattccttgtcctaggatgcaagactgagccacaaactaagccttacccactagacatgtggaagtacggtagtgctttgcaacagaggcccgaagaccggtccttatatggccgagaaaatgatttttatttcgggatgaatttatcaggacgtgacaaaccaccactgtcaccgtcgtcggccagcctgagtaatgttaaggaaaagatccagaagctcggtttgactgacgtccatgaaggaaacgttgtgcccattgatccagagaagttcactcccgaacagaaggaagacttcaatgcaatgatgcaacaagcacaagatcaatttttaagttcattcatgcagactcgcaagggcacatttgttcagaagtacaaggtgaaggtggttcttgaggatcctgggatcggttcttctaaagagggagaaaagaaacaagttccagacggatcagcccagccgagtgacaaaggcgttacagatgggtcgacccaggagaaccagggtgactacttccatggagtacatggagttcaaggtgacggcactcagggaccacaagggggaaatcttaatcagaatgacaatgcattccaagattttttcaataactttcaagatcgagttgactatgttgtgtatagtgctttgattaatcaatctggagtgttgactaataccttgtcaaatataatgaaatcggtagccgatggttcaatagctgaacatcaggctgcaggcccagtttatttgcaagggggtacttttccaaattattga

SEQ ID NO: 84302 - DNA, 1518 bp, Oryza sativa
  Clone ID: PAT_MRT4530_83551C.1
atggcggggagggcggcgacgtggggacgcggagtgggggtgcggatgcggaggaaacgggcagcgtggggaggtgggggcgccggcggttggagctcggctccaaccggctggaggaggaagacggggccgatagccgatgttgttaagtacatgtcggctccaattttgaaaggaagggttggaaaatggatattttctttaactgagtttgatcttcggtatgagtcaccgaaggcgatcaaagggcaagctatagccaatttcatcgttgattatcgtgatgattcaatcggctcggttgagattgtgccatggactttattttttaatggatcagtttgtactcatggttgtggtatcggcttagttataatttcacctcggggggcatgctttgagtttgcttatactattaaatcttatgcgactaataatcaagctgagtatgagacagttcttaaagggttgcaattgctcaaggaggttgaagccgatgctattgaaatcatgggggattctttgttggtaatcagtcaattggcaggagaatatgagtgcaaggatgatacgttgatagtttataatgagaagtgccaagaactgatgaaggaatttcggctagtaactttgaagcatgtatctcgagagcagaatattgaggccaatgatttagctcaagaggcatcgggatataagccgatgatcaaggatgttcagattgaagttgctgccatgacggccgatgattggagatatgatgtgcatcaatatttacagaatccatctcagtcggcttctaggaaattaagatataaagtgttgaagtatgctttattggatgatgagctttattatcgaacgattgatggagtattgcttaagtgtttgagtgttgatcaggctaaagttgcaatcggcgaagttcatgaaagaatttgtggtactcatcaatcggctcataagatgaagtggttacttcggcgtgcggggatgacttgtcatggatcaatccaagttcctccttataagcttgtttatggacatgaagcagttttaccatgggaagttcgaatcggctcaagaagaacagagttgcaaaatgatttgacagccgatgagtactataatcttatggccgatgaacgggaggatttggttcagtcgcgattgcgagcacttgcaaaagttactagcgataaggaacgtgttgctcggcattataataagaaagtggtgcctaagactttttcggaaggtgagtttgtatggaaattgattttgccgattggagctcgggatagcaaattcggcaagtggtcaccaaattgggaagggccattccaaatacataaagttgtgtctaaaggagcatacattggtgtagagggagcagagcgcgacgcctcttgcggtggcggcggcggacatctccttggcgatgatgcaggtgcacctgccgacgttgaaagggagagggcggcagaggagggcgcggttggggagcgtcgcccatga

SEQ ID NO: 84303 - DNA, 922 bp, Oryza sativa
  Clone ID: PAT_MRT4530_83552C.1
gaaaggatcggggggtagttttcttttaattgcaacggtcccaatgcggtttattctccacaccctttgagtttgatgctccacttcttttcccgtcccattcttttttcagggtgcgccactgtttgttttttggatccctttaaggcatttttgcttctcccccacccggcggaaaaaagtttgttcttctaaagccaacccccctaccgtttcgtattggggttttttctgtctcttcttttgttttttttcgtggatttggtttttttttttttttttttttttttttttttttttttttttttttttttttttttttttttttttttttttttttttttttttttttttttttttttttttttttttttttttttttttttttatacccagtggcaagatgtatttcggtctcaactggaggtcttcagcctagaggactcggcctctgaaggaagggcgctggcctcacatagctgaatcccacgaagttgctacctacgcgtggggggctggccactggagagtcgagcacgggcatgctggtccagcactcgtcaaaattggcgatgcaggttttgccagcaacatttggcggaaacttggctgaggacctgtttgggaagcttaagattctgagaagcagctgctgagaatctggagaagctgagaaacccagcttttggcttgttgtgaaccggatcagctcctcgtcgtcgtggaggctcgaccatggtctggtctgtctgtcccgccggagcggaatcgcccagtgcgctccggtcggtggcgctggctggcatgttgcacgccggggaaggcatcgggtgggcagagccgtcatgcattgcgccgtcgtagaatggttagcatgatgtgtcaggccgaacgggacgccgttggatcgccaattcgccat

SEQ ID NO: 84304 - DNA, 154 bp, Oryza sativa
  unsure (1)..(154): unsure at all n locations
  Clone ID: PAT_MRT4530_83553C.1
caccaacccatggcgttttccagggcatcttttccattcttccttttcatcatctttcctaaccgtggacaatcaatccttttccctttccagacatcatcccacacctatcccatccaggggcgtctcttctcaccccacacaggtggntcan

SEQ ID NO: 84305 - DNA, 137 bp, Oryza sativa
  Clone ID: PAT_MRT4530_83554C.1
cgggctgcaggaattcggcacgagggtttgtaggttgagagaatggtggacgaggctgacaagtttgctcagtgagtgacaaagagacaagagatgccattgataccaaaaaccaggcagactctgtgtgtctacca

SEQ ID NO: 84306 - DNA, 1004 bp, Oryza sativa
  Clone ID: PAT_MRT4530_83555C.1
gaccccgcgtccgaacagaacagagctcgcaactcacaagctgatacagagcagagaccatcggagttcagagttcagacacgagaaagccatggccggaggaggagacgagctgaagctgctgggcatgtgggcgagcccgtacgttctgcgagtgaagctcgcgctcagtctcaagggcctcgactacgagtacgtcgaggaggatctcaagaacaagagcgagctcctcctcagctccaacccggtgaacaagaaggtgcccgtcctcatccacaatggcaagccagtctgcgagtcgcagatcatcctgcagtacctcgacgaggcgttccccgatgccggcgccaccctgctccccgccgacccccacgaacgcgccgtcgctcgcttctgggccgcattctgcgacgacacgatcgcgaaggcgtcgcagcaggcgtcgtcgggaaagacggaggaggagaaggcggaaggggagaagaaggtggtggaggcgctggagaagatggaggtcgggctgagcgagtgctccaaggggaagcccttcttcggtggcgacaccgtcggctacgtcgacatcgtgctcggcagcttcctggcgtgggttcgcgccggcgacgcgatgaagggcgtcaagaggttcgacccggccaccaccccgctgctggcggcgtgggccgagcgcttcgtcgagctggacgtcgccaaggccgccatgccggaggtggacaagctgatcgagctcgccatggcgaggatggctggcgccgctgctgctgccaccaactgaagatacaccagttctcttctagttctagttctgtttaaggtgttattttcttcgatgaaaataaatgttgaatgaaggggtgggtcagtgtgtgtgagtatgggagatctttcacaacttaagaagcacatgtatgcccttttgttcttatatttctatcaaaaaatttaccaataaatatctgatagcgttgactctaaaatatttccat

SEQ ID NO: 84307 - DNA, 129 bp, Oryza sativa
  Clone ID: PAT_MRT4530_83556C.1
atggccgagctggccatgagacggaaggatgacgggacgaacaagctcagcacgcaattgccgaagcagctggagtatggctttgttctccttgcggactttctcatactgaagatccttccgaaatag

SEQ ID NO: 84308 - DNA, 907 bp, Oryza sativa
  Clone ID: PAT_MRT4530_83557C.1
atggccggaggaggagacgagctgaagctgctgggcatgtgggcgagcccgtacgttctgcgagtgaagttcgcgctcagtctcaagggcctcagctacgagtacgtcgaggaggatctcatgaacaagagcgacctcctcctcagctccaacccggtgaacaagaaggtgcccgtgctcatccacaacggcaagcccgtctgcgagtcgcaggtcatcctccagtacctcgacgaggcgttccccggcgccggcgccaccctcctccccgccgacccccacgaacgcgccgtcgctcgcttctgggccgccttcaacgacgacacggtacctggtggaggcgtcgcaggcggcgtcgtgggggaagacggaggaggagagggcggagggggagaagaaggtggtggaggcgctggagaagatggaggtcgggctgagggagtgctccaaggggaagcccttcttcggcggcgacaccgtcgggtacctcgacgtcgtgctcggcggcttcctcgcgtgggtgcgcgccaccgacgtgatgcgcggcgtcaagaggttcgacccggccaccaccccgctgctggcggcgtgggccgagcgcttcgtggagctggacgccgccaaggccgtcatgccggacatggacaagatgatcgagttcggcaaggtgctgcaggctcgcgccgccgccgccaccaactgaagtgacagttgacttgtcgtgtcatgccgaagacgaacggatgttgggattgtttccatctgtttcacagtcgagtgtcgtgtacgttacgagttcagatgtgttactacagtagtagtaacttgggttgaaaaaatatctagggaactagtttgtcctaggataaacatgttataaacctgaaatgaatagtgttaattagag

SEQ ID NO: 84309 - DNA, 2325 bp, Oryza sativa
  unsure (1)..(2325): unsure at all n locations
  Clone ID: PAT_MRT4530_83558C.1
gcggccgcgggagnaatatgtaccaaagcggttagtggtacagggcattgctgcctcctgtgttgaacaatatgagattcggcctacctctggttttacattaacaaacatggagagtgacttcaaagtcagaaggatacaactctttctttctttttttccctctgttttcagagaaagagaaagggtgtatttaagcctgctctttgacatctgcatctgaaacattcagggtcactgaaccccgtggtacctttgcatcccaaaaatgtggagaccaatacgcgaacaaggaaaactgcgccatgtttttcacattctctcagttatgagtgaggcagtgagcattgcatgtagagaacacatcacttagttaacagctggttgctattttcctgctgcaacaagtggaccactgtgatcaagcttcagggacacttccttgaatatcttgcggctgagagtgttgtaaactgctctcgagtattgccgggatgcattcctccagtccattccggctgacatcattaactcaaactcctcgtagcttatcttcccatccttgtctatgtcaacatccagaaatatgtcgtcgatcgacttctggtcacctcttggggagagggcttctttcaactcttcgatctctatgtacccgctgccgttcttgtcgaagaagctgaacaccttcggaaggtgctcatcgctacggattttcttcaggtgaatggatactgtcacaaactccttgcaatccagtatgccatttccatctatgtctgcagcttccatgagcatatcgacatctgtgtcatggatgttgtgccctatcacttgcagtccctttctgagctcttctagtgtcaagtgccccttctttttggtgtccaacatattgaacagctccctgattgcatccagctcttcggttggtaagtactccgccaccacaagtaaggccttcttcttgaacttgttcataacagtgaattgcttcagcctggacctgactgcttctcccagaggaatgttgggagctgcacttgcattctgtatccaaggatgctctagaacctgttgagccgtcaaccgagtatatgggtttggatcaagcatcctccttacaagatccttggcattatctgacacctttggccaaggctctctttggaagtcgatatgtgaccggatgatggcctgtgcgatcccttcgtcggtctcggcccagaaaggaggaacaccacatagcaagatgtacagtatgactcctgcactccatatgtctatttcttgtccatagtttctcttcaggacttctggtgccatgtagtagggagatccaacaatctcattgaatcttgcaccaggtttgaagcacactgagaggccgaagtcgatgaccttgagaggggagttctcagatgcattggcatacagaaagttctcaggtttgaggtcccgatgcatgacgccgttcttgtgacagtgctggacgacgtccatgatggtgcgcatgacggcggcggcggcgcgctcggtgtagtggccgcgggcgacgatgcggtcgaagagctcgccgccctcgcagacctccatcacgaggtggacggcgtcggcgtcctcgaacgcctcccggagcctcaccacgttggcgtgcgccggcagcgaccgcatgatggccacctcccgccgcacgtcctccacgtccacgctgctccggagcttccgcttgctgatcgacttgcacgccagccgctcccccgtcaccgcgtcccggcaccgccgcgtcaccccgaactccccccgacccagctcctccccgatctcgtaccgccgcagcatctcctccgccgccatcacgccgccgttgccgctgctgccgctgttgcccagcacggtcgccggctcgttcgacatcacggcgcgcgccgcgtccgacacggaggagaccgtggagaggcaccgcatgttggcggcgccgatcacccgcctgccgccgcgggtgtgcggggcggtggagctgccgcagcgccgccgcttgtcggcgccggacggccgggacacgcagcagttgcccatcctcttcctcttcttcgatcttcttcttcttcttcttcaccgccgacgacgctgccgcgccaccgcaaacgtacggcgacggtcgcgtcgccggaattgttgtggacgtacgaatgatcgaacgaacgaacgaacgagcgcgcgagctccggagggcggccggtgatcgatctctctctctcttgcggccccctccctctctctctctctctagggcaagagaggagaaggagagcggacgcgtgg

SEQ ID NO: 84310 - DNA, 581 bp, Oryza sativa
  Clone ID: PAT_MRT4530_83559C.1
gcacgaggagagaactagtctcgagtttttttttttttttttttagagcaaagctgattttttttgttcttaagtgtagagcgaatttatagttgcatgtttgtgtacaaatttatatcatcaccatttatgttaccaatttttttacatttttatttaactatttaaatcacatgttgacttgcatgcactaggtgcatatatacacacacctaggtgctaaaaatactttctgttacctctgcaattgcaatacagcacgagtggattgccaatagcctaagaaactaaggactgatcttgagcgtgtcaacaaatcttgtgcctcgagaaaaatgtttagagagcccaaccaagaagtcccttgctttcattttcttgtacagtgtcggccgcttctcatctaccagtccagccgccggctcgatcactcgctcgggatccacagcatagaacatggccagcgagatcctctcattctctgcactggtcacaaccctatgcaccgggcttctgaacatcccattgctcattacctccatggattcccctacattgatcaacaaggcgtgagtgctcga

SEQ ID NO: 84311 - DNA, 345 bp, Oryza sativa
  Clone ID: PAT_MRT4530_8355C.1
atggatcatgccgtcatcaccatcgacgccggagttggagtccaccttgaacatccaagcacaccacagccaaaatcttctctgagtataatagtaagttgcaaagaacatttgaacattaggaagagcaaggagaagaaggctggaagtggaagtaaggatacaaataaacggaagtgtcaaaataccatgcccattcacaagaagttcacagataacaacattcatattcacagagctgctcacaggacagataataacacagataacttgctaggacagcagcaacagattcctgtcaacatcttcaatctacagcaacagctcccaaatgccagaaaatga

SEQ ID NO: 84312 - DNA, 374 bp, Oryza sativa
  Clone ID: PAT_MRT4530_83560C.1
aaacgcaacgggccaagaggccaagagaaataaggttctatagccaacgagcgcgctgacaaatgcatgttaattttcaacggctatacaggcaaaaaactactgcattatattcccattgggggggtaaggttacagggtacactctccctgatcaagggctgcaacccgactccttttcaccatggaacactcataaaaaacgaagcccagggggaaacaagggaaggccccaagccgggaagggaaacaaaacagctttgcaggggccacataaggccaactataggactggccaggatcccgcaacgccaactataagaaatgataaagaaaataggccgccaccgaaaatgcaattcccgccacaaaaa

SEQ ID NO: 84313 - DNA, 336 bp, Oryza sativa
  Clone ID: PAT_MRT4530_83561C.1
tggttcttcaacaaatgcaagctgggaacagaatggtagtgctggaaatgattctgataagatggggaggttggaatgacgcaactgctggagctgacacgggagtcacacatccagcacaccaagggaatcactgttgggatttgcctgccacagcttaaaagagttcctactattggtgaggctgggtccctgcaaaggcagatgagtaggagaaaacatgtggagagcccgctcaacatgatgcttggtctgtccagggccctaacaggtcatcacatggaggatccagctggaacaagcagcctagcactcataatgatgacaactcctgga

SEQ ID NO: 84314 - DNA, 2237 bp, Oryza sativa
  Clone ID: PAT_MRT4530_83562C.1
ttttttttttttttttttttatataaccttcacatattgagtaaaactgaaagcatatatcaggtagtggcgcaatactgatacagttctgaaaatatttcgggtaaagtaaactggcacacaaacaccgggatatgccaagcggccgcaatgttttattatctttttttgggtataaaacatttgcgaattggaagcataatttaactgtcgtaaaactcaattccaccgttggattggaccaaatcctcgtacaagacaaaaccggcccacatggaaacgagtaaggcaggtcggagtccataggagagcacgtcccaggcatggtagggggtaacattgaaccaacaacccttcacaacaataatagacgacggcgatgaacaaaactaggacgactctttcttctcttccacctccgcttccttcttctcctcaggctccttctcctctgcagcctcctcgaacgtctctccagggacaagctcagggacatcatcgtcgtcgtcctgagcgttacctgcgctggcaccagcctcagcaccgggtacctgcttctggaactgctcagcaagcctcctgaggttgtccaggttatcaggtcccaactggttgatgattgttggaagcagatcttgcagcttcttcgtctgtggtgttccactcactacccatgtatttgcaccaatggatgcttgcacttttggattctgaaattggataaccacatcatccttgaagatattgacctcttcgataccaggaatgttgttcactcctactcttttcaaggtgctttgaagcctcttgtcatcagtggtggtagtcttgtgaactgccttcttcttcctgcgcatgctgcccttgccaccggtgcgcacggcacccgccatcttcttaagcttgtcgacattcatcttggatgggaggaggaggagggcggcgcgccgcggcggcggcggtggcggcggcggcggcgaggggaatggagagggggaggggaaaggggattaggaaggaggagatagggctcgcgaggccaaccagtgcgacttcccggccggctggcccgttctcaatttgtcatatatttgatccaaaagcatagaattatctcgatttagagccttagtactcatgcaatcttgacctctttcggaaagggcatgtttgttccttttcttgttaggattctcaattccttttccctttctagtctttcgtactgtagattctgttgatctcactcctgcttgggcttgggccttttcagtgtttcctccggcagattcttttgatatcactcctgcttgggcagcagatttgtttttgttctggaaccatcggattcgcagtgcaacatccattgcagtcttcttgggaagaccatatgcaatttccatgcacatgctgacactgtcttggttggccaaccgagaaaagccgtcgagcagcagtttgtcctcgtccgatgaccacaccatggacgcctcgccgccgcactcgtccgcgacgcgggaaagctcggccatctccatcgcgtccgctgctgctctggccggcggcgtgtcagagctagggatctcttggactagttggtgggtggccaccgccgagttgtggatggcggtttgatgattcgtccccagcagcgagtctgcatcgaattggctcagcaggctgcagggtgtttgattcggattcgcgtcgaggtgggcggcgcccagtatccattgatcatcgttacccttgtctagctcaagggcatacgcaaacaactcctccgtctcctccggcctgggcacctcgtcgaacggctcgaggagatcgaacacatcgtcgaacgggtgcaagggagcattggacggcgccaagtgagcggcctcctccatgccgctgctcatcgccggtggaaggcccgatccctcgccggcgccgttgtggtacggtggctgggccgagacgtcgtcgccgatgaactgcggcgccgcctttacgcttcctcccggggttggtggtggtggctgagccgacaagtcgccgatgaactgcgggaatgatggcgcggccgcctcctccggctccgcgtcgtcgccgcccagcgtggttgggtgaagcaagccgagctccccaatgtacggcgccgggaatgccgtcccctccgggtcgcaaaggtttagatcatcttggtaaaagaacggctcatctttgggaagaattagataatcttcgtccat

SEQ ID NO: 84315 - DNA, 1677 bp, Oryza sativa
  Clone ID: PAT_MRT4530_83563C.1
atggcgatccaccacctcgtcgcctctctcctcctcttcttctcgtgctgccacgcggtcgccgccggcgctggcgttcgcggccggctgccaccgacgctggcgacgtggcgccagtacgcggccgccgccgcgccgccgccgcaggtggtgcagtacgagacgcggtacttcacgcagcggctggaccacttcaacgagctgccggcgagcaacggcacgttccggcagaggtacctggtgaacggcacgttctggggcggggcggcggcgccggtgttcgtgtacgccggcaacgagggcgacgtcgcgctgttcgccagcaacaccggtttcatgtgggaggcggcgccgcggttccgcgccatgctcgtgttcgtcgagcacaggtactacggcgagtcgctgccgttcggcggcaccagggcggcggcgttcgcggacgcgtcggcggcggggtacctgaccacggcgcaggcgctcgccgacttcgcggagctcatcctcagcctcaagtccaacctcaccgcctgcaaggcccccgtcgtcatcttcggcggctcatacggcggcatgttggctgcatggatgaggatgaagtacccgcacattgtgatgggcgccgttgcatcctctgcacctattcttggcttaaacggtctatctgatccttactccttctataatgtcgtctccaacgacttcaagggaaagatgttggctgcatggatgaggatgaagtacccgcacattgtgatgggcgccgttgcatcctctgcacctattcttggcttaaacggtctatctgatccttactccttctataatgtcgtctccaacgacttcaagagtgaaagtaaacattgctacgatgtgcttcgaaactcatggagtgagatgtacaaagcgctggccaccgacgcagggcgagctcgactcaaccaaacattcaatatgtgcaaaggtaacgtggacgacatacccggcttggtcgagaaggctctaatctacggctcaatgatggattacccgacaccatccaacttcctcacctccctcccggcgtatcccgtcagagagatttgccgcgcgatcgacaaaccgacgtcggggaacgacacggtgtcgcggatcaaggacgcgatgacgatctactacaacagcaccggcgggcttgcgtgcttccccggcgccggcgccgaggacgacgacccctacggcatgttccccggctggacctggcaggcctgcacggaggtgatcatgacgatgagctacggcatcggcaacgccaccgtcttcccgccggaccccttcaacctcaccgcctacctcgccggctgcctcgccaccaccggcgtccctccccgccctcactggatccagtcctacttcggcggctacgatattcggaatgttttgaagagatctgggagtaacatcatcttcttcaatggactccgcgatccgtggagcgccggcggaatactgaagagcatttccaacagcatcattgcgctggttgagccaaaaggtggacaccacgtagacctgagattctccaccaaggaagaccctgaatggctcaagaaagtccggagacaggagatgagaatcatagctgattggctcaaacaatactacagtgatgaggccatagatagcatgatgaactag

SEQ ID NO: 84316 - DNA, 440 bp, Oryza sativa
  Clone ID: PAT_MRT4530_83564C.1
gcctcgtcacgcccatgtgggcgacgcaggctgtgcgcccccaggcttttatcgagtccaacggcgacacttttgttacgtccttcccttccccctttgttttgttgtggctgtgcgcgcgccgcgcccagcggatgcatgtgcgcccccgccaccgcgccccgtttgggccccgtagattgcctccgcggcagcggaacgcttcaatgcgcgccccctgcgcctgcggatgtgcgctgcctgcgcggctgcgcccccgcttgcctctctgttcatgttcagtccgtcaagccgacgcgccgccggaggcttggaggctgagagcgccgctgaccggcgctagcacgctgcccctggcgtgggcctcggccgccgccgcctggcgccacgctggcctcggccaccgcccgctgaggatgttggaaaaaaagagaggatga

SEQ ID NO: 84317 - DNA, 496 bp, Oryza sativa
  Clone ID: PAT_MRT4530_83565C.1
gcacgaggcttcaagcctccaatttctcctctttgctaagcagcgagccagaagcccagaacagagaagcatgcttgcagtacttgagctgctgctgctgctgctctacggagttgcaggcatccgttgctcaactgtccctgagaacagcacggatatgctctcgttgatccatttcagaaaagccattaacgacccggctggagccctgggtaactgggacacaagatgctcgacgaaacaccccgggcgagtcacagcactcaacctcgccggccaaggcttgtcaggcacaatccccgcctcactcggaaacctgacttttgttcgtatacttgacctgtccaataataacttctccggccagatgcctgatcttagcaatctccagaagatacaagtccttaatctgagctacaattcgtagggtggaattatcccagacacgctcactaattgttccaacctgaaggaattacatctctatcataactcc

SEQ ID NO: 84318 - DNA, 766 bp, Oryza sativa
  Clone ID: PAT_MRT4530_83566C.1
gcggctggggagagagaggagaggagaggagagagaggggaggagaggtagaggaggcgagagctcgatggcgtcgtcgctggggaggctcaaatcctccatctttgacaaggaggagaggaagatgcaataccaatcgcacattcgggggcttaatgcgtatgatcgacacaagaagttcatgaaggattatgttcagttttatggccatgacaagaatgtggataatcgtgcacccatcaagactgataaagatacactgcgagaaggatataggttcatactttctgaggaagacgatgtggattctacttgggagaagaggctgattggattgagatggagaactgaaaaggaggtgatatctggaaaagggcagtttctctgtggcaacaggatttgtgatgagaaaaatggacttggtagttatgaggtgaacttttcttatattgaagcaggggagcagaaacaagcactagtgaaactggtagcttgccagagatgtgcagaaaagcttgcttataagaggcaaaaggagaaggaaagagagaaggaaaaagagatttctcgtgaaaaggaaatggagttaaaagaaagggacaagaggaaaagagaacgtgagggaagtgaagaaactgaagatacatcggaggatgaatcaactgagaaatatagtagaagaaaaaaagatcgcaaacgatcatcaagaaaatcgagcaacaatgatgaaggcttcgaggagttccttgaaggcatgttcccttga

SEQ ID NO: 84319 - DNA, 1455 bp, Oryza sativa
  Clone ID: PAT_MRT4530_83567C.1
atgctggcagcggcggcggcggctctccggccagcgcccaccaccgcggccttctccccctccaccgcgaggtccccgccaccaacgctcctctccttcgctcctccccgctctcaccagcgattccacctctccgccaccgccgagggcgcgggcaccaccgcggcgcaggaaggcgcgtcggcgtcggcgtcggctcccccggtcgacgaagcgcgactagcgcagttcgcggcggattggcaggcggcgcgcgcggagagggaccaggggaagatcctgaaactgcaggtgatacgggccaacagcggcgggttgatcgtcaggttcaactccctccagggcttcgtgcccaaccctctccttagccccgcgcattggtgtaaagaccccaaaaggcccattcaagatgttacaaaggaccttgtgggttcttccatttctgtcaaggtggtcgaagtgaacgaggaagaaaggaagcttgtcttctcagagaaggatgcaagttggttcactcattcttctctagtcaagattggtgctatctatgatggaattgtcggttcagttttccactacggtgcatttgttcatctgcgatttcctgatggaaattatcatcttactggccttgtacatatctctgaggtctcttgggatcttgtccaagatgtccgggattttttaaatgaaggtgatactgtcaaggtcatagtggtgaacattgatatggagaagtcaaggatagctttatcaatcagacaattggaggaagatcctctactggagacattggacaaagttattcctttggaggctgatcaatcacctagtgctgggatcatatcatctgattcatctccttcagaagctgatcttcttccaggacttgatggtatatgtaatgaactattgcaagaggatgggtgccagctaaggacaatcagttcaagcttcttgctcgagctgggcgacaggagtttcattaggcaaggattgatgtttagtcggttttcagtcccaactgaacagaaaacaaaggtccaagaactatatttgacaaccagcctagaccaggagggcataaagaaggcggtacagagagtactaggacgtgttccttgagtttggagaacagcgagtatgaggcagcatgcctgtactccccccaattttctgaccaaccgactatagtgaaacaacagcacgagcagacaacctgaaaagttcgtcgttgtttcctcattctgatgctgagcttcctctcagctggagactacttaaccgaaaattgcaaattttgtcagtaatacaatgagtaggtagttatcttcgtgcatgcatgtacctatctgaaacctcaaggccacctgtatatatatcagtattcatcttcagtgtcatcaattcatcatatcttgttctggtaactaatagctagatatgcctttcttg

SEQ ID NO: 84320 - DNA, 201 bp, Oryza sativa
  Clone ID: PAT_MRT4530_83568C.1
atgtggactgaaggaatgagcctgatacaatgcaagggggttacatggacttccactgttattgtatctaatagggacaagggagaaccatggtgtcaaaccaattttcaaggaatggggcttgtcagggagaaccaggcgtctatcaaggctgatgaagatgacactagagacactgaagaaggcatcactgatgaatag

SEQ ID NO: 84321 - DNA, 2636 bp, Oryza sativa
  Clone ID: PAT_MRT4530_83569C.1
gcacgaggctcgccaccacacccctcctcgccccatggccgcgcactccgtcgccgccgcgcacgccaccatcgccgcgcgcgcgggtgccgccgcgccagcgcccgcgccgccggagcgcctcgggttccgcctcagcgcgctcgccggccgcggcctccgctccccgctcccgcctcgccgcggcgcgccatcggcgtccgcgtcgcgccgccgccacaacaaccgcgtgcgcgcggcggcggtcgagacgctcgaggggcaggcggcgacgggggcgctgctcgagaagtcggtgaacacgatccggttcctcgccatcgacgccgtcgagaaggccaactcggggcaccccggcctgcccatggggtgcgcgcccatggggcacatcctctacgacgaggtcatgcggtacaaccccaagaacccctactggttcaaccgcgaccgcttcatcctctccgccggccacggctgcatgctccagtacgccctgctccacctcgccggctacgacgccgtcttggaggaggacttgaagcaattcaggcaatggggaagcaagactccaggccatcccgagaacttcgagacgcccggagttgaagttaccactggacctcttggtcagggtattgcaaatgcagttgggctggcccttgctgagaagcacctggctgctcgtttcaacaagcccgacagcgagattgttgatcactacacctactgtattttgggagatgggtgccagatggagggtatctccaatgaagcttgctcgttggctggccattggggtcttggcaagctgattgcattctatgatgacaaccacatttccattgacggagacacagagattgcattcactgaggatgtgagtgctcgctttgaggctcttgggtggcatacaatctgggttaagaatggaaacgatggctatgatgagattcgtgccgccattaaggaagcaaaggcggtaactgacaagccaacactaatcaaggtgaccaccacaatcggttttggatcacccaacaaggccaactcatacagcgtccacggaagtgctttgggtaccaaagaggttgaagcaaccagagagaaccttggatggccctatgagccattctttgtgcctgaggatgtgaagagccactggagccgccatgtgcctcaaggtgctgcttttgaggctgactggaatgctaagttcgccgagtatgagaagaagtacccagaagatgcagcgaccttgaagagcattgtctcaggggagttgcctgctggctgggctgacgctcttcctaaatacactccagagagccctgcagatgccaccaggaatctgtcacagcagtgcttaaacgcacttgctaaagttgttcctggtcttcttggaggaagtgctgatcttgcatcctccaacatgacattgcttaagatgttcggtgacttccagaaggatacgcctgaggagcgcaatgtccgatttggagtcagggagcatggaatgggcgccatttgcaacggcattgctctgcacagcccaggactcattccatactgtgctactttctttgttttcactgattacatgagagctgccatgaggatctcagccttgtgtgaagccggagttatctatgttatgacccatgactctattggtcttggagaagatggtccaacccatcagcccattgagcacttggtgagcttccgtgcgatgcccaacattctgatgcttcgtcctgctgatggtaacgagactgctggggcatacaaaatcgcggtcctcaacaggaagaggccatccgtccttgctctctccaggcaaaagcttgctcagctgcctggtacctcgattgagggtgttgagaagggtgggtacatcgtctctgacaactcaactggcaacaagcctgacttcattgtgatgagcactggctctgaactagagattgtcgccaaggctgctgatgagttgaggaaggaggggaagactgtccgtgtcgtgtcatttgtttgctgggagcttttcgatgaacagtcggctgagtacaaggagagtgttctccctgaggctgttactgcaagagtcagccttgaagcagggtctactcttggatggcagaagtacgtcggaagcaaaggcaaggctattggcatcgacaaattcggtgcaagtgctcctgctggaaagatctaccaggagtatggcatcaccgcggagaacgtcatcgcaacagcaaagagcctgtaagattcaaaccgcgcgttttgagtttttgtcatcgttgatgccaaggaacagtatacatgaagccatgaaggtcttgtgcccaaagcttggaataatgaagggagagggatgcctgcattggagcgtgagtggtattttaggcctgtaataagcactgcttttccatttacgtttgttttgttggatcactccttagatgattcatcaagttgagcctgattcaattggggactggttttggtaatatttacatttgactatagtccagctacaatattccgttctccctaaaaaaaaaaaaaaaaaaaaaaaaaaataacctcgagaccctggcatcccggggtcttgctagttctaaaaaaaaaaaaaa

SEQ ID NO: 84322 - DNA, 3261 bp, Oryza sativa
  Clone ID: PAT_MRT4530_8356C.1
tcagacaaggaccacagtgagtgagtgaggcgaaaaaatcataatggctccatgacccatatgttctctgctcctgcaaccaaacgactgcccccagatgcttgtctggtaaccaaacctgggaccctcaccaacgtgctcacatctctccctgccaggtgggcccgacccggcctgggcccagccgccagtcgcagcgagccgttgccgcgatcgccgccgtccacctggctcggcatctgatacaatgccaatcaacggccaagatgggggggtggaggaagcagcttgaggttgggggatcatggccaatgcctgtctctcacacagatcgtcacagaccgtcttcatgttaggcctctcatttacaggaagaatacacctaagagagatcgcaagcagctcgtccatcacccttggagattcttccaagcccgtgatgtctcgatcgaaacaatcagttccccgtccttccctgttgcacatttgaacccagtcggtcagatcaacggccccagattgacccgaaattatgtccccggcactcttccgcgtcaacatctccataacaatcaccccaaacgcgtaaacgtcagctttaaatgatggcattggcttggctgtgtttgccagttctggggctctgtaccccaatgcccctaagttaagtatttgctcagcagtgccacttggagtcatgaaccgatgcaggccataatcgactagcttcggggagagatcaggacccgtcaagaatatattggttggctttaggttgccatgaggcagacccttctcatggtgcaagaactggaggcagcgtgccaggtcgatggcaattttgagccgttgagaaactgacaagcgggagtatcttcttggagttgactcataaagataaagagccaagctgtcgccattgacgtagtcagaaataatgagtctttcttgctccttaggaccccagtagaaagctctccacgaaattatatttggatgcctgatggtcccaatcctctttatctccttagtgaagtcctttttatgctttacgaggccaacacgcagccacttcactgtcaggacatggccgctttgtagtgcagctttgtatgtcgtgccatgactgctccttccaagaacctctgctggtgctcgggacaggtcttcagctgtgaaaaccaaagtgctgtctaggaaaatcaattctccgaccaaccgatcgggtgagtacacttcaaatgccacaggttcctcatggaatctactatcaataaaatgtggtgatgttggtagcacaacccgtggagagggctccatagcagggactgcagcagaggtctcagccatacctgaactcgagggttcagtgacttcttttggatcagcatagccgtactcaacagcagcttcagctaatagctctttctgagcagacattgatctagctgcagctgttaagagatggtcatttgagaaacttgttttagttggtataacattatctttcggaggcttgaaaagatttggtcggcttaacctccccagttttagatctctaatagtaatctgacctctaaatccatttcttccgcaaagctcttgagacctgaccacatagattgccaatgctatgaagatcacaagcaatgcagctccaatgcagccaacaataagagcaactcgaacgccagccttatgtccatgagacgattgactctgagcgactccagtatcatcataatttccagcaggaaggccatctggaaaaactaataggtcatttccaggtctaaagcaggttatggggaatttttcaacacttttaggaacagttccttgtagatcattgtaggacacattgaatatcttcaaactagcctggggcatatcaggaattctgccagtaaagtgattatgtgatagatcaagatactccaatccttgaagtttgcttatctcacttggaatctccccagacaactcattcattgcgagagtaaggaactcaactctttgcaagttagaaatatctggtggcaacggaccggacaaagaattacttgacagatcaacgatcctgagaacaggctgaattagtgcaatcgactctgttgaatgtgtgctctgaaatggaatagtcccagtgaagttgtttccggaaagatttaacacatcccaagcacgcaatatagctagctccccagaaagctggttcccactcagatcaactgagctacacttgccaacagtggatggtaaggaacctgagaacgtatttgaagagagattcagcagcttcaaagtcgtcgagttcacaactggaaccgatcctgagaagccattcctgctgagatcaacctcgacaagccgcatcgagttctgcagcatcgcctccggcatcacaccggaaagcgcattgccggcgaccctgaaaaccgccagagagaaccacgcgtcgatctgcggcaccatcccagcaatcccactgttgctcaaatcaagaacctccaggttcttgaaggcccccaccgtctcgttccggaagaacccgccctgcagcttgttgtggctgaggttgaggtacttgacggtgttcccgatgctggacaagctctcgagctccaaatcgacggcgccggtgaagaggttgtcgctgaggtcaatgtactcggcgttgcggagctcggcgagcagatcgccggcattgccccagaaggagttgctgcggaggtcgatgcggcggaggttctgcagctgccggatcccgtcggtggggaagcccgaggagaagttgttgtgggagaggttgaggtggacgaggccggagaggtcggcgaggcggccggggatggggccgtagaagcggttcccggagaggtcgaggtggcggagcgaggagaggtagccgatgccgggggggaggcggccggagaacgcgttcccggcgagggacaggttctggagcgcgcgcatgccggagagcgtcaccagcttgagctccccggcgaggccgagcccgtcgagcgcgacgccgaccaccgcgccgccgtcgcacacgacccctctccacccagacgggcacccgccgcctcccccgccggcgtcgggcgtcgccggcggcgaccaggatcccagcacggggtccctccccctgtccgaaatccccttcttgaactccagcagcgccgccacgtcgtcgcccgccgcgccgccgcctcccaacaccaccaaaaccaccagcacgaggagcgcggccat

SEQ ID NO: 84323 - DNA, 1188 bp, Oryza sativa
  Clone ID: PAT_MRT4530_83570C.1
ccccgggctgcaggaattcggcacgaggaactaatgttacattggtttgatctgctagatatgtacattactagaaatagttggcacactgatagatgtatcaatacaatataataaatgaagtggtgcagcaattacatcatgtattcatttctagcaattaaggaacacctaggagaaaataggcattgttcttcttgatatgaaggaataaatatgtggtgagcgcttaatgtgggtaatgggagaatatctaagaggacctggacatggtgtcattgaaaaaaataagcatagatctgagctacaggacaacccaggactggggatgtgcaccacctattgataatttttacacttacaagcttattttctttctcttcttttgtcggctcgtcatagttttaagctgggcagacaacaatgggaaggcatgttaacaggcatgaagatcagcctagcagcagagttggacactactcgtatctataaagcagatgggaggatatactactgtgatcaaccaagcatcaagttgttctgtgaggacgccggtgagtccccgctggaatctgagagctcgagcagctatttgacttactaagtctgtatgttcaaactttctatatggttactgaacttagtatttggctgtaaattattctatcattgtattatgcatgtatgattaactcaaagattttagcgatcatgataaactaattattcatcaaattcagttctaccagaaattgaaaattaaagtatattaagagaaaccaaaagcaagagattgattgatcttgaacatagtatttgaacctttagctggaagcataggttcatcagggtctatagttctaactaattatttataaattcctgtgattttgcaaaacaaaaaccagatattacggctcgtatttgtaagctgtaatatagggttaactttatatacgctaaagtttctggttttgagtttaaagggaggtatattttttatcctgaacaacctgctacaacgtgttggcatcgctaattgctaagctcgtaatgtctctctttgccttgcccttgtttagtagatgaggccggtgagtgcctgatgatcccaaccgtaagcacattgtacattatcattcccatgggttgtgcttggaaggggcgaggctggcgcctaaacgcatc

SEQ ID NO: 84324 - DNA, 268 bp, Oryza sativa
  Clone ID: PAT_MRT4530_83571C.1
ccccggacccaaaaatatccttaaacggcaaatagaattagccgcttattactttccaaccccaaaatcactaaaaggttgttatctaaaaaaatttgggaaaaagggggctttaacccttgaaatacccgcactaaccctaaaaattccaggctaagcaggggaggtaccctagcaacagtatgtcaggcttttataagggaagaagcctcatgtaaatgacccaaccttaaaaaaaagctttggaatcccctaaggcctttggaaa

SEQ ID NO: 84325 - DNA, 427 bp, Oryza sativa
  Clone ID: PAT_MRT4530_83572C.1
tgttagccaccgatacttgcaccatacggaaagtgcaacttattattactttgttttttatttaactcaatcaatctagatgtatttatatgcttatatagaccatgcttttatgaatttggaagagttggacgctattattttttttatcactttgcctctcttgctgttgcttccatccgatttgcaatggcatgaaatggcttgtactggaaaattatgatacgtgagtatgtagcaagtgttactaggccgtgtgcctgaaaaaaatgctaagactagacaaattgataaggaaagtccatgtgtatctgtgattctgtgtatgcgatctaaccctcagtatgcgttgaattctgtgcggttcagagaacatgtttttcttttcgattaagtgcatttatatgttagttgcagtattggctca

SEQ ID NO: 84326 - DNA, 1158 bp, Oryza sativa
  Clone ID: PAT_MRT4530_83573C.1
atggaggcggatgcgacgacggcggcgcagggacgacgacgggacgatcgctggtcgtccctcccgttcgacatgctcgtgctcgtcgtcgaccggctcggctggtccaaccacccgagcttcgccctgacgtgccgccactggcgctccgccgtgtcgccgttctacccggcgtggatcaccccgctcctcctcagctccgccgacgtcggcgtcgccaacgccagctactacagcccgtacttccacaggagcttcgaggtcgacggctgcacgctcaacgtgccgcccgaagccaatctctgctgctccaacggacgacgcctcacgctgtgcctgcctaagctggtcctgcaaaccgatctcgtcaccggcgccgtcgacgagctaccggagatgccgttctactggttcaacttcatcgtctacgacgacgccgaccggaggatgtactgcgtcaacacgatcttcgtggtgcggctcgcccgcgcgattcaagacgaggacggcgagtgggggccatgggacctgacggagttcaacgtcgaggaaggagcacagcttcaggcctcgccgatcagcaacccggtgctccatggtggcctgctgtacgttcttggtgaagacgggaagctggcggtgtatgatccgtgcaaccacgatgataatttcaaggttgttgataagcttaagggatttgggattgagcatgatcgcgttgacagctacctgttcgagtctgatcaaggtgagctcatggctgtcctcgtcggctacactggtacgcctgtccatgtcctcaaactcaatgaggagacaatggagtgggagaagatggaatccttggatggacgggcattgttcaccggaacatacacgacaatgatgagaaaaaccaagcttaagtcgatgcagaacaaggttttcctcccgaggttgtatgagtggcctaagaccattcatgttgaccttgttattcgtgatggcgaaccagcatttataccaaagtcacactcgcaatatagcatcgagaagatcacctctaatacgagtatttggtcctataaagttgggcagcaggaagaagcaagaaagttttggggatcggagaaggtagactatagtatatgggtcgattttagtactaatttacaataa

SEQ ID NO: 84327 - DNA, 202 bp, Oryza sativa
  Clone ID: PAT_MRT4530_83574C.1
atccacaggaaggcacgacaagtcgcgcccaatgtaccccatcctgacaacgcgggaggtagatgaccaccaattattataaccgcggacgtgttttgtgttatgtcacccgcggaaatgtgttttgctgaagtgtacgccttggggtttctacgcgacgtcgattgtagtattgcccaatttctgctttttaataatggaa

SEQ ID NO: 84328 - DNA, 602 bp, Oryza sativa
  Clone ID: PAT_MRT4530_83575C.1
atggtttccagcaaggatattatgcatgtactggagtacaccaagtttcaggaagatgtcaatgcgtggcaaggagaatcggttggtaggagaagaccaaaaatggagttgatcctgggcaggcaggagcatggcatcatcaacaccgaatggaacatgacgggccaagagggctctgctgcctgccccatgggagatttgcaaatgggagatagtgtagtcagtacaattgacataagggcattgtattgtaacaaatctcctgggaagtcgtcatcaagctcaatgtatggtgcatcaagctcctcaaaaagaaaagcatgtgaattaaatcatggagatggtggttctgctcatgatgatgttagagactatggtgttgatcatgttgatgataatggagagtattatggtgacgatcatgatgatgttatgcatggctgaagtcatattcttgacattcgttccaactgattagcttgagattcattaagaaagctatttgttttaagccaaatgtttggctaattgtactatactgatccagtagtggaaaactctagaaaactcacagtatttgtttggtccaaaaaaaaaaaaaa

SEQ ID NO: 84329 - DNA, 262 bp, Oryza sativa
  Clone ID: PAT_MRT4530_83576C.1
cccagaaaaaaatcccagatgagagttaatcacacaagagtaaatcgaagaaagcatcacatatagtatccaaataaaacaccaaaaattagatcgagggaagtctccgccgccccatcatattctaagcaccgccgtcgccggcgccaccgtatggacggctggcaaccggcggctcctctcctgatggatccggaggactcccgatagatccgccggcctcggctatagacggcgctggcggagggaaaagaatatcata

SEQ ID NO: 84330 - DNA, 322 bp, Oryza sativa
  Clone ID: PAT_MRT4530_83577C.1
gtgttttttttatttttgggggttattttttttttttttttttttttttttttgaccacacaaatgctccaaattttgaaagtaagtgtgggtagtataggctaaaaaaagagaaagattaaacatgataaaagataagtagaaaaattataaagggggtaaaatttcccataaacggacatttatacccacggggaagaattagtttagcaaagtaattaaaagtttcccggccggaaaggtccatttgttgagcatgttggggcacttcttgggggggaactccgggggggtggggccaccctcctttaacgattccaaa

SEQ ID NO: 84331 - DNA, 391 bp, Oryza sativa
  Clone ID: PAT_MRT4530_83578C.1
gccatacgtgacttaataaacctctactgcaaagtcaacagcgaatacggcatcaacctcctatgggtaatgggactactggtgttgaaccttcaattaaacaatccaacagggcttataatacgttattaactatcaaaaaccacggcactaatatcaccttgggcagcgactacatctaggctcatattgggaagaataacctccgtatcggaaaacctctcaattctcagttcagaaataaacctaacaggatgcaatcaatctaggaatacaccaattaacacctacgacctgaacttgtggcaggacatggcatccagagttccatccaccctcataatcaccgacacaagcataaccttcatcggtattacctgaactcatctca

SEQ ID NO: 84332 - DNA, 348 bp, Oryza sativa
  Clone ID: PAT_MRT4530_83579C.1
atggaggcagctccagagggcatccatgcagaggccatcatccactcatgggatccattgcctaccatcatggggcggctcgtgcgtcccagagacttggtggcgctccggttggatgtggaggcaccgatctggtcctccctgcttggggatgacgctcgtgtattggctactatgatgagatcaatggagctaatggagctgcaatggcgctccagcacaccatccccgcgtcgtgacatgaacgacctcacccggaggattgggccctcgttgggtcacaacgttgtagtggctgagctcgccgcttacaccgaggggaaaacgaagggtgtgcccaaggtgtag

SEQ ID NO: 84333 - DNA, 655 bp, Oryza sativa
  Clone ID: PAT_MRT4530_8357C.1
atggccttggcccttgggcgttgggtgcccaggacggagacggacgaaggtggggaggtctgggtttcggacgcggtcggtggtccctgccctcatgaggaggattgcgcaagcatgaactacatgcgtcaccacggactcatcgagcacaatccaggagtatcaccgttcggagctggccacgcggtgaccacggcctgcccgacgacatcctcagttcctcaccatcgaactcctccgccgactcctttcattcccgatgccatcgcggtgtccgggaggccatcgatgtgcaggacacgatgacacctcccacattcatgctcgcatcgagccaccgccgcgtcctggtggtcgtgtacccaccgtgaagagcttctgctgcctggtgctcatgttgagaagccgccgtctccgcctcgcgtcgtcgtgccgacgagccgccgatgccgttacgcctccctgcgcgctggccgcggggccgccgccgcgcctccctgcgcgtgcacgaggccgtcgcgcctccctgcccgcgcgcgaggaccccgcttctctccgccgcgcgctggccccgcggaagctggcccacggggccgccgcgcctccctgccgcgcgctggcgattcatagtatcaagcaacataattccatccat

SEQ ID NO: 84334 - DNA, 855 bp, Oryza sativa
  Clone ID: PAT_MRT4530_83580C.1
atgggtccgacagcgacgtacccaacgaggacgatgagtactcgtcaccaagtgatcgttgtccaagcccgaaacggtggtaaaaggatgagggtgaacaaggtgataaggactacattccccgtgagaaaggggatgcaatacatggatgctaagaagctaaaagaacctatcggatttctagatccaactaggatatgtcaaacacagcataccgtgcagctatcaccacagttagagcagctgaaggacaagactcccgaagagatagctgaatacaagaagggattgcacaagcagaaactgattaatgtcgcacagtacattggacgagccttcttgcactttcaaaataagagggtcgtcctggccgcttataattttaacgatcattacatcggtttaatcatctacccgaagcactgcaccgtgacagtcttggaccctctcgattactctcatgactcatacaaacaatttctaacaatcttacaatatgcgtacaagtactacaagttcaagggtggagaacagattcgatcaagggagaagctgctagtacatacatattggccgtgtcacaagcaacctagaggcactgtcctcagcgggtattacgcatgcgaattcctaagggttaatgggaggtacagggttaacccagaggatttgccaagggaggagcaacaaacaagctttgacaatacagccattaaaaatatccagcgcgatctctaccacttcatccaccgtgagtgctgtcatgtggaaggaaagttcttcgacaaagagggtgccctagctacaagtgacaaatacaaaaatcttcgggagtgcagcaatgctatgccataa

SEQ ID NO: 84335 - DNA, 1235 bp, Oryza sativa
  Clone ID: PAT_MRT4530_83581C.1
tgctttcccctccctgccccaaatgctcccggccacctccaccgtcccacccacctcgccccttccccactcccgcgctgccccgcgccgccacctccgcgcagggcttctccacgggtccgtggcgacggcggcggtggttcgggcgtgcggggtgacgacgggccaccgtcggaggatgggctcggttcgggcgagccccagggcaggcggatgggaggtggcgatggcggataaggagggggtaggggtggagcggctagtggaggtggcgcagagggcggcagacgccgcaggggaggtgctcaggaagtacttccggcaacgcgtcgagatcatcgacaaggaggatcagagtcctgtaactattgcagatagagaagcggaagaagcaatggtgtcagtcattctgaagagcttcccttcccatgccgtttttggtgaggaaaatggttggagatgcgtggaaaagtctgctgattatgtttgggttttggaccccatagatggaacaaaaagcttcataactggcaagcctctgtttggtacgcttatttcactcttgtacaaggggaagccggttattggcatcattgatcagccaatcttgagagaaagatgggttggggttgatgggatgaaaacaaccttaaatggacaagaaatatctgttcgcccttgcaatgtcctggcacaagcttacttatatacaacaagtccacatttgtttgcaggagaagctgaagatgcatttattcgtgtacgggataaggtcaaagtcccactgtatggttgcgattgctatgcctatgctcttcttgcctctggttttgtagatcttgttgttgaatcaggattgaagccatatgattttctctcattggtaccagtcattgaaggagctggaggttcaataacagattggaaaggaaacaagctccattggcctgtctctgcggaatcacggcctgaaagtttcaatgtggtggcatctggagacgcccgtgtccacaagcaggcccttgatgcgttgcaatggcactagtctgcaaaacacatccaagtttggtctctaaacaaacatgaatgtgttattcatgtgtccaataaacagtgtattttgtatgcttgcgccgtgagcgactagttattcaaattgcactgccactaataaaatcaatttgatggttattcggctgaaaaaaaaaaaaaaaaaaaaaaaaaaaaaaaaaaaa

SEQ ID NO: 84336 - DNA, 441 bp, Oryza sativa
  Clone ID: PAT_MRT4530_83582C.1
ttgtctcaaccaggggtggcagagagggaggtggcgcatgtgtacgtgctgatcaagacacaccagcctgtgctaggtggacaccagcagccgcagcagctggcgcatggtccactcatccactccatgcgagccctcaacgtggccctctccgtcatgaaccaaccacatgcttcttcttcttctgctgctgctgctgctgctgctgggcatcattacccggcgatgacaatgatcagagcagagtctactccggcgaacagacctgctgcagatgcttcatacaaccacggcgatggacggcaagaagatcatcacccgccaaacgaagaaggattaactgtgaggacaagtgattgtgggtttaccacacagatggcccttcatgaagatggctaccaatggaggacatatggacagaagaagatccagggcactcac

SEQ ID NO: 84337 - DNA, 324 bp, Oryza sativa
  Clone ID: PAT_MRT4530_83583C.1
atggcccgccaccaccaccaaccagtctctgcgaaggggcggcgcgagcggcgaggcagaggggcggcggggtcagaggagcggcggagtgggcgaagacctcgagcggtggggacagcggcgacctcactgctagatccgctgcctctccgcctctactccggtgatctccacctccaaatccagtatgcacctcctctctcccacgatagcaaggccatggcggccttcgtcgacgatgactttgagctcgccaccgagctttacacgcaggcaatcgaggctagccccgccaccgccgagttctacgccgaccgcgcctag

SEQ ID NO: 84338 - DNA, 2312 bp, Oryza sativa
  Clone ID: PAT_MRT4530_83584C.1
tttttggaggcttcaaccccgcatccgccgtcgcgtgcgcgccgccggaggccggagcccgccgccgtgggatactagtccagcttggaagcggggagggagaggctccagccagtgtgccgaaacctacccttccattctgacccaccacgccatggcggagcccacgccgccgctgccgtcgaacgccgggctccgcatcctcctcagcaaggaccggccaccggcctcctcttcctccgcgctcgccgccgccacctccgccgccgtctccagccacaccgaccgcgaccgcatcatcggagtgttccgggatgcgctgtctaggactgaatcccctgaagcttttgcccttcaggccgttcaggatgcgattaaacctcagaagcaaacagtgttggttctggaggagaaccaatccttagaaaatgctctacgcaaattgctgcaggaacttgcatcatctgcagttcaatctggtaaaagaataatgcaatatggggataatgaagaaaataattgcccgataacacgtcttcttgatatcgtgctttacctttgtgaaagagggcatgttgagggaggtatggtattccagctgttagaagatctgacagaaatgtcaactatcaaagactgcaaagatgtatttggatatattgagagcaaacaagatgtcttggggaagcaagagcttttcgggcgtggcaagcttgttatgctaaggacttgcaaccaactacttcgaagattatcaaaggcaaatgatgtggtattctgcggacgtattatcatgtttctagcacatttcttcccattatcggaacgttcagctctcaatatcaagggggtttttaacacatcaaatgaaacaaagtacgagaaagacgctacagatgtcaactgttctcgtaaaaggatagaactccctaatgagcattttagtaaccctgctttaactgctgcaaatctgacaagatggcaaaagtttgtgtccaatttaacggttgtgctaagcacatttgaagctcagcctctcagtgacgatgatggaaaacttaacaatcttgaccaagaggaagatgctgctttcaatattaagtacctgacaagtagtaaattgatgggtttggagttgaaggacccaagttttcgacgccacatccttgtccagtgcctcatattcttcgactttctcaaggcacctggaaagactgacaaagaaggtccaactgggagcatgttgaaccgattattatcacttattagcatacttctcacagcgtgtgctactgggcataaagaggaaatcgattcttgtgaagagcgtgttaagaaacttctggagataattccaccaaaagggaaggacttcctacaaagcatcgagcatattcttgagcgggagaaaaattgggtatggtggaaacgagatgggtgtctagcgtttgaaaaacaaccttttgaaaagaaaccaggccaagctggagtcagaaaacgtaagccaaggtggagattgggaaacaaagaacttgcccaactgtggaaatgggctgaacaaaaccctaatgctctgactgattctgaacgtatttgcatgccatcagtaacagaatattggaaaccacttgcagaagatatggatccatctgctggtattgaggatgaatatcaccacaagaataatcgtgtgtattgctggaaagggttacgattttcagccaggcaggatttggaaggtttttctcggttttgtgattacggtattgaaggagttgtacctcaagaactgttgccacctgaagtccgttccaagttttattcgaagcctggtgacaaggctaaacgacctaagagggaagacccaaaaggcacttcagcccaacccaaggaacaacaggttgtttcagccacaccggagaccgacggtggcggtagcggggctgaaccagaagaaggtgctgtgccaatggattctgataatgccgcgatcgatgaaggccggaagcagagcccagaggaggtgtctggacctgaaagcgggcagtgcgaggctgaagccgatggcgaagataacatgaaaaatgaggctagtaaagacggtccatccgcatagaacctctgccggaagattttgtagtatcctgttgccgacgtttctactgagatcgcccatctttagagttactgtgaccccccagattgagacatccaggctccagattgttttaaagaagatagagagacatgtatctagtccactgaacacagaattttaatgaatcatcagtagctacgccaaaaaaaaaaaa

SEQ ID NO: 84339 - DNA, 687 bp, Oryza sativa
  Clone ID: PAT_MRT4530_83585C.1
atggccacggcgccgcgcgcgaggcgcctggccgccgccgacgtgcagccggccacgccggcggtcggcccagcgtccggcgggcggccccagttcaacctctcgtcgggcgcggccaccgccgtggtattcgtctccatcgtcctctgcttcatcctgctctgcacctactgccgctgcgccaggcagcgcgccatcgccggcgcgcgcagccgcgtcatgcgcgagatccgggagcgcgtcccgggcgtcctcctcctccgccccgccgccgccgccgccgcgctgcccgtcctcccctactccgccgccgccgccgccgcgggcgccaagaaggggccgctcgtcgaggactgccccgtctgcctcgaggccttcgccggcgacgacggcgtcaaggtcgtccccgcgtgcggccacgtgttccacgccgcctgcatcgaccagtggctcgccgtgcggaactcctgccccgtctgccgctgcgccgtcgtctgctactacgccgaccgcgcgagggacacggcggtggtggtcgacgacgacgacgacgaccaggaggtcgtcctggagcgcgtggttgcgatgatcgaggcgatacgagaagaacagagggaagaggaggcggcggcgaggcgcgcgccggcgagcgatggcgggggaggcgaggggttgatgacgtcatga

SEQ ID NO: 84340 - DNA, 257 bp, Oryza sativa
  Clone ID: PAT_MRT4530_83586C.1
cgagattgaggatcaccatattagtttatttaatctctcagaacttgtggggcgaactagatgcgcttgcatgtgctctcgctgcatagttgtgtgtgtgcccacgagataccgtcattctcggaccaaaaggattcttttgggttcaccaccatactagtactggagtatatccttcccattattacactattatgatccatccacagtagtatttgggtaaaatcatcaccatatttattaaaaaaaaaaaaaaa

SEQ ID NO: 84341 - DNA, 475 bp, Oryza sativa
  Clone ID: PAT_MRT4530_83587C.1
ctctcctctgcgcccctatccgtttctgtgcatggttccagcctggtccctaggtgaatcctagcttccgattccctctgctactgccgccgcacaggtataatcgaagaccccttcccctgctgctgccgccgccgccgccgccctccaatccctttctgcaaggccttgcatctccggtgcccttgactgctcctgcccctgttgctatttgattccatattgtaatgcagaaatactagattaatattatttataaattagaatgcaacccagtctattgtgtttatcaaatacagctagataagatggccaccaatgatcggttcagtgatttgttatggatgcctcattgtcagcataaagtttccaaaatatgggatagtgtgagttgctagattttttttctacgttattcgtccattgtgtgtaaaacttcaaacagactgtatggtttgactaattgatgaaatgt

SEQ ID NO: 84342 - DNA, 1242 bp, Oryza sativa
  Clone ID: PAT_MRT4530_83588C.1
atggccggcaccgaagagctcctggtccaagaatccaccgtcccgatcgtctccgacggcgacccttcccgccccgccgtccgatcggcccacttcctcctcccccgcgcggccgccggtggccggcccccgcccctgccctcctccccgctctgcagtggcggccccgttcctgaccaccacggcctcctccgggtggtggagttcaagggctgggctggctcccctggcctgtggaggcagtgggtcgacaggctccgcccgcgccacgagcccctgtggcggagtgttggcatcttggatgccattctcgccacggcttaccgggtacgccgcgacgagggcacgctgctccagctcgccgcgttctggtccgcagacaccaacacgttcatgttcccgtggggcgaggccacggtgacgctggaggacatgaccgtgctcgccggcctgccgctctttggcaagcccgtgcgggcgcgcctgccggacgctcttgtcggggacgtggacgcgctcatggccgttcggagcgccctgcaccggagcaagtacaagaagccctcctatcctgggtgggtgcagtactttcttaagcgccaggaggaggaggacgacgagacggccgccagcgccggcgccgacctgatcgagcacggggcgtttctggccatgtggctgtcgctcttcgtcttcgcggcaccgccgttcgacgtggttgggcctcaggtgttccccatcgccgccctgctagcgcggggcatccgcgtggcgctcgcgcccgccgcgctcgccggcatctacggcgacctctccgcgctcaagcgcttcttggacttgcgcgacagggaggaggaggcgctccaggtgacggcgccgatgcacattctccacctctgggtctgggagcgcttccctcagctccgccctgccatggcgaccaccaccatccctgcaaccactgatgcttgccgtgtgccaatggctgctcggtggcacggcgtccacaaggcgctggacccccagtttgttcatggcgtgttcatgtcaccggacaagtttgagtggaggccatacgggagtcgcagcattgctctgccacccaaggaagctaaggctggcacttgggttgtccaggattcaccaaaatggaacaacacatatctctcctacaaagtaaacagaaagcacaagaccatgccagtgcctatgaggcaaacaatttcaactctggacaagtaa

SEQ ID NO: 84343 - DNA, 240 bp, Oryza sativa
  unsure (1)..(240): unsure at all n locations
  Clone ID: PAT_MRT4530_83589C.1
agcagagcagatagatagcgcagccgcagcccagcaagcagcctcgctagctctcgcaaaccttcgccaccaagaacccggaaaccccctcttccagaagcttctggaatcaatctccggtcgagcaacatgcaggagttccaccccntncccgggctggccggccggctgttcggcggcgcggcggcggcggtggctgtggcggtggnggaggaggtgcggtgcccgtggtgcgactag

SEQ ID NO: 84344 - DNA, 198 bp, Oryza sativa
  Clone ID: PAT_MRT4530_8358C.1
atgacggcggcggcggtagaggtggaggcggagggggcagcacgtggcaacggtgatgatgatgatgacggcacgatggaggagacagcgcgaggcgccggaggcagtgcgtggcagcagcggcggcggcaggagagggacgacagcgggagtcccgctagtcgccacctcgtcaccgctttgggcggagatcgttga

SEQ ID NO: 84345 - DNA, 2691 bp, Oryza sativa
  Clone ID: PAT_MRT4530_83590C.1
atggccggcaccgaagagctcctggtccaagaatccaccgtcccgatcgtctccgacggcgacccttcccgccccgccgtccgatcggcccacttcctcctcccccgcgcggccgccggtggccggcccccgcccctgccctcctccccgctctgcagtggcggccccgttcctgaccaccacggcctcctccgggtggtggagttcaagggctgggctggctcccctggcctgtggaggcagtgggtcgacaggctccgcccgcgccacgagcccctgtggcggagtgttggcatcttggatgccattctcgccacggcttaccgggtacgccgcgacgagggcacgctgctccagctcgccgcgttctggtccgcagacaccaacacgttcatgttcccgtggggcgaggccacggtgacgctggaggacatgaccgtgctcgccggcctgccgctctttggcaagcccgtgcgggcgcgcctgccggacgctcttgtcggggacgtggacgcgctcatggccgttcggagcgccctgcaccggagcaagtacaagaagccctcctatcctgggtgggtgcagtactttcttaagcgccaggaggaggaggacgacgagacggccgccagcgccggcgccgacctgatcgagcacggggcgtttctggccatgtggctgtcgctcttcgtcttcgcggcaccgccgttcgacgtggttgggcctcaggtgttccccatcgccgccctgctagcgcggggcatccgcgtggcgctcgcgcccgccgcgctcgccggcatctacggcgacctctccgcgctcaagcgcttcttggacttgcgcgacagggaggaggaggcgctccaggtgacggcgccgatgcacattctccacctctgggtctgggagcgcttccctcagctccgccctgccatggcgaccaccaccatccctgcaaccactgatgcttgccgtgtgccaatggctgctcggtggcacggcgtccacaaggcgctggacccccagtttgttcatggcgtgttcatgtcaccggacaagtttgagtggaggccatacgggagtcgcagcattgctctgccacccaaggaagctaaggctggcacttgggttgtccaggatgatgtgcctgggacgattgctcgcgctaactcaaactggaaggtggcatggagaacatatacgtttggctatcgaaagtttgcattggttgttccacactataagcttggggtgacactggagtatgcgcgatggtgggagccatattcgttggcttgctctactgatgtttctaactatgcaaacacaagagaaccccattccctttttattccaatgaaaagaaacactgaagagctttctggggctaattcttgcaaaaagcagcatgttgacaccagtgtgcctttacctggtaccatggaggatccactggatgagattcctctgattgagaggctaaacaatataattatggtacaatgtgctaggcaagagcaaatcgcagacgttgtgaagtattctgtcccagagttcatcagagggaaggataacagtatgattgtgcaacaagatgctgagcaatacttatctgattcaatgagagtcttggatagttcagctgatgaatcattttgtgggtcagtcaccaaaatggaacaacacatatctctcctacaaagtaaacagaaagcacaagaccatgccagtgcctatgaggcaaacaatttcaactctggacaagtaatgatacatcatggcgttgagagtgcagctagtactggcagtaatgaagccattgaagctgcaacaacagctggcatgctgccaacacctgaagacattctagtgacaagtgatgaagttatgatggaacgcaattgtggttatgagcttgatgctgtcctgctgggtgctgctccccaacagcaatcaactgaagatatgggaacatgcatgtttgcattagagagagataatagagtcaagacagacaaggatgaattagcatctttgaaaggtactgaaaaagaaaatgaagatgattcaacatcaaatcaagcaacagcaggttctcttatagaagattgcatagaaatcagcagaaagaactcaggaaacaatggcatttcttctgatattcttgtaaatgcaagtactgaattggtcaggacaaaagtttctacaaaaacgctgtactatcttactaaaatttggttgctgaaaaatgctcatgaaagagatgcaagtgacatgaatagagatcatggagtttaccagccaaggagggaagttgggacgagggaaatgattgagaaatcgtttgcagctcgagaagcccaaaaggttgagttggaaagagtaatcaaacatctgaaggaacaattgagggataggaacccttcaaaacttgatgtataacttcagtgatggtcgtacttttgaactcctgatattatttgtacagttataataggctgtagcagtcttgctagtgaaaatgggatcataattaaatagcctgtggaaggccagtaatgaagaaactgcagctagcactcagtagtcagtcccagtaatatatttctttcctttctaatttttttagcaagacatgactgaacactatggataatggatccattttaattaccaagttcttgttttgcc

SEQ ID NO: 84346 - DNA, 268 bp, Oryza sativa
  Clone ID: PAT_MRT4530_83591C.1
tgcgtacgcgtggtcccactacgagcgcaaatgctctctctcgccgatagaagcagcagctgcaatggccggcctcgcctgcggatccaccgcctttgccggcaagccgggcctggcgcgcgcgccgtcgtgcccggccgcacggttctccgtgtcgagcatgggggtcgggcaacaacggttgcgccagacagatggcgcagaggctggcggggtcggggaagacgttttctggggagctagcgctgtcctaagtgctgctatcctc

SEQ ID NO: 84347 - DNA, 114 bp, Oryza sativa
  Clone ID: PAT_MRT4530_83592C.1
atggctgtatcaatcagcatcatcagcagtaaccacgcgggagctctcgaagtctctccagaagttgttggaacgatggacggagttgcaagagaatacaacttcattcaatga

SEQ ID NO: 84348 - DNA, 291 bp, Oryza sativa
  Clone ID: PAT_MRT4530_83593C.1
cccacgcgtccgaagaaaggatcagccacacatgggattaactgatcactcactcatctaatgaaagcttagaccatgtagggcatgtgctgatccttcaattgctctgacaagagccagcgcttgaagaaaggtaccagctattgcgttgtactgacggagccagagcaggcagataggggcggctgtcgcgtcgaatagaacggggctgaagtgcacaccaggtggtctgcccgactggagtacggcaggtgaagtacgaacaacctgatactcaccgctggagtacct

SEQ ID NO: 84349 - DNA, 1122 bp, Oryza sativa
  Clone ID: PAT_MRT4530_83594C.1
gcagaggccggccggggaatccccgacccggaggcgctaacaccatcaccatcaccaaatcgatctaaaaatactcgccttcttctccacccgagccgagcagagcagcgaagagggcagcgaagtcgccgacgaggaggaggagaaggagccatggccgccaggagcttccaggcccggtcccccaaggaggagtccgacgccgccgtccatgaggcagtcacgctgggattgaagaacgcagccatatctggtaccgtggttgcggtccccacgttggttggttgccgtgtccttccttgggctaaggctaatctcaactacaccgcacaagcactcatcatatcagcagcatgcatcgctggcttcttcatcactgctgataaggccattctacggaacgcaagacagaacaccattgggaagattgacaggttgaaacaacacaaaacaggttctgatctttgtaacgcaagaacagacgacgtacgtggagataagcagccatttgctcctggaagaatgagagaagcttgcgcgccggtgcctcctggggctcatgaggaggcctgcatagagcaaagtgatgatcgatctgaagatggttccttctcgggttcgtccatcgggtcgtcgtgctcatcggcatcggatctgagtgatgatgggagttcttaccgtcctggtgattatcttgagccgtcatcgtcgtcgtcatcagcatcttcgagcacattgcagctggattctgaagggccgctctgtgacttgtcctcactgatagcccagcttcctatcaggagagggctgtccaactattaccaaggaaaatcccaatcattcacatcgatatctgatgctacatgtgttcaggaccttgcaaagaaaattacctacaataagaggatgaaggcgtgcaaaagctatgcagcaggactagacatgaatcaacgatcaaatcacttgccaaagccatgcaacaagatgatagcgaagaggccctcgaaaggatcatttacctgtctgctgtcaagaccaagcagcaccagcctcctgtgcagcagtgctaaaccacctacacaccagagcaagaaagatgtacaaatgcatattaactcgtaa

SEQ ID NO: 84350 - DNA, 438 bp, Oryza sativa
  Clone ID: PAT_MRT4530_83595C.1
cccgggctgcaggaatcggcacgagggaacattctctcgtcagaaagggaaaaggagataatcgaggagataatcaatggtttggttgcacgtttgatgaaaaggatgtgcaccactcctgaaaatgctggatcagttgactgttcagatgcccaattctccctgcagcacttattccgtaagttaggaaatgaggagtttgttggtcagaggataatccttgcaatttctcaaaagatctcaaatgtatcagaaaaattacttctggcagatccatttgatgatggtttccctgaaatgcatagcaatatgtttattatgatacaattaatcgagttcctaatatctgacagcttcaacaattggctatgccgtgatcattttgacagaaaactttttgaagaatgggtcagatctattctcaaggcacgaaaggac

SEQ ID NO: 84351 - DNA, 873 bp, Oryza sativa
  Clone ID: PAT_MRT4530_83596C.1
acagtgcgaagttttattaagagagcaggaaatattttcaagattacaaccttgtgaggtcggtaccaggaaaacgaaaaaagtataccaccatccgcacaccgataactccaacaaacagacccaggagaaggctagcaccggaccggccgccgctaagcgtgaccgaccgccgctaggccaacaacggtacacagccgagatcgcccaaaacccgacccttacaaccaatacaaaactccctccaacgtggccgacttgtagaagctagggcgccgccacaagaggatatgaatctagagtgagcttgcatcaattgcttgggaggtttcggcaaggggatgcctagacgtcgtatccaaggagagaagcgacgaaagtaccaccgccgccgtccgtcaaggtcccaaagagaaccaagactgggctttcacccagcagccccacttgaggggggtcggcctcgccaagctccgcctctatcggcctctcctcctgctgcgctggccaccgcctccacgccgactagcctcgtcgtgtcgcaccagctcctcgatcgcacctccacacacagcagccgcctccgctgtcatcggccgcgcctcaccggcctccgctgtcgccagccgctcctccgtgcgcgcgctgcctccgccaccgctcctcccaccgactgcccgccatcaccgtcgtcgccgcgagtctcctgggccacgccaccacctccgcgagcagcctccgccagccctcgtctcccgggccatgcttctgtacgcgcaatgtctccgccgtcaccggctggccagcctaccgccgtcgctcctccctccggctacccttcgacctgcaggcagcacgctgtcacggccgtta

SEQ ID NO: 84352 - DNA, 604 bp, Oryza sativa
  Clone ID: PAT_MRT4530_83597C.1
tcacgaccgatcaatcaatcagttcggcttagttagttgccaccttagctaagctagctagtatagctctagcttcttcttgctcgctcgcatgggtctcgaggtgctcatggcgagagaccagctgctgcagcgcccgaggtggcggtacgagcggctgcgcggcgacggcgacggcgacggcgaggaggcggcggcgggggtttgcagggtgaggcggcagctgcggctgaggaggagagtggtggccgccggcgccgccgggaggatggcgcgcggcggcggcggcggcggcggcgggaggaagaaggtgaggctgatgcggctggtgttcctgctcccggcgcggcgggtggccgcgctgttcgccgagctcgtgcgccggctggccgccgcggcggcggcgagcgtcgtcgtcgacgcggcggccgagtgccccaccatcgtcttctcctcccagtggggcctccccgtcctctcccactcggccagcggcggcggcggcggcgccgcctccgccgcccggaacgccaggctgcgcgccttctacctcgagaggagcctctcctccgccggcgccagcgccgccgcctcgccatgctga

SEQ ID NO: 84353 - DNA, 285 bp, Oryza sativa
  Clone ID: PAT_MRT4530_83598C.1
ggtgtgggtgttttaatttattttttttttttttttttttttttttttttttttttttttataaaaaggaacattggagttcattatttattcaccaaacatattcttccaaacaaaaggaaaacactaatttttttatttaccacaccaaatgggtgcacagttagctacaatagcctattttttaaccaaatctcgccagccagtaacaaacaccaccttcgccgttggggatttccactttgcaaaaccccgggaggtttgccgccgcgcccttcaaatccc

SEQ ID NO: 84354 - DNA, 439 bp, Oryza sativa
  Clone ID: PAT_MRT4530_83599C.1
acatatgtctacagacaggatttcccaagtcttgatcatgtacagctgagcgctggttaagtggattgataccagagggcacttcttcgaccgctctggaacatcaacgctcacagattcaggtatagtactgaaggacgagcctaggatagagttggcatcaacaatggaacgactgagttcagcggagagctgctatgaggacagattcttattgtgccacagcactatgtagtggtaaagaaggcacgactagaaggatgtgctaacattgcattgaatacaaactgtatctctatggtgagccacattgcaggaaagagtttcatcttccgtgctatcccaactgatgttgtagcaaatgcttatcgtatctcatgagatgaggctcagaggctcacgcataacagaggagatgagttcggtgcattcactcccc

SEQ ID NO: 84355 - DNA, 505 bp, Oryza sativa
  Clone ID: PAT_MRT4530_8359C.1
tttttttttttttttttttggatgatttccctttttatcctttcctctggtgttgtccacgacaaaagagtaacttgtattttaatagtacctcattgggcaaattaaggactactatagggaatacctaaaagttgctgagacaacaattgtctcagcaggagaagattgatgatcacaataaattacagataattagagtaaatacattactgaaaatgaacactaaaatttaaaatattaatccattcaacaacaatttttcaccttaggtcagaggtggcacccttttgttcctcatctccttatcagcgtcaagccgtcaaccacagacatatattgcagtatttgattacaatatctcctctgtttaaaatcaggaaatgtaaaaaacttgtagctgtacaatgagggtccacatatgtactattaatgagggtgtggtaactttctccgagtccaaacacaggattgttaaactattcctgtttatcttcaccatgat

SEQ ID NO: 84356 - DNA, 442 bp, Oryza sativa
  Clone ID: PAT_MRT4530_835C.1
gagcctcccgcagctgtctcgctcgcggtttttctactccatctagcctccgcggctccgcctcgcgtagctcgccatgggcaagtccagatccggggtgctgctggcgctgctcctggtctgcgccgcggtggcggcggcggcggctgctgccgtaccgggcagcaaggggaagggcggggcgggtcgggcggaggtggcgtgctcggatctggcgacgcggggggagtgcgtggcgagcggcggcgggagcaggtgccggtggtgccgcagcgaggcgctcgatgacatgtgctttggggccgccgaggcgtggaggctgcccaaccaggtggcatgtaaaatcacctgcaaattatggcgtctcactgtcaccaagtgtcccgaggttgaattgttcgtggcaaatggcatcccaatttccagaaaggaccgactatag

SEQ ID NO: 84357 - DNA, 199 bp, Oryza sativa
  Clone ID: PAT_MRT4530_83600C.1
cccactctactctactgtgcctcacctcttgccactactatttctagtagtcgtgtatcatcatttcagatatcatatcgccacctctcgtttttttaataatatcagcggcgagcgagcgagatggactccccgtcgcctatggcggcgcaggcggccgacctgtcgctgacgctggcgccgtcgggagggggtggtg

SEQ ID NO: 84358 - DNA, 737 bp, Oryza sativa
  Clone ID: PAT_MRT4530_83601C.1
atcataaatgtcgacgtttgagatcgcgactagggtatttgcatagtatggggatcgttggtaccagggtatatgcaagattgaagtaaaagagacggaggcaaggatttttatacaggttcgagcccatcatctgataggtaatagtcctacatcctattggccgaagccgatgttgctcctttattcatcagctcgtagtcaacgatagggtagtcttcctcttcgaatacgcagtcggtgggatcagagatagtgctagatccctcttgccagcctccgtaggaaccggatggggtatggctaggctcatctctgatgtcgagatctggcagcatattggcttgtggcttcgtagattgtggtgggtgtctcccctctcctcctagggggcttgtatttatatccatagatgatctcctgacaagctcatgaagagctgcagcaggctgagggctgccgccgttgccagcagagctggcagggagcacgccgccgggggtctcgccgtttggccgccgccgccgccgcattggattcctccatacatgcgaagagggtggcacgggtacgacggtgctcgccggcggcgagaatatcctctctctctctctctctctcctcggcttccaactcgggtcaagcgcgtgtatcccctcctcctctgttcttgacgatgcctctgaactgtgctgctcgactacgtcttcctgctcgtgggtcttttcttcctccat

SEQ ID NO: 84359 - DNA, 402 bp, Oryza sativa
  Clone ID: PAT_MRT4530_83602C.1
gggcgaactgatttcccaatttgaaatgttttttttggggcccaaatgtttgaaacagtttggaataatgctgtctttcgtgtgcaaaatttcaatttactacatattttttgcttggagctaggaagcaaacttttaatcctccttttacatataaaaaaataacaaattgttttggtcctcagggctgatgcctactagcccaaaacaaaccagtccttattttgtttttagggggaaccaggttgttttgagccccccaacttgaacttaaaaaatcaaaacaaccctttttttttatttataggggaataaaaagcttccggtttccaagatctaatcacaactttgtttttggaaaatttgcttgggtttcccaaagcacaaaaaataggcgtaaaa

SEQ ID NO: 84360 - DNA, 229 bp, Oryza sativa
  Clone ID: PAT_MRT4530_83603C.1
cggggggcaccctgtttttaaggactttaactttcggctctcactattccgtcaaggccggttaggttcattccggtttttaaatcttggtcagactcggtcgagttcaaaagcgtttgtagttcaccccagacttttctccacattgacggccaggctgttcatcagggacccttgattgacccgggaattttcttaccggtcccgtgcggtttaccaatttttttta

SEQ ID NO: 84361 - DNA, 528 bp, Oryza sativa
  Clone ID: PAT_MRT4530_83604C.1
atgggtgttttgttgaggaaagataagcaatcagagattttgatacaacgagtctttgaggctgagggttgttctgctcattggcgaaataggagtgaatctttgtctcggacctcattgaaatgggtgaaattcaccgaaattcggatctttcggaccgaatcccagaaccttgctgttgggcgctgggtactagcccgctgccgcctaggattgttgatcttacaatcttcagtaggacgagcacttagtggaacagcaaaaaaggtgctccatgtaagggactttggggggtgctctgatggcattcggtttagagatttgaaaggatttgtgcttgcacagattttagaatcagtaatttgttgttccatgagcaatcatgctatgataaatgtaaaagagacagagtggttctattcctctgtgcgcggcgtggcgccgcgcgtccttctatataccagggtttcaaaaaccgctgggggcccggttaccgccacccggcggtacggcggttaccggcggtaa

SEQ ID NO: 84362 - DNA, 621 bp, Oryza sativa
  Clone ID: PAT_MRT4530_83605C.1
atggtggcgcggaggaggagcacgatcctgcagcgtccggcgataacccgtcccgcgcgatctgttgctagcgcggtggaacagccgttggtagggagaagagggatgcgggagcaggcgtcggcggcggggaggaggaggagtaggagtcggcctggcagggggatctggagtgggctcgacgggaggggattcggcgttggttgcgggtgggtggaggattcagcgtcggtgggttttggagtccgccgcgaggagtcctccctgcgccagcggtggtttgacggaggcggtggcagtggggactggatggagtgggggaatggggtggagggaacgggcgacgaagcgggcacctcccagcgctggcgacgacgacagcgactgcggatgccctccccgcgccagcagaggagattagcaacgtcgtcggttggatcggaagccggagtgcgccacgcagagtccttgcgccagcggcgggggactggacgacgtgggggaatggggcagggagcggcggagacgagcggtgtcaacatttgtggtgtagggggtgcggcggagacgagcgcgtcggtggttggtgatgggggcgaggtaggaggagcgatggagtga

SEQ ID NO: 84363 - DNA, 498 bp, Oryza sativa
  Clone ID: PAT_MRT4530_83606C.1
atgttgacaccgctcgtctccgccgctccctgccccattcccccacgtcgtccagtcccccgccgctggcgcaaggactctgcgtggcgcactccggcttccgatccaaccgacgacgttgctaatctcctctgctggcgcggggagggcatccgcagtcgctgtcgtcgtcgccagcgctgggagggaggactcctcgcggcggactccaaaaccctagacactgtccccaacaccggtcgcgccgttctgtccaccgccgccgtgtcctcctcctccccatcacccaccaccaacgcctactcctccgcccacccaccaccgacgctgaatcctccacccacccgcaaccaacgccgaatcccctcccgtcgagcccactccagatccccctgccaggccgactcctactcctcctcctccccgccgccgacgcctactcctcctcctccctggctgcccccgtcgccgacgcctactccacgtcgccgtcggctc

SEQ ID NO: 84364 - DNA, 337 bp, Oryza sativa
  Clone ID: PAT_MRT4530_83607C.1
tcagagggagctgacgacagtggcgcgaaggtctcaaacattcggccccgcacacgccgtcaccggcgtcggcgggcagatcaccttgggtgtcctggtggtcgacggcgaggacacgagggtcacggtggcgttcatgtcgatgtcgggaggtgggctcacgtcgtcgcgctgcggtgcgtggcgcgggaggcgggagccccgcaggcggccgtcgatggcggaggtgttccttcctctcgctctcggcgttgcacaaatcgacgttcggttggggaatcgtggatctcggcgtctcggcggcgtgatgagtgaaggccgaatggagacccactag

SEQ ID NO: 84365 - DNA, 312 bp, Oryza sativa
  Clone ID: PAT_MRT4530_83608C.1
ggggtaaaatacccccctggattctggatacccatttggtgatcaagagctggataaaagtttacaacagaaatacagaagggatcccctttgatcaaattggagcatttatttggggggaaaaacaaaaaaaaaatttaacaccgtaaccacacccacttcaacggggatttttctaaacgcacataatttttggattactacacaccaaatttataatggtaatgtcacgggtgacattttaccccgccatgggaaaaccagccttcttttaaacggacaccgttttcgggtttgcccccattttttttc

SEQ ID NO: 84366 - DNA, 240 bp, Oryza sativa
  Clone ID: PAT_MRT4530_8360C.1
atggagggcaaagaaaggggtgtgatgctgaatggtttttgtgggatgacggtttatgaggtgggtggcgatgtgaagggcctcaacccaataggaagcgggaaggcatgcttgaaaaagcaaggagcgagtgatgttattgagagaacgaagcatacgctcggccttaccgttctgtgggaagcgacaaaggcacgtgcagaggacgccgaggagtacgcatacgccgggagaggatag

SEQ ID NO: 84367 - DNA, 360 bp, Oryza sativa
  Clone ID: PAT_MRT4530_83610C.1
atggcccccacatgcgtcgggtgcggcctctgttgcgccaccgccactgctcgccagcatgacaatgggacgaagtggtggcggcggaggcgcgccgtcgccgggcgcaagcttcaacaccaacttgcggcgcaagaggagcggagggcggtgtggggtgtggtgtgcggcggtggcatcaagaagcgcgcgctgaggagcatcccggtggaggtgcgcgtgctgccgcgctgcaatcatgggttccacgtccggtgcgtcgacgcctggctggtctcgcacggctcctgcccgacgtgccgcagcgcaacaggagtcgtcggcggcaacggggccgaggtcgcgcctgaagagagatga

SEQ ID NO: 84368 - DNA, 780 bp, Oryza sativa
  Clone ID: PAT_MRT4530_83611C.1
atgtaaatgacaaggactactcggattgtatccatattagtttccctagttctacttggacaaggggacacctatggatataaatacaaggccccctaggaggagaggagacacagacaatcaacacccaccatagacggaacaacatataagccaacatacgccaagacaagacgccggatattgacttcagggataggcacggctagtcccctacggtgtttctggatacttataggagagacattgcactatctctgatctcgccgggcacgaactcgaggaggaagactaccctgttatcgactacgagtcagaactacagaccgccatgtcgacaacagttagataggctaccccaaatattgtactgtcttgcgtataccctagtaccaacgatccccataccatacaaataccagaatcgcgacatcaaacgtcgacacatctcccctctcttcatctctcttcaggcgcgacctcggccccgttgccgccgacgactcctgttgcgctgcggcacgtcgggcaggagccgtgcgagaccagccaggcgtcgacgcaccggacgtggaacccatgattgcagcgcggcagcacgcgcaccttctcgccgtccgcgaacttgatcgccgaggcagatggtacacacgtcggtctctgccgtctagctcctccccgccgtggtacacctccaccgggatgctcctcagcgcgcgcttcttgatgccaccgccgcacaccacaccccacaccgccctccgctcctcttgcgccgct

SEQ ID NO: 84369 - DNA, 408 bp, Oryza sativa
  Clone ID: PAT_MRT4530_83612C.1
ccggacccgggggccaccccggaaattccggcccggcccctggaggccaaccaattttccctaaaggaaggcgaataaaagctgggggaaaacagggaaaaaactgttccctgggaaaaaatgttaccccctaaaaatcccaaaaaaaaaacaacccggaaacaaaaagggaaaacccgggggggccaaaagagggacctaacccaaattaatgggggggccctaactgccccttttcaaagggaaaaacctggggggccagctgaaaaaaaaaaacgcccaacccccgggaaaaggcggtttgctaattggcccccaggggggttttttttttcaccagggaaacgggcaaaagttgttggcccttcaccccctgcccctaaaaaaattgcaaaaagcggccccccc

SEQ ID NO: 84370 - DNA, 147 bp, Oryza sativa
  Clone ID: PAT_MRT4530_83613C.1
atggctgagcaagaggagcatgggagacatggaggcaacatcatcaaggatagccatgtagctccactcaagagtgtagcgcgattcaggttctcagaaactggctaccgaatatctgcttctcagaatctaaagctctccaaatag

SEQ ID NO: 84371 - DNA, 453 bp, Oryza sativa
  Clone ID: PAT_MRT4530_83614C.1
atgtcagctctcccatctctcttctctatcccctccttctggctaggccgggacatgacgttgttccagtcccagatctggggctcggaggccatcggcgaggagtaccccgaccccgaggggtgcgccatgggcaccgggctgtggatgtacgcgtgcccctgcaccaccggcatggacgacccgcggatgaaccccatggtgcccggcgcgccggcgctggggcagatggcgtgcgacagggtcatggtgtgcgccgcggtgggggacttcctcaggtggcgcgcccacgcgtacgccgccgcagtggccgcggcaaagggcgacgcgtcggtggaggtgctggagacggccggggagggccacgtcttccacctgttcgaccccgacggcggcaaggccaaggagttgctcaacaggatggtcgccttcgttaacgccgccggcgcgtga

SEQ ID NO: 84372 - DNA, 458 bp, Oryza sativa
  unsure (1)..(458): unsure at all n locations
  Clone ID: PAT_MRT4530_83615C.1
ggaaaaggaaaagatgatgaattgtgagctgaaatttggtctgaaagaggaaaccaagtgtgtgaacaaatgtcgacacgtggtggtcaatttgcagccgtattaggtggtatcaatacgatttttaatcaattcgaatacaggacggttacctatcttaaaaaaatttaaaaaaagaacagggaaataattagtgtacgcaacttggacctaccaataatgccaggcgaactaatccaatccggttcaactactaatggatggctccaagtagcgtcaatgattgagctgtcagggcaattcacaaccaatggaggaaaaaaaaagaggagataataaaaagaaagatgccactagctcaagctgataataatgctctccacagataataataaattttatacaaaagggaattnaaattaaatagagatttgtgggaggacaacacaacaacccca

SEQ ID NO: 84373 - DNA, 747 bp, Oryza sativa
  Clone ID: PAT_MRT4530_83616C.1
ccggccgggacgcgacgtcgccacccaccatactagtccatctcgatccgtccgttcgtgcgtgcgtgcgtccatggcggcctacaagaagggcatcatgatcaacaaggcgtcggtggttgccgctttttcagcggcgtggctcctcctccttgtcctcgtcgtcctcctggccgacgaggccgcggcggcgccggctggccgtgaggccgcggcggcgtggatgaggaggctggacgacacggtggagccggagccgctgccggcggagctggacagggtgcagaggcgcgtcttgcaggcgaccagccactacgtagctccgagcgcgctgaatccggatcgccagggttgcatccagtcctgccttccgggcagtcagtacagtgttccaccgcccggatcgcactgtaatcgtaaatactacaaccagggctgttgactactgcaactactggtgattctgatcactgcaaattgaattctatccttgtgcatggatcccgtactgcttatacttaataaaacctcaaagcgacgatgtgtatatatcactttttcaacggacgtcgaacctctgtaatttgaacatctcgggcggccgatcgatttgctattcgtcgacgatcccttctattatcccaagtttgtgcttaaacagtttgtgcccgtcatcagcaacgacttagtttccctttctttatttcgacgagattcatctacttaactagtagggagccccgcgct

SEQ ID NO: 84374 - DNA, 282 bp, Oryza sativa
  Clone ID: PAT_MRT4530_83617C.1
ggtgcaacccccaagggctatgctcagggcacatttgtcacctaccctccgagagtggccccctatgggttgttgttggctggcaccacctgccgcctgcttctacaacccgtgaaacaccaacaaacaaaggtaaccttctacctagataccggtgccggtgacaatggcaacgacgcgctgtccggctcaagtgctagcaacaagcggtccaaatctgaggtatgggccaactttgaagaactctttaaatcacgcaatggcaatcagattcgccgctaa

SEQ ID NO: 84375 - DNA, 777 bp, Oryza sativa
  unsure (1)..(777): unsure at all n locations
  Clone ID: PAT_MRT4530_83618C.1
ctctctttctctctcttcttcttctctcaaaggttgaggagagagagagagagagatccattgcttccaatggatgtcttcctttcctgagctgctgtctcccgttctctttctgagagcaacttctgatcagattcagattgccaacactgcaaccttctgaagctcagcaagggggttggacaaggattaatctgtgaggctcactctgattgaagccatggggtctggggactggttcaagacgatcatcagcaagaagaagtctaaacgtggcaagtcaaaacacgcaaaggttgccggtcaggtacccaatgggccaaactcaacaaatcaaaagtctaataatggtccttcctctagtagtgaccctgaagacaatgcagcactagaggaatgggcagctactcgaattcaaaatgcctttagatgctacaaggcaaagaaaactctcagatgtctcaagggggttaaaagattgcacattattgggcagaccaatccagttaacaagcagacagctgccacattgaactacatacagtcttggaacaagttgcaggcagagataagaaaccggcgtgccttcatggtcactgaagggcgcaataggaagaagaagcaagaaaatcaaatgaaacttgaagcaaaactccaaaatttgcaggntcgagtggaatggaggctcggatactatggaggaaatacttgggaggatccaacnagggaagaagccgcagtaaagcgtgacgagctatgcatatgcattcatcatca

SEQ ID NO: 84376 - DNA, 1483 bp, Oryza sativa
  Clone ID: PAT_MRT4530_83619C.1
atggggtctggggactggttcaagacgatcatcagcaagaagaagtctaaacgtggcaagtcaaaacacgcaaagttggtgcctctgacatgtgggcccggagcaggtgggacccacatgtcagtgacacatgcagtaccgcagatgatttgtatccgtgatgtggacagtcaaccagtcacttttgaacatggactggttgccggtcaggtacccaatgggccaaactcaacaaatcaaaagtctaataatggtccttcctctagtagtgaccctgaagacacaggagcactagaggaatgggcagctactcgaattcaaaatgcctttagatgctacaaggcaaagaaaactctcagatgtctcaagggggttaaaagattgcacattattgggcagaccaatccagttaacaagcagacagctgccacattgaactacatacagtcttggaacaagttgcaggcagagataagaaaccggcgtgccttcatggtcactgaagggcgcaataggaagaagaagcaagaaaatcaaatgaaacttgaagcaaaactccaaaatttgcaggtcgagtggaatggaggctcggatactatggaggaaatacttgggaggatccaacaaagggaagaagccgcagtaaagcgtgaacgagctatggcatatgcattcaatcatcagtggagagcaaggtctgccacaagtcttggaaacttcaactatgaagttggcaagggtggctggggttggagctggatggaccgatggatagcggcacggccatgggagccccgatcactggtccaccccgaaaacctgaagaaaggacaggcaaagaaggaaaatgccagcacaaacccatcagctctgaagctgcaaggctcaatcagtctaagcaacaacatcaatgatcgaaaagcccctaagaagaagtcatcaccatctccccctgatcagaagaaaccggtagcagcatctcctcctgatcagaagaaaccggtagcactgtctcctcctgatcataagaaaaccgtaacaccatctcctcctgatcaaaagaaaccggtagcaagggtgcagaaggcaaaggcagctggtcctccaaaggcaaagcccaaggacatgaaagggggccaacagaagaagcaacaacaactagaggttccttcgctcagtgtgtaaaattcgccgcgaaatggttaccgctcattgtatgatacatcttgtgaagttcacttttgttttttctccccactctttgtttctctcttctttttgttttttacagtgacatggaacaaacaagtgaccaatgtagaatgtatttggttgagaggttgcacacatctgatgagagtggctttgattaggactaggattcattgttgtgctgttgtaatatgacttgtgatgtgcctgcctatatgtttgaattgaagggaagggttttgttggaacaacagttaaaaaaaaaaaaaaa

SEQ ID NO: 84377 - DNA, 3210 bp, Oryza sativa
  Clone ID: PAT_MRT4530_8361C.1
gctcatcctcaccttcgtctccatgacgccgcgatgagcaggtcgctcacgcgctggcactgcatcagcgcctccaccccgccgtcctcccgcatgtcgcacgcgccgccgccgccgcagcgccgccgcccgctccccagctgattacccaaccaagaacgagatcgtcaggtgcaatagttccggtgacctctatcctctcccggcgtatgcgtactcctcggcgtcctctgcacgtgcctttgtcgctacctccaccaacaccgacctatggcatcgtcgccttggacatcttggtcatgaggctcttactcgcttggcgcaggcgtctgtcattccaccaccaaaagtcaccacctcgctttgtcatgcatgtcagttaggtcatcatgtgcgtcttcccttccccactagctctagtcgggccaaggcaaattttgatttagtacattgtgatctgtggacatcaccaatacctagtgtgtctggatttaaatactatctcgtcattcttgatgattgctagcattatgtgtggaccttcccactccgttttaaatccgatacattttctacactatctcacttctttgcttttgtgaagacccaattttccacgactattcgcagcattcagtgtgacaatgatagagagtttgacaactcctccgctcgctctttatttctcaccaacggcgtctccctctggatgtcctgcccacataccttcccacagaacggtaaggccgagcgtatgcttcgttctctcaataacatcactcgctccttgctttttcaagcatgccttcccgcttcctattgggttgaggcccttcacatcgccacccacctcataaaccgtcatcccacaaaaaccattcagcatcacacccctttctttgccctccatggtgcacacccctcctagtcccacttacgagtgtttggttgcaagtgttaccctaacctatccaccaccgctccccacaaattagccccacgatccaccccgtgtgtgttcctaggctatccccccaccataaagggtaccggtgtttagatcttgccaccaacagggtgatcacctcacggcatgtggtgtttgatgagtcagtttttccttttgctgagatgactaacaatgaagtggctactgatctggagttcctttaggatttctcagcttcacttccgacgccgattggacgacgcccctgccctgaccacatcggtccggcggcccgcttctccacgacggccccgcacaccgaccccaacaggccggcctctccgacgcgcaccggccccagcaggtcagcctctccgactgggcttgcctcgcccagtcccccagctgggcctccttcacctttggctaggttgcccagcccctcctggtcggctggcgcgccgaccgggcctccgccgactgcaccatcaccagctcagccgcccctcgctcggttggtcggcgcaccaaccaggccaccagcacctcttcggcccccgccgaccggcgcccccacacgcccccagagtgcgcgtgtgcctggcgtccgcataccgacacagctcggtctctcacccgtcgtcaacgagcactctatgatgacccgcggcaagaccggtcttcgtcagcccgtccaccgcctcaatctcagtgtggctaccctctctcctgtgccgcgcacgtatcgtgccgcacttgccgaccccaactggaggtccgccatggaagaggaattctccgcacttcaggccaaccacacctgggatctggtgccccgtccacatggcgccaacgtcgtcaccggcaagtggatctttcgtcacaagtttcaggcagatggtagcctggacaggtacaaggcccgttgggttcttcgcggcttcacccagcgtcccggcattgactacgacgagaccttcagtccagtcgtcaagcccgccactgtccgcacggtccttagcctggcagtctcgcgtgattggccggttcaccagctagatgtcaagaacgccttcctccatggcactcttcaggagacagtttactgcacacaaccggctggctttgttgactccaccagacctggcatggtttgccgcctcaacaaattcctctacggcctcaagcaggccccccgagcgtggtacagccggtttgccagtttcctcctatcacttggttttgttgaggctaagtcagatacttctctgttcatctaccgccacggtgctgatatggtctacctgctactctatgtggatgacattgtgctcatagcttcctctgatgctctccatcagtggacgatccggtcgctacagttggagttctccatgaaggaccttggcagccttcatcacttcttgggcatttctttcacacgccagtcttctggtctctacctcagtcagcggcagtactgccttgagatcttggaccgtgccggcatgtctgactgcaagccgtgtgctacccctgtggataccaatgccaagttgtcagctgttgatggtgctcctgttgctgcccctaccgactaccgtagtcttgccggcactctgcagtatctgaccttcacctggcctaacatttcttatgccatacagcaggtgtgccttcacatgcatgacccgcgggagccgcatcttgccgctctaaagcgcatcttgcgctatctccgcggcactcctgacctcggtctccacattcggcgttccactccggtcgatctcaccgcctactctgacgctgactgggcaggttgtcccgacaccagaaaatccacctcgggttacgctgttttccttggtgacaaccttgtctcatggtcctcgaagcgccagcacaccgtgtcctgctccagtgctgaggcggaataccgggcggtggccaacgctgtggctgagactacctggcttcaacagcttcttcatgagctccatacccctccgagtcattctacactggtctactgcgacaatgtgagtgttgtttatctctctactaacccggtgcagcatcagcgcactaaacatgtggagattgatctacactttgttcgtgactgtgtcgccgtgggttcggttcgtgtgttacatgttcccacgacatcctagttcggcgacatcttcaccaaaggtcttcccagcacgatcttctcggagttccggtccagtctgaatgtctgctccgtcgacgtt

SEQ ID NO: 84378 - DNA, 243 bp, Oryza sativa
  Clone ID: PAT_MRT4530_83620C.1
atgaggataccggagagcgcgaggctgtccgtcggcggcgtctccccggacatgggcgacacggagctccgcgaccacttcggccgctacggggatgtcgccgacatctggctgcgccgcgatcgcctcaccggccttccccgccggttcgccttcgccggttcatgcaccccgccaacgccgccctcgccctcgccgaccataaccacgtcgtcaacggccagaaggagtttcacagtttaa

SEQ ID NO: 84379 - DNA, 341 bp, Oryza sativa
  Clone ID: PAT_MRT4530_83621C.1
taccctctacccttcgacatacgtcacatatcgatatggtatacttgcgcgcatacggacgtttttggcatacgttaagggaattcatcatggagttcacagatggaaggagtcctactcggacagaactgggtcgtcattgtattgtgccgggtctgatgtctccgagtcctacttggagaccagccgacttgcgatataaaagagacccccgggaggacctaaggcatcgaatcttaccgccaacacatccaccacagcctacgaagccggagcctacaggagccaagtcgccgggtgatctagtcgaatcaactcgactacgatctcgtcggtatcat

SEQ ID NO: 84380 - DNA, 989 bp, Oryza sativa
  unsure (1)..(989): unsure at all n locations
  Clone ID: PAT_MRT4530_83622C.1
gaaaagaaataaaggagacgaagaaggcgtgtttgaagcagtgattcgattcgagtagaacatgagacgggtggcggattatgcatatgttgggagtaagtaattgatgatgtgtaaaatattaaagagagagatactaacagtgcgtagtgtagaaattacgcgtgacccacctggagtcggagtcggagtcttgttccctttttattgagaggatcccctccctcgtgtcgacacgatcgtccaaaatagggaagagggagggggttcttcttctcctcgatccggttgaggactttgaggtagagagaggcagaggcgacgaggaaggatctgatctatcgatggcgcgcgtttcgcattccagaaagcggactagggctccctccaactccaactccaagcccacttcacaaacccaaccgccgccgccggagctcaccgaccgccctgtccgcgtctacgccgacggcatcttcgatctcttccacttcggccatgcccgcgccctcgagcaggccaagttgctgttccccaacacgtacctgctagtgggctgctgcaacgacgagctcaccaaccgctacaagggcaagaccgtcatgacccaggatgagcgatacgagtcccttcgccactgcaaatgggttgatgaggtcattcctgatgctccatgggtcctcacgcaagagttcattgacaaacatcagattgactatgttgctcatgatgcactgccgtaagtttcagcagcacaccaactattatcgaattcccattttttgtccctttaatactctctttcagcttaactgaggagttcctttttttttgccacagttatgccgatactagtggagctgctaatgatgtctatgaatttgttaaaaagattggcanattcaaggaaacgaaacgggacagacggtgtatccacatcagaccctcatatgaggatatttgagggactacatcagtatgtcatgagg

SEQ ID NO: 84381 - DNA, 408 bp, Oryza sativa
  Clone ID: PAT_MRT4530_83623C.1
tttttggtttttttttttttttttgttttttttttttttttttttttttttttttaagcaaaaaaaaaagagggggccctttatttctttcttctagcaggggacatgcccccatttggttcttggctcaaacagaatgcctccattcatgtcacggggggcatttgggtttttgacaaggggggttttgaaacccaagctgggtttaaaggggggcccctggttaaaaagcttgaaaacaaaacagggggcgaacacaaaatgggatctgaaaaccttcatgggggaaaaggggtcaaacattgcttgatgggctgggggccaaccgaacttggggagaaacaaaacaggtttatgagcctgaggccccggggttccctttttttccgctacaaaaataaaaggggg

SEQ ID NO: 84382 - DNA, 411 bp, Oryza sativa
  Clone ID: PAT_MRT4530_83624C.1
atggagatcggcgcaggcggcgggcgggcgggagggcgagagggcgaggcgagctcgggaggagacgggagcgggggaaggcagagggggcgcgggggcgggggggaggaggtcgacttgggcgccgaggggtcaccggcgagagaacacgcggcggaagcagcaggacacgccggctacgcgggtcgccgtggtggggatcgccgcggcggcgccgcgcaggcggcggggagggtggagacggggggtggtgtcgagggagagggaggaggccaaggggacgcggagatcgaacgatcgattcttcccctttgtgacagctggtgggccgggccggaaagtttaaactgggccggaaacatccgatgccagacccaaccgaacagtactcagttcaggggtcgttgttag

SEQ ID NO: 84383 - DNA, 415 bp, Oryza sativa
  Clone ID: PAT_MRT4530_83625C.1
tttgatctacacatagtaaatcatgcgggccagggggacatgggcacagaggacgcttgcggccccagagaaggctaggagcagacgtgaataacaagcgggccaaacggtgaacaacaccccgcggcaggagatcgagacgcactacgacctgacgacagaagagcaccagactaacgaccaggcggggcaagaggaagccagcctgccctggaagcggctgcacaacaaggtgaccgggtccaccacccacctgatgcgaacgagacagcgcgggccggcgcggagcataaaacagaggctgcggacagaggagcgggagcgcaacatggactttgttaccaaaacctcaggactagactggaaggaaaccccaagggacgaggagaccatggagatgctaacagcgctgggc

SEQ ID NO: 84384 - DNA, 824 bp, Oryza sativa
  Clone ID: PAT_MRT4530_83626C.1
gcatggcggccggccaattcttggacctcgccgggcgcccaccgccctcggcgaggccgaggtcatgaaggttctgacgaagaagttcggcgagatggcggagtgctccgccgcctgcggcgccatgctgggaggcgcggggcccgacgaggaggccgcgctgcggcgctacggccgcaccatcggcgtcctgtaccagctcgtcgacgacatccggagcgcgtcgggcaacggcaagatgaggagcaatgccagcgtcctgcgcgcgctgggcatggatcgagcgctcggcatcgtagaggagctcaaagcgcaggccaagatggaggccgacaggttcggtgacaagtatggcgaaagggtgcttcccttgtacagcttcgtggactatgcggtggagaggggattcgagctgcaggatgcagctacaacgccgtacgacgcagcacacatcacaccggactgggatcctctaggtcaggtgactttagagtcactccacaccactggtcagataatcccacatctctccacaatccctgaattacttgcacccggacccaacatggatgcagccatggctgccccctctattctagcacgcgatggaaggcgcaaccatttaaacagaaaccagccggtggccggtgcttcatgcgcaccaccagagccggcgccgatctacatctccaccagagtatcagatacaaaaaccagagtatcagactcgacgaacgacgcagcaggccattggcctcgcagcttcacggcaagggtcgttggttgcctgggctagaaaaacctgcagcccggggatccactag

SEQ ID NO: 84385 - DNA, 180 bp, Oryza sativa
  unsure (1)..(180): unsure at all n locations
  Clone ID: PAT_MRT4530_83627C.1
cnctattttgttgacgctagtcgtcgcgtccaccgcggtgaagatcattctcttgttcgctctccttgctgttgctgcgtgccgtgcctctgcgcggctcgctcctccttctccccgttctnggccntgtcgtctccggtcgcgtctcctgctaccgcgcgtgggctcgccccgtgccgt

SEQ ID NO: 84386 - DNA, 1433 bp, Oryza sativa
  Clone ID: PAT_MRT4530_83628C.1
atgggccggccggcccaagaaggcggctcagagcgcgcgcgcgggaggggaggagagagggagccggtggaccgggctcacctcgcgtggtcccgagtgggacccgcttgtcggtgacacggttcaccgtgcggaacacgcacgcggcgcgtgctagggtttgggggagggacgcggtgcacgcgcgcggttcgcggaggacgcggatgtggcgggcccacgtgcagcctcacggctcgcggtggaccgcgcgcacgggaagggcctgatcggggtcggctcgacccggtcttggccgagctagcgccgacgtggcgcctacgtggctgccacgcgggccggcgggaggtagacgacgatgccagccggaacggacggcggacgacagcggtgagcggcggagcgaaccacggcgataccggcgaaagcgagcacaccgggtggctgcacaggacgaggggagacgagccaacggctcggattcgccggagggagcttgtcggcggcgaattgcggcggcggcaaccggcggagagaaaaggggaaaacggcgatgaggtcacgaggggccgattcccggcggcgagagcatccacgcggctacgggaatccgtcccttgcgccggattaggaggaaacgcatcgagggaggccggcgacgagaggcgcttccgagctcgggcggcgacggcggcgagcacacggcgagcgacggcaacggtcggggcggcgccggctaactacggggaggctactcgcactaccgtgcgggcgggcgcagtgacgagaggccgacggcgcgggagtgatctctccggcctcgggccggggaagaggaagaagacgagcgcccggagtccccttccgcgtccacgaacgcaccggctctcccggtgcttggcgatgaacggcggaggcgagatgggaaaaggaggaggggagcgggggcgacgcggcagagggaggaggggctctgcctccgtcccttggcagcttgcgcgcggagtggcgggggccgggcgatgatgacggcgatgacggcggggcggtttggagcggggcggcacgtgcgcgcgggaagcaacgggcggcgcggtgatttgagcggcgctgctcgggcacgcggggctggatgacgcagacggcgcaggcgcggcacgggcggcgaccgcgcgggcgcgcgcacgcgaacaacggcgcgcgggaagtggcagcgtgggagcggagagggagggctcggctcggcgcggctcacgcgcacgcgcgcgcggcgcgcgggcagagcggagaagagggagagagagatagcgagagcgagagagagagagagatagccggggagggagggggagatgggccgagagagattcggcccatcgaacctgagggaggcgaaacagacttttgcggagggattgatttgggaaggattt

SEQ ID NO: 84387 - DNA, 143 bp, Oryza sativa
  unsure (1)..(143): unsure at all n locations
  Clone ID: PAT_MRT4530_83629C.1
aggaagccagcggcgtggaggaggtcgacgcggcggctaggatgaggtcgacgcccgtcgggcgtagatctggagaggaggatgtgagcggnccgtggtcagtaaggccggatcttcgagggaggacgaggcggcagcgttga

SEQ ID NO: 84388 - DNA, 380 bp, Oryza sativa
  unsure (1)..(380): unsure at all n locations
  Clone ID: PAT_MRT4530_8362C.1
gcatgnncacgcgnntacgtaagttcttggcnatcctctagtagacggcccccgccctcttttgtttgtttgtttttctcttttaacccaaaggcgagacgcatattcagntggtaacccatcacggcacganagnaacccacctaacacntnnggatgganntggataganngggcttcttcgacttcgaggagagccactgtggacacgataaccgactcgacttcgatgatanagatgattgctgacacgggatagcttaaggataacctggccacgatggngccccaccaatcagttcctccagttcccgccggagtcgccgccgtagccgccgccacggctgccaccgtagccgccgccgccgccgccacggccg

SEQ ID NO: 84389 - DNA, 722 bp, Oryza sativa
  Clone ID: PAT_MRT4530_83630C.1
atggaaattagacttttcctcgggcggctagggcgcgcggctcggctcaccgtgcggagggagtacgtggctcatgcgcgcgggcggggaaaggacgcggtgcacgcgcgcggtccgtggtggacgcaggtgcggtgggcccacgcgcagcctcacggctcgcggtggaacgcgcgcacggagagggactgaccggggtcggctcgatccggtctaggttgagctggcgccgacgtggcgcctacgtggcggccacgtgggctggcgggaggtagacggattcgccggaggttgctcgacggcagcggattgcggcggcggcaaccggcggcgggagaagagggaaacggcgacgaggtcacgagaggtcgattcccggcggtgagagcatctatgcggcttcgggaactcgacgctagcgtcggattgggcggaactacgccgagcgaggccggcgacgagcgggtgctacggagctcgagcggcgacggtggcgaacacacggcgagcgacggcaacgaggaagaagagggcgcggccgaagtccccttccgcgtcctcgaacgcaccggctctcccggcgcttggcgaaggacggcggaggcgagacagagcacgggggcggcggcaacgggcggtcaagccggcgagctggcgctccggctagcgtccaaagcggcgacaggaagtgacgccggcgagaggggaaaaaggggagaaaa

SEQ ID NO: 84390 - DNA, 2072 bp, Oryza sativa
  Clone ID: PAT_MRT4530_83631C.1
acgactggtttcaacttgacggaaaacttcaaagaaaatctagaagctttcttccggtgcgtcaggccgcgagtcgttgctccacagaaaactctaccgacaaagaaaccagtcgtaccagcgccaccaaccttcaagactatggctgacaagacccttcgcgagtttgctgctccctctgctgacaatgtggccattgggccacaaatcaacatgggagacgtggatttcgacttgaagtccagcctcatcatgatggcgaaggctagcccattctgtggcaagcctaacaaggatgccaatgctcatctgcagcagttcctggagatctgtagcacgtacaccatcaagggtgtcactccagacgccgttaggctaaggctgttttcattctcccttctcgggagagcgaagcagtggttctatgccaaccgtgctgctgtcaacacttgggacaaatgttctacggcattcctcttgaaattcttcccgataggcaaaaccaatgcccttcgtggaaggatttccagtttccagcagacgagggacgagtttattccgaaagcatgggaacgactgcaggaactcaccccgatgtcccgtgatcacatcgacgcgacagctggaggagcattcttctctaaaacggttcgaggagccgttgattttaatagataagatggtgtccaatatgggttggagcgaggaacgactccagatccgttagcgaggcatgcacaccgtgaaggagtcggaattacttgctgccaagctggacctcctcatgaaacgcttggacgaccacgagaaacgaccacaaggcaccattaaggccttggactcacacgttacgtgtgaggtctgcgggtcactctgggaatgactgcccgtaaacccgtgaggaggcgatgtacatgggcaacaacaacaacgggtatcgtccacaaggagacggaacaatgctccatggtcaaaataaagtacgggccgaacccacagaatattcaagtggtcgaagtggagccacccaagacggacagcctggtgaagttcatgcagaatttcctggagaagaaaacaacgatgcccaggaaccgttataggaagacaccggtaaaagcaagtacaccggccaagaagctagagcagctggctcaaaggaagccgccgtccgcaccaaagccaaggaaggggtccggctcttcatcaagtcatcatgacgagtctagtactcgttcatcagctattgtctcaatggaagacgccgaagctccgcgacgactcctgaacgacaccgatctcgaccttgtcggtgatcgggagagacaagcctactacatgctgagcgaccgggagtatgctaacacgcgagaatactctccggagctgctgaaaaagataggtatggatgttgaattttgtgctatttggaaagctgttggttggcagaaatttgttgtagtagatgagcctagttctcgtttgcttactttgcaatttctgtgcactttgaaagaaatagaagatggaatttcctttcgctttttccataaggagtatacacttacatggaaaggcttaagtacacttcttggttttcacgtatcctgtaaaatcgatctttagaaaggaatttctggattcgagaaaaataggtcttgggaagatatttctagtgctccaatttgcaagaaacctaggacgaatgatatccataatcctacacttaggcttatacacaaatggattgctatgacttggtttcctagaggtgatcttagacccattagggaggatgaattgattatcatgtttgccatggttagaaagatcaaaattgttcctatgaaatatatgataaggcaatgctgccatgaactaaccattcccctgcagaccatagaagaatctcgtgcaggtggagcatacagggagacgcgcaacatgacaaggaacgaaagagaaagttcatcatcctaacacccgtgcagatgtatgaggcaggttgggagtcaactagggatgcacccggatggatccaagctccacgccacagcatcggagtctcaagc

SEQ ID NO: 84391 - DNA, 1632 bp, Oryza sativa
  Clone ID: PAT_MRT4530_83632C.1
tcagctcggtctgaactgcggctgcagcagcgtattagcgatgtaggggagaacctggagaagcgctgaagtggagactgcgtgcgtgagagcgtgagagacagtggaagggaagacggcctgcgagagagagagagagagagagagagagctgagaggaggcgaactaggaggagggagggaacaccaaagttgtcagcgttccccaccggcccacctccctcgaggtcaaaaagaaaagaaaaagggagagggagggaatatagactttcctcgggcggctagggcgcggcccgagagaaagggcggcttggccgagcttaacgggccggccggcccaagaaggtggcccaaggcggcccaagacgagcgcgcgcggaggaaggagagagagtccggtggaccgggcgcaccacgcgcggtcccgggtgggacctgcttgtcagcggctcggctcaccgtgcggggaggatggacgtggtgtacgcacgcggttcgcgatggacgcaggtacggcgggcccacgctcagcctcacggctcgcggtggaacgcgcgcacggggagggactgaccggggtcgtctcgacccggtctaggctgagctggcgccgacgtggcacctacgtggctgccacgcaggccggcgggaggtagacgacgacgccggccggaacggacggcggtcgacagcggcgagcgacggagcgaaccacggcgatacgggtaaaagcgagcacaccgggcggttgcacgtgacgaggggagacgaaccaacgggtcggatttgccgggggttgctcgacggcggcggattgcggcggcggcaaccggcggcgggagaagggggaaacggcgacgagatcactaggggctaattcccggcggcgagagcatctacgcggttacgggaatccgatgctagcgtcggattgggcggaactacgccgagcgaggccggcgacgagcggtgcttccgagctcgggcggcgacggcggcgagcacacggcgagcgacggcaacggtcggggctgggggggtggggagatggagcgaggaggaagaacggagggaggcactaccgtgcgggacgggcgcggtgacgagaggccgacggcgcgggagtgatctctccggcctcgggccgaggaagaggaagaagagggcgcgcccggagtccccttccgcgtccacgaacgcaccggctctcccggcgcttggcgatggacggcggaggcgagacagagcacgggagcggcagcaatggcacggaggcgaatggaagaggcgggaaaaaggaggaggtgagcgggggcgacgcggcagagggaggagggatgctgcctccgtcccttggcggcttgcgcgcggagtggcggggccgggcgatgacgacggcgatgacggcggggcggtttggagcggagcggcgacactggcgacaggcgcgtgcagaggctgacggcggcggcgaccgggcggtcggccaccccggcacgcgcgcgcggctcgcaacgggaggcgcggcggatggagtggcgcggctcgggcacgcgcgctggctcgcggggccaagcggctgcgcgggcggctcacgcgcacgcgcgcgggcagagcggagaggcgcagggc

SEQ ID NO: 84392 - DNA, 216 bp, Oryza sativa
  Clone ID: PAT_MRT4530_83633C.1
atggcggaaggcgaaagcgagggagatgggtttgggggaggggatcgggtttatagggcggctatgtcggttcagaaaccgaccttgggcgggcgcggctacagggcggcagatgcgggctcaggcgcggaaggcgctgacaacggcggcggcgacttgccggtcggccacctcggcgcgcgcgcacgggaagcaatgggtggtgcggcgatttga

SEQ ID NO: 84393 - DNA, 874 bp, Oryza sativa
  Clone ID: PAT_MRT4530_83634C.1
gaggttgccatacttcaactccctccctgttaatcgataccagtcccaggaaatagtgctggtatgacagggagacagaatatcacagcaacagaggtctctttattatagagtagaggtacagtcatgttgggctgcggacagatcccgagctcacaactgcattacagaagggaaacggaagccaggacttggaccaaacaacacaggcgcgacttgggaactaggccgaaaccctaaaactcatcatagccggcttgctcctggaagaactcctcatcagcaggatccgcttcatcttcttcagcaactgggggggggggatatttatatagagcaaggttttacccaagttgttactcagattttaagtttgaaggcgaccgtcggtactcgcacagagtgcacgattcccgaggcgcaactgggtggttacaagggaacatggctgagctggcgccgacgtggcgcctacgtggcggccacgtgggctggcgggagttagacgacaacccggccgcgaatggacggcgggcggcggcggcgagcggcggagcgaaccacggcgatacgggcaaaagcgagcacaccgggcggttgttcgtgatgaggggagacgagccaacggctcggattcgccggagggagcttgacggcggcgaatcgcggcggcgacaaccggcggggagggaagagggaaacggcgacgaggccacgaggggtcgattcccggcggttagagcatctacgcggcttcgggaactcgacgctagcgtcggattggacggagctacgccgagcgaggctggcgacgtgcgggtgctacggagctcgagcggcgacggcagcgagcacacagcgagcgacggcaacg

SEQ ID NO: 84394 - DNA, 401 bp, Oryza sativa
  Clone ID: PAT_MRT4530_83635C.1
tcttttgcattggagagcccttaggcttgcgcaaccaccaccgcgtccgtcatcccatccaccttcatagccgccgccgtgtatgcgccggcggtgaccgggatccatggcggagccggacctactcgcgcccttagtcgacctcttcttccacctcggcgacgatttccgcgactatccgaccctctgggatgacgccttcgcgctggaggatttcgatctggacgatctggacttcgacttggatgtggatctctttccggcggatgcgccgccggcggtgacgacgtcggcgacgacctcggccgccggatcggcggaagaggggacgtaagaggccggcgacgggggctccaagaacgaggagaacaaggattcgtcgtcgccgtcgaggagcggga

SEQ ID NO: 84395 - DNA, 1142 bp, Oryza sativa
  Clone ID: PAT_MRT4530_83636C.1
tgccaactttggcacgttaggccccccgtctgcgccgcccggtcccgctgccctgccgcctgcaaccgcgcagccgctcggccccgcagccagcgcgcgtgcccgagccgcgccgctcaatccgccgcgcctcccgttgcaagccgcgcgcgcgtgccgtggtggccgaccgcctggtcgccgccgtcgtcagcgcctgcccgcgcctgtcgcccgtgtcgccgttccgctccacaccgccccgcatcggtttccaaaccgacattgccgccctttaaagcccaggcgccctccctctcttctcctcccatcgcctccactccattgttgtcgccgccttccgagctctgtcttgcctccgccgttcatcgccaagcgccgggagaaccgtagcttgtgtagcctccccgtagctagccggcgccgccccaaccgttgccgccgctcgccatgtgctcgccgccgtcgccgcccgtgctccgtagcacccgctcgtcgccagcctcgctcgacgtagctccgcccaatccgacgctagcaacagattcccgtagccgcgtagatgctctcaccgccgggaattggcccctcgtgacctcgtcgccgtttctcccttttctctccgccgggtgccgccgccgcaatccgccgccgacggacaccctccggcgaatccaagacgttcgctcgctccctctcattctccctcgtcatcccggtgtacgccccgtcgcccctcatcgtcgcaaggcgtcccggagaaaccgccgccgcccgccgtccattcgcggccggcgccttcgtcttcctcccgccagcccgcgtaggcgccacgtaggcgccacgtcggcaccagctcggccgagatcgggtcgggccgaccccggtcagcccctcccttgcgtctcgatattcgtgcaccctgtgcgagtatcgacggacgccttcaaacttaaaatctgaaaaacttcttgggtaaaacttgggttttacaaaagacttggaaaacccgacacctgggtcggtgcttgcgaactaaatgaatttccaaaaccgcggaccggggaacgtaccgggtgtacggtttcccgctctcgcacttaaggaccgtttccttggaatttcattcaaacataagacaa

SEQ ID NO: 84396 - DNA, 1704 bp, Oryza sativa
  Clone ID: PAT_MRT4530_83637C.1
atgcacaccgtcaaggagatggaattacttgctgccaagctggacctcctcatgaaacgcttggacgaccatgagaaatggccacaaggcaccgtcaaggccttggactctcacgtcacgtgtgaggtctgtggcaacataggtcattctgggaatgacagcccggaaacccgtgaggaggcgatgtacatgggcaacaacaacgggtaccgtccacatggagctagaactactgatgcattaagcaaaaggcttgctgccaatgacaaggacgtagaaaacatcaatgtcaaactagagggctttgcttctgcttttcaaaatcagctgagctttaataaaatgatagaaatccagttagctcagctggcatccttagtccctgcaactgaaactgggaggattccggggcaacccgactcctacattgaaaatgtcaaggcgatcacgacgaggggagacgaacagttcgctcgttttgttgaagtaatccagaagatccacatcaacgtgccattgttggacgcaatgcaagtactgacatacgcctgttatctcaaagatatactcaacaacaagagaccgctcccaacaacggaggtggtcaagctgacggaacaatgcagcaacctgatactccacaacctcctggagaagatgaaagacccggggtgtcctacgatcacctgctcgatcgtggcacaacaattcgaccaggccttgtgtgaccttggagccagtgtcagcgtcatgccaaaagacgtcttcgacaaactcaacttcacggtgttggcaccaacaccgatgcgcctccaactggctgattcattagtccgttacccggcaggggtagcggagattgtgccagtcaagatacgggatttcttcatcccggttgattttgtggtgctggacatggacacggggaaggagacaccactcatcctggggcgtccgttccttagcaccgcaggagccaacattgacgtgggaacggagaacagcctggaaccgttattggaagacgccggtaaaatcacctatactggccaagaagttagagcagctggctcaaaagaagccgtcttccgcaccaaaaccaaagaaggtgtggaaggaaaagccaaagatgtccgctccatcacctccggagacgggtggaaaatccgggcactgaaccgaaaggagaccatagaagaatctcgtgcaggtggaacatacagggagacgcgcagcatgacaaggaacgaacgagagagttcatcatcctcaacacccgtgcagatgtatgaggcaggttgggcaccaactggggatgcacccggatggacccaagctccacgccatagcatcggagtctcaacctgggcaactgccagtgaggacctgtggcatgcgcctcatgatatccaatggggggacaatcaacctcccaggtcaagtggtgcgcctccatctccaagtgaatgtcgctcgagttcctctcgttgggacttgggtgaaataactaggagaatggacacccttgatatgcagacgggggagattcagtacaacctcacggaacacatagctcaaacacaagaatggcaacaatctgctgatgctcagtttgccaacatcaacaacatgatgcagcaacagcacgatgaccttcaggcgtactttcgttttcagggattcaatccttatcaagtaccctga

SEQ ID NO: 84397 - DNA, 478 bp, Oryza sativa
  Clone ID: PAT_MRT4530_83638C.1
atgtctgataccgagtgggtgccatgcctcataacaggcatcgtgtgtgatatcggttggtatcaagtactagataactggatggccaaatatcaggagccaggcactaaagcgtcgtcgccggtgatcccaccgtccacgtcccacgccggagcttatcgccggcggccacatcctccaccgtccgcgccacgtcgaagctcgtcgccggcggccgcgtcctccgtcatccacgccccacgccggagctcgtcgccgacggccgcatcctccaccgtcgacgccacggagctcgtcaccgtcgccgccgtcgcgctcaccgagcccgcccgcacctcggccgccgcttggttgccgccgaacaacgccggagcccttttctcctcgcgcgccgggtgccgccaccgcccgtccgcgcctcggcatcgccggtcgtcgccgccgttttcttccttcgcgccggtcgccgtgctcgccg

SEQ ID NO: 84398 - DNA, 192 bp, Oryza sativa
  Clone ID: PAT_MRT4530_83639C.1
cctgttaatgctgccgccattgccgcccaaaccgctgttgttgctgtcatccaagccgcaaggcacaaccgcttgctgctaccgtcggcccaacccgtcaccgtggctgctgttgctggcttgctggttgccaagctacctgaaaacctgaccgccgcagcgcctgcttcttgtgagaataacatcttcatg

SEQ ID NO: 84399 - DNA, 227 bp, Oryza sativa
  Clone ID: PAT_MRT4530_8363C.1
gccaatttttgctttgtggtcttgtgattcagtactccgatgtatgtagtgtacacaacgttgtaaacacgtggaaccgctacgcggcttgtgaatactactccctccgttttgtaacggtgtgaggctcaaggttaaatctgaatgaatttttagttcagatctgcctgtttgtaattattaatgttttgatttaagagaaccatcagggagttttgctccttgtt

SEQ ID NO: 84400 - DNA, 1432 bp, Oryza sativa
  Clone ID: PAT_MRT4530_83640C.1
aagaaggtggcccaaggcggcccaagacgcgcgcgcgcggaggaaggagagagagtccggtggaccgggcttaccacgcgcggtcccgggtgggacccgcttgtcagcggctcggctcaccgtgcggagggagcacgcggcgcggcgctagggtgcggcgggcccacgcgtagcctcacggctcgcggtggaacgcgcgcacggggagggactgaccggggtcggcccgtcccgacctcggctgagctggcgccgacgtggcgcctacatggctgtcacgtgggctggcgggaggtagacgacgacccggccgcgaatggacggcgggcagcggcggcgagcggcggagcgaaccacggcgatacgggcaaaagcgagcacaccgggcggttgttcgtgatgaggggagacgagccaacggctcggattcgccggagggagcttgatggcggcgaatcgcggcggcgacaaccggcggggatggaagagggaaacggcgacgaggccacgaggggtcgattcccggcggtgagagcatctacgcggtttcgggaactcgatgctagcgtcggattggacggagctacgccgagcgaggctggcgacgtgcgggtgctacggagctcgagcggcgacggcggcgagcacacggcgagcgacggcaacgggcgcgagctggcgctcggcggtcgcggccaaagcggcgacagggaggatgacgccggcgaggaggaaaaaggggaaaaggagggggagaaagggggcttgcccctttgccgattcgggaaaaaggaggaggtgagcgggggcgacgcggcagagggaggagggatgctgcctctgtcccttggcggcttgcgcgcggagtggcggggccgggcgatgacgacggcgatgacggcggggcggtttggagcggagcggcgacactggcgacaggcgcgtgcagaggctgacggcggcggcgaccgggcggtcggccaccacggcacgcgcgcgcggcttgcaacgggaggcgcggcggatggagtggcgcggctcgggcacgcgcgctggctcgcggggccaagcggctgcacggctgcaggcggcagggcagcgggaccgggcggcgcagacgcgacgcgacacgggtggcaaccacgcgggcgcgcgcgcgaacgagcgcggggagcggcagcaagggagcggagagggaagactcggctcggcgcgggcagagcggagaggcgcagggcgcggctctcgcgcttgcgcgcggcgcgcgagggaggggcactcggcgcggcgacgcgcgctcgcgcgcgcggcgcggggcggagcggagggagagagggagagaggaaagggccgggggagaggggaagatgggccgagagaaaatcggcccatcgaccccgggggaggcaaaatggacttttgcggaggaatt

SEQ ID NO: 84401 - DNA, 826 bp, Oryza sativa
  Clone ID: PAT_MRT4530_83641C.1
aaactcatcgtagccggcttgctcctggaagaactcctcatcagcaggttccgcttcaacttcttcagcaactgggggggattatttatatagagcaaggtttaataacctctgcagagggggtacactttacccacacgacattactaacccggatcacccagcccgtgggaatcagccacgtcgggagacctccaagctttcatgacaaggcatttccaaagccgacacaggtttaccatatgccaacgagaggggtcccagaccaacaacagttttacccaagaagtttttcagattttaagtttgaaggcgtccgtcgatactcgcacagggtgcacgaatatcgagacgcaactagatggttacaaggggacatggccgacgtggcacctacgtggcgcctacgtggctgccacgcgggctggccggaggaagacgaaggcgtcggccacgaatggacggcgggcggcggcggtttctccgggacgccttgcgacgatgaggggcgacggggcgtacaccgggatgacgagggagaatgagagggagcgagccaacggcttggattcgccggagggagcccatcggcggcggatttcggcggcggtaaccggcggagagaaaagggggaaacggcgacgaggtcacgaggggccaattcccggcggtgagagcatctacgcggctacgggaatccgttgctagcgtcggattgggcagagctacgccgagcgaggctggcgacgagcgggtgctacggagctcgggcggcgacggcggcgagcacacggcgagcgacagcaatggtcggggcggcgccggc

SEQ ID NO: 84402 - DNA, 577 bp, Oryza sativa
  Clone ID: PAT_MRT4530_83642C.1
aacctctgcagagggggtacactttacccacacggcattactaacccggatcacccagcccgcatttccaaagccgacacaggtttaccatatgccgacgagaggggtcccagaccaacaacaggttaggtcccagaccatactgtgccaggaagaccaggggtcctccccgacaccaccccggcgaatccacttgtctctcggcatcaaggctcccctgattagctaattactcagccaggggtgtcccattccacccatgtggttgtactattatatgctcggatgtaattccgaaggaatcggcccttaaatgcgaccgcacaagcttcccgcccagattttaagtttgaaggcgaccgtcgatactcgcatagagtgcacgaataccgaggcgcgaccaggtggttacaaggaaacatggtggcttgccttgctcagggtcttgatcttcacgaatcttcaagaaatccgcttgatgaaaatctggtaaccgcaactatacgcaaacaatcaaaaacctaaccaaaagaccaaaagaaagatcctatttagactaattaatagtgacattaaa

SEQ ID NO: 84403 - DNA, 734 bp, Oryza sativa
  Clone ID: PAT_MRT4530_83643C.1
acgaggatctgacgttttcaaatcatagggggtattttgacttaaaaaaaaaatgaaaacgcgaatataccagccgaaagtaaagctgcggcggctggggtgaatggctccctcctctccccgccgcgacctcgacggcgaggggaccggcggcgggagctcggcggcgagggagaaggagcggccgaggtccttcgacgagaagacccggtcggcgtgctggcggaaggcggcggtggtgatgggccggcacccggagcggtggcggcaggacgccgccggcaacgtcgtgtgccgccgcttctggagctgccacggctgcctctgctacgagtacgaccacatcgtccccttctccaaaggaggggagtctactgttgacaattgccagattcttcagacaagggtgaatcggtcaaaatctgataaagcatggatagagcaggcagaaatgcagggattttcttgtgatatcaagttcactgataaagaacttgatgtgattgaaatggctgtctatggggatgtcatccgtcctggaaagcaatgtcgctgcaggacagtagctgagatgcttgggaaggtgaagtcaaagaatcagatggctgcttgcgagttgccacataatgatgcctcctagcataagtcatatcgttctgcacaactacaccagattcattatggtccgcacgggcagcaagcctgagatcactaccctgatttcatgctctatt

SEQ ID NO: 84404 - DNA, 1356 bp, Oryza sativa
  Clone ID: PAT_MRT4530_83644C.1
gacatctacaccacatacaatacaagagctactactacagctcaccatcaccggagcaagagccaagaagacgacgacgacgacgagctagcagcagcattgcaaccgacggcaatggaggagcagcagcaggtggaggtggaggtggaggtgccgtcctacttcgtgtgccccatctcgctgcagatcatgcgcgacccggtgacgctccccaccggcatcacctacgaccgcgacggcatcgagcgatggctcctcaccgccggcacctgcccgctcaccaagcagcccgtgccgcccgactgcgaccccacgcccaaccacaccctgcgccgcctcatccagtcgtggtgcgccctccacgccgaccatggcgtcgacctcgtccccacccccaagccccccgccgaccgcgcccgcgtcgccgacctcgtctcccgcctccgcgccgccacgagctccgctgccctcctcgacgcgctgcgcgagctcagggacgttgccgccgagagcgagcgtaacaggaagctcctcgccgccgtccccggcgcggtggatgttctggccgccgtcgtcgtcgcgtcgtgtcgagacgccaaggccgcgtgcgacgaggccctcgagatcgtctgctcgctggagctctcggagcggtgcctggcgcggctcgtcgagaggaacgaggagctcgtcgacgcgctcgtcgccacgctgcagcggacgaacaccacgtcccgggcgcacgcggcgctgctcctggaggccgtgacggcggtcatgccgtcgaacaggctggtgtccctcccggaggaggtgttcggtgaggcggtgcagctgctccgcgacagggtatcgagcccggcgacgagggcggcgctgcacgtgctggtcggcacgacgtcgtggggccgcaaccgcgtgaaggcggtggacgccggcgcggtggcggtgctggtcgacatgctcctggacgggccagtcgagcggcgcgggtgcgagctggccctggcggcgctggaccggatgtgcgggtgcgcggaggggcgggcggcgctggtgtcgcacggcgcgggcgtggcggtggtggggaggaaggtgctgagggtgtcggaggtggcgagcgagaaggcggtgcgggtgctgcggtcggtggcgaggcacgcggcgacggcggcggtggtgcaggagatggcgcagacgggggcggtggagaagctgtgcgtggtggcgcagtcggagcagtgcggggagaggacgcgggagcgggcgcgggagacgctgcggctgcacgccagagcgtggaggaactcgccctgcttgcagcctcacctccaggccctctacccttcttgctga

SEQ ID NO: 84405 - DNA, 183 bp, Oryza sativa
  Clone ID: PAT_MRT4530_83645C.1
atggagaagcttggggaggatatggagagagcgaagtctgataatgcccaccaacgccttttggtgcaagacaatgaggtcatccacaagaagagtgaggcagcactatcattccccctcctcttctcgatccggatcaaagccctggtgggcagcacagctagatccgtcgctcgaggttag

SEQ ID NO: 84406 - DNA, 213 bp, Oryza sativa
  Clone ID: PAT_MRT4530_83646C.1
atgccgagcgccgaccatcaacatgggagcaggggcgggcccagcgcggcgtgcggcgccggcgcggccgcgcaactcgtggggcggcaggcggctgccggctgccggctgggcgcaccggacctgaccggcgcagggcggcaggccccacgagcaggtccgccatccgcggcgcgtcgcggctcaggccactgccgacgggcagggccgtag

SEQ ID NO: 84407 - DNA, 407 bp, Oryza sativa
  Clone ID: PAT_MRT4530_83647C.1
gcgatctagaactaggggacgcgtgggcggacacaagacagtgcacgggggcagtctattgagaggatctgggaattcaggactgctaccagccagcgttctagatatcagtattgagtggctggtgagagttagaagtagataaggccatagttatacagtgcatgaaactgcaacatgttaaaactataactgactatgcaacaaaatcgcatcatttatacagtaacgggcgcatcaacgagagggcaagctaaattatattgaattgggcatactgggcgttagttattcagtacactttgtgagtcgcacacttaaaagaagcatgcatggctcggatagagtctgttttggtatacgcgaggatgctatgatggtgacaaaaaaaaagaacgcctggggaa

SEQ ID NO: 84408 - DNA, 218 bp, Oryza sativa
  unsure (1)..(218): unsure at all n locations
  Clone ID: PAT_MRT4530_83648C.1
ggagcttagcttcctcttcttcttcggtgatcgggtttggggttcttggaatcgcgaggaggcgggacatggcgggagattgggcttgtcacagactcagggcctgctgatcaatgcaaatagacttgaaagaacattatattctcgtgatcttatcaagtgaaggccatatctnaatgaaagnttgttaaaattngtggcttncttgaatgagattt

SEQ ID NO: 84409 - DNA, 1881 bp, Oryza sativa
  Clone ID: PAT_MRT4530_83649C.1
ctaagttatctcaatcgggcgctttttcggcccgattgagatgacttccttgtgacggccactaatttcaagcatgttagaggccgtcacaaatggaaggttctgtactagtgtactagtgccagtggctcgaccatgctcggctgggcactggcccggagctaggtggaaaccgctgcggacgatgctcgcgcggctgacttggccgtacgctgaggcggctcccgcgcagccgacttggctgtgcggggcggttgtagttcggcgacgagctcgagctggactcgggtgtggtgatgacgatgacgggatcggcggtggtcgtcggcggatgtacgcgggaaaggaggaagagggaggggtgctggctggctttatatccacggcgaggagggagattgctgagttggttcttccttccttcaaggagaaggctggcggcacaggagaggagaggacggcgacgcagcgctgttggacggcggcggcgcaggacctggatgtcgacatcgccacaggaggggaagggcaagagtcaaaattttcggggtgttacaacgcgacggccaggcggcggtgcggggcgttggaccaattcttgctatatcgtggaagcaccccgaatcgagatggcggtggggcttgcggtggcagcgatggtcctgctccaccaatcggcatggtcggcattgccacaccatgtgtcgccccctggagcaaagccaacaccgacggctgtgagaaagaggacggtggcggcggtcgagaagctcttactgctagagcattgtttcctcctttcgcgcttacatatctcggcatcggcgatgccgccgtggtggtcgtgctgcagtgctggagcagggcgaggagtggatggggttacttgtggtcatggcggcagcgaaggacctagcctatccgagcgacacaggcaagagtggcaacgccggctaccccatcattgtggcatcacacgcagtggatctggaggagttggtctcagagaagctagttggggctggtgacccagccggtgacgagttgagaatgagcatccagtctctccggagagaatactctaacaagtgttccaaattatttttcttcaggctagaagagcctaagggtttgagtgctgaggatgaggctgagatggctagacatgctgctgctgaagttggagctgctgatggtgctggaactacgggtgctggtgttactgcagtagcagctgcagctcctactactaatgttgaagatattaatggggcatcaatacctgtacatgatgaagtaccaggggagatggtcatggcttatgaccctaataatccttgcatgaaggttggcactatgtatcctaacatgaaggagtttagtctagccatgagacaatgtgctataatcaaggagtttgagttgaagttggtgaaaactgaccctgaaaatataggtggttgtaaatttgatggttacccttggcatatggtggagggcttaggtaccgagaacttcaccagggagtgtgatagagatagataccgtggagagagttttaacaactggattaaggattacaaggcattgctaatttgtgaccatgcggaaatttacagagcgttggttatggttctatggaataagaggagaagaattgtagagaaggttgaattgccaagggtgttaggtgcacctttacctaagaagacaaatggaagatacggaaagcttaggaccaaaacttgccttgaaggtggtaggaagtccaaatccaaaactgcttcaattgacaatgattcagggaagagggtgctggaagaggaagccaaggaggaacactgccaactacttcagatattcctagtcccaaaagactag

SEQ ID NO: 84410 - DNA, 669 bp, Oryza sativa
  Clone ID: PAT_MRT4530_8364C.1
atgtcgttgctcatggtcacttgccgctgcattggcttggagttgccattgtgtcgccttcctcgggccgcaacatcaccgctctcgttgttttcatcgccgttcgtgcatcgacaccctcgtcatctgcacttgtcgtcatcaaccgtcaaggtcttcttcgtctacttcgagcatcaccaccacatctccaagctatcactattgctgccccaggccagtggtccagccgaccctgcgtgggttactgatgtcatcgttccaggccgttggtcccgctgcctcgtcttcgtttaccttcgccttctattcgatgccatcttctccaacgactgccacgattgcgtcaccatcttcgtcttcagctattctcctcctctactattcaacagagatgaaagtgggggacggttgagggagcagttgagccggtggagttggccggggcagtggaagttgccggatccgctcaacctcaatggagtagcaatcaggcagggactacgtcgatcggctttggctccagttgtccgtgatgcctccgtctctgatccccttgccacccctaccggatcctgctcgaaggggtcgtcggcgtccggctccttcgtcttggttgcttctgccatggatgtcctcgtcggctttttctccggggtctccctgtaa

SEQ ID NO: 84411 - DNA, 1183 bp, Oryza sativa
  Clone ID: PAT_MRT4530_83650C.1
atgacgatcgtcgtcaccaccgccgtcgtcctcctgtccggcccgcagctcgccgccggggcgcgcgtcctgatcaaccacgctgaactccggcggcgcgacattgccaccgccggcggcggcggcggcggcggcgacggcgcgtgcgcgacggccgtggcgccgttcggctacccctgcgaagagcacgaggtgacgacgcaggatggctacatcctgggcttgcaaaggatcccgaggggacgcatcggcggcgtcaccggcggcggcgcggcggcggcgcggcagccggtgctactgcagcacggtgtactcgtggatggcatgacatggctgctggggtcgccggaggagtcgctgccgtacatcttggccgaccagggcttcgacgtctggatcgccaacaacagggggacccgctggagcagccgccacgtctcactcgatcccaaaagccggagctactggaactggtcatgggacgacatcgtggtcaacgacatgcctgcaatcgttgactacgtttgcagccacaccggccagaagccacactacgttggccattcaatggggacgctggtggcgcttgcagctttctccgaaggcaggatggttgacaagctgaaatcagctgcgctgctcagccctgtcgcgtatctgtctcacattaccactcccattggcgttgtgttagctaaagcattcgctggagagctcatctctgatctccttggcatcgccgagttcaacccagcatcgtatggccggcattctcgtgcctttcagacaaataaaaatcatttttacagcttggaatcgtctccggcctcaagtgtccaacttgcggtgagagacggggttctgaccaagtacgactacgtgatgccggacgcgaacgtggccaggtacggggggtcccaagggggccgacccgccggcgtacgacatggcggcgatcccggcgtggttccccatcttcctcagctacggcggccgggactcgctgtccgaccccgccgacgtcgccctcctcctcgacgacctccgccgcggcggccacgccggcgaccggctcaccgtgcagtaccttccccagctcgcccacgccgacttcgtcatcggcgtctgcgccaaggaccttgtctacaacgacgtcatctccttcttccgtcgatttcactaa

SEQ ID NO: 84412 - DNA, 1033 bp, Oryza sativa
  Clone ID: PAT_MRT4530_83651C.1
ctaagttatctcaatcgggcgctttttcggcccgattgagatgacttccttgtgacggccactaatttcaagcatgttagaggccgtcacaaatggaaggttctgtactagtgtactagtgccagtggctcgaccatgctcggctgggcactggccgggagctaggtggaaaccgctgcggacgatgctcgcgcggctgacttggccgtacgctgaggcggctcccgcgcagccgacttggctgtgcggggcggttgtagttcggcgacgagctcgagctggactcgggtgtggtgatgacgatgacgggatcggcggtggtcgtcggcggatgtacgcgggaaaggaggaagagggaggggtgctggctggctttatatccacggcgaggagggagattgctgagttggttcttccttccttcaaggagaaggctggcggcacaggagaggagaggacggcgacgcagcgctgtgagctcggctcacgctttcgacgtggacgaacaagggcggcggctagagcgcgagggagcggggtggccggggtggtgaaccaagtgtagcggcacagagcggcatgggcatgggggaaaaagcacagggctgaggcgatgtggcacgcgcccacaggttggacggcggcggcgcaggacctggatgtcgacatcgccacaggaggggaagggcaagagtcaaaattttcggggtgttacaacgcgacggccaggcggcggtgcggggcgttggaccaattcttgctatatcgtggaagcaccccgaatcgagatggcggtggggcttgcggtggcagcgatggtcctgctccaccaatcggcatggtcggcattgccacaccatgtgtcgccccctggagcaaagccaacaccgacggctgtgagaaaaaggacggtggcggcggtcgaggtgggcgagaaaagctgcgcgggaacatttcgccggacgtgcgcgagagagcggcgagggaagggtttgggaatgaaaccgagtggctagaagtggggaacgaataa

SEQ ID NO: 84413 - DNA, 113 bp, Oryza sativa
  Clone ID: PAT_MRT4530_83652C.1
ggggcagttggcagcactaaatacctagtaggtggatagtgggcggccagcaatccctataggagtgataatcgtatcagtcatagcgttccgtgtgaaatgtatcgtcacac

SEQ ID NO: 84414 - DNA, 391 bp, Oryza sativa
  Clone ID: PAT_MRT4530_83653C.1
cccacgcgtccgccagattcatcttgcccgctctccagttcgtgccttttagcaacatttctcagtgtcagcaaccggcagtcaacccatcttcccaccgtcaacataggacgtagacggggacataaacgcggcgaagctgccgaacgagacaagcctctttggaatcccaagaaaggcaaaaagaagaagaacaagatgggccaggaaaactcgaccctaccacccaaaacactctccgaccggagtctcaaggcggtttctgattacatcctatctggtgatgccaagaagattgtagtcatgatcggtgcgggtgtgttcacagcggctggaatcccccactttcgttccccaagactgttctctacgccatctgcaacggttcaat

SEQ ID NO: 84415 - DNA, 367 bp, Oryza sativa
  unsure (1)..(367): unsure at all n locations
  Clone ID: PAT_MRT4530_83654C.1
ggaagggagagagacacgcgccgcccctccaaaacccccaatcttgtcgccatttcctcctctcccccagcctccatcgccacccttgccgcgcgccgccctcctcttggtggctggaggaggaggaggaggaggatgcaggccacggggagcggttcttgggtcgcgcaggcgtccgtgctcggctgcggcgggggcggaggaggggtggtggtggtgcggcggccgtngtgggatgggcggtgcggcggtcggtggtaagggcgaaggggtttcggggttgtgcggttcttgcgtncaaggagaagaaagccgcgggttaaggaagacccaaggaaggagaaggcggganattgtccaagtcttt

SEQ ID NO: 84416 - DNA, 107 bp, Oryza sativa
  unsure (1)..(107): unsure at all n locations
  Clone ID: PAT_MRT4530_83655C.1
gtatcaggttctgcttttagaggcttgctcgtgacaaatacttttctaagccagctntttgacactgttatgaccgaagatgataattgtgagtgttttcatgtaga

SEQ ID NO: 84417 - DNA, 152 bp, Oryza sativa
  Clone ID: PAT_MRT4530_83656C.1
aaaaaaaaaaacccaatgattcacattcaatactgaccagccacacggaacatttcaatacctatctcaatttcttctgagctgcaaggacataaaaggagacccgtagccttttacaaccgactccctcgaaaacaaaaatgggacccagg

SEQ ID NO: 84418 - DNA, 311 bp, Oryza sativa
  Clone ID: PAT_MRT4530_83657C.1
atcttctgtttggggtttttattcattcattttctttcttttgacaaaaacacaaccccatgggggacataatgaagacccccaaagatggccccagggtgcagcaaaggggagcatcagttcccctaaaaaaaagggttaagaaaaaaacggggccaaacacatccaaggggggttaggacatttaaaattgtttcaagggtacaagcaaccccccaagtggttaaaaacctggggggtgggaaaaactttcatccttttttggggcttgggaaaaaatccccccaggatccatgacattgacggggaac

SEQ ID NO: 84419 - DNA, 569 bp, Oryza sativa
  Clone ID: PAT_MRT4530_83658C.1
aacctctgcagagggggtacactttacccacacgacattactaacccggatcacccagcccgcattttgaaagccgacacaggttcaccatatgccaacgagaggggtcccagaccaacaccaggttaggtcccacaccatactgtgccaggaaatccgggggttctccccggcaccaccccgttgaatccacatgtcttttggcatcatggttcccccgattagctaattactcaaccaggggtgtcccattacacccatgtggtcgcacttgtcttatgttcggatgaaattccaaggaaacgatccttaagtgcaagagtgggaaaccgtactcccggtacgttccccggtccgcgattttggaaattcatttagttcgcaagcaccgacccaggtgtcgggttttccaaggatcaaaggtgacttgccttgcttgagatcttgagcttgatcctcgaaatcctcgcactgcgggtcttcgggctccgaaactacacacgaaacgggacaactcaacaaacggcgaaaataaagctctattattgacctctatgcgtgccattgga

SEQ ID NO: 84420 - DNA, 483 bp, Oryza sativa
  unsure (1)..(483): unsure at all n locations
  Clone ID: PAT_MRT4530_83659C.1
atggcggagaagaaaagggagaggaaagaacacgagcaattgggccgtgagagggaggggggtgancacgtgaagggcggcgagaaatcggagaggagaactgggggagatgggccgaatgtggcgaagaaggccggcgaatactgccgcgccgccgaggcctggagcgtttgccacgtcatccaggggacgcgaagattcgcggaggtggatggcctcacgaccaccgtcgggcggcattgtcatttgaaggagttgatggtggaggcggctatagtcctcggcaagtctgctaccgctccacatcatgggatgcatgagtttgccaatgaggtgccgtgtgaagctcatcgcctctgcaccgctgccgcctgccggtggacttggttggaagatatgaactcgttgccacaggccgtgttcacgacaagccgcatgaaacgaagcgtgagaactttccctgagcatggacctggacactag

SEQ ID NO: 84421 - DNA, 444 bp, Oryza sativa
  Clone ID: PAT_MRT4530_8365C.1
ccgggctgcaggaattcggcacgagggctgtttcctgtaaaacaaggttccataatcatataagacagtctagcccacttgtttcctgctacatgtgtgttatatcctgaataagcttacatagatcaaaggaataggcaatgcattagcttacacaaggaaattggggatcgagtgaagggaggagactggaaacagagcccagatggggagaactagcactatctctgtttcatttctaccctcttgttacacagtagttggcttttgtaccctctcaaccttactagagtaaagaccactccatttactttcaccagcctggcccacatgaccgattaacccttagttctgccacctcacttcatattaccatagctgtagctatggtatgatctatcgaagctttctaacactatggatctttgaccatcagtggcctgt

SEQ ID NO: 84422 - DNA, 1108 bp, Oryza sativa
  Clone ID: PAT_MRT4530_83660C.1
ccgcgcctgcagccgctcggccccgcagccagcgcgcgtgcccgagccgcgccactcaatctgccgcgcctcccgttgcaagccgcgcgcgcgtgccgagtggccgaccgcctggtcgccgccgtcgtcagcgcctgcccgcgcctgtcgcccgtgtcgccgctccgctccacaccgccccgcctcggtttccaaaccgacattgccgcccttaaaacccaagcctccccctttcccttcctctcccattcgcctccactccatcgttgccgctgctttccgagctctgtctcgcctccgccgttcatcgccaagcgccgggagagccgtagcacgagtagcctccccgtagctagccggcgccgccccgaccgttgtcgccgctcgccatgtgctcgccgccgtcgccgcccgagctccgtagcacccgctcgtcgccagcctcgctcggcgtagctccgcccaatccgacgctagcaacggattcccgtagccgcgtagatgctctcgccgccgggaatcggtccctcgtgacctcgtcgccgtttcccccttttctctccgccgggtgctgccgccgcaatccgccgccgacggacaccctccggcgaatccaagccgttggctcgctccctctcattctccctcgtcatcccggtgtacgccccgtcgcccctcatcgtcgcaaggcgccccggagaagccgccgccgcccgccgtccattcgtggccgacgccttcgtcttcctcccgccagcccgcgtggcagccacgtaggcgccacgtcggcgccagctcggccgagatcgggtcgggccgaccccggtcagcccctcccgtgcgcgcgttccatcgtgcaccctgtgcgagtatcgacggacgccttcaaacttaaaatctaaaaaacttcttgggtaaaacttgggttttacgaaagacttggaaaacccgacacctgggtcggtgcttgcgaactaaatgaatttccaaaacagcggaccggggaacgtatcgggtgtacggtttcccgctcttgcacttaaggaccgtttccttggaatttcatccaaacataagacaagaaataaaaaataaaatatattcagaa

SEQ ID NO: 84423 - DNA, 468 bp, Oryza sativa
  Clone ID: PAT_MRT4530_83661C.1
aattcataactacacaccatctgagtttttatattgattttcttaaacacaccacagcgcgcgcgcgcacatatatacatatcgcactactaaatccatcttatacttttatttaatataatccagactaggtttaagtgcagcgtacataataataaattagtacgcagcaacatcagcatcatcatgagctactatatatttcttcacggggtacattgcccacgtagtgatgccgcagattccgttcttgtccgtgatgtcgcgcttcatacgaatatagccactttcaccccagccttcgccccaagagttcttgacgatccagtatttaatattatctgtggtcacgccataccctaccactaacaccacgtggttatctttagtctccgttccgcacggtccatcgaaaacacccccgtggtacgaatggaatctgtcgctgatttggatgataacggacac

SEQ ID NO: 84424 - DNA, 1356 bp, Oryza sativa
  Clone ID: PAT_MRT4530_83662C.1
gcgcccggggcccaaaaggggccccaaatcggacagggttggtaaaagagaaaaacccgttgtccccgcctcacccccccgggcccggaggggacccgatttacaaggaattggctccccgggcatagatagcacggggctctcgcgcgcgaggaggcgggcccacgcgaagcttcttggcttggggtgtaacgcgcgcacgaagggcctgactggggtcggcccgtcccgtcttcggttgagctggcccccacgtgggcgcctacgtgggctgccacgtgggctagcgggaggtagacgacgacgccggccggaacggacggcggacgacagcggcgaacggtggagcgaaccacggcgatacaggcgaaagcgagcacaccgggtggttgcacaggacgaggggagacgagccaacggctcggattcgccggagggagcttgacggcggcgaatcgcggcggcaacaaccggcggggagggaagagggaaacggcgacgaggccacgaggggtcgattcccggctgtgagagcatctatgcggctacgggaactcgatgctagcgtcggattggacggagctacgccgagcgaggctggcgacgtgcgggtgctacggagctcgagcggcgacggcggcgagcacacggcgagcgacggcaacgggcgcgagctggcgctcggcggtcgcggccaaagcggcgacagggaggatgacgccggcgaggaggaaaaaggggaaaaggagggggagaaaggggggcttgcccctttgccgattcggaaaaaaggaggaggtgagcgggggcgcgcggctgagggaggagggaggccctgcctccgtcccttggaggctagcgcgggagtggcggggccgaggcgatgacgacggcgatgacggcggggcggtttggagcggagcggcgacactggcgacaggcgcgtgcagaggctgacggcggcggcgaccgggcggtcggccaccacggcacgcgcgcgcggcttgcaacgggaggcgcggtggatggagtggcgcggctcgggcacgcgcgctggctcgcggggccaagcggctgcgcggctgcaggcggcagggcagcgggatcgggcggcgcagacgcgacgcgacacgggcggcaaccacgcgggcgcgcgcgcgaacgagcgcggggagcggcagcgagggagcggagagggaagactcggctcggcgcgggcggctcacgcgcacgcgcgcgggggggggaggggcactcggcgcggcgacgtgcgctcgcgcgcgcggcgcggggcggagcggagggagagagggagagggggagcgggagcgcgccgggggagagagcgagagagag

SEQ ID NO: 84425 - DNA, 273 bp, Oryza sativa
  Clone ID: PAT_MRT4530_83663C.1
caaggacaaacgcaccacctttttttcaacgactcaaacgctaattatacaaacgggggacaagttcatagcccatagggtccaaaaaagctagtcataacatgtttattggtacagagcttaggggcaaaccttcaagaaaaaagccccagtttgcgggaccggttacaccttaaaaacaggactaaattcttgccacctccggacccggtaaatttaaggggggaggtatcccaggcccggaccaaggagggcttcccttcgtggcgggat

SEQ ID NO: 84426 - DNA, 1625 bp, Oryza sativa
  Clone ID: PAT_MRT4530_83664C.1
gcacgaggcacaaaacccccgtttcccgtctcgcgttcttcgatcgcctccgcttaaaaagckcgccgcctccgaccgaatccackccccccccakcaatcccgcaaccctaccgaaaccggtaaaccactggaagaaagcgggttcgatcgatcgatcttgctagtgcggctatatctgctagtaggtgaattggtcgctcgacgttggtgatcatggtggagaagacgaagctgcagctgccgctggtgcacaacgagcggctgtgggcgcggccgtggcggtgggccaagacggtgttcttcctcgtctccatgctcgcctcgctgctgctcgtctgcgcgccgccgctgctcatcgtcgtcctcgacctgctactcccgcccgcgctcctctccaacttccaccgcgccgcgaaccaccccacctcgctcatcgaccaggccaggggcttccacttccggtcatcgctcgtcgacctccccgccgtctccgccgcgcgctccctcctcatcctctgcgcgtacacggcgtgcgggggaggcgcggcctacctgtgggtggccgtggcgtgcagcgtcggctcggtgtgctacgtcgtcgccaaggcggccgtggtgttcggcgcggcgcccgacagggccgtgctggggctgcagggcaagggccagctcgtcgccgtggaggccatgttcctcatgtcgctcgcgctcgccgccgcgcacatcgccatggcctaccgcgccagctgccgcgagcgacgccgcctgctcgtctacagaatcgacgtcgaagctgtaaggctaaagggaggccaaacgcccaagtccctgaagcagcagttcgccgaagacgggtgcatgcatggacagcgtgtgtgcatcgtccacaagatgaaaagactgaagaagtggtcgaaggagatggctgagctggcgccgacgtggcgcctacgtggctgccacgcaggccggcggaaggtagacgacgacccggccacgaatggacggcgggcggcggcggcgagcggcggagcgaaccacggtgatacgggcaaaagcgagcacaccgggcggttgttcgcgacagggggaggcgagccaacggctcggattcgccggaggttgctcgacggcggcggattacggcggcggcaaccggcggcgggagaagagggaaacggcgacgaggctacgaggggtcgattcccgtcggtgagagcatctacgcggcttcgggaactcgacgctagcgtcggattgggcggaactacgccgagcgaggccggcgacgagcgggtgctacggagctcgggcggcgacggcggcgagcacacggcgagcgaaggcgacgagagagacatcaccgggaagaggaggggcgctgtgacgagaggccgacggcgcgggagtaatctctccggcctcgggccggggaaggggaaggagagggcgcggccgaagtccccttccgcgtcctcgaatgcaccggctctcccggcgctcggcggaggacggcggaggcgagacagagcacggggcggcggcaacggcgcggagacgaatggaagaggaggggtaaggggaggccgggggggtttaaaggggacggcaatgtcggtttga

SEQ ID NO: 84427 - DNA, 570 bp, Oryza sativa
  Clone ID: PAT_MRT4530_83665C.1
aacctctgcagagggggtatactttacccacacgacattactaacccggatcatccagcccgcatttcgaaagccgacacaggttcaccatatgccaacgagaggggtcccaaaccaacaccaggttaggtcccggaccatactatgccaggaaacccgggggttctccccggcaccaccccgttgaatccacatgtctcttggcatcatggctcccttgattagctaattactcagccaggggcgtcccattccacccatgtggtcgcacttgccttatgttcggatgaaattccaaggaaacggtccttaagtgcaagagcgggaaaccgtactcccgattttaaatttgaggagaggtgttccgatgcgcgtgcccgaaggcccgtgcatcgaagcacaacagttgacaaaggaggtttagtgacttgccttgctcgagatcttgagcttgatcctcgaaatcctcgcactgcgggtcttcgggctccgaaactacacgcgaaacgggacaactcaacaaacggcgaaaataaagccctattattgacctctaagcgtgccattaga

SEQ ID NO: 84428 - DNA, 915 bp, Oryza sativa
  Clone ID: PAT_MRT4530_83666C.1
atggcacccagacatcacggatggtcggctgggtctgccataatcaatacggtccacgaagatactcgttacacggggaaaagcactgcatatgacaatgacttccccaaggttagtacagtgtgtgataggctgatgctccaaacttatttcggtctttccaagtcctcttccggaggaccgaaaaaggagcaaacttttagtttcgtggatcagggcacagatactccacgtgttggaggttcaatttatggcgtcaggccgtcgcaaaactttggatctttatttagggggtacaaagaaggacagggcaggatcctaactcgaaagatggacaactcgaacgccccattccgagccggccgtcgtagcgccgcggctcggctcaccgtgcggagggagcacgcggcgcacgcgctcgggcgggggagggacgcggtgcacgcgcgcggttcgcggtggacgcgggctgagctggcgccgacgtggcgcctacgtggctgccacgcgggccggcgggaggtagacgacgacgccggccggaacggacggcggtcgacagcggcgagcgacggagcgaaccacggcgatacgggcaaaagcgagcacaccgggcggttgcacgtgacgaggggagacgaaccaacggctcggatttgccgggggttgctcgacggcggcggattgcggcggcggcaaccggcggcgggggaagggggaaacggcgacgaggtcacgaggggccgattcccggcggtgagagcatctacgcggccacgggaatccgatgctagcgtcggattgggcggagctacgccgagcgaggctggcgacgagcgggtgctacggagctcgagcggcgacagcggcgagcacacggcgagcgacggcaacggtcggggcggcgccggctag

SEQ ID NO: 84429 - DNA, 250 bp, Oryza sativa
  Clone ID: PAT_MRT4530_83667C.1
catgcgcgcgtacgctagctctgtgtcctctattttgggcgccctcttttttttttttgggcagtatgggttttggtgcaaactcatctccaccagctgattgtgattggtgagacacgtcctcctggaccaggtcccccgctggcaggactcgcagatgcttggaataaggaatgactgaccgtccgacccgtgccaatgcctaacactacgtgccaacaccaaccacgccgattaaccttatgagaca

SEQ ID NO: 84430 - DNA, 342 bp, Oryza sativa
  Clone ID: PAT_MRT4530_83668C.1
atgcgagattcggcgtctggggtcgtggtcaacatgttcaacgccttcgaggcgtcagagctgggcaagatcgaggccaagctgtccaagtcaaccttcgccgtcgggccgctgcacaagctcaccacggtgaggacggcggcggaacagtaccgccatttcgtgtgcctatacggtccggaccgcgcctggctggacgcgcacccgccgcgctccatgctgtacgtgagcgagctggagaggagaggtgaggtgccaggggcaatcttgcctgcccctgcaaggagtgacggcatgggcttgaaggtggcaagcacctcctccattgtcgcatggatctag

SEQ ID NO: 84431 - DNA, 5589 bp, Oryza sativa
  Clone ID: PAT_MRT4530_83669C.1
atggccgaacaagcaaaggcgcacaacctctctccgagtgttagcggtgacgacggggagccaaacccacgccgtcgagctcgtactccaccgccccctccacgccaaagtcctaggcgggaggaggcgctcgagagggtcgaaggatccgcgacttcgacatccacgggtgatggggaagggcggcgagatggggagcgtcgcctcctcgtctatggcgacggcagcacgcctcagggcgcactccaagctgcgggcgcgctcctacgtcacccgcccgttgtccctgacccggagtctccagcccaacgttggctggacgacgtggccaacttggtcatgacggcacggcagcgcctaggtgctggtgggcggtcctccgccaccaagacctctggcgctgctaccaccggctccgtatcgtcaaggcggagggcgcggcgagcggcggctgttgctcgccattcggccgccactccttcgtcagcgcctccgacccaggaagatctgcgtggggggccggatgcccgcatcgatatcgagcgccggcgtaatagccgacgtgctgcccacgcaacggagggcgcctcctcgtccggagtgtcacatcaacacggacgcggggatcagccctccgtgcccccggttggtggtgtcggctgtagagcctttgtggcgagccttcggaacgtccgttggcccccaaggttccggcccaccatcgccgaaaaatatgacgggagcgtcaaccccgccgagtttctccaggtctacacgaccgggatcgaggccgccgggggtgatgacaggatcatggcgaatttctttcccatggccctgaagggacaggcacggggttggctaatgaacttgccacccgcgtccgtccactcttgggaggatttgtgccaacagttcaccatgaactttcaaggcacatatccgcgcccaggtgaagaagcggacttacatgcagtccagcgaagggatgatgagtcacttcgctcatacattcagcggttctgtcaagtccgcaacaccatatcatgcatccctgcacacgcggtgatctacgcgttcagggggggtgtgcggcacaaccgcatgctcgaaaagatcgcctccaaagagccccagactaccgcggagctttttcagctcgcggaccgagtggctcgtaaggaggaggcatggacctggaacccctccggttccggtgtggcagcttcggccgcccccggatccgctgctcagacagggcggcgtgacaggaggaggaagaagaggtcagcccataccgacgacgagggtcatgtcctcgccgtcgagggcgcttcgtgggccacccgaaaggggaggcctgcgggcgacaaaaagaaggaggccggcgctcccagcagggagcgcccaaccggcaagtggtgcatcgtccacaacacttcccttcacgacctcgcggactgccgcgcagtcaaaagtttggctgagcggacgaggaagtgggaggaggagaggaggcaggagcgccgagagggcaagtccccggcggttccttcctgcaatcggcgaagtgaggccaagcagaaggcccccgccgaggacatcgatgacggcgatgatgacctaggtttccaagagcctggggccaccattgccactgtcgatgggggagcatgtgctcacgtttctcgccggagcctcaaggccatgaagcgagagcttctggccgcggcccctactcatgaggcgacgcgccgggcgcggtggtcggaggttgccctcaccttcgaccagaccgaccacccaccgtgcgttgcccggggaggacagatcgcaatggtggtttcccccactgtttgcaacgtgaagctggggcgtgtcctcattgatggaggagcagccctcaacatcctttcccccgcagcctttgacgccatcaaggccccggggatggtgctccggccgtcccagccgattatcggtgtgacgccggggcacacttggccgctaggtcatatcgacctcccggtcactttcggtggatccgccaacttccgcacggagcgggtgaactttgatgtggcggacctcagtctgccctacaacgcggtcttagggaggcccgcgttggtgaagttcatggcggcggtccactacgcctacctccagatgaagatgccgggccccggtggccccatctctgtccatggcgacctcaaagtcgcgcttgcttgtatggagcagcgcgcggaccacctcgccgctgcgtccaagcccgagggtggcgacgagaggcttggcacctccgtccccgctgccccgaggcagcggatgatcacatgcggcgaggtcccggaagacgcgctcgtctccttcctgcgggcaaacgctgacgtcttcgcatggagaccggcggatatgcccggggtccccagggaggtgattgagcaccgtctcgccgtgcggccgggcgcaaggccggtccggcagaaagtgcggcgccaggccccggaacgtcaagccttcatccgcgaggaggtggcgcgacttctggaggccggattcatccgcgaggtcatccatccggagtggctggcgaacccggtggtcgttcccaaggcgaacggcaagcttcggatgtgcatcgactacaccgaccttaacaaggcatgtcctaaggacccttaccccctgcctcgcatagatcagattgtcgactccacagcggggtgcgaccttttgtgttttctagatgcatactctggttaccatcagattcacatggctagggaggatgaggaaaaaactgcattcattacccccataggaacttattgttatacgacaatgcccttcgggttaaagaatgcaggtcctacttttcaacgtactactcgaatttctttgggtagccaaataggacgtaatgttgaggcttatgtcgatgacttggttgtaaagacgcgcaaccaagagaccttactctcggatctagcgaaaacttttgagagtctccgctccgcccgcataaaactgaaccccaataacaagcttagggatgtgcaatgcgtcaccggttgcatggccgccctaagtcggttcatatcgaggctgggagagaaggcgctacccttatttaagctcctcaaacgctccgggccgtttacttggacggaggaagctgaacgtgccctcactcagttgaaggcgtatctcagctctcccccagttctggtcgccccggagccaaatgaacccttgctactctacttagcggcgaccccgcaagtggatggcccgagggccactgcgggaaggccgcacctatcgccctctgaccccgaggctaaccctgtgccgactcgacccgggagagagcagggagaagaggcccccgagccgaacggtggcctaaggcccctgacgaccggagttggccctttgcccgcttgtccgacgacgccaggagcccccgacccccaggacggccccgaggccactgtgggaaggccgcccctgtcgtcctccgaccccgaggtcgtcggcacagaagacaagtgcgccccgcgaggccgcttggacgaagagagccccagggacgtggcccctagcgaagaggatcggccccaccgaaaggtgcagcggcccgtctactttgttagtgaggccctccgggacgccaagacccgataccctcaggcccagaagatgctttacgctattctgatggcttcgaggaaactgcgccattatttccaggcgcatcgagtcacggtggttacgtcttaccccctcggccaaatcttgcataatcgagagggtactggatgggtggtgaaatgggcaatcgagctttctgagtttgatttgcactttgaaccacgccacgctatcaagagccaggccctcgccgattttgtggcagagtggaccccagctcccgagcccgtctcagtccccgaggccagctcgggcccctcgcagctgcctcacatcgcccactgggtgatgcagttcgacggctccctgtctcttcagggcgccggtgcgggggtcacgttgacctcgccgagcggagacgtcctcagatacctggttcgccttgactttcgggcgaccaataatatggcagagtacgagggactccttgcaggactcagggtggcagctggactggggatccgccgcctcctggtgttaggtgactcccagctggtcgttaaccaagtctgtaaggagtaccggtgctctgacccgcagatggacgcttacgtgcgccaagcccccgaggcccgcggagtccaggcctcgggacccgaggggagcgctcccagctcccttagattgattgcttggatcgctgagatccaagcatacctcacagataagactctacccgaggaccgcgaagggagtgaacgcgtccagcgcatctccaaacactacgtgctggtagaagggaccctctatcggcgcgcggctaacggaatcctcctgaagtgcattcctcgggaacaaggcgtcgagcttcttgccgatatccatgaaggcgaatgcggagcccactccgcctcgcgcaccttggttggcaaagcctttcgtcaaggtttctattggccaacagctctcaatgatgcggtcgacctggtccggcgatgcagagcgtgtcaattccacgccaagcaaatccatcagccggcccaggccctgcagatcataccactttcatggccatttgctctctgggggctcgatatcctgggaccgtttaggcgggccccgggcgggtttgagtatctgtatgtcgcgatcgacaagttcactaagtggcccgaggcttatccggtcgtcaagatcgataagcactccgcacttaaattcattaagggcatcacagcccggtttggagtgcctaaccgtattattacggataacggcacccaattcactagtgaacttttcggcgattactgcgaagacatgggcatcaagctctgcttcgcctcacctgcccaccccagaagcaacggccaagtggagcgcgccaatgcggaaatcctcagaggccttaaaaccaagacattcaacatcctcaagaagcacggcgattcgtggatcgaggagttgccagcggtgctctgggcgaaccgaaccacgccaagccgagcaaccggggaaacgcctttcttcctcgtctacggcgcggaagcggttctcccatccgagctcaccctgaggtcccctcgggccaccatgtactgcgaggctgatcaagatcagcttcacagagatgacctcgactacttggaagagcgaaggcggcgcgcggccctccgagccgcgcgctaccagcagagcctgcggcgctaccatcagcgccacgtccgggcccgatcactctgcgtcgacgacctcgtcctacgccgcgtccaaacgcgtgctggattgagcaagctctcaccaatgtgggagggtccgtatcgagtgatcggcgtcccccggccgggctccgttcggctggccacgggcgacggcacagagctgcctaacctgtggaacatcgaacaccttcgtcgcttctacccctaa

SEQ ID NO: 84432 - DNA, 183 bp, Oryza sativa
  Clone ID: PAT_MRT4530_8366C.1
catctttgtctcgcctccaccggccgtgatctcgccgccggcgccgtcccgccgcccctgaggcctactagtagcgacctacaagtaccttgttttgtaccatcctaggagcgaatcctccccctgcggcagcggtagcagatcgcgatggccgcctcggcgccttctccggccgagccgccg

SEQ ID NO: 84433 - DNA, 600 bp, Oryza sativa
  Clone ID: PAT_MRT4530_83670C.1
atgcggcgcggcgctagggtgaggtgtggggcgcggtgcacgcgcgcggttcgcggaggacgcggatgcggcgggcccacgtgcagccttacggcttgcggtggaccgcgcgcacggggaagggctgatcggggtcggcccgacccgatctcggccgagctggcgccgacgtggcgcctacgtggctgccacgcgggccggcgggaggtagacgacgacccggccgcgaatggacggcgggtggcggcggcgagcggcagagcgaaccacggcgatacggacaaaagcgagcacaccgggcggttgctcgtgatgaggggggacgagccaacggctcggattcgccggaggatgctcgacggcggcggattgcggtggcgtcaaccggtggggagggaagagggaaacagcggcgaggtcacgagaggtcgattcctggcggtgagagcatctacgcggcttcgggaactcgacgctagcgtcggattgggcggaactacgccgagcgaggccggcgacgagcgggtgctacggagctcgggcggcgacggcggcgagcacacggcgagcgatggcaacggtcggggcggcgccggctaa

SEQ ID NO: 84434 - DNA, 6100 bp, Oryza sativa
  Clone ID: PAT_MRT4530_83671C.1
atggccgaacaagcaaaggcgcacaacctctctccgagcattagcggtgatgacggggagccaaacccacgccgtcgagctcgcactccaccgccccctccacgccaaagtcctaggcgggaggaggcgctcgagagggtcgaaggatccgcgacttcgacatccacgggtgatggggaagggcggcgagatggggagcgtcgcctcctcgtctacggtgacggcagcacgccccagggcgcgctccaagctgcgggcgcgctcctacgtcaccctcccattgtccctgacgcggagtctccagcccaacgttggctggacgacgtggccaacttggtcatgatggcacggcagcgcctaggtgctggtgggcggtcctccaccaccaagacctctggcgctgctaccaccggctccgtgtcgtcaaggcggagggcgcggcgagcggcggctgttgctcgccattcggccgccactccttcatcagcgcctccgacccaggaagatcagcgtggggggccagatgcccgcatcgatatcgagcgccggcgtaatggtcggcgagctccccacgcaacggagggcgcctcctcgtccggagtgtcacctcaacacggacgcagggatcagccctccatgcccccggttggtggtgtcggctgtagagcctttgtggcgagccttcggaacgtccgttggcccccaaggttccggcccaccatcgccgaaaaatatgacgggagcgtcaaccccgccgagtttctccaggtctacacgaccgggatcgaggccgccgggggtgacgacagggtcatggcgaatttctttcccatggccctgaagggacaggcacggggttggctaatgaacttgccacccgcgtcggtccactcctgggaggatttgtgccaacagttcaccatgaactttcaaggcacatatccgcgcccaggtgaagaagcggacttacatgcagtccagcgaagggatgatgagtcacttcgctcatacattcagcggttctgtcaagtccgcaacaccataccatgcatccctgcacacgcggtgatctacgcgttcagggggggtgtgcggcacaaccgcatgctcgaaaagatcgcctccaaagagccccagactaccgcggagctttttcagctcgcggaccgagtggctcgtaaggaggaggcatggacctggaacctcttcggttccggtgtggcagcttcgaccgcccccggatccgctgctcagacagggcggcgtgacaggaggaggaagaagaggtcagcccataccgacgacgagggtcatgtcctcgccgtcgagggcgcttcgcgggccacccgaaaggggaggcctgcgggcgacaaaaagaacgaggccggcgctcccagtagggagcgcccaaccggcaagtggtgcaccgtccacaacacttcccttcacgacctcgcggactgccgtgcagtcaaaagtttggctgagcggacgaggaagtgggaggaggagaggaggcaggagcgccgagagggcaagtccccggcggttccttccggcaatcggcgaagtgaggccaagcagaaggcccccgccgaggacatcgatgacggcgatgatgacctaggtttccaagagcctggggccaccattgccactgtcgatgggggagcgtgtgctcacgtttctcgccggagcctcaaggccatgaagcgagagcttctggccgcggcccctactcttgaggcgacgcgccgggcgcggtggtcggaggttgccctcaccttcgaccagaccgaccaccctccgtgcgttgcccggggaggacagatcgcaatggtggtttcccccaccgtttgcaacgtgaagctggggcgtgtcctcattgatggaggagcagccctcaacatcctttcccccgcagcctttgacgccatcaaggccccagggatggtgctccgaccgtcccagccgattatcggtgtgacgccggggcacacttggccgctaggtcatatcgacctcccggtcaccttcggtggatccgccaacttccgcacggagcgggtgaacttttatgtggcggacctcagtctgccctacaacgcggtcttggggaggcccgcgttggtgaagttcatggcggcggtccactacgcctacctccagatgaagatgccaggccccggtggccccatctctgtccatggcgacctcaaagtcgcgcttgcttgtatggagcagcgcgcggaccacctcgctgccgcgtccaagcccgagggtggcgacgagaggcttggcacatccgcccccgccgccccgaggcagcggatagtcacatgcgacgaggtcccggtcaaggaggttgccctgggcgacggccccgtctctttcctgcgggcaaacgctgacgtcttcgcatggagaccggcggatatgcccggggtccccagggaggtgattgagcaccgtctcgccgtgcggccgggcgcaaggccggtccgacagaaagtgcggcgccaggccccggaacgtcaagccttcatccgcgaggaggtggcgcgacttctggaggccggattcatccgcgaggtcatccatccggagtggctggcgaacccggtggtcattcccaaggcgaacggcaagcttcggatgtgcatcgactacaccgaccttaacaaggcatgtcctaaggacccttaccccctgcctcgcatagatcagattgtcgactccacagcggggtgcgaccttttgtgttttctagatgcatactctggttaccatcagattcgcatggctagggaggatgaggaaaaaactgcattcattacccccataggaacttattgttatacgacaatgcccttcgggttaaagaatgccggtcctacttttcaacatactactcgaatttctttgggtagccaaataggacgtaatgttgaggcttatgtcgatgacttggttgtaaagacgcgcaaccaagagaccttactctcggatctagcggaaacttttgagaatctccgctccgcccgcataaaactgaaccccgataagtgtgtgttcggtgtacctgcgagcaagcttctcgggtttttggtctctgcccgaggcatcgaggccaaccccgagaagatacgagctatagagcggatgcgccccccccagcaagcttagggatgtgcaatgcgtcaccggttgcatggccgccctaagtcggttcatatcgaggctgggagagaaggcgctacccttatttaagctcctcaaacgctccgggccgtttacttggacggaggaagctgaacgtgccctcactctgttgaaggcgtatctcagctctcccccggttctagtcgccccggagccaaatgaacccttactactctacttagcggcgaccccgcaagtggttagtgcggcgttggttgtggagcgcgatgaggacaatcctcattccgcgcacccccaccctgtgctggcttggcccgggagagagcagggaggagaggcccccgagccgaacggtggcccaaggcccccgacgaccggagcaggccctctgcccgcttgtcagacggtgccaggtgcccccgacccccaggatggcccgagggccactgcgggaaggccgcacctatcgccctctgaccccgaggctaaccctgtgccaactcgacccgggagagagcagggagaagaggcccccgagccgaacggtggcctaaggcccctgacgaccggagttggccctttgcccgcttgtccgacgacgccaggagcccccgacccccaggacggccccgaggccactgtgggaaggccgcccctgtcgtccttcgaccctgaggtcgtcggcacagaagacgagtgcaccccgcgaggccgcttggacaaagagcgccccagggatatggcccctagcgaagaggatcggccccaccgaaaggtgcagcggcccgtctattttgttagtgaggccctccgggatgcgaagacccgataccctcaggcccagaaaatgctttacgctattctgatggcttcaaggaagctacgccattatttccaggcgcatcgggtcacggtggttacgtcttaccccctcggccaaatcttgcataatcgagagggtacaggacgggtggtgaaatgggcaattgaactttctgagttcgatttgcactttgaaccacgccacgctatcaagagccaggccctcgccgattttgtggcagagtggaccccggctcccgagcctgtctcagtccccgaggccagctcgggcccctcgcagccgcctcacaccgcccactgggtgatgcagttcgacggctccctatctcttcagggcgccggtgcgggggtcacgttgacctcgccgagcggagacgtcctcagatatttggttcgccttgactttcgggcgaccaataatatggcagagtacgagggactccttgcgggactcagggtggcagctggactggggatccgtcgcctcctggtgttaggcgactcccagctggtcgttaaccaggtctgtaaggagtaccggtgctctgacccgcagatggacgcttacgtgcgccaagtacggcgtatggagcgccattttgacgggatagagcttcggcacgtgcccagacgggataacacggttgccgacgaactctcgcggctcgcttcctcgcgagcccagaccccaccgggcgcctttgaagaaaggcttgcccagccgtcagcgcgacccgaccccttaggggagacggacgcgcctgacaggcccccgaggcccgtcggagtccaggcctcgggacccgaggggagcgctcccagctctcttagattgattgcttggatcgctgagatccaagcatacctcacagataagactctacccgaggaccgcgaagggagtgaacgcgtccaacgcatttccaaacgctacgtgctggtagaagggaccctctataggcgcgcggctaacggaatcctcctgaagtgcattcctcgggaacaaggcgtcgagcttcttgccgatatccatgaaggcgaatacggagcccactccgcctcgcgcaccttggttggcaaagcctttcggcaaggtttctattggccgacagctctcaatgatgcggtcgacctggtccggcgatgcagagcgtgtcaattccacgccaagcaaatccatcagccggcccaggccctgcagatcataccactttcatggccatttgctgtctgggggctcgatatcctgggaccgtttaggcgggccccgggcgggttcgagtatctgtatgtcgcgatcgacaagttcactaagtggcccgaggcttatccggtcgtcaaaatcgataagcactccgcacttaaattcattaagggcatcacagcccggtttggagtgcctaactgtatcattacggataacggcacccaattcactagtgaacttttcggcgattactgcgaagacatgggcatcaagctctgcttcgcctcacctgcccaccccagaagcaatggtcaagtggagcgcgccaatgcggaaatcctcagaggccttaaaaccaagaccttcaacatcctcaagaagcatggcgattcgtggatcgaggagttgccagcggtgctctgggcgaatcgaaccacgccaagccgagcaaccggggaaacgcctttcttcctcgtctacggcgcggaagcggttctcccatccgagctcaccctgaggtcccctcgggccaccatgtactgcgaggctgatcaagatcagcttcgtagagatgacctcgactacttggaagagcgaaggcggcgcgcggccctccgagccgcgcgctaccagcagagcctgcggcgctaccatcagcgccacgtccgggcccggtcactctgcgtcgacgacctcgtcctacgccgcgtccaaactcgtgctggattgagcaagctctcaccaatgtgggagggtccgtatcgagtgattggtgtcccccggccgggctccgttcggctggccacgagcgacggcacagagctgcctaacccgtggaacatcgaacaccttcgtcgcttctacccc

SEQ ID NO: 84435 - DNA, 1489 bp, Oryza sativa
  Clone ID: PAT_MRT4530_83672C.1
atggagcggtctggccgagctaaatgggccggccggcccaaggcggcccaaactcgcgcgcgcgcgggagggaggagagagagagccggtggaccgggctcaccacgcgcggtcccggggcggggaagggacgcggtgcacgtgcgcggttcgcggtggacgcggatgcggcgggcccacgcgcagcctcacggctcgcggtggaacgcgcgcacggggagggactgaccggggtcggctcgacccggtctaggctgagctggcgccgacgtggcgcctacgtggctgccacgcgggccggcgggaggtagacgacgacccggccgcgaatggacggcgggcggcggcggcgagcggcgaagcgaaccacggcgatacgggcaatagcgagcacaccgggcggttgcacgtgacaagggggggcgagccaacggctcggattcgccggaggttgctcgacggcggcggattgcggcggcgacaaccggcggcgggagaagagggaaacggcgacgaggtcacgagaggtcgattcccggcggtgagagcatctgcgcggcgtcaggaactcgacgctagcgtcggattggacggaactacgccgagcgaggccggcgacgagcgggtgctacggagctcgggcggcgacggcggcgagcacacggcgagcgacggcaacggaagaggaaggagagggcgcggccggagtcctcttccgcgtccttgctcgtgccggctcctccgacacatgcaacgacgatcggcgacggcgaaacagagggcggcaatggcgcggaggcgaaaatgagggagtttggagggggagggcttgggcttaaatggacggcaatgtcggtttgggagaggggaaccgacattggacggttaaggcgcgagctggcgctcggcgcttgtagccaaagcggcggcaggaggatgacgccggcgaggaggaaaaaggggaaaaggagggggagaaaggggcttgcccctttgccgattcgggaaaaagagggggaggggaacgggagcatcgcggcagagggaggaggggcgcggctccgtcccttggcggcttgcgcgcggaggggcgggggccgggcgatgacgacggcgatgacggcggggcgatttggagcgaggctgacggcggcggcgaccgggcggtcggccaccacggcacgcgcgcgcgggaagcaacgggcggcgtccgcgcgggcgcgcacacgctggctcgcgaggacgagcggctgcgcggctgcaggcgcggcagagcgaggggaaagggagggggcgctcggcgcggcggcttacgcgcacgcgcgcgcggcgtgcgggcgaggctgagcgggggaggagagatgggagagcgcgcgagagagagagagagagagagagagagagagagcgcccggggagagagggggccggggaagaggggaagatgggtcgagcgagattcggcccatcgacctcgggggaggcaaaa

SEQ ID NO: 84436 - DNA, 396 bp, Oryza sativa
  Clone ID: PAT_MRT4530_83673C.1
atgccgaaatccgacacttccctctgccttatgcctcactatacctcccgcttctatttcgtcgcctcctactatgccatagcttgcggcacgatatattacaagatggacgagaacagttctactcgtattgatgattttaaagctctttctggtctgggggatatgccacgtcacgctaaaccaaaggaatatgtagacttgaacagttacctaacctgtggggctagtcggtacagaacaggtaatgggtcctctaatagagaggttgtcgaccttgattcatcggtgcatacaaagaaaaatattccgaccatggtgatatggtatctgccagtgaaagatgtcatgaagcgcttgttctcaaatcctaatgacgatgagttgatgagatag

SEQ ID NO: 84437 - DNA, 5907 bp, Oryza sativa
  Clone ID: PAT_MRT4530_83674C.1
atggccgagccagcaaaggcgcacgacctctccccgagtatgagcggtgacgacggggagccaaacccacgccgtcgagctcgtactccaccgccccctccacgccaaagtcctatgcgggagaaggcgctcgagagggccgaaggatccgcgacttcgacacccacaggaggtggagaagggcggcgagatggggagcgtcgcctcctcgtctacggcgatggcagcacgccccagggcgcgctccaagctgcgggcgcgctcctacgtcacccgcccgtcgcccatgacccggagtctccagcccaacgttggctggacgatgtggccaaattgatcatgactgcacggcagcgcctagatgctggtgggcggtcctccgccaccaaggcctctggtgctgctaccaccggctccgcgtcgtcaagacggagggcgcggcgagcggcagccgctgttcgccattcggccgccactccttcgtcaacgcctccgacccggaaagatctgcgtggggaaccggatgcccgcatcagtatcgagcgccggcgtaatggccgacgtgctccccacgcaacggagggcgcctcctcgtccggagtgtcacctcaccacggacgcggggatcagccctccgtgcccccggttgttggtgtcggctgtagagcctttgtggcgagccttcggaatgtccgttggcccccaaggttccggcccaccatcgccgaaaaatatgacgggagcgtcaaccccgccgagtttctccaggtctacacgaccgggatcgaggccgccgggggtgacgacacggtcatggcgaatttctttcccatggccctgaaaggacaggcgcggggttggctaatgaacttgccacccgcgtctgtccactcttgggaggatttgtgccaacagttcaccatgaacttccaaggcacatatccgcgcccaggtgaggaagcggacttgcacgcagtacagcgaagggatgatgagtcacttcgctcgtacattcagcggttctgtcaagtccgcaacaccataccatgcatccctgcacacgcggtgatttacgcgttcagggggggtgtgcggcacaaccgcatgctcgaaaagatcgcctccaaagagccccagactaccgcggagctttttcagctcgcggaccgagtggctcgtaaggaggaggcatggacctggaacccctccggttccggtgtggcagcttcggccgcccccggatccgccgctcagatagggcggcgtgacaggaggaggaagaagaggtcagcccataccgacgacgacggtcatgtcctcgccgtcgagggcgcttcgcgggccacccgaaaggggaggcctgcgggaggcaaaaagaacgaggccggcgctcccaacagggagcgcccaaccggcaagtggtgcaccgtccacaacacttcccttcacgacctcgcggactgccgtgcagtcaaaagtttggctgagcggacgaggaagtgggaggagaagaggaggcaggagcgccgagagggcaaatccccggcggttccttccggtaatcggcgaagtgaggccaagcagaaggcccccgccgaggacatcgatgacggcgatgatgacctaggtttccaagagcctggggccaccattgcaaccgtcgatgggggagcgtgtgctcacgtttctcgccggagcttcaaggccatgaagcgagagcttctggccgcggcccctactcatgaggcgacgtgtcgggcgcggtggtcggaggttgccctcaccttcgaccagaccgaccacccaccgtgcgttgcccggggagggcagattgcgatggtggtttctcccaccgtttgcaacgtgaagttggggcgtgtcctcattgatgggggagcggccctcaacatcctttcccctgcggcctttgacgccatcaaggccccggggatggtgctccggccgtcccagccaattatcggtgtgacgccggggcacacgtggccgttaggtcacattgacctaccggtcaccttcggtggatccgccaacttccgcacggagcgggtgaacttcgatgtggcggacctcagtctgccctacaacgcggtcctggggaggcccgcgttggtgaagttcatggcggcggtccactacgcctacctacagatgaagatgccgggccccggtggccccatctctgtccatggcgacctcaaagtcgcgctcgcttgtctggagcagcgcgcggaccacctcgccgctgcgtccaagcccgagggtggcgacgagaggcttggcgcctccgcccccgccaccccgaggcagcggatgatcacaggcgacgaggtcccggaagacgcgctcgtctccttcctgcgggcaaacgctgacgtcttcgcatggagaccggcggatatgcccggggtccccagggggttgattgagcaccgtctcgccgtgcggccgggcgcaaggccggtccggcagaaagtgcggcggcaggccccggaacgtcaagccttcatccgcgaggaggtggcacgacttctggaggccggattcatccgtgaggtcatccatccagagtggctggcgaacccggtggtcgttcccaaggcgaacggcaagcttcggatgtgcatcgactacaccgaccttaacaaggcatgtcctaaggatccttaccccctgcctcgcatagatcagattgtcgactccactgcggggtgcgaccttttgtgttttctagatgcatactctggttaccatcagattcgcatggctagggaggatgaggaaaaaactgcgttcattacccccataggaacctattgttatacgacaatgcccttcgggttaaagaatgcaggtcctacttttcaacgtactactcgaatttctttgggtagccaattaggacgtaatgttgaggcttatgtcgatgacttggttgtaaagacgcgcaaccaggaaatgttactctcagatctagcggaaacttttgagagtctccgctccgcccgcataaaactaaaccccgataacaaacttagggatgtgcaatgcgtcaccgattgcatggccgccctaagtcggttcatatcgaggctgggagagaaggcgttacccttatttaagcttctcaaacgctccggaccgtttacctggacggaggaagccgaaaatgccctcacccagttgaaggcgtatctaagctctcccctagttctggtcgccccggagccagacgagcccttgttactctacttagcggcgaccccgcaagtagttagtgcggcattggttgtggagcgcgatgaggacaattctcatttcacgcttccccaccctgtgccgacttggcccgggagagagcagggaggagaggctcccgagccgaacggtggcccaaggcccccgacgaccggagttggccctctacccgcttgtcagacggtgctaggagcccccgacccccaggaaggccccgaggccactgtgggaaggccgcacctatcgccctttgaccccgaggctaaccctgtgccgactcgacccgggagaaagcggggagaagaggcccccgagccgaacggtggcctaaggcccctgacgaccggagttggccctttgcccgcttgtccgacgacgccaggagcctccgacccccaggacggccccgaggccactgtgggaaggccgcccctgtcgtcctccgaccccgaggtcgtcgacacagaagacgagcgcgccccgcgaggccgcttggaagaagagcgccccagggatgtggcccctagcgaaggggatcggccccgccgaaaggtgcagcggcccgtctactttgttagtgaggccctccgggacgccaagacccgataccctcaggcccagaagatgctttacgctattctgatggcctcgaggaaactgcgccattatttccaagcgcatcgggtcacggtggttacgtcttaccccctcggccaaatcttgcataatcgagagggtactggacgggtggtgaaatgggcaatcgaactttctgagttcgatttgcactttgaaccacaccacgctatcaagagccaggctctcgccgattttgtggcagagtggaccccagctcccgagcctgtctcagtccccgaggccagctcgggcccctcacagctgcctcacaccgctcactgggtgatgcagttcgacggctccctgtctcttcagggcgccggtgcgggggtcacgttgacctctccgagcggagacgtcctcagatacttggtccgcctcgactttcgagcgaccaataatatggcagaatacgagggactccttgccggactaagagtggcagctgcactggggatccgccgcctcctgatggacgcctacgtgcgccaagtacggcgtatggagcgccattttgacgggattgagcttcggcatgtgcccagacgggataacatgattgccagcgaactctcacggctcgcgtcctcgcgagcccagaccccaccgggcgcctttgaagaaaggcttgcccagccgtcggcgcgacccgaccccttaggggagatggatgcgcctgaccggcccccgaggcccgtcggagtccaggcctcgggacctgaggggagtgctcccaactcccttagattgattgcttggatcgccgagatccaagcatacctcacagataagactctacccgaggaccgcgaagggagtgaacgcgtccatcgcatctccaaacgctacgtgctggtagaagggaccctctatcggcgcgcggctaatggaatcctcctgaagtgcattcctcgggaacaaggcgttgtgcttcttgccgatatccatgaaggcgaatgcggagcccactccgcctcgcgcaccttggttggtaaagcttttcgccagggtttctattggccgatagctcttaatgatgcggtcgacctggtccggcgatgcagagtgtgtcaattccacgccaagcaaatccatcagccggcccaggccctgcagaccataccactttcgtggccatttgctgtctggggactcgatatcctgggaccgtttaggcgggccccgggcgggtttgagtatctgtatgtcgcgatcgacaggttcactaagtggcccgaggcttatccggtcgtcaagatcgataagcactccgcacttaaattcattaagggcatcacggcccggtttggagtgcctaaccgtattattacggataatggcacccaattcactagtgaactcttcgacgactactgtgaagacatgggcatcaagctctgcttcgcctcacctgcccaccccagaagcaatggccaagtggagtgcgccaatgcggaaatcctcaaaggccttaaaaccaagaccttcaacatactcaagaagcacggcgattcatggatcgaggagttgccagcagtgctctgggcaaaccgaactacaccaagccgagcaaccggggaaacgcctttcttcctcgtctacggcgcggaagcggttctcccatccgagctcaccctgaggtctcctcgggctaccatgtattgcgaggctgatcaagatcagcttcgcagagatgacctcgactacttggaagagcgaaggcggcgcgcggccctccgagccgcgcgctaccagcagagcctgcggcgctaccatcagcgtcacgtccgggcccgatcactctgcgtcgacgacctcgtcctacgccgcgtccaaacgcgtgctggattgagcaagctttcaccaatgtgggagggtccgtatcgagtggtcggcgtcccccggccgggctccatacggctggccacgggcgacggcactgagctgcctaacccgtggaacatcgaacaccttcgtcgcttctacccctga

SEQ ID NO: 84438 - DNA, 750 bp, Oryza sativa
  Clone ID: PAT_MRT4530_83675C.1
atggggcggtccggccgagctaaatgggctggccggcccaagacggcccaaggcggcccagggcgcgcgcgcgcgggagggaggagggagagagccggtggaccgggctcaccacgcgtggtcccgggtgggacccgcttgtcggtgacttggtttaccgtgcggagcgagcacgcggcgcacgcgcgcggacgggggagggacacggtggaacggatgcggcgggcccacgcgcagcctcacggctcgcggtggaacgcgcgcacgggaggggctgaccggggtcggcccgggccaatctcggccgagctggcgccgacgtggtgcctacgtggctgccacgcgggctggcgggaggtagacgacgacgccggccgtaacggacggcggacgacagcggcgagcggcggagcgaaccatggcgttacaggcgaaagcgagtacaccgagtggttgctcaggactaggggagacgagccaacggctcggattcgccggagggagtgcgtcgacggcggattgcggcggcagcaaccggcggggagggaagagggaaaaggcgacgaggtcacgaggggccaatccccggcggtgagagcatctacgcggctacgggaatccgtccctagcgtcggattgggcggcgctacgccgagcgaggccggcgacgagcgggtgctatggagcacgggcggcgacggcggcgagcacatggcgagcggcggcaacggtcggggcggcgccgactag

SEQ ID NO: 84439 - DNA, 2002 bp, Oryza sativa
  Clone ID: PAT_MRT4530_83676C.1
atgaccatattccagacaaccctgacatggatggaggcagctgcactcgtcgcttgcatcttcatatcgttccggcgtttactcaagcaagactacgtcgatccaaaagacaaagttaaggatgaccacaagaacattagaggttccctgaatgtcttctatgggctggcccttgcccatagcatgtcctactacatcttgattgttgcgttccagtttttagtggctccattggtaaggttggtccattctagttacaagcttcatgactggggcatggatgcagtttctgagtatacagccaaaaagctttgggcattcattaggtataatgttagggaagctctcgagatgaatttgatcacctttggaaaggagctggcacgatccgattcaattgatgaccagttgaaaggagttaggattcttgattacatcataagatgggagaagcagcacttatctagagcaggtgttcttgacatctacaagattgagaagtacaaagggagggtgcttacaagtattcgagcttccactgagacactagagagagtggtgaatatgctggggctgaatttgaagagcctagaagaggaagaaactagaggtcatgcagcatccatagtgcttgaacttgctccatacctcctattcgagaatttgcctgcaatgccacagcttatagcctcactactaacgacaggccgagagaggatcaatgaaggcccccatgacataaatagtgtggagctcacttgttatggtgtgaaaattcttgaaaggcttgtagagaatccagataaccgcagatctgtggctgatgccaatgtcgttttgtcgaaaattgtagaactgctaaacttcagagatgattgtaaggtacctgttccagatgaaactgagaatagaagccaagaagagatagttgaggcctcactaaatgtcctgcacaagctagttagcactactggtgagactggcgaagctctacgaagcaccatttccaagaattctgagatcatgagcaacatcagaaaaatcctgtatcagcatgataacaagaacagtagtttatctgttcatgctgtaaaaatcctttcttgcttagcgatgcatgagactgctagagaagtgattggaagttcttgccagatcgtcaggaagcttgtttcgtcggttcttccaaggcctatggatattgttcaagatggcaacaatggatccacagttgctgactcagccgcacaggcattagttctgctaagtactgggagtgaatacaacagggcaaccatccttgataaaattaatctggaagagcttgtcggcatgctctttgatgcttccatggagcaaaggattatgatagcacatctgcttaaacatttgcggacgtattcaggcccaggttatggaaaccaactgaagaaagtaattgacggttctctgccaaagttattggaagaaatcaaagttgcagttcagaagctcgataatcctgaattccctgatggacaaccttctcatgacctgaaagaactgaaagctgaagaaggcaaactactagacagctttattggcctcagctcacagatttgccactccttgcaagccattgattttgataaggctctacagagtgccaaccttacaatggatacgtatgctcaagatgattacgttggggtgttcaagaggtatgaaatggacaaggcgctgaaggaagtggcagagacagcaactgagctcgagagcttcgagctattctgcagtggttctggtgttggcaagcatgatgagcccatctcttctgctgtcagatctactttggcgctgcttgcaggagattcagcataatgataacattgattactgcgtttgaaggtatcaaggatcaaggtatatgctgtttgctgctacgtctcgacttccttactcgtagcaggaccaatttgccgtatgtcaatttaattatctacactagaaagatagcctcctg

SEQ ID NO: 84440 - DNA, 165 bp, Oryza sativa
  Clone ID: PAT_MRT4530_83677C.1
atggatcttggccgtctgttttggatgaatcgatcttggctgttcgtttccattccgacgtttccggagagtccgttttcgcaggagaagaatttgaagtgttccaaggccagcaaggcaagtcacacagatcccaaactaaaacttgataatggtgggttgtga

SEQ ID NO: 84441 - DNA, 5973 bp, Oryza sativa
  Clone ID: PAT_MRT4530_83678C.1
atggccgaacaagcaaaggcgcacaacctctctccgagcattagcggtgatgacggggagccaaacccacgccgtcgagctcgcactccaccgccccctccacgccaaagtcctaggcgggaggaggcgctcgagagggtcgaaggatccgcgacttcgacatccacgggtgatggggaagggcggcgagatggggagcgtcgcctcctcgtctacggtgacggcagcacgccccagggcgcgctccaagctgcgggcgcgctcctacgtcaccctcccattgtccctgacgcggagtctccagcccaacgttggctggacgacgtggccaacttggtcatgatggcacggcagcgcctaggtgctggtgggcggtcctccaccaccaagacctctggcgctgctaccaccggctccgtgtcgtcaaggcggagggcgcggcgagcggcggctgttgctcgccattcggccgccactccttcatcagcgcctccgacccaggaagatcagcgtggggggccagatgcccgcatcgatatcgagcgccggcgtaatggtcggcgagctccccacgcaacggagggcgcctcctcgtccggagtgtcacctcaacacggacgcagggatcagccctccatgcccccggttggtggtgtcggctgtagagcctttgtggcgagccttcggaacgtccgttggcccccaaggttccggcccaccatcgccgaaaaatatgacgggagcgtcaaccccgccgagtttctccaggtctacacgaccgggatcgaggccgccgggggtgacgacagggtcatggcgaatttctttcccatggccctgaagggacaggcacggggttggctaatgaacttgccacccgcgtcggtccactcctgggaggatttgtgccaacagttcaccatgaactttcaaggcacatatccgcgcccaggtgaagaagcggacttacatgcagtccagcgaagggatgatgagtcacttcgctcatacattcagcggttctgtcaagtccgcaacaccataccatgcatccctgcacacgcggtgatctacgcgttcagggggggtgtgcggcacaaccgcatgctcgaaaagatcgcctccaaagagccccagactaccgcggagctttttcagctcgcggaccgagtggctcgtaaggaggaggcatggacctggaacctcttcggttccggtgtggcagcttcgaccgcccccggatccgctgctcagacagggcggcgtgacaggaggaggaagaagaggtcagcccataccgacgacgagggtcatgtcctcgccgtcgagggcgcttcgcgggccacccgaaaggggaggcctgcgggcgacaaaaagaacgaggccggcgctcccagtagggagcgcccaaccggcaagtggtgcaccgtccacaacacttcccttcacgacctcgcggactgccgtgcagtcaaaagtttggctgagcggacgaggaagtgggaggaggagaggaggcaggagcgccgagagggcaagtccccggcggttccttccggcaatcggcgaagtgaggccaagcagaaggcccccgccgaggacatcgatgacggcgatgatgacctaggtttccaagagcctggggccaccattgccactgtcgatgggggagcgtgtgctcacgtttctcgccggagcctcaaggccatgaagcgagagcttctggccgcggcccctactcttgaggcgacgcgccgggcgcggtggtcggaggttgccctcaccttcgaccagaccgaccaccctccgtgcgttgcccggggaggacagatcgcaatggtggtttcccccaccgtttgcaacgtgaagctggggcgtgtcctcattgatggaggagcagccctcaacatcctttcccccgcagcctttgacgccatcaaggccccagggatggtgctccgaccgtcccagccgattatcggtgtgacgccggggcacacttggccgctaggtcatatcgacctcccggtcaccttcggtggatccgccaacttccgcacggagcgggtgaacttttatgtggcggacctcagtctgccctacaacgcggtcttggggaggcccgcgttggtgaagttcatggcggcggtccactacgcctacctccagatgaagatgccaggccccggtggccccatctctgtccatggcgacctcaaagtcgcgcttgcttgtatggagcagcgcgcggaccacctcgctgccgcgtccaagcccgagggtggcgacgagaggcttggcacatccgcccccgccgccccgaggcagcggatagtcacatgcgacgaggtcccggaagacgcgctcgtctctttcctgcgggcaaacgctgacgtcttcgcatggagaccggcggatatgcccggggtccccagggaggtgattgagcaccgtctcgccgtgcggccgggcgcaaggccggtccgacagaaagtgcggcgccaggccccggaacgtcaagccttcatccgcgaggaggtggcgcgacttctggaggccggattcatccgcgaggtcatccatccggagtggctggcgaacccggtggtcattcccaaggcgaacggcaagcttcggatgtgcatcgactacaccgaccttaacaaggcatgtcctaaggacccttaccccctgcctcgcatagatcagattgtcgactccacagcggggtgcgaccttttgtgttttctagatgcatactctggttaccatcagattcgcatggctagggaggatgaggaaaaaactgcattcattacccccataggaacttattgttatacgacaatgcccttcgggttaaagaatgccggtcctacttttcaacatactactcgaatttctttgggtagccaaataggacgtaatgttgaggcttatgtcgatgacttggttgtaaagacgcgcaaccaagagaccttactctcggatctagcggaaacttttgagaatctccgctccgcccgcataaaactgaaccccgataacaagcttagggatgtgcaatgcgtcaccggttgcatggccgccctaagtcggttcatatcgaggctgggagagaaggcgctacccttatttaagctcctcaaacgctccgggccgtttacttggacggaggaagctgaacgtgccctcactctgttgaaggcgtatctcagctctcccccggttctagtcgccccggagccaaatgaacccttactactctacttagcggcgaccccgcaagtggttagtgcggcgttggttgtggagcgcgatgaggacaatcctcattccgcgcacccccaccctgtgctggcttggcccgggagagagcagggaggagaggcccccgagccgaacggtggcccaaggcccccgacgaccggagcaggccctctgcccgcttgtcagacggtgccaggtgcccccgacccccaggatggcccgagggccactgcgggaaggccgcacctatcgccctctgaccccgaggctaaccctgtgccaactcgacccgggagagagcagggagaagaggcccccgagccgaacggtggcctaaggcccctgacgaccggagttggccctttgcccgcttgtccgacgacgccaggagcccccgacccccaggacggccccgaggccactgtgggaaggccgcccctgtcgtccttcgaccctgaggtcgtcggcacagaagacgagtgcaccccgcgaggccgcttggacaaagagcgccccagggatatggcccctagcgaagaggatcggccccaccgaaaggtgcagcggcccgtctattttgttagtgaggccctccgggatgcgaagacccgataccctcaggcccagaaaatgctttacgctattctgatggcttcaaggaagctacgccattatttccaggcgcatcgggtcacggtggttacgtcttaccccctcggccaaatcttgcataatcgagagggtacaggacgggtggtgaaatgggcaattgaactttctgagttcgatttgcactttgaaccacgccacgctatcaagagccaggccctcgccgattttgtggcagagtggaccccggctcccgagcctgtctcagtccccgaggccagctcgggcccctcgcagccgcctcacaccgcccactgggtgatgcagttcgacggctccctatctcttcagggcgccggtgcgggggtcacgttgacctcgccgagcggagacgtcctcagatatttggttcgccttgactttcgggcgaccaataatatggcagagtacgagggactccttgcgggactcagggtggcagctggactggggatccgtcgcctcctggtgttaggcgactcccagctggtcgttaaccaggtctgtaaggagtaccggtgctctgacccgcagatggacgcttacgtgcgccaagtacggcgtatggagcgccattttgacgggatagagcttcggcacgtgcccagacgggataacacggttgccgacgaactctcgcggctcgcttcctcgcgagcccagaccccaccgggcgcctttgaagaaaggcttgcccagccgtcagcgcgacccgaccccttaggggagacggacgcgcctgacaggcccccgaggcccgtcggagtccaggcctcgggacccgaggggagcgctcccagctctcttagattgattgcttggatcgctgagatccaagcatacctcacagataagactctacccgaggaccgcgaagggagtgaacgcgtccaacgcatttccaaacgctacgtgctggtagaagggaccctctataggcgcgcggctaacggaatcctcctgaagtgcattcctcgggaacaaggcgtcgagcttcttgccgatatccatgaaggcgaatacggagcccactccgcctcgcgcaccttggttggcaaagcctttcggcaaggtttctattggccgacagctctcaatgatgcggtcgacctggtccggcgatgcagagcgtgtcaattccacgccaagcaaatccatcagccggcccaggccctgcagatcataccactttcatggccatttgctgtctgggggctcgatatcctgggaccgtttaggcgggccccgggcgggttcgagtatctgtatgtcgcgatcgacaagttcactaagtggcccgaggcttatccggtcgtcaaaatcgataagcactccgcacttaaattcattaagggcatcacagcccggtttggagtgcctaactgtatcattacggataacggcacccaattcactagtgaacttttcggcgattactgcgaagacatgggcatcaagctctgcttcgcctcacctgcccaccccagaagcaatggtcaagtggagcgcgccaatgcggaaatcctcagaggccttaaaaccaagaccttcaacatcctcaagaagcatggcgattcgtggatcgaggagttgccagcggtgctctgggcgaatcgaaccacgccaagccgagcaaccggggaaacgcctttcttcctcgtctacggcgcggaagcggttctcccatccgagctcaccctgaggtcccctcgggccaccatgtactgcgaggctgatcaagatcagcttcgtagagatgacctcgactacttggaagagcgaaggcggcgcgcggccctccgagccgcgcgctaccagcagagcctgcggcgctaccatcagcgccacgtccgggcccggtcactctgcgtcgacgacctcgtcctacgccgcgtccaaactcgtgctggattgagcaagctctcaccaatgtgggagggtccgtatcgagtgattggtgtcccccggccgggctccgttcggctggccacgagcgacggcacagagctgcctaacccgtggaacatcgaacaccttcgtcgcttctacccctaa

SEQ ID NO: 84442 - DNA, 609 bp, Oryza sativa
  Clone ID: PAT_MRT4530_83679C.1
atgacgccggcggggaagaggaaagggaaaaagagggagagaaagggggctcgcctccttgccgctttggggaaaaggaggaggggagcgggggcgtcgcggcagagggaggaggggctctgcctccgtcccttggcggcttgcgctcggagtggcggggccgaggcgatgacgacggcgatgacggtggggcggtttggagcggagcggcgacacgggcgacaggcgtgggcaggcgctgacgacggcggcgaccaggcggcggcagggcagcgggaccgggtgacgcggacggcgcagacggcgcggcacgggcggcaaccccgcgggcgcgcgcgcgaactacggcgcgcgggggccggcttcgcgggcggggagctcgccagggatggggagaaggagagcgaggaggggaggaggggcgctcggcgcgccgacggcccctacgcaagtaacagcacgatgctcatagagcacgtgttggtgtccaaagcccaaacaacccgtgggttcgtaaattggttatttgaggaggacaagaacccgaacccgaacccgacgcggttatttcgcttcgacgtgacaccagtggtatctcgcgccgtatag

SEQ ID NO: 84443 - DNA, 355 bp, Oryza sativa
  Clone ID: PAT_MRT4530_8367C.1
aacacaaagggggggcccaagggacattgggtttttggaaaaattattttggtagcaaaactgggggacaaaaaaaaatggggggccggggcttattaggggtcaagaaggaaaaaaaagggggggccaggggaaggcttgctcactttgggcggggggaacaggacacagggactagaccccaacaaggaaaaagggaaaccggggaaaaaaaaaaaaaggaaaaactaaaaaccgggcccagttcgggggcccctggtctccaccacctttttttacagggccctgcgggtgggtcaaaaaacaagggacccaaaaaaaatggtccccccccaaaccaaaatttttttttttt

SEQ ID NO: 84444 - DNA, 471 bp, Oryza sativa
  Clone ID: PAT_MRT4530_83680C.1
cgataatcctgaattccctgatggacaaccttctcatgacctgaaagaactgaaagctgaagaaggcaaactactagacagctttattggcctcagctcacagatttgccactccttgcaagccattgattttgataaggctctacagagtgccaaccttacaatggatacgtatgctcaagatggtactgagcgtgtgcaaatctcctaccaccgatttcccggggataagaagagtaacactcagtcagatgaaatggctgataaaaaataacgaagattacgttggggtgttcaagaggtatgaaatggacaaggcgctgaaggaagtggcagagacagcaactgagctcgagagcttcgagctattctgcagtggttctgggttggcaagcatgatgagcccatctcttctgctgtcagaactactttggcgctgcttgcaggagattcagcataatgataacattg

SEQ ID NO: 84445 - DNA, 381 bp, Oryza sativa
  Clone ID: PAT_MRT4530_83681C.1
atggcgaagaggggagggactcgccggcgtaggcgaggagggcagggtggcggcgaccacgacgccagcgacgaagccactgccacgtccatccttgcgtcgcgccctgacgagccgtcgccactggatctggcgagcttggccaagcactcacgccgtcgtcacgactcgccgccgcaccccgatgagccaccaccaccggatttggcgagcttggccacgccgtcgtcgcgactcgctgcagccgcgcgcccgcgcgtcgtgcctcgacgagacaccgccactggatctggcgacccttgccacaccattgtcgcgactcgttgccatcgcgccatgccccaactcgccgcaatcgtcgcccacagccagatccggtga

SEQ ID NO: 84446 - DNA, 141 bp, Oryza sativa
  Clone ID: PAT_MRT4530_83682C.1
gggtgggtggcctccgatttagggcgtgcagcgagcagctttccccacagcaagggcacggcttgcacaacacgatgcgtggcagacaacctccccatggtagctcgatgtgctcgaggccctgctcgtattccactctag

SEQ ID NO: 84447 - DNA, 294 bp, Oryza sativa
  Clone ID: PAT_MRT4530_83683C.1
atggcgatggttggacgggctcgggatgatctagggagaaaaataagggggattagagagggattgggaaaagaggtggatataagaactggatatgggcagttcatttccaaccaatatcagggaaggatccagttttccttcaccgtgcaaggatggcggctcgtctgccccactcatcagctagtcgatctatgtcgacggccaaggatcttgggcggggctagcttttccttcttgcacatggatgatgaccccgtcttccccatgcatcatccactagatctcagttga

SEQ ID NO: 84448 - DNA, 277 bp, Oryza sativa
  Clone ID: PAT_MRT4530_83684C.1
aggcgtccggtcagtcttggaccgagctgagccgccatggctacgactcggccgtgcgcgcaacgacccgcacctgccgggggatgaagcggcgcgggtggaggccaaggtccggggctacttcgacagcatggccaggaggcgcccttccaagccgccgcggatcgacccggcggacgccggggagggtggggcggaggccgacgccgacgccgacctgccgagagcttcggatgctccgtgacctctaggccataccccagaagttgatgctgga

SEQ ID NO: 84449 - DNA, 2674 bp, Oryza sativa
  Clone ID: PAT_MRT4530_83685C.1
ttttttttttttttttttttttaagatcgaccaagaacttttttttggcatcattttccactcatcatcacacacacctactattagctgcaatgatgcactgtaataatttgcaaactgaacaacaatattcagtcaaacttcacacccacagcaatacatacgctctctctctctccaatccaaattccaaattcaaaagatcttcaaattctaaattcgaatgtatcgcaacaacacaaaatggacctcgcactcgccgccgccgccgccgtcttcacctcctcgccggcaagctgctcgacggctgcctccccttggacctgctcctcccgctcccgctcccctcgccgcgctgccccagcctccgcgacgccgccgcagcggacgaccgcttccgcgcgctacgggagcctcccccggcgccgccggcctcgagcgcggcgcgcgacacggcgccgtcggcgggggcggcgccgcggggcttgacgggctgcttgttgaggtaggcgaggtgggggaggaggcccgtgacggccctgcggagggcgtcgtcaccgacgttggcctggacggggttgccgacgaggttgagggcgcggagggagtggtagttggccaccagctggcccagcgccctcgccgtggtgaccttgttgaaccccaggtccagcaccgccagcttcagcagccggtgcagcccctccacgtcgctgatcttgttccccgccaggtacagctccctcagcgccgtgcaccccgacagcccgtggccgatgcgcgagatccggttgtagctgaggttgagaacgcgcagcttggtcagctcccggagcccctcgatgttggcgatcttgttccgcgacagatcgagcgagtgaaggcccttgggcagcgatcccggcgagatatgaacgatgaagttgccagagaggttgatggcgcggaggctggagaacggcgcgatcatcggcaccaccttgaggcccatgccggagatgtgcgccaccgacgagaatgcgttgagcgactggatgatggtgttggcctgggcgacctcgtcggcggccgtggaacgcttcgacttgccgtgccccttcccggacgactcgccgatctccagggcgcgcggcgcccgcgccacgcagtcaccgtgctccatggcgtgctcgccgtcgtcgtcgtcggcgtcgccgtggtaatggtggtggtggtggtggtcgtcgtcgtcttcctcggcgatgcggaacgtgtcgttgtcgatgctgttcacccacgcgctgatgcggtcgtggagggagttgtcggcggagaaggcgacccactggttggggatcggcggcgagtcgtcgaccatcaccttcttgttcttgcggtcggcggcggcggtggccgggccttcctccagcgtgtcggaggtgtagccgccgccgccgccgtggtggcccgcgggtgtgcacgcggcggccgcggggcgcgccgccggcgacgggcggtgcaggttgcggtggctccagaggaagagccgccaccacagcttgcggctccgcgacgggagcacctggctcgacgaacgcttcttcagcatcacgcggtcggcggtgcgcgacgtcctcaccgacgccgggctcgcctccgcctgcggcgccgcgccgcgcggggttgtctccagggagatgccgccgcctccgccgccgggcaggttcccgaggtcgccgtaggatcttgaccgcgccggcgccgcctccgccgccgcgtcgtgcgtgcccggccgcttcgtctcgatgttggagcacgaccgcttcagcttcggcgacgcgtcggccaccaccacctccttcccgctcgcgatcaccgcgtccggcgaggcgccggcggggacgccatgtccgtcgggcttctcgtgtgcgtggaactcgaactcgaagtcagacgacatgctgcccctcttcgccaacgccatgtcgccgccatgatcgtcgccgccgccgcctcctttggtcgccgccaaggcggtgacaaccgtgtcgtcgacgacgaccttgacatcgcacggcgcgacctttctgtcgccgcattcggcggccggcgagtcgatgaactccaccggcttcaccttgggacaatccccactagccttcttggcatcagcaaccactcgtttcttcctcctgccggcgagcagacccgggatgcacctcatcctggtcatcttgacctactcaaaactcgcaaatcccttcgaattttcttctgttcagacgaattcgttccaaatttcagtaagtttctgagaccttttagccgttgtctacgggagagactctccggagcagcgacggcgagacgaggaggaagacggcggaggagatcgcatgccccacagcaccacacacctcactcacggcgcgaggcggcggcggcgccacggggaaggccagagtgaccggagattagccggagacgccgccgcggagccgtcttggcaaaccttacccttcctctccccaggcagcagcaaaccgaactcagaatcagatgcttctccggtgctggacttatactcttctgttcgagtaaagatcttgattaggtcgctgagcactgatgcgaatgggatgaagagaagcagaggagaggagtgtccctcgtgccgattcctgcagcccgggga

SEQ ID NO: 84450 - DNA, 2073 bp, Oryza sativa
  Clone ID: PAT_MRT4530_83686C.1
tcttctttctttcaggtcagataacttatcaaatggcattgatacttccataggatcacagaagatgttgcagatccacatcttgatttagattttagaccctagtggtatacacataacattgggccacggccacaagtggattttacaagcacattttactgggatctcatctcattgtagcctctccttcctgagcctctccagctccttcaccatctgccagtgctccatggagagactcttctcaccaaagcttgcagccattatctgtgccatcgttagccatctgctaagttcagaacaacccaagctcctatcatcacgcatggcattgaccatttcatcttgaatcatctggtatgtatcagtttcagttgactgaggaagagacctaactgtggccaaataccatctccaactttcaagttcctcggagcttgcatttaccgcaggaacagatgatgggcggaaaggtactatcaagtcagaaggtaggatatttgattttccctcggagagaattagtagctgcacatcagttgccatttccaacttgtagaactcaaaatcatactcaaccttctgtgactccatcaagttcttaagcagcatagtattctcgacacctttggatgtcaatgatccagactgcaagagagtctcatcaaaggtcaggtgagtaccctgaggtaactgtaaaactcctgtaaccaatcttcctgattggttgtcctttctaggctgaagtgtggctgtgttgagatactcaattgacagaggaataacttgtgaatatggtagtagcctctggaacaaattatttagctggtttccaaatatagaaacactctctctgttaaagccagtgaaattcaaggagagcctaccaacggtaaccacatccaccttattacgaagtctggatagaagatgcaacagtaaacattgagctgccagttcatctttccctaataccagagtaagatgtgagagcaaagattgccgaattccccttagcaggattggtgatggctcaaccgcaggaggccttggtagaaaatcatgagcagataagtttctccataccaagcagtgaagacggggaaccttactgggaggcagctgagcggttacatcttccataaggtcaaacattatatcatccgaattatcgttaggagcagcaagttcagggtcaaatgtatatacacctatgaactcagaaacatcgttcagtttcacctgactttcaggcatatcatacaccttcactaggcaggaaaaggagcttccaggaatatgatgatctcccccattcatctctgggacatgatgttcttcattcattgacatttctactgaactatttgagatcttgacaccatcatccttctgaggaaaagtaaggcagtttaaatcagattcccagtcagctaacgtcttcttgctggatgaagaagtctctccactaccactttctgaaacatccatggcgtcattatctgcacccctcttccttttctccctttgttcagatgtgaagcagcttgctattctgcgcaagtcagggccaggggacgactcgcgtgtccaagaattttgtccaggcacaggcacacagtggaaaagatggcgctcccagagatgtgaatcacaagggtgtggcattgagaacggcgaggaatcggagaatttgtttgtcctccaagtggagccatccttgaaagcaccaacatagaactcgttcccgagcatgtcctgaaccatcccccggaaccgaacaagggtattcggcttgatcaatccaagatttgattcatccaacaccggaaccttgtcaagcccgccttgctcgaagagaaaggagcggaacacctcggtggcgccccagtctttcccccggaacgccgccaccggctcgtgcccaccggactccgccgccgccctctcgaaggtggagcgcaccgcccccagggggttcccgacgaggtcgtactgcggccccaccatcctccctctccctctcctcgctctctctctctctcgttggggagattggcctcgtgccga

SEQ ID NO: 84451 - DNA, 1554 bp, Oryza sativa
  Clone ID: PAT_MRT4530_83687C.1
atgaccccaacactattagatatcatcatgatcactggtctagatatcacttcatcggctaacttgtccagcctaaacactcaactcacccatgagttcaaaaccagaagcataggtggttggtcaggttatgttgccaagaacatgggaactgggccggttaccccaagagaacacacagcttttcttatgatgtggctggaaaagttcttattctgtggtccaagctgtggtccgaccgcaaactggcaatgggttgctgaaaatctagtagaaaagaagcattttccccttggcaagtatctgctaggctatttgtatcagaccctcaatactgcaattgacaaaatagcctctggaaaaacaatcggcacagggggtccatggtggctactccaaatttggctgaatctgcataccagaaaagtggccaatcggccagcactagccgatgtagaattcccaagattcgagccgatcatcagggacgatggagaaacaagcaccacatgccgatgtatgtccttcgaagaagcagcatcggttagcgcaatgtccaagctatcggctgaacctttcagggaatggttcaataatttctatgatgggttccccaagaatgataggatctggtttgcatatgaaggatctgctagctttgaactaccagaagtattctcaacagctatcagccccttcatcatccatgtcggcatccatcaaggcaagaatatccagatgacttacgaattctatcatccaacaagcgctagcaaaagtggtgtggaaattgaatatgcactagggctcctacctaatggtggtggactaacacctccagtcatcggctataatgcccccaagacctccacattgctgcacggcctgtctcgtatgccgattgctcgtgctgctggaaggaaaagagcaaaatcagctgcggcaccatcggctgcaaagaaaaagtctaagaagcaaaagactgctgccgatgatctgccagccattgatccagatgtagcagatttcctggaggatgaagcaatgtccgaagagaaaaagaagatagcttccaagaaaccacaaggagcagctgcaccggttaatttccctgatcctatcaattctctttttcagttttcaaccgatgctaacttgtactcacgttttcagccccctcgacattcaactcctgtctttgaatcaagtgaaagtactccatcggttataggaagtcatcatgtagaagaagaagaagaagaagtagcaccaactcctgctgtccctcgtgaaaggagagatcttgaagcaaccatccaagccaacagaacgtccatcaatgaagaaaaagctaagctggatgagttggaggctggtccaagtgcaactcaaaccaacattgatcagctaaataaatggaagatagaactcatagctggactagagcaatgcaatgcacaacttgctcttgaacaggaaaagcttgccgatctgccaaaagccatcgaagaccaaaaaatccaagttgaaagcatctgtgaagcatctaactga

SEQ ID NO: 84452 - DNA, 364 bp, Oryza sativa
  Clone ID: PAT_MRT4530_83688C.1
cggccccgaggcccaacggagttcgttaagcaagaaaagggaaagggccctcacaaagcccaacccgcttctccgcggggggttgggccgatttcataaaatcaggtggcccggacaggtttccccactggaaaagcggccagtgcttgtggagtacaaaagcaaggaccctgatcatgtagagtgggcaaaagctctaaaagagctcttcgtgcctagtttgcgtgactatgtgaagacattctaccctttgggcccttgtattacaattcactggccgtcgttttacaacgtcgtgactgggaaaaccctggcgttacccaacttaatcgccttgcagcacatcccccttttgccagctggc

SEQ ID NO: 84453 - DNA, 2793 bp, Oryza sativa
  Clone ID: PAT_MRT4530_83689C.1
atgctcatgcgtcatccgaccatcgccgccgccgccgcctcctccttcctcctcctcatgatcgccgccgatggccaggcggcgacgccgccaccacctgcagccatcggcaactactgcgaaccgcgcgagagagacgcgctgctggcgttcaaggaaggcgtcaccgacgaccctgcaggcctccacgcctcatggcgacgaggtggcggtcagctgcaggaggattgctgccaatggcgaggcgtccggtgcagcaacctcaccggccatgtcgtcaagctccgcctccgcaacgaccacgccggaacagcgctggccggcgagataggccagtctctgatctcgctggagcatctcaggtaccttgatctcagcatgaacaaccttgcaggttccactggacatgtccctgagttcttgggctctttcaaaagcctgagatatctgaatctatctgggatagtgttctccggcatggtgccgcctcagctcggtaacctttcgaacttgcgatatctcgatctttctgggataagattatctggcatggtttcatttctgtacattaatgatggttcatggttaggacacttgtccaatttgcaatatctgaaccttgatggggtaaaccttagcacagtagttgattggtcacatgttctgaacatgatcccttctctgaagattgttagcctttcttcttgctcacttcagagtgcaaaccagtctctcccagagcttagtttcaaggaactcgagaagcttgatctttccaacaatgactttaaccacccagctgaatctagttggatttggaacttgacatctctcaagtatctcaatcttagctcgactagtttgtacggtgatattccgcgagcgctaggaaacatgctgtccctccaagttcttgatttctcatttgatgatcataaagatagcatgcgcatgagcgtgtcgaaaaatggcaatatgggcaccatgaaagcaaacttgaagaatctatgcaatttggaagttctagaccttgattgtaggctagaatatggaaacattacggatatatttcagagtttaccacagtgttcacccagcaaactgaaggaagttcatttggctggcaacactttaaccgggatgctaccaaattggattggaaggctaacaagcttagtcactcttgacctcttcaataatagcattactggacaggtgccttctgaaataggtatgcaaacaaatctgaggaatttgtacctacatttcaataacatgaatggtaccatcacagagaagcactttgcgcacctgacgagcttgaagtcgatatatttgtgttacaatcatttgaacattgtgatggatcctcaatggttacctcccttcaaattagagaagtcttactttgcatctattacgatgggtccctcattttctagatggcttcaatcacaggttgatattgtcgcacttgctatgaatgatgctggcataaatgacacattcccagactggttctctacaacattttcaaaggccaagttgttggaatttcccggtaatcaaatcagtggtggattgccaacaaatatggaaaacatgtcattggaaaaattatatctgaaatcgaaccaaatagcgggtctgattcctcgcatgccgagaaatctcactatattagatttatcaaacaactcattgtcaggacctctgccattaaatattggatctccaaaactagctgagttgaatctgttatccaaccgtatcaccgggaatgttccacaatctatttgtgaactgcagaatttacatggcctagacttatccaacaatctgcttcatggagagtttcctcaatgttctgggatgagcatgatgtcgttttttcgtctgagtaacaatagcttctctggcaacttcccatcttttcttcagggttggacagagttaagcttccttgatctatcatggaataaattctctgggaatttgcctacatggattggaaatttcagcaagctagaaattctgcggcttaagcataacatgttctctggaaatattcctgccagcatcaccaaacttggaaatctttctcatttggatcttgctagcaatagtatatcaggtcccctgcctcagtatttggcaaatttgacaggaatggttccgaagcaatattatacgaacgagcatgaagagagactatctggatgtgactacaaatctcttgtgaccatgaaggggctggaacttgagtatgatgagaaaatggacatgcagtcattggaatcgctcgacctctcgaagaacatgctctatggtgaaatcccacaaagtttgtctgatttatcgtctttaagttttctgaacctatcttataacaatctcatgggaagaataccattagggacacaacttggcaccctctatgaccaaaaccatcatctgtatgatggcaatgatggtctttgtgggcctcctctcccaaaaagctgttataaaagcgatgcatcagagcaaggtcacctgatgagaagtaaacaaggttttgacatagggccattttccattggagttgcaatgggatttatggcaggtctctggattgtcttctatgcccttttgttcatgaaaacttggagggttgcttacttctgtctcttggacaaggtgtatgacgagctacagtacctgaagaaaaatgaaaacagagcatgcagagctgggacagaggttttgcgctgcaaacttcatcagcttttctgggcttatattctcccctaa

SEQ ID NO: 84454 - DNA, 1050 bp, Oryza sativa
  Clone ID: PAT_MRT4530_8368C.1
atggggaatagagaagttcttgtggttgcattcttcataagatccatatatggaggtgtgcagatagtaaccaaaatcgcattcaatagaggcatgagcacaactgtttttgttttctacaggcatgcaattgctattttattcctagttccagttgcttttgtggtagaaaggaaaactgctccaccgttgtcatacaaaatcttgctaaaattatttgtgcatgcattatatggaattgctgggtcagtaaacatatatggccttggtcttagttattcttcagcaacatcatcatctgcaatatctaaccttctaccagtgttggccttcttcttggcagttcttatggggatggagtctttaaacttgaagaggatccatgggattgcaaaagtttttggtgtactcttctccattgttggtgttatcatactcgcattttaccagggacctgaattgaagtctctgaaccttcagcatctttctagtcgaaatgtcgtccctactgggagtactgcctatactacaaaggcatggacatcagggatctttttaacagttttatctacaacatcttgggctctttggacagttcttcagatagtacttcctcagggccttatgttggaggtgtatccctctaagctactcaacacaactatccagatggtctttgcaaccattcagtgtttcttcattgctctagcagtcgaaagagatttttcgcggtggaagctgggactagatgcaggtcttatcgccgtgatttattcaggtgcacttgtgtctggacttgcatactacatgcaagtatgggtgattgacaagagtggaccggttttcttggcaatgacaatgcccataactctgattgtcacaatagtgctctcctcatttgtcttgggagaagcagtcaccctgggaagcataataagtggagtggtgatggttggcggtctctactgcgttctttgggccaagaaagctgaacaagcaattgccagcaaggaagaagctacactcccagttcaggctacacaagtctag

SEQ ID NO: 84455 - DNA, 768 bp, Oryza sativa
  Clone ID: PAT_MRT4530_83690C.1
atggcaggcggcaagctagcaggcaagcctgccggggcgcaggcgcagcgcaagcagactagcagaggcaggggcagccgggcagggactgcggcagccgggcagaaccgagataatggtatgactggtcgtaacgccggactaaccgcaccctatgccggtcagaccgtgcccatcatggccggtcagaccatgcccaccatagccggtcagaccgtaccctatcctggccagatcaggcctcctatagccggtctgacagcaccactgacctccggacagaccgggccatgggccgaatggaagcaatcacctagggcagtaccaagtcattctaactcaagacaagaccgtttcccacaaaagaatcggtccggtggagcaaaggtgaaaaaggtgaagaaggtgtgggtgaggaaagaagccaaagcttcggaggtcgttgccgtcaaggaggagtctcaagatgttcatgtacctactggagatgtggtggaaaccatgcaagcaaaggagatcgaagccgacaccgtgattgtcaaaagcggaggtctgatggaggcgtctggccagtctgaccgccagcctgtggccggtctgaccgccttcctggccggtttaaccgctagactacggccggagcttccacttcgaccaaaaatatcaagaatcattgcttggctcctagaaaacaaccacagccgaagtggataccttccggcttatctcgctctcaaaagaggaggctacagcgtcttcgggccatag

SEQ ID NO: 84456 - DNA, 636 bp, Oryza sativa
  Clone ID: PAT_MRT4530_83691C.1
atgccgtattaccaagagtggaaggaatcacctaggtcagtgccaaatcattcatctaactcaagacaagaccgtttcccacaaaagaatcggtctggtggatcaaaggtgaagaaggtgaagaaggtgtgggtgaggaaagaagccaaagctccggaggtcgttgctatcaatgaggaatctcaagatgttcatgtacctactggagatgcggtggaaaccacgcaggcaaaggagatcgaagccgacgccgtgactgccaacattgaaggtctaatcgagacaactggtcggtttaaccgccagactacggccggtctgactgaccctcctagccggtctgaccgacggcttgtggccggtctgaccgggcccagaggccggtatgaccggggggcattggagaagagtgggaaaattaagagcaacataggagcttccacttcgaccaaaaatatgaagaatcattgcttagctcctggaaaacaaccacagctgaagtggataccttctggcttatctcgctctcaaaagaggaggctacaacgtcttcgagccataggtcaaaaagaaaaggaggccggagatgtagagaacaaaacaagtaataatttagagcctcgaatagcaacctag

SEQ ID NO: 84457 - DNA, 178 bp, Oryza sativa
  Clone ID: PAT_MRT4530_83692C.1
ggaaagtgggtggttcttccaggggagaatttctacggtttggttaatgtgtactgaataatgttcatttttttcgtcagagtttctctgtctggtggttcttttattatggcagtaacaaataaataaaagtttgggcactaaagcccagcatttgtggtttaaaaaaaaaaaaaaa

SEQ ID NO: 84458 - DNA, 616 bp, Oryza sativa
  Clone ID: PAT_MRT4530_83693C.1
ataacagaaaatagattccttggcaaggcgttgccaaaagacgaatcatagggtgcccaaatcgccatgctgatcagtggcgacgagacgccgagttcttccacaacgactagattcgtccaatgcggctcctgctgctcggcgacgtcggcgagcctccgtggatgcatgaggcgaagatgggggatgagcacgacggctgcctccggtgccggtccaatgtcctcggtgccgcccgccgctcgtctcgccctccctactgcgtgcgccgcacgcggcacccgccgcgccctccccaaggaggatcggactcgtcacccgccgtcgttggcacggagctcgagagggggagcagcagcagtgccaccgctttcgtcgcctcatcgccgttgacgcggagctcatcctcggccctgcctagcctcctccaacaccctcctcggcgctgcccgccgcccatcgcgccatccacacgctcttccgccgctgaccgcacgtccgttccccacgcgccgccgccaccgcccactgctagtccacgcacgcctgagagagagagagagagcgagagagagagtagaggggaggaggagtaatggcatgtgggtcccaccat

SEQ ID NO: 84459 - DNA, 1454 bp, Oryza sativa
  Clone ID: PAT_MRT4530_83694C.1
ttttgatgtcatcgtacgtcgtcgtcgccgcagcgttgctcgtgttcgtcgtcgtcgtcgtcgccgcgatcaagaatcttggaaaggggaagcttccgccgtcgccgccgtcgcttccgttcgtcggccacctccacctcgtcggggagctcccgcaccgctcgttggacgccctgcaccgccgctacggcagcgacgggggcctcatgttcctccgcctgggccgtgcgggggcgctggtcgtgtccacggcggccgccgccgccgacctgtacaggggccacgacctcgccttcgcctcccggccgccgtcgcacagcgccgagaggctcttctacggcgggcgcaacataagctggccgtggcgcacctcctctcccctcgccgcgcccgcccgcgccgccgaggccgccgcgctcgtcgcccgcgctcgccgcgccgcggaggcggcgcgggccgtccagctcagggagctcctgtacgcctacacgaacggggtcatcacccgcgtggcggccggcggcagcggcgcgacggcggagaggttcaggaagatgatggcggacacgtcggagctgctcgccgggttccagtgggtggaccggctgccggaggcggcggggtgggcggcgaggaagctgacgggcctgaacaagaagctagacgacatggccgacgagtcggacaggttcctgggcgagatcctggcggcgcacgacgacgagaaggcggagggcgaggaggaggacttcgtcgacgtgctcctgcgactgaggagacaaggcgccgccgccgccggcggcctcgagctcgcggaggataacgtcaaggctattatcaaggacattatgggtgcagctaccgatacctcgttcgtgaccctagaatggatcatgacggagctgattcgaaacacgcaggtgatgtccaagctacaaaacgagatcatacaagtcactggctccaaaccaaccgtcacagaagaggacctaaccaaattggactacctaaaagcagtcatcaaggaggtactccggctacacccaccagcgccgcttctcatcccacaccactcaacgatgccgaccaccatccaaggctaccacattccggccaagaccatcgccttcatcaacgtgtgggcgatcgggagggaccctgcggcgtgggacacaccggatgagtttagaccagagcggtttatgggcagtgcagtggatttcaggggcaacgactataagttcataccatttggggctggccggaggttgtgccctggcatcatcttagcattgccaggattggagatggtgatcgctagcttgttgtaccacttcgattgggagctccctgatggcatggacgtgcaagatctagatatggccgaggcaccggggcttactactcctccgatgaacccggtttggctcatccctagatgcagaacaatttga

SEQ ID NO: 84460 - DNA, 374 bp, Oryza sativa
  Clone ID: PAT_MRT4530_83695C.1
agctggcctcagcacaaatcctactcccacagattaccgcgcctccagtggcggagccaggatttcaaagttgggtattcccgtctaagcgctgagccgctggccgcccctgcccctcgcagccgccggcaaccaacaggcctgaccgcctgagcttggcggagtgtcgggcgccggccaccgcccgccgcagcaatggcctccccctccgcggtagcacggttcagctcctgccgccggttgccgcctcaccatgccgctacctagggtttgcaaataggaagcggcgcgagggagccgagccagggagggatggatcacggagggagagcgagagggggctgtctagaagagttgtggctaagagcaggtac

SEQ ID NO: 84461 - DNA, 246 bp, Oryza sativa
  Clone ID: PAT_MRT4530_83696C.1
gccgtcccctcccgcgccgagccgctccgagccccgcgccgcgccgcccgctcgtcgccatcgccgcgcgccgtcgcccagaccgagggagccgcggatccaggtgaaggccaagacccgcaagacctcgagcaaggcaagtcatcactattccttgaacatgttgatcccaattgcgaaattgttttgtttataaataaaattgcatgcaattatgaacctcctacttgtgattatgccatgcct

SEQ ID NO: 84462 - DNA, 348 bp, Oryza sativa
  Clone ID: PAT_MRT4530_83697C.1
atgaaaactgaaaccgacacgatgggcgttcgcagacggcagcgcatcagacattcagaatgcaaccggcaattgaagtggtttggtcgaactcgaacacaaagcatgcgaagcaggggagacccaccggtcgtcttcagtgtagagaccactttgaccactcatcaccccgtctccggctgcctggtcagtagcacgagagagagtggacaatgccatgcggggtcctgtgaagtctccttccagatcgacacggtcaccgtgggctcctccaagttggaggcaaccactgcactgagagaatggttggatggcaccatgcaccatggacgatcgtgttggcaatga

SEQ ID NO: 84463 - DNA, 1125 bp, Oryza sativa
  Clone ID: PAT_MRT4530_83698C.1
atgctggcctgcatcgcctgcgtcaagcaggaagatggcggccgccgccaggacacgccgcgcgccggcgccggcgccggggacgacacgcccacctgcagggaccccgtcaagacgctcacctcccaggctgtggcggccctgctcaaggacatggtgatgaagctgtccggcacgagccgtcatcacggtcagcagaggcgtggcgggtcgccgccgccgaggggccggacgacgtcggtgtaccggagcgggtactaccggccgggcatggtccaggacgacatggcggtgccgccggcgacgtacctgggcggcggcgggacgtcgatgagctcggcgagctcgacgccggcgtgggacttcgcgcggccggcggagggcgaggctcgggagtgggtggcgcaggtggagcccggggtgcagatcacgttcgtgtccctcgccggcggcggcggcaacgacctgaaacgcatcaggttcagccgggagatgtacgacaagtggcaggcgcagaagtggtggggcgagaacaacgagcggatcatggagctctacaacgtccgccgcttcagccgccaggtcctccccacgccgccgcgctccgacgacggcgagagggaatcgttctactctcaagtggggtcgacgagggggagccccgccgccacgccgtcgccggcgccgctcaccccggaccgcgtcaccagctggagcgccttcgtccggccgccgtcggcctcgcgccagcagcagcagcacagcttccggccgctgtcgccgccgccgccgtcgtcgtccaacccgtcggagcgggcctggcagcagcagcagcagccgcagcgcgctggcaagagccccgcggcggcgtcggacgccatggacgcggcgagaacgaccagctgctcgtcgagggacgaggtgtccatcagcaacgccagcgagctggaggtgacggagtgggtcatacaggacgagcccggcgtctacatcaccgtcagggagctcgccgacggcaccagggagctccgccgcgtccgtttcagccgggagaggtttgcagagctgaatgctaagctatggtgggaggagaacaaggagaggatacaggcgcagtacctctag

SEQ ID NO: 84464 - DNA, 1411 bp, Oryza sativa
  Clone ID: PAT_MRT4530_83699C.1
atgggccggccggcccaaaaggcggcccagagcgcgcgcgggaggggaggagagagggagccggtggaccgggctcacctcgcgtggtcccgggtgggacccgcttatcagcggctcggctcaccgtgcggagggagtatgcagcgtgcgctagggtttggggaagggacgcggtgcacgcgcgcggttcatggaggacgcggatgcggcgggcccacgcgtagcctcacggctcgcggtggaccgcacccgcgagcggggccggagggagcggctgaccggggtcggctcgacccggtcttggccgagctggcgccgacgtggcgcctacgtggctgccacgcgggccggcgggaggtagacgacgatgccggccagaacggacggcggacgacagcggcgagcggcggagcaaaccacggcgatacaggcgaaagcgagcacaccgggtggttgcacgagacgaggggagacgagccaacggctcggattcgccggagggagcttgatggcggcgaattgcggcggcggcaaccggcggcggaagaagggggaaacagcgacgaggtcacgaggggccgattcccggcggcaaaagcatctacgcggctacgggaatccgatgctagcgttgggttaggaggaaacgcatcgagggaggccggcgacgagaggcgcttccgagctcgggcggtgacggcggcgagcacactgcgagcggtggcaacggtcggggcggcgccggctagctacggggagactactcgagctactatgaggaggggcgctgtgacgagaggccgacggtgcgggagggatctctccggcctcgggccggggaagaggaaggagaggacgcgcccggagtccccttccgcgtcctagtgcgcaccggctcctccggcacacacgcgacggctgcggtcggcgagagggacggcaatggcgcgggcgagaaacagggaagattgggagggggaggagcttgggtttataggggcggcaatcgcgtggagtggcgggggccgggcgatgacgacggcgatgacggcggggcggatttgagcggcgcggctcgggcacgcgtgctggctcgcggggctgagcggctgcgcggctgcaggcgcggcagggcagcggggccgggtgacgcagacggcgcaggcgcggcacggacggcgactacgcgggcgcgcgcacgcgaacaacagcgcgcaggggtcgagtcggagggctcggctcggcgccgcgcacgcgcgcgcggcgcgcgggcagagcggagagtgagcccgggagggagagagagagagagagccggggagggaggggaagatgggccgagagagattcggcccatccaacctgggggaggcgaaatagacttttgcggagggactttcgggaaggattt

SEQ ID NO: 84465 - DNA, 564 bp, Oryza sativa
  Clone ID: PAT_MRT4530_8369C.1
gcggggcggggcggggcgggcgtcccggtcggggattgcgctggttcgatccccccgcgcgtgtgggggtgtgggtgcgtgggatcgatctctccctctcgcccgcctctcctcctccctctcgtccccccgccgcctctccctcgcgccgccaggcgtcgcgtcctcgtcgcctccgcctccgcccacaaaccacattttttcttgggggttctgcggttcttgggcgaggagaggagatgaaggagatggtggttgggttggtggcttcggcgccggtggggaggtggggggcggcgtcgcccacgtgctcctggagaggatgaaggattacgggcaggagggcgttcacgctttgggacaacctctcgcctgaggacctggaactgttcgtcagggatttcgaggcttcctttgcccaccgtcaagctggtgtcggagtccatcgtgttgaatgtagaggagaggtccgtggtggaacaaggggctgaaggccctttcggaggggaagctagccgttatccttttagccggtgggagactggcctggccgatctgattcta

SEQ ID NO: 84466 - DNA, 1484 bp, Oryza sativa
  Clone ID: PAT_MRT4530_836C.1
tttttttttttttttgttactcaaatgagttgttggttatccatttcaaacagtgagcaaatagatagcaacattagaacagtggaccaatttggtggcatggtcattgacctgtggctgacatttaaacaacacagccacaatgtggcatccaaacagtatagatataatcacaagcacacccactacccaccagaattaactccataggaactttggacaattagcactgttataatcagtaaaagagctgtaggaaaaggaaaggaggagaaagagaaagctaagaacaaaatgccaggccaccacagctgataaaggagagcctaacaacaaagtaccaattcaaaaaccatcacttcagcacattaaggtcatctgtctagcagcttccatagcaccaccatccaccatccatccattcattctggaacctccacatcctgaagatgatgatacgattagcccggcttcctccgctccggcgatcagatcggcgcacaatgtgatcttgtagatagtggacatttctatatgtattgtacggcggaggggagtggatcggagggagcttattgccggccgaaggagtggcgattcttcttgatgaaatcgtcgaatcgccggttcatctcctccgctccgatcgacgggtcgcgcgctcgcggcggcggcggccctgcgggaggcgccttctgcgccggaggggccgccattgccggcgcggtggccgggcgcgtcttctgcatgatggcgttccacgtggcgtccaggtcgtcgtcgtcgtcgtcatcggcggcggcggcggcggcgtccctgccgctgtcgacggccgggagcggcagcgagaactcccgctcgagaaccgagtgttcctgcggcggcggcgcaaggctccgcctctcgtcggaggtgtacgacgcggcggtggacgcgtcctcgtcggactccgtggtcacgcaggactcgccgccgccggagtccggggagatctccggggaggcttcgtgctccggcatgccgccgccgccgccgccgtacacggccgccgcggcgttgaactcctccttgggcttgacaacaagcgatggcgcatcctccgccgcggccactggaacagccggatgcgggtgcggccatggatccttgagctgctgctgctgcgcctggaagtgcttgtggtcggagagcttccagatgacgaggatgatgaggtgcacggtgacgaacaggtacggcggcacgagccacaccctcgccgccgcccacacccgcgggaacacggcgccggccacggacacgagctgcggcacggcgaggcgcgcgaaggagccagccccggcgaccgccgccgccgcgaacgccaccttagccgcaagcaccgtcgcggccatccctccaccgccgcccccgccacgtcgccgcgaggcgtagctgtacgacatggtggttggtctcgtcggcgtcggcgtcggcgaggatgg

SEQ ID NO: 84467 - DNA, 583 bp, Oryza sativa
  Clone ID: PAT_MRT4530_83700C.1
aacctctgcagagggggtacactttacccacacgacattactaacccgaatcacccagcccgcatttcgagagcagacacagggttgccatatgccgacgagaggggtcccagaccaacaacaggttaggtcccagaccatactgtgctaggaagcccgggggttctccccgacaccaccccgttgaattcacatgtctctcggcatcaaggctcccccaattagcaatttactcagctaggggcgtcccattccacccgtgtggtcgcactattgtatgctcgaatgtaattccaaaggaatcggtccttagatgcgaccgcacaaagaagttactcatattttaagtttgaaggcgaccgtcgatactcgcacagagtgcacgaatatcgaggcgcagctagatggttacaagggaacatggtggcttgccttgctcaaggtcttcactgagcttcacgaatcttcgagaaatccacgatcgacgaaaatccggtaaccgcaactatgcgcaaacaaacaaaaacctaaacaagagaccaagaaaaagaccctatttagactaaataatagtgccattaaa

SEQ ID NO: 84468 - DNA, 266 bp, Oryza sativa
  unsure (1)..(266): unsure at all n locations
  Clone ID: PAT_MRT4530_83701C.1
acctttgggaaccggttggtttccattncaggtagccctcagccgcgcgctgctgttaatgctagttgggataatgagttggcattttgttttgcgcaatgctagcctgagcttgtaagttgtaagcgatggctgatgatnatggagcgctgagtgctagcttttttggcttgtgaagaatataaggcgcgtcgcagtgncagttgtaattttgttatgnctggttggcataaaaaaaaaaaaaaaaaaaaaaaaaaaaaaaaaaa

SEQ ID NO: 84469 - DNA, 1520 bp, Oryza sativa
  Clone ID: PAT_MRT4530_83702C.1
acgggccggccggcccaagaaggcggcccagagcggcccaagacgcgcgcgcgcggaggaaggagagagagtccggtggaccgggctcaccacgcgcggtcccaggtgggacccgcttgtcagcggctcggctcaccgtgcggagggagcacgcggcgcggcgctagggtggaggatggacgtggtgcacgcacgtggttcgcggaagacgcaggtgcggcgggaccacgcgcagcctcacggctcgtggtggaacgcgcgcacggggagggactgaccggggtcggcccgacctggtctaggctgagctggcgccgacgtggcgcctacgtggctgccacgcgggccggcggaaggtagacgacgacgccggccggaacggacggcggtcgatagcggcgagcggcggagcgaaccacagcgatacgggcaaaagcgagcacaccgggcggttgcacgtgacgaggggagacgaaccaacggctcggatttgccgggggttgctcgacggcggcggattgcggcggcggcaaccggcggcgggagaagggggaaacggcgacgaggtcactaggggctaattcccggcggcgagagcatctacgcggttacgggaatccgatgctagcgtcagattgggcggaactacgccgagcgaggccggcgacgagcggcgcttccgagctcgggcggcgacggcggcgagcacacggcgagcgacggcaacgaggaagaagagggcgcgcccggagtccccttctgcgtccacgaacgcaccagctctcccggcgcttggcgatggacggcggaggcgagacagagcacgggagtggcggcaatgggcggtcaaaggcgcgagctggcgctcggcggtcgcggccaaagcggcgacagggaggatgacgccggcgaggaggaaaaaggggaaaaggagggggagaaaggggcttgcccttttgccgattcgggaaaaaggaggaggggagcgggggcgacgcggcagagggagggggggcgctgcctccgtcccttggcggcttgcgcgcggagtggcgggggccgggcagtgacgacggcgatgacgccgggcggtttggagcggcgcgacgacacgggcgacagacgcgtgcagaggctgacggtggcggcgaccgggcggtcggccactcggcacgcgcgcgcggcttgcaacgggaggcgcggcggggctcacgcgcacgcgaacacggcgcgcgggaagcggcagcggggaagcggggagaagggctcggctcggcgcgggcggcgcacgcgcgcgggcagagcggaggggcgcagggcgcggctctcgcgcttgcgcgcggcgcgcgagggaggggcactcggcgcggcgacgcgtgctcgcgcgcgcggcgcggggcggagcggagggagggaggaagagagagagcgggagcgctccgggggagagagcgagagagagagagagagagggggggggggcgccggggagagaggggagagggccgggggagagggga

SEQ ID NO: 84470 - DNA, 732 bp, Oryza sativa
  unsure (1)..(732): unsure at all n locations
  Clone ID: PAT_MRT4530_83703C.1
gtcaccgtccgccgcgccgccgctgggcgcgcgccgcgcaccgtcgaccagtgcaagaatcgcttggattacctcaagaagcgcctcaaggccgagcgctccaggtccaaggggaccccggccccgccgccaccgcctccctcggtcgaccgcctccgtgcgctcctccgcctcgccccctccattctccctggattcactccccggggcggcgccataccaaaggtgggagaggatgccccgttcctggccgtcggtgctgaagcggccgaggacggcggtggcgttgctaccgttgagctcctccacggggcatcagcacggagacggaaggacatcgtgcacggaggtggcggcggcgctggataggctcgccggaacatacgagcgggtggaggtggcgaagcaggaggtgacgcggctggaggagcgacgcctggaggccatgcccgacctcgagatcgagcgcatgcggattctcgtccgcgtcgccatctccgcctccngcgtgggccgacgccgccactgccacggncggcgtcctctaattggtatatgcccgtgagtcatttcattccgtattttcgnggggtgtgcatctgtacattgtgcagcagctcgttggggtggtcataacaagcaaccatgtttgaagattcgtgattctggttgggaatttaagcacaacatggctggaaaatttgcaaaaaaaaaaaaaaaaaagggcgggcg

SEQ ID NO: 84471 - DNA, 591 bp, Oryza sativa
  Clone ID: PAT_MRT4530_83704C.1
atggccaatggtggcgagcagcttcgacttgatcgatggccactgccgtcgcccgcccaccgcgatgccgccccctgccggtctccgcgccgccccggcaccgacctctcccccagcccggatctagagagccgccctgggtgggcgacgcaagggagcgccgttgctgctgctccaccttccccggccaccgcatgccatctcccttccccacctccttgggtgccgccgtcgtctcgggagggggccaaaccgctggatcttgtgagggacgccaaatccggcaccgtcgccgccacccccgttccgcacccagtcgcctccgcgcgcccagcccgacgccccgataccgacaccgataccgccgcaccgtcgtcgctcccatctggtcagggtcgtgggcgccgacccacgccttcgagggagaaggaaggccccgccgccgccttcctcgcagccgcgcggtttccggtggtctgctcgggcggcggcgaggcggaggagggaggaaggcggcggtggtcgccgcccgtgtcgcccctgcgcctggagcggcacgggggccctcaacccgccaaagttcgtaggtaa

SEQ ID NO: 84472 - DNA, 282 bp, Oryza sativa
  Clone ID: PAT_MRT4530_83705C.1
atgacggttgtagaaggggaattgtccgaagtgccctccaaccgtcattaggatgcaatcttggacgtccacgccaaaaccaggatccaacggcgccaggattggttcggccgaacctggggctggcccaatccaacccaatttcggctagtggcctcctctattgctccactctgcagacttgtgaattttggtccaattcatcgtgtcaattctgagttcttggcccattcatacataagtctggtcctcgacatcgtctgattgatttatcgttgacag

SEQ ID NO: 84473 - DNA, 1740 bp, Oryza sativa
  Clone ID: PAT_MRT4530_83706C.1
acaccggtggtcacatgcggagtaattgctctcgggtttagaaaagccttatgcgaccttggagccagcgtcagcgtcatgccaaaagacgttttcgacaaactcaacttcacggtgttggcaccaacaccaatgagccttcaactggctaactcatcagtccgttacccggcagggatagtggacgatgtgccagtcaagatacgggatttcttcatcccggttgactttgtggtgctggacatggacatggagaagtagacgccgctcattctggggcgtccgttccttagcaccgcaggagccaacattgacaatattcaagaggtcgaagtggagccacccaagacggacagcctggtgaaatttatgtagaacttcctagagaaggaaacaacaatgcctaggaaccgttattggaggacgccggaaggtgtggaaggaaaagccaaagacgcctgctctaccacctccggagacgggtggaaaatccatcaactgaaacgcaaggaggggtccggttctccatcaagttgtcatgacgagtctagtactcattcatcagctgatgtctcgatggaagacgccgtagctccgtgacgactcctaaacaacgctgacctcgaccttgtcagtgatcgggagagacaagcctactacatgctgagcgaccgggagtatgctcacacgtgagaatactcaccggagttgctgaaaaagataggtatggatgttgaatttcgttctatttggaaagctattggttggcagagattcgctgtggtagatgagcctggttctcgtttgcttactttgcaatttatgtgcactttgaaagaaatagaagatggtatttcttttcactttttccgtaaggagttcacactcacatggaaaggcttgagtacacttcttggttttcacgattcctgtaaaatcaatctccagaaaggaatttctaggttcgagaaaaataggttttgggaagacatttctggtgctccagtttgcaagaaacctagaacgaatgatatccataatcctaaacttaggctcatgcacaaatggattgctatgactttgtttcctagaatgcaagggcatattttgaaacatggagcagatggatctttgatatactttttccccggttgtacaaatgaaatcccgttgccaaatgcggggtatcatttgtacaactgccatgaactagccattcccctgcagaccatagaagaatctcgtgcaggtggaacatacagggagacgcgcaacatgaaaaggaacgaacgagagagttcatcatcctcaacacccgtgcagatgtatgaggcaggttgggcaccaactggggatgcccccggatggacccaagctcgatgccctagcatcggagtctcaacctgggtaagcgctagtgaggaccagtggcatgcgcctcatgacatccactggggggacaaccaaccctccagatcaagtggtgtgcctccatctccaagtgaatggcgttcgagttcctctcgttgggacttgggtgaaatcacaaagagaatggatacccttgatgtgcagacgggggaaatccagtacaacctcacggaacacatagctcaaacgcaagaatggcaacaatctgctgatgcttagttcgccaacatcaacaacatgatgcagcaacagcatgatgaccttcaggcatactttcgatttcaggggttcaatccttatcaaggaccc

SEQ ID NO: 84474 - DNA, 1134 bp, Oryza sativa
  Clone ID: PAT_MRT4530_83707C.1
atggctgggctgcagtcgattcgtgggaacgacggcgaggccggaggtagtgctatcgagcgggtggacggtcgccgcggctaccgcagctcgcgtcatcggcggatccgtgccgccgccacactcgcccagcggcggatccggccgcgcacggacgccgcgccatcgccgcccgtcagagccagcggggagaggctggccgtgcgaaggaaggaaggatggggagggaaggcagggggtggggcagtggtgcgccgccgtccgcctcccccctccacggctgtgtgccatctcctgccgccgccgtgcgccatcctcccgccgttgccgcctccccctatcgtcacatcgccgggcgccgccctcctcgccggcggatccgtcctccgctggcggccgcgtgcaccggccgtcgtccaccgtgcggatggcgctgcgggaggacgggccatccgtggccatcgtgggcgcaacgagcgttgtcggccaggacttcctccgcgtgccgtccgcccgcccccagtcgctgccgtcgtcgtccaccctccatccgccgccgcctacctcgtccgccctccccccgctctcctctacggcgagacgtccgcgctgctcgacgcgtggcgcctcctccgcaccgcagactggcgcgcctgcgcggccgccgtcaccgtccgccgcgccgccgctgggcgcgcgccgcgcaccgtcgaccagtgcaagaatcgcttggattacctcaagaagcgcctcaaggccgagcgctccaggtccaaggggaccccggccccgccgccaccgcctccctcggtcgaccgcctccgtgcgctcctccgcctcgccccctccattctccctggattcactccccggggcggcgccataccaaagcacggagacggaaggacatcgtgcacggaggtggcggcggcgctggataggctcgccggaacatacgagcgggtggaggtggcgaagcaggaggtgacgcggctggaggagcgacgcctggaggccatgcccgacctcgagatcgagcgcatgcggattctcgtccgcgtcgccatctccgcctccgccgtggccgacgccgccactgccacggcggcgtcctctaattggtatatgccgtga

SEQ ID NO: 84475 - DNA, 1456 bp, Oryza sativa
  Clone ID: PAT_MRT4530_83708C.1
ggccggccggcccaaggcggcccaagtgcgcgcgcgcgggaggggaggagagagagggccggtggaccgggctcaccgtgcgcggtcccgggtgggacccgcttgtcagcggctcggctcaccgtgcggagggagcacgcggccggtggaagcggtgcggcgggcccacgcgcagcctcacggctcgcggtggaacgcgcgcacggggaggggctgaccgcggtcggcccgtcccgacctcggctgagctggcgccgacgtggcgcctacgtggctgccacgtgggctggcgggaggtagacgacgacgccggccggaacagacggcggacaacagcggcgagcggcggagcgaaccacggcgatacaggcgaaagcgagcacaccgggtggttgcacgagacgaggggagacgagccaacggctcggattcgccgtaggaagcttgacggcggcgaatcgcggcggcggcaaccggcggggagggaagagggaaacggcgacgaggtcacgaggggtcgattcccggcggtgagagcatctacgcggccacgggaatccgatgctagcgttggattgggcggagctacgccgagcgaggctggcgacgagcgggtgctacggagctcgagcggcgacggcggcgagcacacggcgagcgacggcaacggtcgggcgctccggctagcggccaaaacggcgacaggagggagggaggatgacgccggcgggaggaaaaaggggaaaaaggagggggagaaaggggcttgtccccttgcctcttcgggaaaaggaggagggagcgggggcgtcgcggcagagggaggagggaggctctgcctctgtcccttggcggcttgcgcgggagtggcggggccgaggcgatgacgacggcgatgacggcggggcggtttggagcggcgcgacgacacgggcgacaggcccgtgcaggggctgacggcggcggcgaccgggcggtcggccaccacggcacgcgcgcgcgggtcgcaacgggaggcgcggcggatggagtggcgcggctcgggcacgcgcgctggctgcggggccgagcggctgcgcggctgcaggcgcggcagggcagcggggccgggcggctcagacgcgacgcgggcgaggaccacgcgggcgcgcgcgcgaacgacgcgcggggagcagcagcgagggctcgactcggcgcgggcggctcacgcgcacgtgcgcgcggcgcacgggcggagcggagggggagggaggcgctcggcgcggcggctcacgcgcacgcacgcgcggcgaggaccacgcgggagcggagcgaagggagagagggcgagagagaaagggagagagagcgagcgccgggagggaggggagagggccgggggagagggggagatgggccgagagaaattcggcccatcgaccccgggggaggcaaattagacttttgcggaggaatt

SEQ ID NO: 84476 - DNA, 965 bp, Oryza sativa
  Clone ID: PAT_MRT4530_83709C.1
gcttggattacctcaagaagcgcctcaaggccgagcgctcaggtccagggggccccggccccgccgccgccgccgccctcggtcgatcgcctccgcgcgctcctccgcctcgccccctccgttccccccggattcacttcccgcggcggcgccatgccaaaggtgggagaggaggagcaggaggaggaagaggagaaggcggagtccttcgcggctcctctgccccgttcctggccgtcggtgccgaagcggccgaggacggcggtggcgttgctaccgttgagctcctcctcggggcatcagcacggggacggaggagggacgccgtgcacggaggtggcggcggcgctggataggctcgccggaacatacgagcgggtggaggtggcgaagcagaaggaggcgacgcggctggaggagcggcgcctggaggccatgcgcgatctcgagatcgagcgcatgcggattctcgtcgatgtcgccatctcatgccccgttcctggccgtcggtgctgaagcggccgaggacggcggtggcgttgctaccgttgagctcctccacggggcatcagcacggagacggaaggacatcgtgcacggaggtggcggcggcgctggataggctcgccggaacatacgagcgggtggaggtggcgaagcaggaggtgacgcggctggaggagcgacgcctggaggccatgcccgacctcgagatcgagcgcatgcggattctcgtccgcgtcgccatctccgcctccgccgtggccgacgccgccactgccacggcggcgtcctctaattggtatatgccattacagggaaagcatgccccaaagcataagcaagccgctctgaaaagggcaaactgcaagcgttctgcaatgcctccaaaaccagaatctgcatatccaaatggtgcccagaccaagccaccagttaggttgacaactggtgcactcctctga

SEQ ID NO: 84477 - DNA, 490 bp, Oryza sativa
  unsure (1)..(490): unsure at all n locations
  Clone ID: PAT_MRT4530_8370C.1
gcagggcgccgacgcgttcggccgagccagcccgcgcgggcgtcggctccgcgcgcggccaagccggccgcacgggcgccacctccacaaccccctcccacctccgcctcggcccccaccgaaaccgtcatcttcatcctcccccgggccggcgtcgcggcgtggccgactccgacagccgccggacgcatcggccccgccttcctccacctcggcgccttccctccaccgccgcgacagccgccgtcttcgtcttcctccgttgtgccgccacgccgcgtcgagcaccgccatctcgcgtgcccctctgcctcgttgcattccccgtcgccgcatcggctgtcgttgccgcgccggcaccggtcccgcctcgtgcgccgtcggaacgccggctgccgtcgcagtgccccgcgcccacgcccgtcttcgccctgcgccgctcggtggaaaggagcanagagggggacgagaggagagatcaagagaggag

SEQ ID NO: 84478 - DNA, 789 bp, Oryza sativa
  Clone ID: PAT_MRT4530_83710C.1
atgacctctaagcggcacggcccgagagaaacggagcggttcggccgagctaaacgggccggccggcccaaggcggcccaaggcgcgcgcgcgggagggaaggagagagagagccggtggaccgggctcaccacgcgtggtcccggttgggacccgcttgtcggtgacacggttcaccgtgcggagcgagcacgcggcgcacacgcgcgggcggggaagggatgcggtgcacgcgcgtggttcgcggaggaacggatgcggcgggcccacgcgcagcctcacggctcgcggtggaacgcgcgcacgggaggggctgaccggggtcagcccgaccctatctcgggcgagctggcgccgatgtggcgcctacgtggctgccacgcgggctggcgggaggtagacgacgacgccggccggaacggacggcggacgacagcgacgagcggcggagtgaaccacggcgatacaggcgagagcgagcacaccgggtggttgctcaggacgaggggagacgagctaactgctcggattcaccggagggagtgcgtcgacggcggattgcggcggcggcaaccggcggggagggaagaggaaaaaggcgacgaggtcacgagggaccgattcccggcggcgagagcatctacgcggctacgggaatccgttgctagcgtcggattgggcggagctacgccgagcgaggccggcgacgagcgggtgctacggagcacgggcggcgacggcggcgagcacatggcgagcggcgacaacggtcggggcggcgctggctag

SEQ ID NO: 84479 - DNA, 2398 bp, Oryza sativa
  Clone ID: PAT_MRT4530_83711C.1
atgtacatgggcaacaagaacaacgggtatcgtccacaaggaggtcagggatggaaccaaccacacgcatattatcaaggaggtaacaataacggtaatttctctaaccagccctgcttgaagcatctagtctttgcgcaagctaaaaccactgatgcgctaagcaaaaatcttgcggccaatgacaaggtcctggagaacataaatgtcaaattatatggctttgcttccgcttttcaaaatcagctgagctttaataaaatgatagaaacccagttagctcagttggcatctttcgtccctgcaaatgaaactgggaggattccagggcaacccgactcctccaatgaaaatgtcaaggcgatcacgacgagggaaggtaagtccactcgtgatccgccatatcctaacccttcaggaactactgggatgtcaaaagaagcaccatctagtgactcggctgatatggatgttcagccagaaaagacagtgccgtaggagtactgcgacacacggttgctgcctttccctcaatgaagtaggagaccgtcagtggacgagcaattcgctcgttttgttgaagtaatccagaaaatccacattaacgtgccgttgttggacgccatgcaagttccaacatatgcccgtttctcaaggatatcctcaacaacaagagaccgctcccaacaacggaggtggtcgacctgacagagcaatgcagcaacattatactccacaagctcccggaaaagaagaaatatccggggtgtcccacgatcacctgctcgatcggggcacagcagttcgaccaggacttgtgcgaccttggagctagtgtcagcgtcatgccaaaagacgtcttcgacaagctcaacttcacggaagagaagtttgagtttcaaccgaggacggaacaatgctccatggtcagaataaaaatttcctggagaaggaaacaacgatgcctaggaaccgttattggaagacgccgataaaaccacccataccggccaagaagtcagagcagccagcttagaagaagccgctatccacaccaaaaccaaagaaggtgtggaggaagaagccaacgacgcccgctccaacacctccggagacgggtagaaaattcttgaactgaatcagaaggagtttgctctcaagttcattcaaactttgatagtttccctcaaatttaaactcttagttgcatatatacaagtcgctttggtgaaactaactggcgaaatgaagaggcgattgtctcgtctgttcaaggagtccggctcttcatcaagtcatcatgatgagtctagtactcgttcatcagccgatatcgtgatggaagatgccaaagttccgccacaactcctgaaccacgccgatcttgaccttgttggtgatcgggagagacaagcctactatatgctagccgaccgggagtatgctcacacgcgagaatactcaccggagctgataaaaaagataggtatggatactgaatttcgtgctatttggaaagctgttggttggcagaaatttgctatggtagatgagcctggttctcgtttgcttactttgcaatttctgtgcactttgaaagaaatagaagatggaatttcctttcgctttttccatgaggagtttacacttacatggaaaggcttaagtacacttcttggtttccatgatacctgtaaaatcgatctccagaaaggaatttctgggttcgagaaaaataggttttgggaagatatttctggtgctccaatttgcaagaaacctagaacgaatgatatccataatcctacacttaggctcatgcacaaatggattgctatgactttgtttcctagaggtgatctaagacccattaggggagatgaattaattatcatgtttgccatgaccatagaagaatctcgtgcaggtggaacatacagggagacgcgcaacatgacaagaaatgaacaagaaagttcatcatcctcaacacccgtgcagatgtatgagggaggttgggagccaacggggggatgcactcggatggacccaaactccacgtcacagcatctgagtctcaggctgggcaagtgccagtgaggaccggtggcgtgcgcctcatgacatacaatagggggacaaccaaccttccagatcaagtggtgtgcctccatctccaggtgaatggcgctcaagttcctctcgttgggacttgggtaaaatcactaggagaatggacacctttgatatgcagacgggggagatccaggattcaatcctcatccaggaccctgagcgaaagccaaacttgggggaagatatctctacccccactaaggttgttgtaagatatgagatggtaaataagagttgctatgatcctgatactagtttgact

SEQ ID NO: 84480 - DNA, 492 bp, Oryza sativa
  Clone ID: PAT_MRT4530_83712C.1
atggagcgcgtcatccacccaggcctcgtcgccggcggcggcggcgaccacgccgtcctcaatgcgcaggagcaggtcttgctccatgtcgtccaacctcttgacatcgtccatgtcctcgacgagcaggacctctacggagacgcgaccgggagcgtgtcggtcctcgtccccaccacggccagcctcatggaggcgctggggagcgcgtccagcaggcgcatgcgtactctgccttatctcggacatcatcggcctacgcgagccgccgctcgtgccggattccttgctgggctagaggcgactgggtggatcaccgtgcgcgcgccggcatacgtcacgtgctgggcagggccgcgctacacggaggcgttggtggcctccccggacgccgccgcgctcgacaccgttgtgttcacctccaccgccgaggtggaagtcctgctcagggggctagacgctgcgtggttcttgacgctctcgcctcgatga

SEQ ID NO: 84481 - DNA, 690 bp, Oryza sativa
  Clone ID: PAT_MRT4530_83713C.1
atggagctgtccggccgagctaagtgggccggccggcccaaactcgcgcgcgcgcgggagggaggagagagagagccggtggaccgggctcaccacgcgcagtcccgggtgggacccgcttgtcagcggctcggctcaccgtgcggagggagcatgcgacgcacgcgcgcgggcggggtcgggacgcggtgcatgcgcgcggtccgcggcggacgcagatgcgacgggcccacgcgcagcctcacggcttgcggtggaacgcgcgcacggggagggaccgaccggggacggcgggaggtagacgacgacccggccgcgattggacggcgggcggcggcggcgagcggcggagcgaaccacggagatacgggcaaaagcgagcacaccgggcggttgttcgtgacagggggaggcgagccaacggctcggattcgccggaggtcgctcgacggcggcggattgcggcggcggcaaccggcggcggaagaaaagggaaacagcgacgaggccacgaggggtcgattcccggcggtgagagcatctacgcggcttcgggaattcgacgctagcgtcggattgggcggaactacgccgagcgaggccggcgacgagcgggtgctacggagctcgggcggcgacggcggcgagcacatggcgagcgagggcaacggttggggcggcgccggctag

SEQ ID NO: 84482 - DNA, 120 bp, Oryza sativa
  Clone ID: PAT_MRT4530_83714C.1
aggttaccacggtatttatattaccgtaccccacggtaaggccagtaaccgcggttaccgacgataatggcaggggcgccaggcatcttcctgctttccgtgaatatgctcggtgcgacg

SEQ ID NO: 84483 - DNA, 384 bp, Oryza sativa
  Clone ID: PAT_MRT4530_83715C.1
atgtccgagataaggcagagtacgcatgcgcctgctggacgcgctccccagcgcctccatgaggctggccgtggtggggacgaggaccgacacgctcccggtcgcgtctccgtagaggctggagaggaacgcggcgtcaaggaggtccagactcttgaaaacgcggtgccggagcacctactcctgctcgtcgaggacatggacgatgtcaagaggttggacgacatggagcaagacctgctcctgcgcattgaggacggcgtggtcgccgccgccgccggcgacgaggcctgggtggatgacctagaggaaaggaccgctggtctcggtgagcagggggcaatttggtctcatcaagccatattccaacgaaaatggaattga

SEQ ID NO: 84484 - DNA, 1549 bp, Oryza sativa
  Clone ID: PAT_MRT4530_83716C.1
aaggggcggctcggcagagctaaatgggccggccggcccaaggcggcccaagcacgcgcgcgcgggggagggaaggagagagagagccggtggaccgggctcacctcgcgtggtcccggggcgtgggagggacgcggtgcacgcgcgcggttcgcgatggacgcggatgcggcgggcccacgcgcagcctcacggctcgcggtggaacgcgcgcacggggagggactgaccagggtcggctcgacccggtcttggatgagctggcgccaacgtggcacctacgtggctgccacgcgggccggtgggaggtagacgacgacgccggccggaacggatggcggacgacagcggcgagcggcggagcgaaccacggcgatacaggcgaaagcgagcacaccgggtggttgcacaggacaaggggagacgagccaacggctcggattcgccggaggatgtccgtcggcggcggattgcggcggctgcaattggcggagagaaaagggggaaacggcgacgaggtcacaacgggccaattccgggcggcgagagcatctacgcggctacgggaatccgatgctagcgttggattgggcggaaacgcatcgagggaggccggcgacgagcggcgcttccgagctcgggcggcgacggcggcgagcacacggcaagcggcggcaacggaagaggaaggagagggcgtgcccagagtccccttccgcgtccttgctcgtgccggctcctccgacacgcgcaacgacgaacggcgacggcgaacagagcacgggaggcggcggcaatggcgtggaggcgaatgggagaggaaaggaaagggggaggcttggtttataggatggcaatgtcggtttgggaaccgacttagggcggtgaaaggagagtgctggcgctcggcggtcgcggccaaagcggcgacagggaggagggaggaggatgacgccggcgggaggaaaaggggaaaagagggagagaaaaggggggctcgccccttgcttctttgggaaaaggaggaggggagcgggtgcgtcgcggcagagggaggagggctctgcctccgtcccttggcgacttgcgcgcggagcggcggggccgaggcgatgacgacggcgatgacgacggggcggtgtggagcggcgctgacgatggcggcgaccaggcggtcggccactcggcacgcgcgcgcggcttgcaacgggaggcgcggggacggcgcagacggcgcggcacgggcggcgaccacgcgggcgcgcgtgcgaacaacggcgcgcgggggccgactttgcgggcggggagctcgcctgggatagggagaaggagagcgagggggagggggcgctcggcgcggcactcgcgcacgcgcgggcagagcgaggggaagggagggcgctcggcgcgagcggctcacgcgcatgcgcgcgcggcgcgcgtgcggagcggagggggagggggagagggagagagagagagcgccgggggagggaggggggagatgggccgagagagattcggcccatcgaccccgggggagtcaaaa

SEQ ID NO: 84485 - DNA, 741 bp, Oryza sativa
  Clone ID: PAT_MRT4530_83717C.1
atgatcaggcggggcggcaaggcgcgggggaaggtcgcggaggaggaatggccgagcctggtggatctggtgcttggctggaaactcgaggacgtcatgaacgagaacctcttcaaggacaaggttggtgccactgctccctccattgctccgctccgcctcgcccgcgcgccgcgcgctctagcgcgtaagccgcccgcgccgagccaagtcctccctctccgctccctcgctgccgcttcccgcgcgccgtgttcgcgtgcgcgcgcctgcgtggtccacgcccgcgtcgcgtctgcgccgcccggccccgctgccctgccgcgcccgcagccgctcggcccctgcagccagcgcgcgtgccgagccgcgccgctccttccgccgcgcctcccgttgcaagccgcgcgcgcgtgccgtggtggccgaccgcctggtcgccgccgtcgtcagcgtctgccgcgtctgtcgcccgtgtcgtcgcgccgctccaaaccgcccgccgtcatcgccgtcgtcaccgcccggcccccgccactccgcgcgcaagccgccaagggacggaggccgcgcccctcctctctctgccgcgtcgccccgctcccctcctcctttttcccgaatcggcaaaggggcaagccccctttctccccctccttttcccctttccccccctcgccggcgtcatcctccctgtcgccgctttggccgcgaccgccgagcgccagctcgcgcccttga

SEQ ID NO: 84486 - DNA, 418 bp, Oryza sativa
  Clone ID: PAT_MRT4530_83718C.1
tgtttttttttacattttgtttcatttgcactgtgttaccgtacggttacttttttttctgtttttttcaaaaccaaaaaaaagggttttttataaccttgcaaattacattaaaaatttttttaccacatacccaaaaaaaaggggtaggaaggatttttactaaaacacacccatgagaaaaattttttccaacttacattaaaacttgggtaaaccaaggggtaatttttttaggagcaaaaattggtgcatacattggaggacacccccaaaaatgggggcgggcccggggtgatggggtccggcccttggggaacctttcttaaaaatgggaacttcgtaaatggccgaggcggcggcggtgggtccgaggtgaaagggtcaagacccgaggggaccttccttaaaaccggga

SEQ ID NO: 84487 - DNA, 393 bp, Oryza sativa
  Clone ID: PAT_MRT4530_83719C.1
atggctgacgactgctgcgccaagttctcctcgagcagctcgccgcagttgtcgatgaggaagtggcgtcgaatccggcaacatctgacctgctgctgcgcctgcgccactgcgtttagctacaaatatggtcatgcagcggcgagagcagagctgaggcatcaggcgtggtgcgcgtcgcttgatgttggttctgaccctgagccgcttctagacactacggcgggagttctgcttccattgcctccagattcctgcaactccatatacggcacatattctgttggtgtattccaggctaggatatcaaggaaacaaggggttgatgaggtgatggacaacagtgcaggatcaacaatgagaacaggatggagcggagagatggatcagtag

SEQ ID NO: 84488 - DNA, 1900 bp, Oryza sativa
  Clone ID: PAT_MRT4530_8371C.1
tgcaggaattcgggcacgagattgttccagcctcaaggaattacatctctatcataacactctaaggagtgaaattccgaggaacataggtctccttactaatctagttttgttggcccttaacagtaacaatcttaccggttccatccctcaatctgtcggtaacattacccatttagataaaatctatcttgagttgaatcaacttgcaggaaacattcccgaagaactgggccaattttctaatattacagtgctgggcctaggggataataggctatcgggaattataccagccagcctttttaatttgtcctctcttcaaactctagcacggggtgcaaatcagttaggtgggactctaccaactaacatgggtgatcatctcactaatctccaaatactctacgtgagcaacaacatgctcgaaggtcatatcccagcttccttaggcaatgcttcgatgctacgagaaatagttttccaatttaataatttcactggtcagattcctacctcctttggaaaactttcaacgttgattagattagaccttcaggcaaacaagttcgaagcaaatgatagtgaaagctgggcattcttgcaggctttgggaaactgcagtgaactagatattttatcaatatctagaaatcaactacagggagtcataccagattcgattggtaacctaccaacaaatattacgagtatagcattgggaggaaataaactgtctggtacagttccaccaagcatagggaacctctctaggttaattcaattgggactggatgtaaacagtctcagtggtgagattggtccgtggattggaaacctgaaaaaactacaatctttaagtcttaataacaacaacttcaccgggcccctcccgccatctattggcgatttttcggggttgacagcactatatttgcaatcaaacggttttgaaagtgccataccgcaaaacataggaaacctcggaaaacttttagagttagaccttagttataataacctccaaggcaacattcctctagaaatcggcaaccttaaacagctcatcagcatctctctttctgcaaacaaacttaccggggaaattcctggcaccttggtccaatgctatggtttacaacacattaaaatggacaaaaacttactcacaggaagcattccagtatccttcggcaacctaacgagcttgactgcactcaatctttcatataactacttgtctggcaccattccaagagctctaggtgatctacaacagcttaatgagctggatctttcgcacaatcacctccaaggggaaataccgacaaatgggatcttcaaaaatgctaatgctgtttcacttggggacaactggggtctctgtggtggagtactcgatcctcacacaccctcatgcccaagggcatctcggaaaatcagtatacagtattacttgattagagtgctgatcccaatatttggcttcatgtcactcgtactattggtctactttttattccttgtaaagaaggtgccgacaagcaagtttttgcagtcctcttttggagagtatttcctcaaagtttcctacaacgatctagctgaagccacaaaaaatttctcgcaatcaagcctgattgggaaaggaacctacggttcagtgtataaagggacgttaaaggaatcaaaagtactagtagctgtgaaagttttcaatctggagatgcgaggcgcggagagaagtttcttagcagaatgtgaagcactgagaagcattcaacaccgaaacctccttcccataataactgcatgctcgacggtagatcatacaggcaatgttttcaaagctctagtttatgaattcatgcctaatgggaacctagacacttggttgcat

SEQ ID NO: 84489 - DNA, 2011 bp, Oryza sativa
  Clone ID: PAT_MRT4530_83720C.1
ctcgcgccgccgccgcctccacctccgccgccgtcgtgttgctgtctcctcgcccctccgtgtccgcctcttcctcgcgccgtcgcccgagcgcaaccgtctccgcctccgccactgccgtcgctgtcgccgagtgctgccacttccgccttcgcctcgctccgcccctacctagcaccgcgccgcagctgccgccgttgccgagcaccgccggagcgccgtcctccatttctgtcgctatcgccgagcgccaccgatgcatccttcgccgccatggctgacgactgctgcgccaagttctcctcgagcagctcgccgcagttgtcgatgaggaagtggcgtcgaatccggcaacatctgacctgctgctgcgcctgcgccactggcaacaatcgatttcacctgccatgaaaaaacaaaagaaagcggctagagcagagctgaggcatcaggcgtggtgcgcgtcgcttgatggtgcttgccggcactgtcagcaaacctggcaagaggaccactcgatgatcttgtgaacatttacagacggcttttgcatcattaagggaacttgttgcatcatggatgactaggatatcagaagagtgcaagttgtggacttcttctgctctatccaaacaaggaagacttcagatatcctaatatgcatattaatggaatttttagaaataaaattttcagctcctttaactttctgcttcaaatgcatatttcccattccaatgctcctaatggattgtattttgtctcaagcagttgttttagtaaaaaaattgtatgtaatacatgagatagcctgggacagtaatagctcaagaaacaaaactctctttgagcacaaagagaaaagtcctttcgagccgtgagaaacttttgggtacctttttggcctcctatcatatgagctcctttttcttctcccctgtaaatttgtcaagttctacctcactgtaagagagaggagatagagagagatgtactaactgatgaactgatcaatacaagtcctaactgttcaacggggctattttcgtgccgcgcgagcgagaagttgtgcacagctgagttgggatcagatcatctaatgcttactggagttcaatgtggttattttctatccacgcgatctcaagactttgcttaggggctattacaaacacgagctaggtgggcgacggacctcatattatgacatcgaagtcacttctgactgaggcaagatagtttttgcacttgtaccagcatttgccaccacttattcaattcataagatcccactagccatagtggcaatctcaaaaccactatacatcagtgaatttccatcttatatagctagcttgctggaagatgaggaggtgaacaaatccttcccagatctgtacagttggttctgaccctgagccgcttctagacactacggcgggagttctgcttccattgcctccagattcctgcaactccatatacggcacatattctgttggtgtattccagcaggctaggatatcaaggaaacaaggggttgatgaggtgatggacaacagtgcaggatcaacaatgagaacaggatggagcggagagatggatcagtagttcctccaatctacaagtgcatactataccgaacgccacacatgatctccgtttaggatcctcagtagtggtatgtctaacatgatgtggtgatctttgtggaacaggcataggtttgtgtcttaggtgaaaaatagcacatatattattctgatgagaatatatttgttggtgctattttcagcaacacctatgcatttggtggattaatgtttgccaagcagttctattcacctaaaagtcttgatgataccaaaagttggttaatggttatagtagtgtacatggacaacgttgcatagattatcttatctgtttttgcaaggggatattcataccaaattttcttatggatacttctctaacaagaaaaatagtgaattaatttgccctgacaatg

SEQ ID NO: 84490 - DNA, 233 bp, Oryza sativa
  Clone ID: PAT_MRT4530_83721C.1
agcgcgcgtttattgtcaatcagtatagatgcttgaacaagggctgtagagatattgccaaaccgcaagctgccaataatgcgaggctctaccaggtctgctcggaccaaggctagtgtcgatcgcaaccgagaaaataagatgcaccttggccattggggtggcttgacaggctgagtcacgatattagtcatcccgcgtttacgttagtgaactcgaagctggggcacgat

SEQ ID NO: 84491 - DNA, 471 bp, Oryza sativa
  Clone ID: PAT_MRT4530_83722C.1
atggtgttccacaaaggtttatactgggacaaggcgtcggcaaagccgtgtgcccgcaagaacggcggcggcggggcttccctccccttcgcagccaccggcgcccggcggctgggaacgccgctcggagcggcggcggtggtgcccagatccgccatggctggccggatctgggggagtggcagtcggcggcggggaatgaaggtggcgacggtggacaacgcggcgatccgtgccatggctggccggttctgggggagcggtagccggcggcggggaaggaaggtggcggcggtggacgacgcggtggtgccggagttggcggcagcggctggctggcgtccgcggctccggctagatctggtcggcggctggttggcggcggttggtggtgactgtggctgccgacagtggcaggtgacggcggcggctggttggtggcgaggcggcgggtgctatggtgactgctga

SEQ ID NO: 84492 - DNA, 266 bp, Oryza sativa
  unsure (1)..(266): unsure at all n locations
  Clone ID: PAT_MRT4530_83723C.1
atcacccccgcatntctctctctctctctcttcgtcganctcctcctcctccgctgctgctgccgcccatgnnttcgtcgtcgaagaggagagncgtggctggaggngnaggagcgnagaagaaggacctcttccatgtcgtccacaaggtncccgcagggacagcccntacgtnanagccaagcanctgcagnttttcgataaggatncgnagacaaccatcgtttggttntggaaggcgntcaacttcagggacaaggtggata

SEQ ID NO: 84493 - DNA, 915 bp, Oryza sativa
  Clone ID: PAT_MRT4530_83724C.1
atgcctccttccaccaccgccgccgccgccgccgccgtcctttcgcagccatcatcgcccgttttcggtcgtcgacaccgcattcgcaccccttggactcctacttctccgcgccttccccgccactgcatccgccagcgtcgccaaccgccgccgccacaccgccaccactaccacggcgctgcctcactagccgccaccacagcagccatccggccgccgccacagctcgccagccgccgcatcagtagctgccgcctcagcagtcaccatagcacccgccgcctcgccaccaaccagccgccgccgtcacctgccactgtcggcagccacagtcaccaccaaccgccgccaaccagccgccgaccagatctagccggagccgcggacgccagccagccgctgccgccaactccggcaccaccgcgtcgtccaccgccgccaccttccttccccgccgccggctaccgctcccccagaaccggccagccatggcacggatctgggcaccgccaccgtcgagcggcatccctagctgccacctcccgcaccgccgcgttgtccaccgtcgccaccttcattccccgccgccgactgccactcccccagatccggccagccatggcggatctgggcaccaccgccgccgctccgagcggcgttcccagccgccgggcgccggtggctgcgaaggggagggaagccccgccgccgccgttcttgcgggcacacggctttgccgacgcctgtttttggcaaggaatgaattcttattcatcaatggcttgcatacacacacatataggggtaattggtggcaaccggagtacacgatggatgggaaccaccgcgatggttgcatggagcgcggagagggcgaggggacacggtgctattgatgtggttccttgttgt

SEQ ID NO: 84494 - DNA, 237 bp, Oryza sativa
  Clone ID: PAT_MRT4530_83725C.1
atgtctagccggatgaagagggaggtggagccgcctcctcagatcgttgtgagatctactggtcctctcgctgttccgacgccgcaggcagcgccgtatccatatggaggtctctggttctcactgccaccgactgcttggcttgcttctccacagtcacaagccatgcctggctcttctgctttccctcttcctgcagatggcaagactgatgtgcatcctgatcttgaagaatga

SEQ ID NO: 84495 - DNA, 321 bp, Oryza sativa
  Clone ID: PAT_MRT4530_83726C.1
atgccgtgtgggtatgggcttgttgaagctctccacagcagctccctatctagggctggagatgctgacggcgttcgtcagctcaggcgtctcgagctcctcgccatcatccacgtcatgcgcgagcgtgttgagtacctgtgctctctcatcctctccaacaaagtcgaggacctcgccatacggtgctccgccgtcaacgactccaggtcgccgcaagacagccgcgcgactctggtccgactgccatcccacggcgcagcgtcctgccggcggccgacgcccctctccacgcctccaacccgctacacgtcgccctga

SEQ ID NO: 84496 - DNA, 1380 bp, Oryza sativa
  unsure (1)..(1380): unsure at all n locations
  Clone ID: PAT_MRT4530_83727C.1
ttaaaaaagataaaatctgttagaaattatctagcttaccaactctttgcctattttggcttaacatttgctattatgttagctattaccttagccattcctaatttcgatgcgcgttcattctcacgtttagaaaaaggtgaacatgaattttttattcaagaaagccgtcaaacagaattacaatataatttagatgaaatttttgaacgtcgcctttctgtagccactcaaaatggctttaatattattttattcgaccccaaaactcgcattttcgttggagcgggagctgactctaatagaattcaatcattccaagttttcctttatcgtgcacaaacaccacttgaaccattacaacgtcgctttggtagtttagaaatttccggtccttttttggttaagtctaataagcgcgaatatatgcaatattttgcacagatagtggatcctcaggaagagttttttaatagaatttttgactcgccttggctaatgcttatgatcgtattaattgtaagtgtgcctattctactttggctttcgtggaaaattgcgcgcccagtaaaagaattacgaatctgtgccaatgcggtagccacaggtaatttggcgattaacccaaaattagaaacggaaggtattcatgagtttagagaggtaggtcgtagttttaaccaaatgattacttcgttacaggagttgacggaatatcaacaacgactactttctgatatttcgcatgagttaaaaacaccactcgcgcgcttacaattagcaacagcgctaatccgtcaacgtaacggagattctgcagagctaacgcgtattgataaccaaattatgaaactagatacgatggtacatgatttgctttctctttcacgtcagcaaattaatcagcatctaatgcgagaagtcttctcaattaataaaatttgggatgatattttagaagatgcaaagtttgaggcagaacagaatcaaatagacttatttattgagcaacgaattgataatgtagaaggctattttattaacggtnatgaaattattcttgccagtgctgtagaaaaattaattcgtaatgcgcaaagttatgctaaacaaagtatcactgtactgatttacattgatgataaagaattggttatgtcagttaatgatgatggtgaaggtgtaccagaatcagaatatannnnnnnnnnnnnnnnnnnnnnnnnnnnnnnnnnnnnnnnnnnnnnnnnnnnnnnnnnnnnnnnnnnnnnnnnnnnnnnnnnagcaaatgctgctcaacaacataaaggtcgtgttgaagcaatgaaaagtattcttggtggtttaagagttgaaactagactaccactctggcttgaa

SEQ ID NO: 84497 - DNA, 2973 bp, Oryza sativa
  Clone ID: PAT_MRT4530_83728C.1
gcgaccatcacccaggtggatgtaaccccccagccgccttcgtataaagttcaagctcgtgtagctgcacaatatggtattttccttgggactattcaaactgataactttatggatacacgtccattgagctcagtgagatcacaactacaaagtacaaaagggacaggaatttggttagtaaattcagaatttttgcccagtgttgttggaacataaattctattggcacgatgcaatcaagcagcatatagaagcatggtactggtccaacctaaattgggatgaagatgatgttgtggccaaaatcaaagctccaaatggcgcaccactgtgagcactcctgacgggtttccaaaatattcggcatttctaataattttgagaggcactcggaaggaaaagattctgtcagtggtactagactctcctggtgatacaacctgtagtgatgaagataatggttgcaaggcacattctaatgattttagtgacaacattgctgtcctaagcgaaggtagttttcccatgaacattggttggcagctaagtactatggactctcatatttgtacagcagggtctcatgagacgcccctaatctcctcttcagttcacaggtatgatatatttccgccgaagtgggagcatatgcataaggagaacttcttccatccaggcaaataggctaccgaactgaaagctatcaaggagatcaagcaactatgtttgctcatgttctaacatgcttattgtacatatgctatcgtaataacgaaacctgaaagatccatcggtccttttcctctatctgtgaccagtatatcatgatacacaactggtcagcatataaacatctcataccgtacgatgtatctataataattgtgcatattttggagttttcaaaaaccaaaaaaaaaattaaagtattcagagctattctccaaacatcaggaagtatcagcttctgaaagtgtcaaaagtgatgctttgaagacattcaagttgcccgagacacgtaaaaacactgaagataataaagaagtacttccggtctgtattggggttcataatggtattggtaacaatgcaagttattttcctgaagaacaaaattccagaagacagaaatgctatgattctacggaagagtgggagaacatgatagctgcgaatcaacaggaaaacctttcagtcagcaaagccaaactcttaggtgaggatagttccaaccatattgggagcataactgaagaatcaattaacaaagggcctagtcctcttggcagtgctcctagggctcttgttgagaatctgagtgaaagcctacatgttaatgtttgttctcaagcagctggggcagaggaatgcacacaggctcaaatatgtgcaaaaggaggtcagcagcctcgctattattcagattctggggggagcatgttgaagacgtcttctgaatcaagatcgaagtctcgggcagaacttctgaaacaaatgcatgatttatcggcaatgcttctgtccacttgcaatagcgttccattacagggatatgaagaggaacttctgcaattagtgattcaaaatcttagagatgctagttcctgtataagcaaggttcaaaatatgagttgttcaaggaataacttatggatggcaatgcctgaacactcattagtagagaacgattcagaattgaagacctctatttcacaggctgttgctaagctcccagaggataagacgcttgatgatattgatgtctcgcaattgtcgatctacaaaaatttgtgggttgaagcagaagcatcagcatttcctgttgacttatcaaaaggcaataaaatctttatctcaaccatacccaatagtaaaccacaaaacagcactgcctatcctgcgaacttgcaatgtcagggagcagatagttgtgacgggcaacttcctgcagtaaataggagcatcattgatggtgttgatgctgaggtgattgagcgattgaaatttttacagtccaatttgaaggattgtcgtgctttttgccaaaacaactgtgaagagcaggaagaagcaagcaaaaaaccatgtgcaattgaagatgctgttatggccaggctaagggttttgaattcgtgtcctgataatatagcctctctaaaacaggaaaacaacaaccaccaccagctagatacaagcacaaacagagcagataatattgatgatgctgttatgtctaggctgagaattttgaagtcccgtcctgataatgtaaacccactgggtcaggaaagcagcaagcatgagccagatgcagctacaggcacaaataattttattgacaatgctgttatgtctaggctgagaattttgaagtcccgtcctgataatgcaaactcattgggtcaggaaagcagcaagcatgagccagatgcaagcacaggcacaaatgatttaattgataatgctgttatgtctagactgagaattttgaagtgccgtgacgataatataaattcattggacgatgccatcaagcagcatgtagaagcatgtactgatcaaccaaattgggatgaagatggtgttgtggccaaaatacaagctccaaatggcgacactgtgagcactgctgacgggttccaaaatattctgcattctaataattttgtgaggcactcggaaggaaaagattctgtcagtggtctagactctcctggtgatgcaacctgtagtgatgaagataatggtcgcaaggcaccttctgatgaagtcaatgacaaaactgcagtccaaagcgaaggtagttttcccatgaacattggttggccgctaagtacaatggactctcatatttgtacagcagggtctcaagagacgcccctaatctcctcttcagttcacaggtatgatatatttccgccgaagtgggagcatatgctgaaggagaacttcttccatccaggcaaatag

SEQ ID NO: 84498 - DNA, 340 bp, Oryza sativa
  Clone ID: PAT_MRT4530_83729C.1
gtataaatatatatagccggagccaagaaacatgctaaaaacatataccagaacctggaaaacaggtgtccgagcagtatatacgtgttaacacatgaacattagcagcacaattgagacatacaaatgccggaagtacgtaataataaatgccagaaagagaaaaaaactatgaggagacgaagaaaggcgggggacgaaacaggaaactgggtgggcagctaaaaactgctaaatatgaatatacacaggatagaggggaacaaagtagaagtatgccgaaaacttgtggggcaaggagctgatacaaaggaactacctgacgtagtttaaaccgatt

SEQ ID NO: 84499 - DNA, 2130 bp, Oryza sativa
  Clone ID: PAT_MRT4530_8372C.1
atgtcgccgacagaggacgcgccacgacgatcttggtcggagctctcgacggacctcgccggtgagatcttcggtcgcatcctgtgccacggcgaccgcgtccgcttcggcgccgtctgccgccagtggcgtatcagcgcgcggcggaacccactgccccggcaattcccatgctcgcgttgcccgaccggaccttctacagcctgccaaactccgccttccggcggctgccgctccatctccaccgccaccagcagctgccgcacgcccagagctcctgcggcgagtggctcgtcttccagcgccgcgacggcgcgtacacgctggatgcccaccgacccaccggtcacccacgacacgccgccgccgctgcagaagctcgtcgtgtgttcgcctaccctcgtcgctgctgtcgtcggcaagaggccgagccagctgttgctgtgccggccggggtcagcctcgtggtcgtgcaggcatgacagattgcaagcactcgagatccaagacatggtctcctaccaaggaaagctccacgccctcgtcaacagcggagacctcctctccatctccatcagcgaggacgacgacggcagccacgccggcggcgagccgaccgtgtccagcgtcgattgcctcgtccggataagccccggccgccgcaccgagccgccgctctacctggtggagtccgacggcgcattgctcatggtccgcaaagagaatcacagcacgagagagggatcatactccgacgacgaacaatccaacgtcattttgtatcccgacgacgacgattcctacgtccctttgtattccgccgaacagatagagttgcagaccaagttcgaggtgttcgcggcggacatggcggggtcgcggtggaggaaggatcgtggcgccgatggctacggcggccagcaatggcggacggtggagttcttctgcaccatctacgacatgagggaacgccggtcgcagctgttcctcaagacgccattacggccagtgggtagcttggggacgtggctgttccctccctccggccgcgagagcggagggggagatcgcgtcgcgcgtgagaggcgaggaggagatcgcggcgtgcggatgcggaggggaatgggcatggtcgacgcgacgcacgcggacggaaggagatggctgctcatcctagtcgcgcgcgagatcgcaactgataccgttggcgaggctatatatcagacgcagcgatatacgaaattgatcgaaggacacagtgctatagacgcacacagagctcttcctctgtcagcgccggcggcgttagcacttcactcaatcagagctcttcctctgtcagggccggcgatgttagcacttcactcaatcaggcaactgcagcaagcagcaacgattggtgacaggcacaagctcttgtgcagtgcgaatagaatgagcaggcctctgtttctcgacataatgaatgcagtagaggatcacgatgacaattttgtgcagaagagaaatgcagctggtttaattgggttcagttgtcatcaaaaggacactgcagcagtgcgtcagttggcttatggtttagcagcatatgctttggatgaatatctcggtattgcagaaagtaccgctatagagagcctgagaaggtttgtgaaagcagttgtagaagtttttgaacatgaatacttaagatcacccaatgagaacgatacaactcgattacttgaacttgggaggacagaggtttccccgctagctgaaggcaaggctcctgaagtgaactatagtataaatggtcacaattatacgatgggatattatcttgctgatggcatatatccttcttgggccacatttgtgaagaccataccagaaccacatggcaacaagagaaaatattttgccaaagcacaggaagcagtaaggaaggatgtcgaacgagcttttggggttctgcaagctcgatttgccattgttcgagggccaactcgacattgggatgaaaagaccttaggatacatcatgaaagcttgtgttatcatgcataacatgattattgaagatgagggagaagttgattgggaagaacggttcccagaggggggagaaaatgtcagtgtcccacgatga

SEQ ID NO: 84500 - DNA, 396 bp, Oryza sativa
  Clone ID: PAT_MRT4530_83730C.1
ggaacttctgcaattagtgattcaaaatcttagagatgctagttcctgtataagcaaggttcaaaatatgagttgttcaaggaataacttatggatggcaatgcctgaacactcattagtagagaacgattcagaattgaagacctctatttcacaggctgttgctaagctcccagaggataagacgcttgatgatattgatgtctcgcaattgtcgatctacaaaaatttgtgggttgaagcagaagcatcagcatgtaagctcaaatatgagcttcaacttacccgtgtgaagcttgcagcaatggaaaatcacaataacacacaagttcctgttgacttatcaaaaggcaataaaatctttatctcaaccataccccataggtaaccacaaaa

SEQ ID NO: 84501 - DNA, 131 bp, Oryza sativa
  Clone ID: PAT_MRT4530_83731C.1
cagcatcctagctttagctcgcctgagtccccagctcgcactcactagaggagcttgacagattgagttgctagcaacggcggccgctaccatggccctaagcagctccttcagccgcatcaaaaaccccg

SEQ ID NO: 84502 - DNA, 849 bp, Oryza sativa
  Clone ID: PAT_MRT4530_83732C.1
atggctatcctggatagcaacccgccgcccgccgccgatgccgtcgtcgcagcagacggctcaggcgactacaccaccatcgccgccgctgtcgcagccgcgccgtcgaagagcaccaagaggtatgtcatatacatcaagaaaggaacttataacgagctcatcaccatcggccagaacacatggaatctgacgctgattggagacgggatggatgttacaatcatcaccgggaaccagagcgtgggcggcggcgtctcgtcgacgtccaagacgggcaccgtcactgttgatggcattggcttcgtcgccattgatctgaccatcgagaacacggccggagcagagaacgagcaggcggtggcgctgctgtccaactccgacgcctcggcgctgtaccgctgcggcatcagggtgtaccaggacacgctgtacgccaagagcaacagcgccaccggcttctcgttccaggactgcaacatctacgccgacgacgacctcctccgcggcgcccccgccggcggcgtggagacctacctcggccggccgtggcagccgatcccggacagcccgccgttctcgcgcgtggtgttcatggagtgcggcatgtccgacgtgatcgatcccaagggatggctgccatgggaagggaggaccgacgtgtccaacgtctactatggagagtacgagaacaccggggatggtgctgacgtcagcggccgcgtgaagtggactagtttccacgtcatccaagacgcatcggaggcggccaagtacacggtggagaacttcatccagggggacaagtggattccggggacaggggtgtacttcgagcccagccattga

SEQ ID NO: 84503 - DNA, 696 bp, Oryza sativa
  Clone ID: PAT_MRT4530_83733C.1
ggatgaaagacgtggcggcactaatctacgcggcttctaagaaaaagaaagaacgctccaatatgcattgtgatcagacttaccagcgggcacgggctggacaacggaagtgatcgataagcttatcacggtctggagtgcgtcccagacaatagagctgtcagagataaaataacgagaacctcaatagcctcggagaatatacatcgacgtcggtctataatgcgtaactcagcacaacgatcactaactttaacaacctaatccgtaaaccctagactccgcgcgaatgtaaaactttcgcctcgctggtcattcaaaatagagcctagactcctaacaaactagcaatcaagggacgaccaaacggctccacctatctcttatgtcgttgggtccaggagacgacccttaacctcttcccgggctaccactacacaggaagaatatgggcagctctaggaaaatgtgcggtgtgcaacaatctacacccaaaccagtggcagtaatcgtcgacagtactacaatggtaggagttaatcataagcgtaaaagaggcacctaaaaagacccttcgctccctaacgttgttgatcgtctgggtgatatgaaacaaaagaagccgcagaacttttcaacagaagaagctttcgttggagtggcttgctggcaaaaatcaaagtgaaggtgatcatc

SEQ ID NO: 84504 - DNA, 509 bp, Oryza sativa
  Clone ID: PAT_MRT4530_83734C.1
tttttttttttttttttttttttttttttttttttttttttttttttttttttttttttttttttttttttttttttaaaaaggaaaaaattttttttttggccccccctcccaataaaagaggaacccccctttcgaaaattttcagaaaagggaacttaaaccattatttaccgggggacgaaagggaaaaaaaatgttttttttggaacccaaatgggggggggggggtcacccgggaattttcccaaaggcaaaaacaattggccccaaaccaagttttttttttttaaaaaccaattttttttcaacaaaaaccccaaattacccccccccgcttgttaacaacatttgttaggggaaaaattggttttggggggtttttgcttaaaaaagttttttttccccccggaggaagcatcacccaaaagggtggggggggccaaaattttgaaaaaaagttcctcaaaaattggaaaaaattcactttggttttaaccctggctttt

SEQ ID NO: 84505 - DNA, 1218 bp, Oryza sativa
  Clone ID: PAT_MRT4530_83735C.1
atgggtgccgagatcgcggcggttcccaacatcagcgaaggtcttgccaagatctcgacgaagatgatggacttggcggcacaactccaggctttggcggctccatcagccgagcaggccatgtctctcggagctgctgaacgatccgaccggcaggccatgacgttcctgctaccacggcagcacgaattcaagcagcggttgcgaggcgccaactcgaggaggaggatgagttgcctgccacagccaaaggcggccatccctcgcggtcgtctgccaggagttatgccactcatctcggcggaaacaagacttggtggcgtggtgctggggatggcatcaacggcgccacttctgcccaagccgccgtcgaccaccacggcgaaacgacatccttcaccgtgcctacaggcaccacaaccggttgggttgtcaccggtaacagctgtcagatggagtcttcctccttcgctcttggcggcgcttcaacagtccgagccattggagaccacccgggagaagctcagggcgaccgacgacacaccgtcaagggcagcggtgcctacttttgtgacgccaacccttgaaacaagaaggcgggatcaaggtcgttggagagcatgcctagccggaactcgacctcgctgttcggcctggcaatgccgccgtggttattggcgttctcaacggaggcagaggagacgactgcgagttccacttccatggcggcgtagcacggtacgggcatccgtgcgatttccgggcgatgcgatcatgcgaatcggtttccacagtgggaggcgcaaattccggcgacggttggagcagagccatgggaagcggagcggcttcttcgggcgccaggtttggcacgatctgctggcgaaccgtgcccttcgcgcggatggccccgctcgtgcactcgattggctcccgcggaggcgtggggacggcgcagatcgctccgagtccgagcgctggctcgagaagctcgcgattcgatcgcagttggctgcatcgctgctgtcggcgtggccacgtgaagaaaaggatagggtttctgtcttcttccagttgggctggctggtctggtctggttggtttccacgttggcccatgaatcatagatggttcttcctcatgttttgggccatgaaccatgcaagtaaactgctgcttctccctttgctgttggtctgggcacgtgggttttggtga

SEQ ID NO: 84506 - DNA, 563 bp, Oryza sativa
  Clone ID: PAT_MRT4530_83736C.1
aacctctgcagagggggtacactttacccacacgacattactaacccggatcatctagcccgcatttcgaaagccgacacaggttcaccatatgccaacgacaagggtcccagacaaacaccagattaggtcccagaccatactgtgccaggaaactcgggggttctccccgacaccaccccgttgaatccacatgtctcttggcatcatggctcccccgattagctagttactcagccaggggtgtcctattccacccatgtggtcgcacttgtcttatgttcggatgaaattccaaggaaatggtccttaagtgcaagagcgggaaaccgtacacccgattttaagtttgaaggcgaccgtcgatactcgcacagagtgcacagagcgcaactagatggttacaagggaacgtggtggcttgccttgctcgagatcttgagcttgatcctcgaaatcctcgaaatgcgggtcttcgggctccgaaactacacgcgaaacgggacaactcaacaaacggcgaaaataaagccctattattgacctctaggcgtgccattaga

SEQ ID NO: 84507 - DNA, 606 bp, Oryza sativa
  Clone ID: PAT_MRT4530_83737C.1
atggcgcggaggcgaaaaatgagggagtttggagggggagggcttgggcttaaatggacggcaatgtcggtttgggagaggggaaccggcattgaacggtcaaggcgcgagctggcgctcggcgcttgcagccaaagcggcggcaggaggatgacgccggcgaggagaaagaaaaggggaaaaaagagggggagaaaggggcttgcccctttgccgattcgggaaaaagggggggagcgggagcatcgcggcagagggaggaggggcgcggctccgtcccttggcggcttgcgcgcggagtggcgggggccgggcgatgacgacggtgatgacgggggggacagcttggagcggagcggcgactccggcgacttgcgcgctcagaggctgacggtggcggcgaccgggcggtcgaccactcgtgctcgcgcgcgcggcttgctacgggcggcgtccgcgggggcgctcgcacacaaactctgcgcgcagggaatcggttttgctatcaaggagctcgcgcgaggggacgtggcgcacggagccggctactcccgcttactctcgagcatactgcaggccaagctgaacgaccggatgatcaactag

SEQ ID NO: 84508 - DNA, 253 bp, Oryza sativa
  Clone ID: PAT_MRT4530_83738C.1
ttcctcggaccttttgtatttcccttggccatcgtcattggaggacgatgagaagaggcgctacaaaggaggtcctggggaaccaaaggcgctcaggtggaaaaatgcgcaagatgaggtggcagcgatccaccagtgcgtcgctgtcggggatgagaaagaggagggggtggcggcagcgacagcggcggtggcgggatgtcacgcttgtgccacacgcgtgacgagctacaatgccaggatgacgtttaca

SEQ ID NO: 84509 - DNA, 462 bp, Oryza sativa
  Clone ID: PAT_MRT4530_83739C.1
aaaaacaaaatggttttttttaaacccaaccccccgggacagatcaaaaacaaaaaaatgttttggagagggggggggcaaaatctaacctcctttatttttttggacaggaaacgcgaaaccccgacctaagggggaccagggggtaatgggtctgcagggttccccacccaaaaccgggatcggggcccaaatagcaggaagccaaattgggcctttggaacctttggggcagggcttgggggggggggggaaaaaaaccgaaattttctccttaatccaaaaccctgccctgctattaattcctcgccgttgtcgtcgtcatccgaccaaccggaggggggggcagtgacgtcaaaccggcagaaccatttgctgctgccatggggaggaagaggaacctgccaaaatggcggagcgacacgctcctttgaaaagccgggggacctccgggggggccaa

SEQ ID NO: 84510 - DNA, 423 bp, Oryza sativa
  Clone ID: PAT_MRT4530_8373C.1
atggggggagggacccacctctctacctctctctttcccctttcccttcctctcaatctctctctctctcatatgtcgctgggagcagcgactaggtggccagtgatgggcgcggcaagcggcgggcatggcggaaagcaggcggagggcgtgtgcagcgacggtggtcgaggcggagaaggtggcggcggcggtccgggcgaagaaggcggcgacgtcggcggtggtggtccggacaaacaaggtctcggtgggggaggacggctggtgggcccggcggaggggtggcggggaggggaaccagcttcctcggagcgtgagtactctgtcgtgcgcagcaccaacaccgtctccgccactagctgcccgggcaagttccgcctcagcagcctgccactcgggcaatctccgcctacgccgtag

SEQ ID NO: 84511 - DNA, 579 bp, Oryza sativa
  Clone ID: PAT_MRT4530_83740C.1
tcagttcttcttcacgaagacaaaacgcttcttctccttatcgaacacaggaaccccaatattaccttccacttccttcatgacaaacttcctcctcttctcatcgtacacttcgatgtaatcgccgaactcgccgtcctcgatcgtgggaagaatatcagccatctcctccgcgagcatctccgcccacaacgccctccgctcctccctcctatgctgcctctgctcgaagtggttgtggtcgtactccacctcgacgaaccccttctcctcgtgcttggcgcgcacccacttctcgaagtccctgaacttgtcgaactcgtccatgaggagactgtcgatgtaccgcatcagggccttggggttatcgtagtaggactccggcaggggatcctccgcgccggggacgccggaggggctctggaggaggaaggggatgtacctcgagatgtcgggcgcgtcgtcgccgcacagctccttccgggcgaggatccagtcgacgttttcctgcgacagccgcagcttcgccgtcgccgtcgccggaacctcctcgtgggaaccagttgccgccgcagccat

SEQ ID NO: 84512 - DNA, 1390 bp, Oryza sativa
  Clone ID: PAT_MRT4530_83741C.1
atggggcggtccggccgagctaaatgggccggccggcccaaggcggcccaagcgcgcgcgcgggcggggaggagagagagggccggtggaccgggctcaccacgcgtggtcccgggtgggacccgcttgtcagcggctcggctcaccgtgcggagggagcacgcggcgcggcgctagggtgggggagggacgcggtgcacgcgcacgctcagggtggaacgcacgcacgggagggactgaccgggtcggcccgatccgatctcggccgagctggcgccgacgtggcgcctacgtggctgccacgcgggccggcgggaggtagacgacgacgccggccggaacggacggcggatgacagcggcgagcggcggagcgaaccacggcgataccgttgaaagcgagtacaccgggtggttgctcaggacgaggggagacgagccaacggctcggattcgccggagggagtccgtcggcggcggattgcggcggcggcaaccggcagagagaaaaggggaaaacggcgacgaggtcatgaggggccaattcccggcggtgagagcatctacgcggctatgggaatccgttgctagcgtcggattgggcggagctacgccgagcgaggccggcgacgagcggcgcttccgagctcgggcggcaacggcggcgagcacacggcgagcggcggcaacggaagaggaagaagagggcgcgcccggagtccccttccgcgtcctagtgcgcaccggctcctccggcacgcacgcgacgacgaacggcgacggcgaacaggggcgacagtggcggcgagagacgaaaacgagggagattggagggggaggggcttgggtttaaatgggcggcaatgtcggtttgggagaggggaaccgacattggacggtcaagccggcgagctggcgctccggctagcggccaaaacggcgacagaaggtgattccggcgagagggaaaaacagagaaaaaaaaggggagggaaagggggcttgtcccttgcctctttgggaaaaggaggaggggagcgggggcgacgcggcagagggagggggagctctgcctccgtcccttggcggcttgcgcgcggagaggcggggccgaggcgatgacgacggcgatgacggtggggcggtgtggagcggggctgacggcggcagcgaccaggcagtcggccaccacggcacacgcgcgcggaaacaacgggcggcgcggtggtttgagcggcgcggctcaggcacgcgcgctggctagcgggatcgggcggctgcgcggacggcgcagacgcgacgcgggcgacgaccacgcgggcgcgcgcgtgaacgacgcgcgggggagcggcagcgagggagcggaaaggaggactcggctcggcgcggcc

SEQ ID NO: 84513 - DNA, 378 bp, Oryza sativa
  Clone ID: PAT_MRT4530_83742C.1
ctttacctccttccggcggagctacggtgagccttctactccgcgccggcgtgcggtcggtgagcaggaagggggtctgttctatggtcctcttggctgtggtaagactttgttggtcaaggcaattgctaacaagtgccaggttaattttattaacaatatgggacgtgatcatattactcatgagcgataggtttatgaaggaagactgtcatatgaacaagaggtattttaagtacgctagattgttcgacaagttcaaggtcgatcgtgagagaggtattaccattgatattgccctgtggaagtatgagaccaccaagtactattgtacggtcattgatgctctcttggttatcgtgtatttattaagaacta

SEQ ID NO: 84514 - DNA, 1538 bp, Oryza sativa
  Clone ID: PAT_MRT4530_83743C.1
atggggcggtccggccgagctaaatgggccggccggcccaagacggcccaagcgcgcgcgcgtgggaggggaggagagagagggccggtggaccgggctcaccacgcgcggtcccggggtcggggagggacgcggtgcacgcgcgcggttcgcggtggacgcggatgcggcgggcccacgcgcagcctcacggctcgcggtggaacgcgcgcacgggaagggattgaccggggtcgactcgacccggccttggctgtgctggcgccgacgtggcgcctacgtggctgccacgcgggccggcgggaggtagacgacgacgccggccggaacggacggcggtcgacagcggcgagcgacggggcgaaccacggtgatacgggcaaaagcgagcacaccgggcggttgcacgtgacgaggggagacgagccaacggctcggattcgccggagggagcttgaaggcggcgaatcgcggcggcggcaaccggcggcgggagaagaggaaaacggcgacgaggtcgcgaggggccaattcccggcggcgagagcatctacgcggctacgggaatccgatgctagcgtcggattgggcggaactacgccgagcgaggccggcgacgagcggcgcttccgagctcgggcggcgacggcggcgagcacacggcgagcgacggcaacggaagaggaagaagagggcgcgcccggagtccccttccgcgtcctagtgtgcaccggctcctccggcacacacgcgacgacgaacggcgacggcgaacaggagcgacggtggcggcgggagacgaaaacgagggagattggagggggagggcttgggtttaaatgggcggcaatgtcggtttgggagaggggaaccgacattggacggtcaaggcgcgagctggcgctcggcgcttgcggccaaaacggcgtcagggcggagggaggatgacgccggcggggaggggaaaagaaaaagagggagagaaaagggggcttgcccccttgcctctttggggaaaaggaggagggagcggggcgacgcggcagagggagggggggctctgcctccgccccttagaggctagcgcgcggagtggcggggccgaggcgatgacgacggcgatgacggcggggcggtttggagcgaagctgacggcggcggcgaccgggcggtcggccaccacggcacgcgcgcgcgggaagcaacgggcagcgtccgcgcgggcgcgcgcacgcgaacacggcgcgcgggaagcggcagcgagggagcgtagagggaggactcggctcggcgcgggcggcgcggctctcgcgcacgcgcgcgcggcgcgcgggcagagcggagggaggggcgctgggcgtggctctcgcgcacgcgcgcgcggcgcgcgggcggagcggaggaagggagagagagagggagagagcgggagtgcgccgggggagagagcaagagagagagagagaaagagagcgccggggagggagggggagatgggccgagagggattcggcccatcaaacccgggggatgcaaac

SEQ ID NO: 84515 - DNA, 366 bp, Oryza sativa
  Clone ID: PAT_MRT4530_83744C.1
atgtaccgatacgtcttcatctgtggtcgtgccctcattgctcgtcgccagtggccgcgtcctccgccatccatgtcccactccacgtcggagcttgttgccggcggctgcatcctctgccgttcacaccccacgccacaccaggagctcattgccgatggtcatgtcctccgtcatccacgctccacaccggagctcgtcgccggcgaccgcgtcctttgtcgtccatactccacgccacgccaagatattgtcgccgacaatcgtgtcctttgccgtccatgccccacgccaccccgaagcttgtcgccggcggccgcatcctccgctgttcatgccctacaccacactggagctcatcgctag

SEQ ID NO: 84516 - DNA, 1410 bp, Oryza sativa
  unsure (1)..(1410): unsure at all n locations
  Clone ID: PAT_MRT4530_83745C.1
accgggctcaccgtgcgcggtcccgggtgggacccgcttgtcagcggctcggctcaccgtgcggagggagcacgcggcgcacgcgcgcgggcgggggagggacgcggtgcacgcgcgcggtctgcggaggaacggatgcggcgggcccacgcgcagcctcacggctcgcggtggaacgcgtgcacgggaggggctgaccggggtcggcccgtcccgacctcggctgagctggcgccgacgtggcgccgacgtggctgccacgcgggccggcgggaggtagacgacgacgccggtcggaacggatggcggacaacagcggcgagcggcggagcgaaccacggcgataccggcgaaagcgagcacaccgggtggttgcacgagacgaggggagacgagccaacggctcggattcgccggaggaagcttgacggcggcgaatcgcggcggcggcaaccggtggggagggaagagggaaacggcgacgaggtcacgaggggccgattcccggcggtgagagcatctacgcggccacgggaatccgatgctagcgtcggattgggcggagctacgccgagcgaggctggcaacgagcgggtgctacggagctcgagcggcgatggcagcgagcacacggcgggcgacggcaacggcgcgagctgtcgctccggctagcggccaaaacggcgacaggagggagggaggatgacgccggcgggaggaaaaggggaaaaaggagggagagaaaggggggctcgcccctttcttctttgggaaaattgggaggggagcgggggcgtcgcggcagagggaggagggctcggcctccgtcccttggcggcttgcgcgcggactggcgcggcagagggtgacggcggcggcgaccagatggtcggccactcggcacgcgcgcgcggcttgcaatgggagggcgcggcggatggagaggcgcggctcgagcacgcgcgctggctgcggggccgagcggctgcatgcgcggcagggcagcggggccgggcggcgcaaacgcgaatgacgcgtggggagcggcagcgaaggggcggaaaggagggcttggctcggcgcgggcggctctcgcgctcgcgcgcggggcgcgcgggcggagcagagggagagggaggcgcgcggcgcggcggctcacgcacgcgcggacagagcggggggagcggagtangggcgctcggcgcggcttgcgcgctcgcgcacgcagcgcgcgcggcgcgcgggcggggcggagcggagcggagggagagggggagagggagcgcgccgggggaggggagggggagatnnncnnnnnnnnnnnnnnnnnnnnnngcccccgnggcggcccnnnnnccncgcgcggcgggccccgngccgcccccgncccgcccccggcggggcgccccc

SEQ ID NO: 84517 - DNA, 1039 bp, Oryza sativa
  Clone ID: PAT_MRT4530_83746C.1
atgggccggccggcccagaaggcggcccagagcgcgcgcgggaggggaggagagagggagccggtggaccgggctcacctcgcgtggtcccgggtgggacccgcttgtcagcggctcggctcaccatgcggagggagtatgcggcgtgcgctagggtttggggaagggatgcggcgcacgcgcgcggttcgcggagggcacggatgcggcgggcccacgcgcagcctcatggctcgcggtggaccgcgcccgtgagcggtgccggagggagcggctgaccggggtcgactcgacccggtcttggccgagctggcgccgacgtggcgcctacgtggctgccacgcgggccggcgggaggtagacgacgacgccagccggaacggacggcagacgaccgcggcgagcggcggagcgaaccacggcgatacaggcgaaagcgggcacaccgggtggttgcacaggacgaggggaaacgagccaacggctcggattcgccggagggagcttgacggcggcgaattgcggcggcggcaaccggcggcggaagaagggggaaacggcgacgaggtcacgaggggccgattaccggcggcgagagcatctacgcggctacgggaatccgtccctagcgttggattaggaggaaacgcatcgaggaaggccggcgacgaaaggcgcttccgagctcgggcggcgatggcggcgagcacatggcgagcggcggcaacggtcggggcggcgccggctagctacggggaggctactcgcactaccgtgcgggcgggcgcagtgacgagagccgacggcgcgaaacgtgatcgtttcggcctcgggccgaggaagaggaggaagattgcgcggccaaagtccccttccgcgtccttgctcgtgccggctcctccgacacgcgcaacgacgaacggcgatggcgaacagggcgacagtggcagcgagagacgaacacgagggagattggagggggggagcttgggtttaccttggaggctagcgcgtggagtggcgggggccgggcgatgac

SEQ ID NO: 84518 - DNA, 357 bp, Oryza sativa
  Clone ID: PAT_MRT4530_83747C.1
atgggagcgaattttccaggatttaacggcgtcgtgctttcagtggtaggcgacgtacccgtcgacagcgagacgcctgtggtgacttcgtcaatctctctagaatttgccggcccagtcttcgaagatgctcatagggcacagtatctccggcaagtcatccgcggcaggcacacacacactggtatcgcctccggagcatccacgtacacaaggctacagccacgtcgcacaagggtaggggagccaacgaggcacagagccaaacaacaacctgccatgcgccgcgcaggcagcgactccatccccgggaacaagagcacccaacaagcaaagctcagcatggcgtccagatga

SEQ ID NO: 84519 - DNA, 402 bp, Oryza sativa
  Clone ID: PAT_MRT4530_83748C.1
atggaggaggcgcgggcgagggattgtgttacgaggacggcctccgtagtcacgttgccggagaaggggaatgctgagctggcgccgacgtggcgcctacgtggctgccacgcgggccggcgggaggtagacgacgacccggccgcgaatggacggcgggtggcggcggcgagcggcagagcgaaccacgcggcgagggaagagggaaacggcgacgaggccacgaggggccgattcccggcggtgagagcatctacgcggcttcgggaactcgacgctagcgtcggattgggcggaactacgccgagcgaggccggcgacgagcgggtgctacggagctcgggcggcgacggcggcgagcacacggcgagcgacggcaacggtcggggcgacgccggctaa

SEQ ID NO: 84520 - DNA, 1198 bp, Oryza sativa
  Clone ID: PAT_MRT4530_83749C.1
ttttttttttttttttttttttcctgaagtgctactggcttttgccttttgtttgaattcaatcagaaaaagtggttttcttcccgcatcgaaaaggataatactatatcaagttttctaaggtggtttgtacataatcagcggcaagtatcatggtccaggttcagctcatctcttacaatcgatggattgatacaaacaaaggtaacaaaatagtattatgctgcataatttttgtctggctattatttatccttattcaagcactgttcttgtgtggcgttctggttcaaacttgcccttcacccgtagcaacggatggggtcgttgcaacccttctccgcagactgcctgaacccgaagcgaccgcctttcgcaaggtattgctggtggtactcctctgccctgtagaacctctttgcaggaagaatttcagtgacaatcgtccgattcagaagcttctgctgcttctccagagattctcttgccgccttctcctgctcaggggtgtagtagtagatacctgacctgtattgggtcccaacatcattaccctggcggttgggcgtggtgggatcgtggcgcgcccagaagacgtcgaggaggtcgtcgaacttgcaggcggagacgtcgtagtggacgcggacgacctcgttgtggtaggtggcgccggtgcagacgtcctcgtaggtcgggtcgtggaggttcccctggctgtatcccacctcggtgcgagtcacgccggggacgcgctggaacgcgagctccacgccccagaagcacccggcgccgaactgcgcgaactcgttcccggccgccgggcggtcctcatcggggccctgcgccagcgccgccgacgccgccgacgcccgcgggcttccccccagcccgcccagccccagcttcccgagccagctcatcgccgcgaaactcgtcctcgtcgtctgggtggtggtggtgctcggcgcgaggaagccgcggcgcgtccggtggaggagaggggcgccgccgcagccgcagccgccgcctccgcggaggcgagaggcgaggaggagaggggacgtggaggaggtggaggcgaggagaggaggcatcgagggaggcttttcctttccgcttcggcttttgtggcggcgtggcccagaagcttcgacgcgcggttggttggtgccttggtgcctgcaggggacccgtgggt

SEQ ID NO: 84521 - DNA, 1287 bp, Oryza sativa
  Clone ID: PAT_MRT4530_8374C.1
atgggcatggtcgacgcgacgcacgcggacggaaggagatggctgctcatcctagtcgcgcgcgagatcgcaactgataccgttggcgaggttatatatcagacgcagcgatatacgaaattgatcgaaggacacagtgctatagacgcacatagagctcttcctctgtcagcgccggcggcgttagcacttcactcaatcagagctcttcctctgtcagggccggcgacgttagcacctcacttaatcaggaatagaatgagcaggcctctgtttcttcgcataatgaatgcagtagaggatcacgatgactattttgtgcagaagagaaatgcagctggtttaattgggttcagttgtcatcaaaaggtcactgcagcaatgcgtcagttggcttatggtatagcagcagatgctttggatgaatatctcggtattgcagaaagtaccgctatagagagcctgagaaggtttgtgaaagcagttgtacaagtttttgaacatgaatacttaagatcacccaatgagaacgatacaactcgattacttgaacttggggaggacagaggtttccccggtatgttaggctccatagattgcatgcattggaagtggaagaactgccctacagaattgcacggtatgtaccaagggcacgtgcacgagcctacaataattttagaagccgttgcttcaaaggatctctggatttggcacgctttttttggtatgcctgggtctcataacgatatcaatgtacttcatcgatccccgctatttgcaaagctagctgaaggcaaggctcctgaagtgaactatagtataaatagacacgattatatgatgggatattatcttgctgatggcatatatccttcttgggccacatttgtgaagaccataccagaaccacatggcaacaagaggaaatattttgccaaagcacaggaagcagtaaggaaggacgtcgaacgagcttttggggttctgcaagctcgatttgccattgttcgagggccagctcgacattggaatgaaaagactctgggatacatcatgaaagcttgtgttatcatgcataacatgattattgaagatgagggagaagttgattgggaagaacggttcccagagggaggagaaaatgtcagagtgtcccacgatgaaatacctgatcttgatgattttatccagatgcacaaaaaaataagggacgacgaaactcactatcagctacgtgaagacctagtggagcacttgtggcaacattatccggataaatattga

SEQ ID NO: 84522 - DNA, 2151 bp, Oryza sativa
  Clone ID: PAT_MRT4530_83750C.1
atgcacaccgtcaaggagacggagttacttgctgccaagctggatctcctcatgaaacgcttggacgaccacgagaaacggccacaaggcaccgttaaggccttggaatctcacgtcacgtgtgaggtctgcggcggcacgggtcattctgggaatgaatgcccggaaacctgtgaggaggtgatgtacatgggcaagaacaactggtatcgtccacaaggagctaaaaccactgatgcgctaagcaaaaagcttgctgccaatgataagatcttagaaaacataaatgtgaatctagatggctttgcttccgcatttcaaaaccagctgagctttaataagatgatagaaacccagttagctcagttggcatctttagtccctgcaaatgaatctaggaggattccggggcaacccgactcctccattgaaaatgttaaggcgatcacaacgaggggagttatccaaaagatccacatcaacgtgccgttgttggacgctatgcaagtgccaacatatgcccgttatctcaaggacatactcaacaacaagagaccactcccaacaacggaggtggccaagctgacggaacattgcagcaacatcatactccacaagctcccggagaagaagaaagatccggggtgtcccacgatcacctgctcgatcggggcacaacaaatcgaccaggccttgtgcgaccttggagccagcgtcagcgtcatgcccaaagacatctttgacaagctcaacttcacgtccgtccgttacccggcagggataacggaggatttgccagacaaaatacaggatttcttcatcccggttgattttgtggtgctggacatggacacggggaagaagacgccgctcatcttggggcgtccattccttagcaccgcaggagccaacattgacgtgggaacggggagtatccgtttccatatcaacgggaaggaggaagagtttgagtttcaaccaaggacggaacaatgctccatggtcagaatcaagtacggaccgaacccgcagaatattcaagtggtcgaattggagccacccaagacggatagcctggtaaagttcatgcagaacttcctggaaaaggaaacaacaatgaacaggaaccgttattggaggatgccggtaaaatcacctataccggccaagaagttagagcaaccggctcagaagaagccgtctaccgcaccaaaatcaaataaggtaaattgtatgaggaggcgactgtctcgtctgttcaaggggtcaggctctccatcaagtcatcatggcgagtctagcactcgttcatcagcggatgtttcgatggaagacgccgacgctccgcgacaactcctgagtgacactgacctcgaccttgtcagtgatcgggagagacaagcctactacatgcgaagcgaccgggagtatgctcacacgcgagaatactcaccggagttgctgaaaaagatagaaatagaagatgatattttttttcgctttttccgtaaggagttcacgctcacatggaaaggcttgagtacacttcttggttttcacgattcctgtaaaatcgatctccagaaaggaatttctgggttcgagaaaaataggttttgggaagatatttttggtgctccaatttgcaagaaacctagaacaaatgatatccataatcctacacttaggctcatgcacaaatggattgctatgactttgtttcctagaagtgatctgagacccattaggggagatgaattaattatcatgtttgccatgatttatgaggcaggttgggcaccaactggggatgcacccggatggacccaagctctacgctatagcatggactctcaacttgggcaagcgccagtgaggaccggtggcatgcgcctcatgacatccactggggagacaatcaaccttccagatcaagtggacttgggtgaaatcactaggagaatggacacccttgatgtgcagacgggggagatccaatacaacctcacggaacacatagctcaaacgcaagaatggcaacaatctgctgatgctcagttcaccaacatcaacaacatgatgcagcaacagcatgatgaccttcaggcgtactttcgctttcaggggttcaatccttatcaaggaccctga

SEQ ID NO: 84523 - DNA, 1395 bp, Oryza sativa
  Clone ID: PAT_MRT4530_83751C.1
atgggccggccggcccaagacggcccaaggcgcgcgcgcgcgggaggggagagtgagccggtggaccgggctcaccacgcgcggtcctaggtgggacccgcttgtcagcggctcggctcactgtgcggagggagcacgcggcgcggcgctagggtgggggagggacgcggtgcacgcgcgcggttcgcggtggacgcggatgcggcgggcccacgcgcagcctctcggctcgcggtggaccgcgcgcatggggaggggctgaccgggatcggcccgatccgatctcggccgagctggcaccgacgtggcgcctacgtggctgccacgcgggccggcgggaggtagacgacgacgccggccggaacggacggcggacgacagcggcgagcggcggagcgaaccacggcgatacaggcgaaagcgagtacaccgggtggttgctcaggacgaggggagacgagccaacggctcggattctccggagggagtccgtcagcggcggattgcggtggcggcaaccggcggagagaaaaggggaaaatggcggcgaggtcacgaggggccaattcccggcggcgagagcatctacgcggccacgggaatccgatgctagcgtcggattgggcggagctacgccgagcgaggccggcgacgagcggcgcttccgagctcgggcggcgacggcggcgagcacccggcgagcggcggcaacggccggggcggcgccggctagctacaggaaggctactcgtgctactatgaggaggggcgctgtgacgagaggccgacggcgcgggagtaatctctccggcctcgggccggggaagaggaagaagagggcgcgcccggggtccccttccgcgtccttgctcgtgccggctcctccgacacgcgcaatgacgaacggcgacggcgaacagggaaaaggaggaggagagcggggacgtcgcggcagagggaggagggcgctctgcctccgccccttggaggctagcgcgcggagtggcgggggccaggcgatgacgacggcgatgacggcgggggcggtttgagcggcgcggctcgggcacgcgcgctggctagcggggccgggcggctgcgcgtcagggcagcggggccaggcggcacagacggcgcaggcgcggcaagggcggcgaccgcgcgggcgcgcgcacgcgaacacggcgcgcgggaagcggcagcgagggagcggagagggagcgcgcacgcgcgcgcggcgcgcgggcggagcggagggggagggggagagagagagagagagagagagagagaacgccggggagggagggggagatgggccgagagggattcggcccatcgaccccgggggaggcaaaatagacttttgcggagggattttatttggaaggattt

SEQ ID NO: 84524 - DNA, 421 bp, Oryza sativa
  Clone ID: PAT_MRT4530_83752C.1
aaaacgcaaaaccggttttaaaaccaacacattaaaaaaggggtttaaggggaggcaaaatgggaggggaaaaaaacacccccccgaaacattgacaacggacgggggggggccaaaggccaaaaaaattttataacaggggggacccaaagggggaggggggggggaaaaacgggcccaagcctaaaggcaaaaaaagagcccccggggcaagggcctagcagggggaaacaaaaaacctttaaagcataagggaaccccagttgggaaaggtgggggggggcccccttggagccttaaaaaaaagccttctcatcgggaaaaaatttctccacaagggggcgaaaggaaagcaaaccaaaaagggttttgccacaaggaagggaaaaaaggccctctttggaaccactaaaaagccccg

SEQ ID NO: 84525 - DNA, 456 bp, Oryza sativa
  Clone ID: PAT_MRT4530_83753C.1
gggttggtgtttttttttttttttttgaacaaattttttttttttttttttttttgtttttttaatttttatttttttcgtcacaaagttttctttcttgtggttttttttttttgatacaccttttctatttattagtacattattttaaggccttgtttttcgacttatttgaaaagcctgggtgggtttgttgttgatatttaggagggaaggcaccgagcttttttcccctattatttttaagggttcgtgcttgttccctcgatatgcggtaagcattatcgatcacattcactgggatgggacggaatattgagtttttccctggaggggggctcaccatggagtttgcattggttttgaatgaaatgtattggcatccttcatggtgtggtttcttaaagacaacgttttgttgtggaatgaacaacaattgacctggacgtagaacgc

SEQ ID NO: 84526 - DNA, 548 bp, Oryza sativa
  unsure (1)..(548): unsure at all n locations
  Clone ID: PAT_MRT4530_83754C.1
accctcccaggccggccgggaatcactcaaaacactcatcaatgaaatctgatcagcggcagctctttttttttctttctgaaggaacaaaagtgagcaatagctagcggcacatctctctctgtggccatggatcaagcgaggatctccctcttcccggatggcctccgcgtgatgatcatccacgacgaccgaaaggccgncagaagggcaacggcgacgctgccccaactgcaccacgcagnggnggcgacgcactccaccgcaagcgctgccctgcgcgccctctccggcgacaacgccccacaaacccaagccatcctctgccaagcccacacggcggcccccccacgcctcccactccccccccgccccccaccccccaccctcccatccccgccacctaacctcctgccccaaccacggaacgaggcaggacacggcccgccccccaggcaccccccccccccccccaaccacccccctgctccacccccccccccaccccccaggacccccccccaaccccccccccctaccccccgcct

SEQ ID NO: 84527 - DNA, 556 bp, Oryza sativa
  Clone ID: PAT_MRT4530_83755C.1
ggaaagccccaaagatggcaccccccccctttccaattttaaatcgaccctgggtccaggttcacataaacttttaactcatttgaagtttttttgaaactgtccttttttggaaaccaggctttttaaagccatactttgtttggggatccaagaccccttccatttcagttttcgggggccgctcatttcgaatttgagccggttcgcacaaaacccccccaaattcaaccttccatttctttcgagtgactggaccctcgcccggtgaccaaaaaatcttcgttcggtggattccaggaaataatttcccttcacagcttttgggtctcataacatgaagccccccttccttcatcactgatttttgaggaccttcctttggagtttgacattaatgcctccttttctttacggaagattttctttgcctcgctgtttaaagcacccaatttggggaggaccgcaagcccgatcttggttcccgccaaaatcttgtcccgcttggatgcaatcccataaggatccctaagtatacccatgggggggaagatga

SEQ ID NO: 84528 - DNA, 478 bp, Oryza sativa
  unsure (1)..(478): unsure at all n locations
  Clone ID: PAT_MRT4530_83756C.1
cccacgcgtncggtttgttctaccttgcttcgctgatgtacgagccgatcagatttgcactttcaaggtccacgagatcacaggcagtgccgttgcaggccgttgtgatgcccaggagatcagtcgtgtactgagcaaagattaggccagaagccccggcacccaggacggttttcaatgctagtggaaaaagtgtaagtggtgatatctcgatggagatgcacagcacaattctccccttcacatccgtgccgttcagatcatccttggtgcatctatccacaagaaaacggcctccatatgctagaagtctgaagctgctgcctgatgagttattcccttcgtagtagtacatggactgtccctgcaaaatagccagatttttggacaagataagccgttgaccaatgagcacacatcgtgtggtgattaatggatcacgtttgtgcgtcgtaccacaatctggcgcttgtccccc

SEQ ID NO: 84529 - DNA, 1055 bp, Oryza sativa
  Clone ID: PAT_MRT4530_83757C.1
ttttcgtttactgatgggtgttaaagccagtattcgtggcaatttacgtgaattactggctgatcaaaaagtcgtaaatggcttaaccaaaatagcagaaaatatagaatttctacaagaagtgattaaaaaatcacttggtcgctcagaaacgttagataaaatcttcgaaagattggcggaagtcaaagttcaattacaaaaattgagtaatactagcatagttggttattgctattggtatgaagccaacgggcgttattttggtttacatatcaccccgttaaccgtggcagataaatttggtgaacaactcaaaaagcaacaaattggttgggtttttgcttcagcaactttagaagttggtggtcagtttgatcatttttgtcaacgcttaggcattgaaaatgcagaacaaatagtattacccagtccatttgattatgctaatcaatcactgctttgcgtgccacgttatctgcctgataccaataaatctcacacgttaaccacgttaggaaatatgttaatgcccgttattgaagccaataatggccgttgctttttgttgtgcacttcttattcaatgatgcgcggtatggctgattttttacgagaacatagccagcttagcgtattgttgcaaggtgaaacaagcaaagcgcgcttattagcacaatttattaccgaaaaaaatagtgtgttagtcgcaacgcaaagtttttgggaagggattgatgttcgtggtgatgcattatctttagttattattgataaattaccatttacctcaccagatgaaccgctattaaaagcgagaatggaagattgccgtttgcaaggtggtgatccatttaatgatattcaaattcctgaagccgtgattacgctaaaacaaggtgttgggcgtttgattcgtgatgtaaccgataaaggtgtagtgattatttgtgatgctcgtttagtgatgcgtcagtatggcaagacttttttagaaagtttgccaccatcaagccgcactcgtgatcttgctaaagtgattcaatttttgaaaa

SEQ ID NO: 84530 - DNA, 1281 bp, Oryza sativa
  Clone ID: PAT_MRT4530_83758C.1
atcttaatactaaaccggatagtgatttggttccggaaccccatcaaatctgccggttctcccacttcgtacgccgcctcgccggaaggcgaagaggaccacgccgcggcggcggtgacagaggggcccccgctgccagccgctggcggggagccccctgccatggttgtccacgtggtgtacaggaggagggagagctcttggagagggggcgagacgtccgcgaggctccaccagggcgccgccgccatgagcaacccggccggcggcaagcacctcgtccgcctcgccggctcctcctcgctccgcggtggcgccgccctgtctcccgccgtctccatctccagcgggagccgccctgccacgcgagccggggcccgtgccctgcgcgccgcctcgcctcccccggcctgctccatcgcctccgtcgggtgctgggagtcccgcgcgctccgccttgatggcgatgaggactgggaggtggtcgtcgcccagggcgatgacgccgtcggggcggattctggggcgttcgacgctgtccaggaggcggcggatgagcacgcggaggcgttcggggccccgcccaccgaccaggaagtccgcgccgccgttgctagcatccaagaggtatttgaaaaccatcctggattggattctgatgcacctgcccaagcacttgcattgtcccccatctcaggacttcctccatctggaatgtttgttaattatttttctgaaggttctacaccatctgatattaagattgaggattctactccatctgatgttaagattgaccaattagccagcttagaacactctacaccagacactgcatcagaggaatgtattgaacctgctatgcttgtccttaactcaactgctcttttgacaagggaacatcggaatgtgctggatgcattccacctattgcaagtagattcttctgtccagaaaatggttatggccttgtcaactgataagtctgtatgggatgccgtgatgaaaaatgaggtggtgcaagaattcaggaagtcctttcaggatgctaaggaggctgatcccaatggaagttcttctgcttctcctggagtgatgaagtgggtcatggaaaccacccaagcaaagatcaaggaattccttgagagcatacttaagcttgtgaacatgctctttcaagctcagagtgaggactatgatttgtatgacgatacagtgagaatgtccttcatgctcgcagtgttcgtcttcattgtggtgactgtggctcgcattaagtga

SEQ ID NO: 84531 - DNA, 1989 bp, Oryza sativa
  Clone ID: PAT_MRT4530_83759C.1
atggcttctgcatcatatttttggtccaacacactcaatgccttcatgttcaaccaagggccgatgacccccactctgcttgatgtcatcatgatcactggtttggatgtgacttcatcggctaatcccatgaacttgaactccaagaaccaattcgacttcatgaccaagagcataggtggctcgtttggttatgttgattcatacatgggcaaaggatcggttaccccccgagagcacacaacctttctgttaatgtggctcgagaaattcctgttctgtgaatcaagctgtggccctatcaccaattggcaattcctagcggaagcccttgaagccaagaagcaaatccctttgggcaaaattctcctcggctatctatatcagatgttgaacaacacatcggccaagatagctgtaggctcagtagtaggtgcagaggctgcatcaacaccagccgattctagagcaaagctatcggctgaattgctcaaagactggttctgcagtttctatgagggcttccagaaagatgctcgagtgtggtttacatatgaagattcagtggagttcgagctgccatcagacttcatatttgaagacatcaattctgagaaatttgataagtccatagaagtcttctcggctgctatcagtccatcttccatgtacatgacagatctattcccggatgtcatccctcagacaacagaatcttctcctccccacaaaagcaatagtggcaaggacatagaatatgctctaggccttatcccaaatggaggtggattagctccccctgttatcagctaccatgcccccaggacctcgagtctactccaagggcagctgaaagaaccagccgatgccggcaggaagaggaaaactaaggcattggctgttgacccatcggctctggctccaaagaaaaaggccaagaagaagaaatccaagccaaccgatgacttgcctgtcttaaatccatccatagaacaagccctggatgaagaagagatcgaggaagatgtcgaccaagctgcaaccgaactgagtgacttaggagaaaaaacaccatcggcttcacccaaacagactcctccaactcctgctgctccagcccatttctcaaggaaaaagaaaactgtcgtgaagaagaaatcggcaccagcaccatctaaactagctccaccgcctcctcctcctccttcgtctcctgtgcagccgacgccaagtgatcatactccatcggccgcaggcagccacaatattgaggaggaagaacaaacaactgctccttctatcccagtcttagccgatatgttatcctttgacatcaaggattactttgacgaggaggcagaagaagaaacaacaagcaagactctagcccctctagatgaagatgtcaaaagaacacttgaagacatatctcatcggctagagtcatcattagacaacttagtggcttactgtggttcaatccgggcaagatttgcagagattcaagccctagtcccggatgatctggcaaataccatctcttcagctgtctatctcaagcaacatcaattcaagatggaaaaggccaagcaaaggatagccgatcggcgagagcaaagggatattgaagccactattcaggccaatcagcaacttgtgcatgaagaaaaagctaagcttgatcaactctatgttgggccaattcagtctaacaaagatcggtttgaagcccgcaagattgatctcatagcacaacttgaagaatgcaacgccaagctggatctggaaaaacaaaaattagccaatcttcccaatgccgttgaagaacagaagtccagactaagatcggccataaaaaatgtggctgatatgaccaagtccctcaaggtcattcctggaaccgacgcccaagatatccaagctatcgaagaagtagatcaaattagacaacgggttgtatcggctatccagcgttacttgtctggatga

SEQ ID NO: 84532 - DNA, 1836 bp, Oryza sativa
  Clone ID: PAT_MRT4530_8375C.1
accaaagtgaagagattcttcagttttgtcgactagatagagaacatcgagtcataggttcacagcaaacacaaaaggactcaatgtgtcaccgtacagaattacagacaaagggatatccttacagcacctgaacatgcttacattgtcgctatttaacgagccatgttatattaggcacacgtggccagacaacagctgcttggactgacatataaaatacctgacttggtaatacctggcaaagataatcagtcatccaaaattcagcaaaatcacaaggaatacctctccagcaaccaacatggtcaaatactattaagatcatccatcattcgggcaacattttcttagtataaaaactagtgaatggatgataaaatcctggttccatggtttgggaaagcttcttgaattgcattgagtgcagattgaccatgaaggcaccaatatctgtgcacagcaatacttcattatgttcctccacaaagcccagaatagttggtgcagctccatgacgccctggttcgacggaaagaagcctgtccagttcaattgttttttccagcatccatccagcaacacccatcacaattggccttgatacttccacacattgaggctaaattctggcagaacaaggaggagaagcccaccatcctctgctggcatgatccgaatctggtagtaggtaaccacatgggcatgcacatccggtggcacatcgatccgggctagtccctgcgtatcgaaatcgaactgaaggatggagattccatcaccctggaacaaccagtaaacagaattcccaaccagtgcactagaatgatgacagatgtaacccgctgaataaaactcggttgagatgacattgccccaatcgccggtcttggatgagtaaacgcaggtgaagagccgtgtttgcagtgggtgattgcctagtatggctacctcaaagtggcagcctccgtcgacgacgcaacgcaccgccccccggaagacgaccacgagactcctgccatggccgtcgaggaacgagccaggaatgtccacggcgcgccggtcgccggtgacggggtcccataccatgagccggtgaagaacccagttgaagagaaggacgaggccatggcggcatccgaacatggagtagcggtcatcgtcgccgccggggagccgccaggagaagcgcgcggcggggatgcggtccggcgggtccagcgtggggatgaaggtggggtctactctcctgaacccggccttgaagaagccgaggaggggatgcttccggtggcgggattggaagcggcggaggaagccggggtcggagacgatgaggcgccagcggctgcagacgacggaggcgcgggggagggaggacggcagcggcgggaggcggaggaggatctcggagagaaggtcgtcgtcttccagcggctgcgccggcgccggcgaggtgggacgccggcggcggcttgtcatctccgcctcactcattttttggggttttctgtctgtcggatcaattttcatatggacttgaaagtatggtgggtcccacatgtcatcttcaatctctaccctttttctctcctttcctagtttatgcgattctcctaagtcttgacgagaagcttgtgttggtggtgactggtgactttttgtcctggtgccatgctccacgaggctagcaccaaattcggtaggagcgagcggttcagcctcagccttgtttcctcgtacggcccacatacggcagcccacagctttgttgtcccctccaatattttccttttccttttcatcttctctcctcctcctcctcctcctcctcat

SEQ ID NO: 84533 - DNA, 442 bp, Oryza sativa
  Clone ID: PAT_MRT4530_83760C.1
acagtggacacaaagaattactggagttggcggcggcggtgggccggtggcgacggctggggacgatgaccggggtcaggggatgccggcgagggcgacggccggaggacgacgtcgatccagtggtgttgcgcgggagggcgccggccggaggacgtcgggaagggcggcggaggaggtcgccgaagctgcggtcgtagctagcgaggtcgtcggggagacggggaggccggcaaggcaggcaagctcccggagaagccgattcgccgtcggcggttgctcggggccgcaccttgaagcgtgcgagcagcgcagtggcccctgccctggggtcgggggccctcggaccgccgccgccttttccggtgaggtgagcggcgaggcgcgctttttcccgcccttccgcccccgccgcgccgtgccgcgccggtggtcggtgtga

SEQ ID NO: 84534 - DNA, 1850 bp, Oryza sativa
  Clone ID: PAT_MRT4530_83761C.1
actagtggatccccgggctgcaggtttttttttttttttttttgttagggaactcatccaataggctaatataatatccattatgtccagaaagactatgtacatctaagcacaccaagaactctagtcgcatatcatgaaggccaaaaccaaaactctaaacaaaagagagagagagaaaaagaatattataggtaaatactagagacaataacgaatccaactgacatattaacgcatattgacggactagacagagaaaattgccaaactcttttttagttttttaacccatcggcggcgaggttaagatactggcatgctgctcaggaaactgttggtttcaccgccaccggcttggctgggtcagtgccgagcacggtggccgccgccggcacgccgctgacagccgaagcatactgggggaggacgctggtgtagtagatggcgtggccattgctgtcatacgccacctgcggcgcgtaggcctgagcattcgacgcggcggcgggggaagggccattgccgctcgcattggcattgccattgtgctgcgcgacggcgtagacggcggggaaggaggtggcgccggggccagcggcggtggtgaagtagccatgcggcggcgcggggatgaagaagacgggggcatggtcagcgccagagccaggggcaacagatgtataccttcccggcaccggtaggaaggccgtcggcggtggagcggatgatggaggcggagcagcgggcttctcctggtacttgggcaagtagtactccggcgtggccgttggcggcgttggggtgacggtggcgggagggtaggcgcgggtgagggagtcgtcgctgccatttctcggtagggccgccggcggcggcgcggcggtagcgggagcaggtggtggtggtggttgctgcgcggcggtgtcggcgaactgtagcttctcgagcccctggatctggcgctggaactcgccgggagagacgaccggggagacaacgacgtggtcgcttacggggttggtggtgtggcggtcgtcgttcttggcggggatctcgacggggacgttgtccttcaccgtcggcgggtcaccggcggggtccttcaccttcaccgcgggcggcgggacgaagccgttgtcgaggccgaacaggtagtcggggcccgtcggcgctggcaacaccggcggcggctgcggcatcggcacaaccgctggtggtggcgactgcacggagaccgactcctgcttcggctgcggtggcgacggtggcggcggctgatggacggagttgagcgcgtcgacgaaccactggcgttgctcctgcttgggctcgaggaggccggacggctgcggcgggggcggtggcgtgggcgactggacggggaagaggaaaaccctgagcctgggcgtggaaccgccgcgggacgagccgccgccagatcccggcgcggggcggagcaggtggaggcggtcgtactcgaggacgaggtgctccagatcctcgtcgttggtgacggagacgagcgcgtcgaggtcctcgccggggagctggtacttgacgcagaagtcccccggagaacccgcgaggccggccaaccgcgcggcgaagtcggcgaagcggaggggcctctcgagcgacaggatcttcgtctcgccgttgacgtacgagagctggtggtcgtgcggccgcggctggatgcgccccccgtagctcaccatcaaccgcaccttcgccggcggcgccggtggcgggggcgccgcctgcgccgccgccgcctccgagccctcgtggtgcgcgtcgtcggtggccgcggcggagtgcggggacgagtcgccggagtcggccat

SEQ ID NO: 84535 - DNA, 2175 bp, Oryza sativa
  Clone ID: PAT_MRT4530_83762C.1
atgaatcttaagcggcaaaacttcaagtgggtgttcaacaaaggcttcaggaccggaggtgatatagatcatcgaggtggcagcgtaagtggttttatggggaggctggcggggtcagatcagggtgactgcagagtaacgtcagggaaggccgaagtcagaggctcgggcagcggctggaacgagggagggcagagcggcgcgcagcaggaggcgacggtgcagctgcgtaggctcaggtgcctcatggctgcggtggccgacgcactcgccaagctcaggacgccgacctcttgccctccgggtaggcagccggccgaggcggcggcccgcgaggcaggcgaggcgggcatccgagcaggcggccagcgaggcggcggcgctccttgggcggccgagcaggcggccaacgaggtggcggcgctccctgggcgggcggcggagcctgaggcggcagcgggcaggcaccggccgccgaggcggcaggcggcggcggagcccgaggcggccaggccggaggccggcgaggcggcggacggccggcacccgatctctgcgatgtggcgacggcgacggcggggtgcggggtgcgggcggcgcgacgacggcggggtgcggcggagacggcggagatggccgtccctccctccccctctccctctccccgtcggcctcgacggccgtccctccctccctctcggcgacggtcgtccctacggcagcgtcgacggcgacgacggcgtctgcggcatccacagcgacgaggagtccccggaggcgaaggcgccgctgctgacgtcatcggacgacggccagacgatgcaaccgctagcgcaggcgacgccgagcctcgtctgcaaggcgctgaacagcacggccgacctcgcgaagcacctcccaaccagcgtcgtgctcgccttcggggtgctctcgccgtcctctaccgcggacggcagctgcacggccgccaaccgcgcgctcaccgcctgcctcgtcggagcctgtgcactctgctgcttcctgctctgcttctccaacagctaccgcgacggcacgggcgccgtgcgctacgacttcgtcacgcccagcggccgcctccgcctcatcgacggctccggctcgctgccgccgagggacaacaggtacaggctcggcgcgcgcgacgtgctgcacggcgcactgtcgttcgcggtgttcctggccgtggccatggtggaccacaacgtggtggcgcacttctacccggtggagtcaccggcgacgagcattgacgggagcggcagcgggcgcggctccggccagcagcggtcgcgcaacggcctccgcctccgtcgccgctcgctcggtccgtctccacctcagccaccgcgagctttacctcagccgaccgctccgcctccttgcgctcgtgctctgcctggaccaccaccgctgcggcctcacgccgccgtcctcaagatgctgccggccggcgccacgatggcccgcctctccgcgatggacgccggcgcccgcctctcccccatcccctccacctccctgcgcgccgctgtgcgcaccgaccaccggcccgcccccgcgcgccgctgcccatcgcatcccctcgccgacgcttccgccggcgctcacctctccaccatggcgtgccggcgtgtgcagcactgcccgctgctgactgaagaagagagagaaagagggatggaggaagagagaaagagtgccggccgcctctcccaccaccggcgccgcttcccttcccttctccctcccttcttgccggtacggcgcgacgatggagggctgcggcagcggcagcggctctccttcccgtctcgccggcacggcgcagcaacggcggggtgcggcggagacagccgtccctccccctccatcttcctctccctctccccgtcggcgtcggcttcgtccgagggtggatccgtcgacggtggcggccaccgcgggcggttccggcagcggcgctcccttcgccgcctctcttctcctccggcggcgatggtggttgaagacagggcgagtcctagcgagcagatcagtcaaggcgacttaccagagcccatctcaccatcaatcttgaatgtctcaactatggccaaccaccttgatcaaaatagatttagaaaagatcaaagccggttaccagagccgatttag

SEQ ID NO: 84536 - DNA, 705 bp, Oryza sativa
  Clone ID: PAT_MRT4530_83763C.1
atggcgtcgcgtccaaccggcgccgacgaggagaccccggaggcgaaggcgccgctgctcgcgtcttcggacgacggccagacgacgcaggcgacgcaggcgagcctcgtctgcaaggcgctgaacagcacggccgacctcgcgaagcacctcccgaccggcgccgtgctcgcgttcgaggtgctctcgccgtccttcaccgcggacggcagctgcacggccgccaaccgcgcgctcaccgcctgcctcgtcggcgcctgcgcgctctgctgcttcctgctctgcttcaccgacagctaccgcgacgccacgggctccgtgcgctacgggtttcgtcacgcccagcggcagcctccgcctcatcgactccggctccggctccggctcgccgccgccgccgccgccgagggacgacaggtacaggctgggcgcgcgcgacgtgcttcacggcgcgctgtcgttcgcggtgttcctggccgtggccatggtggaccgcaacgtggtggcgtgcttctacccggtggagtcgccggcgacgaggcaactgctcgcggcggtgcccatggcggccggcgcggcggggagcttcctcttcgccatgttcccgtcgacgcgccgcggcatcggcttccccgtcgcggcgggcgcctgacgcgcgtacacacggatcgattgatcgagttgccacttttggcgctcggatga

SEQ ID NO: 84537 - DNA, 378 bp, Oryza sativa
  Clone ID: PAT_MRT4530_83764C.1
atgaaagttgaccggggagcccgacccctagtcacgggagagggcagccaccgcccgaccttgggcccgatcccctctcgggggagggccacgtggcgcctggggcagccttctccctctagtctcggccagggagtggccgccgccctacctcgggcccgacccccctcgggggagggccacgtggcattggagggcagcctcctccatccagtctctgggaaggagtggccgccgccctacctcgggcttccgtccaatctctgggcctctaaacatgatacccccgggcccatatcaccgacagtaaccccccgcgttagccctaaccaaaaccttcccccggtggccagggttgacgccactctcctagtctaa

SEQ ID NO: 84538 - DNA, 591 bp, Oryza sativa
  Clone ID: PAT_MRT4530_83765C.1
gatcataaaggatctttcccacccaaaagctagccattgaggtgaggggctcccccacttatattagatctcttgcccttccacaactaatgtgggactattcaacaatctctccctttacacattggtatccctcagcccttcaccgccccttcaccgtttccacacggctcctcaggtatacgggccctacaggcacccacggtccatcagaatcgtaaaggatctttcacacctcaaaagctaggcattaaggtgaggggctctcccacttatatattaggccccttgcccttttataaccaatgtgaaactattaaacagttcgtgttgatgtttgccttatattataaaatatctaataaaagtggttgtgcactatcatggaatggagggagtatacgttaaacttgcacgatatacaatctgcaacttcactacagatatttactgcaacaattagttttacttctattacggacggcctcgtggagcgctgtctctcccttgctgttccgcctcctcgcgaacgccctcgccgccgcgtcgcccgcgacgccgccgccgccgcccctcctcgccaggtccagg

SEQ ID NO: 84539 - DNA, 433 bp, Oryza sativa
  Clone ID: PAT_MRT4530_83766C.1
ttggtttttttttttttttttttttttttttttttttttttttttttttttttttttttttttttttaggaaccaaggccaactttgctccgtgcttttgaaaaaacgggtgcaaccagtgctattgttaatgaaggggaattttttttttgtatcacaagaccattctgttgtagcaacaagagactcgctgatcattaatgaatgaacaactcccaacaccataattgtgacctaaaagaccaagtagcaacccgcggcaatgcttcttccagccgttcttgttttcccagttgaaagcctatgtgttgagaaccttggaatccttttcgcgcacctgccttcaggacaacaatgaataagcaaattaagctggaggatgcattacaacaaaggccatggagttaaacaggttatacaataaagcagtagt

SEQ ID NO: 84540 - DNA, 549 bp, Oryza sativa
  Clone ID: PAT_MRT4530_83767C.1
gcacgagggcgccgccggacgcagttctcccgcaccgccgtccgcaacctcatcgtcctctcgggggctcgccgagcatgattcggttcggatgattggtggtgtggcgcggactctcttttgcgggagtatattgtgattgattgttgtgtgtgcctatgcctggattggtggcgattcgttgcggaggtttttgcgttacctgtgcctgggtcgctgatcaaacttttggagtttcttttgtaagcattttcgtggcttgttgctgtgaggagcgatgcttgagaccgagtccgtggggatgaggacaagtgaaaacagtgtcaatgttttgtgctgacggggcaaaagggcgacagctttattgaaacgaagtaaacatagcttgggatgttctcgcaaacaacaagtattgaagataagctattcatgttgttgagcatatcttttttttgtgtgtgtgagacagttaactgctttggtggtatatcgcaatttcaccaaagtagactgcaggggagtcatcccatggtagtgggaaatggaggg

SEQ ID NO: 84541 - DNA, 1476 bp, Oryza sativa
  Clone ID: PAT_MRT4530_83768C.1
atgcacaccatcaaggagacagaactacttgctaccaagctggacctcctcatgaaatgcttggacgaccacaagaaacggccacaaggcaccgccaaggccttggactcacatgtcatgtatgaagtctgcggcggcatgggtcattctgggaacgactgcccggaaacctgtgaggaggcgatgcacatgggcaacaacagcaacgggtatcgtctacaaggaggtcaggggtggaaccaaacacgaccatattatcaaggaggaaataataacggtaacttctgtaaccaaccctccttgaaggatcttgtttttgcgcaagctaaaaccactgatgcgttagctcagttggcatccttagtccctgcaaatgaaactaggaggattccggggcaaccagactcctccattgaaaatgttaaagcgatcacgacgaggggaggtaagtccactcgtgatccgccgtatcctaaccctacgggaactaatgggatgtcaaaagaaacgccatgtaatgactcggctgacaaggagattcagccagaaaacaccgtgccgcaggagtactgcgacacactgttgctgccattcccccagcggagtaggaaaccgtcagtggacaagcagttcgcttgttttgttgaagtgatccaaaagatccacatcaacgtgccgtcattggacgctatgcaagtgccaacatacgcccgttatctcaaggacatactcaaaaacaagagaccgctcccaacaacggaggtggtcaagctgacggaacactatagcaacatcatactccacaagctcccggagaagaagaaagatccagggtgtcccacgatcacctgctcgattgaggcacaacaattcgaccaggccttgtgcgaccttggagccagcgtcagcgtcatgccaaaagacgtcttcgacaaactcaacttcacggtgttgacaccaacaccgatgcgcctccaactggctaactcatcagtccgttacccggcagggatagcggaggatgtgccagtcaagatacgggatttcttcatcccggttgactttgtggtgctggacatggacacagggaaggagaagccgctcatcctgggccgaccgttccttagcaccgtaggagccaacattgacgtgggaacggggagtatccgtctccatatcaacgggaaggaggagaagtttgagtttcaaccaaggacggaacaatgctccatggttagaatcaagtatgggccgaacccgcagaatattcaagaggtcaaagtggagccacccaagacggatagcctggaatcgttattggaggacgccggtaaaatcacctataccgccaagaagttagagcagtcagctcagaagaagccgtcttccacaccgaaatcaaagaaggtgtggaaggaaaagccaaagacgcccgccccattacctccggagacgggtggaaaatccatgaactga

SEQ ID NO: 84542 - DNA, 417 bp, Oryza sativa
  Clone ID: PAT_MRT4530_83769C.1
atgagaaacggccacaaggcaccgtcaaggccttggactctcacatcacgtgtgaagtctgcggcggcacgggtcattctgggaacgactgcccggaaatccgtgaggaggcgatgtacatgggcaacaacaacaatgggtatcgtccacaaggaggtcaggagtggaaccaaccacgcccatattatcaaggagctgagctttaataagatgatcgaaacccagttagctccgttggcatctttagtccctacaaatgaatctgggaggattccggggcaacccgactcctccattgaaaatgttaaggcgatcacaacgaggggaggtaagtccactcgtgatctgccatatcctaagcctgtaggaactaatgggatgtcaaaagaagcgccatctattgactcgttttgttga

SEQ ID NO: 84543 - DNA, 1802 bp, Oryza sativa
  Clone ID: PAT_MRT4530_8376C.1
atggggccaagcagttttcagaaactttttaggagtgtatcatgggtaagatttaaagattttcttcaaccccagcgaaaacatgctgacctcggggaagatgatggtgagctgcagcagacagagagcttctttctggccaacctgtgcaaatttgccaattcccagaagctgcacgtctgcacctcgaagcagaagcttcacaagtggcataaagggcagctgaagctatatgtttatgccaatcacggcgagagcggagggggagatcgcgtcgcgcgtgagaggcgaggaggagatcgcggcgtgcggatgcggaggggaatgggcatggtcgacgcgacgcacgcggacggaaggagatggctgctcatcctagtcgcgcgcgagatcgcaactgataccgttggcgaggttatatatcagacgcagcgatatacgaaattgatcgaaggacacagtgctatagacgcacatagagctcttcctctgtcagcgccggcggcgttagcacttcactcaatcagagctcttcctctgtcagggccggcgacgttagcacctcacttaatcaggcaactgcagcaagcagcaacgattggtgacaggcacaagctcttgtgcagtgcgaatagaatgagcaggcctctgtttctccgcataatgaatgcagtagaggatcacgatgactattttgtgcagaagagaaatgcagctggtttaattgggttcagttgtcaccaaaaggtcactgcagcaatgcgtcagttggcttatggtatagcagcagatgctttggatgaatatctcggtattgcagaaagtaccgctatagagagcctgagaaggtttgtgaaagcagttgtacaagtttttgaacatgaatacttaagatcacccaatgagaacgatacaactcgattacttgaacttggggaggacagaggtttccccggtatgttaggctccatagattgcatgcattggaagtggaagaactgccctacagaattgcacggtatgtaccaagggcacgtgcacgagcctacaataattttagaagccgttgcttcaaaggatctctggatttggcacgctttttttggtatgcctgggtctcataacgatatcaatgtacttcatcgatccccgctatttgcaaagctagctgaaggcaaggctcctgaagtgaactatagtataaatggacacgattatatgatgggatattatcttgctgatggcatatatccttcttgggccacatttgtgaagaccataccagaaccacatggcaacaagaggaaatattttgccaaagcacaggaagcagtaaggaaggatgtcgaacgagcttttggggttctgcaagctcgatttgccattgttcgagggccagctcgacattgggatgaaaagactctgggatacatcatgaaagcttgtgttatcatgcataacatgattattgaagatgagggagaagttgattgggaagaacggttcccagagggaggagaaaatgtcagagtgtcccacgatgaaatacctgatcttgatgattttatccagatgcacaaaaaaataagggacgacgaaactcactatcagctacgtgaagacctagtggagcacttgtggcaacattatcctgataaatattgaggttttatttatatgtttgaattccatgtaataaataatatacatatgtgaggatttgccaaatcatcttaatttgtttttcatgaattgaataaatggtgtactgttcggtttaagaatagtacaggagaattaat

SEQ ID NO: 84544 - DNA, 666 bp, Oryza sativa
  Clone ID: PAT_MRT4530_83770C.1
atgacattactaacccggatcacccagcccgtggggatcagccacgtcgggagacctccaagctttcatgacaaggcatttccaaagccgatacaggcgcccttcggtactcgcacagattgcacgatttccgaggcgcaactgggtggttacaagggaacatgcctcacggctcgcggtggaacgcgcgcacgggaggggctgaccggggtcggcccgtcccgacctcggctgagctggcgcctacgtggctgccacgcgggccggtgggaggtagacgacgacgccggccggaacggacggcggacaacagcggcgagcggcggagcgaaccacggcaataccggcgaaagcgagcacaccgggtggttgcacgagacgaggggagacgagccaacggctcggattcgccggaggaaacttgacggcggcgaatcgcggcggcggcaaccggcggggagggaagagggaaacggcgacgaggtcacgaggggccgattcccggcggtgagagcatctacgcggccacgggaatccgatgctagcgtcggattgggcggagctacgccgagcgaggctggcgacgagcgggtgctacggagctcgtgcggcgacggcggcgagcacacggcgggcgacggcaacggtcggggcggcgccggctag

SEQ ID NO: 84545 - DNA, 429 bp, Oryza sativa
  Clone ID: PAT_MRT4530_83771C.1
atggctaacaagtctctccgcgagtttgctgctccctctgctgacaatgtggccattgggccgcagatcaacatgggagacgtggatttcgacttgaagtccagcctcatcacgatggcacaggctagcccattctgtggcaagactaatgaggatgtcaatgctcatctacaacagttcctggagatctgtagcacgtacaccatcaagggcgtcagtccagacgctgtcaggctgcggctgtttccattctccttcctcgggagagcgaagcagtatttctgtgccaaccgtgctgctgtcaatacctgggacaaatgctctacgacattcctctcgaaattcttcccgatgggaaaaaccaatgcccttcgtggaaggacttcaagtttccagcaaacaagggacgaatctattccagaagcatag

SEQ ID NO: 84546 - DNA, 1393 bp, Oryza sativa
  Clone ID: PAT_MRT4530_83772C.1
accgggctcaccgtgcgcggtcccgggtgggacccgcttgtcagcggcttggctcaccgtgcggagggagcacgcggcgcacgcgcgcgggcgggggagggacacggtgcacgcgcgcggtctgcggaggaacggatgcggcgggcccacgcgcagcctcacggctcgcggtggaatgcgcgcacgggaggggctgaccggggttggcccgtcccgacctcggctgagctagcgccgacgtggcgcctacgtggctgccacgcgggccggcgggaggtagacgacgacgccggccggaacggacggcggacaacagcggcgagcggcggagcgaaccacggcgataccggcgaaagcgagcacaccgggtggttgcacgagacgaggggagacgagccaacggctcggattcgccggaggaagcttgagggcggcgaatcgcggcggcggcaaccggcggggagggaagagggaaacggcgacgaggtcacgaggggccgattcccggcggtgagagcatccacgcgaccacgggaatccgatgctagcgccggattggacggagctacgccgagcgaggctggcgacgtgcgggtgctacggagctcgagcggcgagcacgcggcgagcgacggcaacggagagggctagcgctcggcggtcacggccaaagcggcgacaaggaggagggaggaggatgacgccggcgggagggaaaaaggggaaaagagggagagaaaagggggcttgtccccttgcttcttcgggaaaaggaggagggagcgggggcgtcgcggcagagggaggagggaggctctgcctccgtcccttggaggctagcgcgcgggctggcgcggcagagggtgacggcggcggcgaccaggcggtcggccactcggcacgcgtgcgcgggaaacaacgggcggcgcagctgggcacgcgcgctggctcgcggggccgagcggctgcaggcgtggcagagcagcggggccgggcgacgcggacggcgcagacgacgcggctcaggcggggaaccacgcgggcgcgcgcgcgaacgacggcgcgcaggggccgtcttcgcgagcggagagctcgccagggagaggagaaggagagcgaggggagggggcgcttgcgcacgcgcgggcagagcgaggggaaagggaggggggcgctcggcgcggcgctcgcgtacacgcgcgcgcggcgcgcgggcggggcggagcgaagcggagggagagggggagagggagcgcgccgggggaggggagggggagagagagagagagagagagagagagggagcgcccgggagagggagagagggagatgggccgagcgagattcggcccatcgacccgggggaggcaaaatagacttttgcggaggactt

SEQ ID NO: 84547 - DNA, 168 bp, Oryza sativa
  Clone ID: PAT_MRT4530_83773C.1
gggtggtctttgttgaattataccgtgacacactcttcaggtgacgaaaaaaccagtagccctgaacaattatcctattgactatatgcacgttccctttcatgtcttacataacctgtctgcacaccaacatttacccgcggagagaaccgacacatgcatatatct

SEQ ID NO: 84548 - DNA, 1393 bp, Oryza sativa
  Clone ID: PAT_MRT4530_83774C.1
atggagcggtccggccgagctaaacggaccggccggcccaagacggcccaagcgcgcgcgcgggagggaggagagagagggagccggtggaccgggctcaccacgcgtggtcccgggtgggacccgcttgtcagcggctcggctcaccgtgcggagggagtatgcggcgtacgcgcgcaggcggggctgggacgcggccgaggtggcgccgacgtggcgcctacgtggcagccacgcgggccggcgggaggtagacgacgacccggccgcgaatggacggcgggcgacagcggcgagcggcggagcgagccacggcgataccggcgaaagcgcgcacaccgggtggctgcacaggacgaggggagacgagccaacggctcgaattcgccggaggttgctcgacggcggcggattgtggcggcggcaaccggcggcgagggaagagggaaacggcgacgaggccacgaggggccgattcccggcggtgagagcatctacgcggcttcgggaactcgacgctagcgtcggattgggcggaactacgccgagcgaggccggcgacgagcgggtgctacggagctcgggcggcgacggcggcgagcacacggcgagcgacggcaacgaggaagaagagggcgcgcccggagtccccttccgcgtccatgaacgcaccggctctcccggcgcttggcgatggacggcggaggcgaggcagagcacgggagcagcggcaacgggcggtcaagccggcgagctggcgctccggctagcgtccaaagcggcgacaggaggtgacgccggcgagaggggaaaaaggggaggaaaagaggaaaaggagggagagaaagggggcttgcccctttgccgattcgggaaaaagggggaggggagcgggggcgacgcggcagagagaggaggggcgtggcctcctttccttggcggcttgcgcgcggagtggcggtggccgggcggtgacgacggcgatgacggtgggatggtttggagcggcgcgacgacacgggcgacaggcgcgggctggcgcggcacagggtgacggcggcggcgaccaggcggtcggccactcggcacgcgcgcgcgggaaacaacgggcggcgcccacgcggcgcgcgcgcgagcaacggcgcgcggggccggctttgggagcggggagctcgcgcgagaggagggggcgctcggcgcgggcgactcccgcgcacgcgcgcgcggcgcgcgggcggagcggaggggagcagagagagaggcgctcggcgcggctctcgcacgcgcgagcagcgagggggggtaaacgcgccgggggggagagagagagagagagaggggggaagagatgggccgagcggaattcggcccatcgaacccgggggaggcaaac

SEQ ID NO: 84549 - DNA, 1478 bp, Oryza sativa
  Clone ID: PAT_MRT4530_83775C.1
atgggccggccggtccaaggcggcctaagtgcgcgcgcgcgggaggggaggagagagagagggccggtggaccgggctcaccgtgcgcggtcccgggtgggacccgcttgtcagcggctcggctcaccatgtggagggagcacgcggcgcacgcgcgcgggcgggggagggacgcggtgcacgcgcgcggtctgcggaggaacggatgcggcgggcccacgcgcagcctcacggctcgcggtggaacgcgcgcacgggaggggctgaccggggtcggcccgtcccgacctcggctgagctggcgccgacgtggcgcctacgtggctgccacgcgggccggcgggaggtagacgacgacgccggccggaacggacggcggacatcagcggcgagcggcggagcgaaccacggcgataccgacgaaagcgagcacaccaggtggttgcacgagacgaggggagacgagccaacggctcggattcgccggaggaagcttgacggtggcgaatcgcggcggcggcaaccggcggggagggaagagggaaacggcgacgaggtcacgaggggccgattcccggcggtgagagcatctacgcggccacgggaatccgatgctagcgtcggattgggtggagctacgccgagcgaggctggcgacgagcgggtgctacgaagctcgagcggcgacggcggcgagcacacggcgagcgacggcaaagaggaaggagagggcgcggccgaagtccccttccgtgtccttgctcgtgccggctcctccgacacgcgcaacgacgaacggcgacggcgaaacagaggggcggcaatggcgcggtgggcggtcaaaggagagggctagcgctcggcggtcgcggccaaagcggtgacagggaggagggaggaggatgacgccggcgggagggaaaaaggggaaagagggagagaaaagggggcttgtccccttgcctcttcgggaaaaggaggagggaagcaggggcgtcgcggcagagggaggagggctcggcctccgtcccttggcggcttgcgcgcggagtggcggggccgaggcgatgacgacggcgatgacggcggggcggtttggagggcgcgacgacacgggcgacaggcgcgggctggcgcggctgagggtgacggcggcggcgaccagacggtcggccactcggcacgcgcgcgcgggaaacaacgggagggcgccagcggggccgggcggcgaagacgcggcgcgggcgcgtgcgcgaacgacgcgcggggagcggcatcgagggggcggaaaggagggctcggctcggcgcgggcggctcacgcgcacgcgcgggcagagcgaggggaaagggagggggcgcttggcgcggcggctcacgcgcacgcgcgcgcggcgcgcgggcggggcggagcggagcggagggagagggggagagggagcgcgccgggggaggggagggggtgagagagagagagag

SEQ ID NO: 84550 - DNA, 369 bp, Oryza sativa
  Clone ID: PAT_MRT4530_83776C.1
atggcgctcactgtcaccacatcgtgggttgcctcatcagatcctgtcgctgccaccacaatgagaggagaggagaagagaacctatcgtaacctcgcaagtagtcgatctgcctctaagcgacctctccgcttgggcgctgtcgcccggcacggagtcggcccttctccccgccgcttgccaaattccggcccctacccctgtccacgccgcctgtggcctacatcttggcttggtgaagatggggatgagaggagaaaagagttaactgctaacgtcctggaaagggccatcgctcttcataggctacgacgcataaagtggcacaaccacggcccacaggcatacgagcccgtccgtgcttcttga

SEQ ID NO: 84551 - DNA, 402 bp, Oryza sativa
  Clone ID: PAT_MRT4530_83777C.1
atgggggaggtcgaccagagggggaggtgggcgccccagggcgtggtgcttagattactgggtatcattatttggggttatatgctgcggatgagatgtgggccgctgatggtgacagctcagtgcgggaactcggcagtcaggggtggcttctcgaactaccaggatggcatcggaaagggggctccaaatgaaggttactgctatgggaaatacccaaactaccctccaaccatcattgggatgaaatcaggagcatcgacaaggaagatggcgatcaacggtgacagacatggattagccaaactggatcaaactgactgcgatgcccgcatatcaccaagatttggaactgcactagagctaagcagatctctcaggcagttgtgttcgtcgacttag

SEQ ID NO: 84552 - DNA, 1146 bp, Oryza sativa
  Clone ID: PAT_MRT4530_83778C.1
atgggccggccggcccaaggcggcccaaggcacgcgcgcgcgggaggggaggagagagagggccggtggaccgggtccatcccgcgtggtcccgggtgggacccgcttgtcaacgactcggctcaccgtgcggagggagcacgcggcgtggcgctaggatgggggaaagacgcggtgcacgcgtgcggttcgcggaggacgcggatgcggcgggcccacgcgcagcctcacggctcgcggtggaccatgcgcacgggggaaaacggagggagcggctgccggtcgcggccgaggtggcgccgacgtggcgcctacgtggcagccatgcgggccggcgggaggtagacgacgacgccggccggaacggacggcggacgacagcggcgagcggcggagcgaaccacggcgatacaggcaaaagcgagcacaccgggtggttgcacgagacgaggggagacgagccaacggctcggattcgccggagggagcttgacggcggcgaattgcggcggcggcaaccggcggcgagggaaggggaaacggcgacgaggtcacgaggggccgattcctggcggcgagagcatctacggggctacgggaatccgtcccttgcgccggattgggcggagctgcgccgagcgaggccggcgacgagcggcgcttccgagctcgggcggcgacggcggtgagcacacggcgagcggcggcaacggtcggggcggcgccggctagctacggggaggctactcgtgctactacccgacgaggcgcagtgacgagaggccaacggcgcgggagtaatctctccggcctcgggccggggaagaggaaggagagggcgcgcccgaagtccccttctgcgtccacgaacgcaccggctctcccggtgcttggcgatgaacggcggaggcgggacagagcacggaaggcggcggcaaaggcgcggtggcggcaagcgaaacggggggggggaatcgatgggagggcgccttggtttataggacgacgatgtcggtttggaaaccgaccttgggcggtcaaggcgcgagctggagctcagcgctcgcggccaaaacggtgacagaggcggatgacgccggcggggaggggaaaaggaaaagagggagagaaaagagggcttgcctc

SEQ ID NO: 84553 - DNA, 1042 bp, Oryza sativa
  Clone ID: PAT_MRT4530_83779C.1
atgtcgtgggtgtcggaggttcggaaagatgcagcaatctgccaatgtgtaggagatgaactgagtgatgtccatatcctggcatccccgatgttctttgtttctacgtacttcgacaaagcatgcatcatcaagaagcacggacgggctcgtatgcctgtgggccgtggttgtgccactttatgcgtcgtagcctatgaagagcgatggccctttccaggcttccagcccagtgaaagcccataagatggaccatgatcaagtatagtccatccacgaactcgcgaaaccatatcaactttttgtctcgaggcaatatggctcccggtttcatctgatgtggcgctttaacttcggtcagctttgttgagtcagcgtggggttcacatgggtcccacacgtcagcagttaactcttttctcctctcatccccatcttcaccaagccaagatataggccacaggcggcgtggacaggggtaggggccggaatttggcaagcggcggggagaagggccgactccgtgctgggcgacagctccaaagcggagaggtcgcttagaggcagatcgactacttgcgaggttacgataggttctcttctcctctcctctcattgtggtggcagcgacaggatctgatgaggcaacccacgatgtggtgacagtgagcgccatccgagatagggcattactgctgttggttgcgcaccttgttgtgatggccgtgctgccaggatcctcgtccctcctcctctgccgatgcctaccagcgcataagtggagaggttgaccagagatggtccgactgctcacgaggctgcaacagcctccgtaggatcccattcgtccttctctgccgataccaatgtcctcctccatgccgttgtccgcgctatatggctcatgcattaaatgcggtgcctgctcacatgccgctgccgacctcctctcaccgatgccaatgtcaacgccctcttccaacaccgaaaggttgatggttccgaggagttgcagtacgatgtttctatgtgtgggcgccat

SEQ ID NO: 84554 - DNA, 691 bp, Oryza sativa
  Clone ID: PAT_MRT4530_8377C.1
aacatgttcttgcactgctcgaaacaaatttagcctgttgtgatgcaattctttgttctgaaacagagtgaaacacaaattcatctaaaaccagcataaaaaagtaatttcattaagtccatgcatgtttcctacattcataaagaaaaagcagggttgattttctttagaatggatacaacctacgttgattgtattacataagtttcaaaattgcaaacactacttttcaggcatccaagctgaggtgaatcacatgagacaaaatggcagtcttgctttcaatgaaagccttgttgctggtatatttcttcattttgccagtgcaagacccacactggtcttccagaccacggaatggtagtgcatcaatagggctgcagcagggtgacacaccagcaccacggttattggattcaggagtttgccaagaagcagcaattaaatgattagcttccacctttaattttgctggcaggtagtctgtcgacggcttcttttttccagttatggcaatgtagctattcttatcaattcctcccctttctgctattgcattcagcataagagagttaagcccactacctagccggctctttgttgccaacttattgtgactactttcgattttggtgcagtagttttggttagtgactattatatcattttttcttaaaataaggtcccacat

SEQ ID NO: 84555 - DNA, 709 bp, Oryza sativa
  Clone ID: PAT_MRT4530_83780C.1
gttccattccctgacccggcccacctaagatgatcaaagatttaaaattcaagatcgctgcattcatcgtctcctcgtcgatcgatcatggcaaagatcgatggagagagagaggtgtgtgtcactgacgcagggaaaaactcaatgcagatttaccagcaagaacaagagctggatgctattcttttgctctaccttttttcttctctctttcttcttctctgtttcttgattgggcgagcgagatggagatggatctgatcatgaatgggacacaagtgggcatgtaaatgaggagctccctagaaggcgagagagattggccaagcgtcgcctcaagcagtgtaggagtatctatcttttgccgtttcgctcgctttctttccttcttttctttcaccatggccaacaacgatgactctgggtgtcaacatcacagctcattttgttcggtctcatgttgcatcattcactgcatgatgaccatgattcgggaaaatttgctccatgcacctccgcttggccgacaacacttgccctctagtaagcatccttaaacacccacggtttctactactattcatcgctttataaatcctacggagtgctagctttacgctactactactgtcatgtaatctatcatcatcaaaagagacgatcagattaacatatatgtcaactatttaagctttggctctttgctttc

SEQ ID NO: 84556 - DNA, 1374 bp, Oryza sativa
  unsure (1)..(1374): unsure at all n locations
  Clone ID: PAT_MRT4530_83781C.1
atgacgcagcacgcccacgctgagagtcgtgcagtgcgcccaagcacgaatctcgagggtggagaggccatagatcgaagggaggcgcctccgccgccgaaggaagcggcggcggagaaggtggatggctccccgcaaccccagccccaggcggagctgcggctgcggctcccggcggagatcgactgggaccggctcgacaagtggaggttcttcgtcctcggcgccggcctcttctccgccgtctccaccgcgctctaccccgccgtcgtcctcaagacgcgcctccaggtcgccccctcgcccgcgcacgccgcggcgtcgtcgctcccgccctccgccgccgccgcggccaccgccatcctgcggagcgaggggcccctcgccttctaccgcggcttcgccacctccctcgcgggcaccgtcccggcgcgcgcgctctacatgggcgcgctcgaggccacgcgctcggccgtgggcccgacagcgctcgccctcggcgcgccagagcccgtggcttccgcggccgcgggcgccccggcggggctcgccgccgccgtggcggcgcaggtggtgtggacgcccgtcgacgtcatcagccagcgcctcatggtgcaggggaacccgtgcccggcctcccgctaccgcggcggcctcgacgccttccgcaagatcgtggccgccgacggcctccgcggcctgtaccgcggcttcggcatgtccatcctaacctatgcaccctccaatgccgtgtggtgggcgacctactcgctgtcgcagaagacgatttggagcggaattggttgctacctgtgcgagtacggtgttggtgtccaagaaatcgatgccggggaaggggattcctccctgcagccgggttacaagactgtcatggtggtgcagggagtgagcgcggcgatggccggtggcgcttccgcccttgtgaccatgccattggacaccatcaagaccaggatgcaggtcatggatggggaaggcggcgagccgattacggtggggaggacggtgaggaggctgatcaaggagggtggatggggagcgtgttacagggggctcggcccgaggtgggcgtcaatgtcgctgtctgccaccaccatgatcaccacgtacgagttcctcaagcggctctccgccaaggggcatgagagcagcctcccctgacgagacgaatagatgatgcaaataggtgaccttgctttgttactttcattcctttccaatgcttgtttcatcttttaggtgttgcaaagagttgtttgtagatagtctttgtttgctcctctaattaagctaagcaaatcaatgcaatccactctttnagaaaaaaaaaaaaaaaaaaaaaaaaaaaaaaaa

SEQ ID NO: 84557 - DNA, 216 bp, Oryza sativa
  Clone ID: PAT_MRT4530_83783C.1
atgttggggcaggagctcatcgcggcgaggcggccgtggggggaggcgttccgggcgccggccttctccaagtcgcccagcgtcggggaggccatcgccaaggcaaggtggaacacggcctacttccgggcgaactacgcgctcgtcgtcgccgcgtcgtcgctgctctggcacccggggacgctcttcgcgctccacgccctctgcaccgcctag

SEQ ID NO: 84558 - DNA, 3090 bp, Oryza sativa
  Clone ID: PAT_MRT4530_83784C.1
atggccagcaagactcttcgcgagttcgctgctccctctgctgacaatgtggccattgggccgcaggtcaacataggagacgtggatttcgacttgaaatccaacctcatcacgatggcgcaggctagcccgttctgtggcaagcctaatgaggatgccaacgctcatctgcaacaattcctagagatatgtagcacatacaccatcgagggagtcagacccgacaccgataaatactctacagcattcctctcaaagttcttcccgatgggcaaaaccaatgccctccgtggaaggatttccagtttccagcagacaagggatgagtctattccggaagcatgggagcgtctgcaggagcatgtggccgcctgtcctcatcatgggatggtcgactggctgatcctgcagaacttctacaatggactcaccccaatgtcccgcgatcacctagacgcggcagctggaggtgctttcttctctaaaacggttcaaggagccgttgaattaatagagaagatggtctccaatatgggttggagcgaggaacgactccagacccgtcagcgaggcatgcttaccgtcacggagacggagttacttgctgccaagctggacctcgtcatgaaacgcttggacgaccacgagaaagggccacagggcaccgtcaaggccatggattcacacgtcacgtgtgaggtctgcggcggcacgggtcattctcggaatgactgcccggaaacccgtgaggagacgatgtatatgggcaacaacaacgggtaccgtccacaagaaggtaacaataatgataacttgtctaaccagccctccttgaaggatctcatttttgcacaagctaaaaccactgatgcactaagcaaaaatcttgctgctaacgataagatcctagagaacattaatgtcaaactagatggctttgcttctgcttttcaaaatcagtcgagctttaataaaatgatagaaacccagttagctcagttagcatctttagtccctgcaaatgaaactgggaggattccggggcaacccgactcttctattgaaaatgtcaaagcgatcacaacgagaggaggtaagtccactcgtgatccgccatatcctaaccctgcaggaactaatgggatgtcaaaagaagcgccatctaatgactcggcttacaaggagattcagcccaacaagaccgtgccgctggaatactacaacacacggttgctgccattccctcaacggagtaggaaaccgtcagtggacgagcagttcgctcgttttgttgaagtaatccagaagattcacatcaacgtgccgttgttggacgctatgcaagtgccgacatatgcccgttatctcaaggacatactcaacaataagagaccgctcccaacaacggaggtggttaagctgacggaacaatgcagcaacgtcatactccacatgctcctggagaagaagaaagatccggggtgtgccacgatcacctgcttgatcggggcacaacaattcgaccaggccttgtgcgaccttggagctagcgtcagcgtcatgccaaaagacgtctttgacaagctcaacttcacgatgttggaaccgacgccgatgcgcctccaactagttgactcgtcagtccgttacccggcagggatagcggaggatgtgccagacaagatacgggattccttcatcccggttgattttgtggtgctagacatggacacggggaagaagacgccgctcatcctggggcgtccattccttagcaccgcaggagccaacattgacgtgggaatggggagtatctgtttccatatcaacgggaaggaggaaaagtttgagtttcaaccgaggacggaacaatgctccatggtcagaatcaaatacgggccaaacccgcagaatattcaagaggtcaaagtggagccgcccaagacggacagcctagtgaaattcatgcaaaacttcctggagaaggaaacaacaatacccaggaaccgttattggaggacgccggtaaaatcacctgtatcggccaagaagttagagcagccggctcagaagaagccgccctctgcaccaaaaccaaagaaggtgtggaaggaaaagccaaagatgcccgctccatcacctccggagacggaaatagaagatggtatttcttttcgctttttccatgaagagtttacatttacatggaaaggcttaagtacatttcttggttttcacgattcctgcaaaatcgatctccagaaaggaatttctgggttcgagaaaaataggttttgggaagacatttctggtgctccaatttgcaagaaaccaagaacgaatgatatccttaatcctacacttaggctcatgcacaaatggattgctatgactttgtttcctagagcaaaagggctaggggtcgttagcgaccaaattgcttttatcttagccgctcgtccgcgtattgatgaggcttatctagtgctagcgcatattttgaaacatggagcagatggatctttgatatactttttccctggttgtacaaatgaaatcccgttgccaaatgcggggtatcatttgtacaactgccacgaactaaccattcccctacagaccatagaagaatctcgtgcaggtggaacattcagggagatgcacaacatgacaaggaacgaacgagaaatttcattatcctcgacacccgtgcagatgtatgaggcaggttggacaccaactggggatgcacccggatggacccaagctccacgccgcagcatcggagtctcaacctgggcaagcgccagtgaggaccggtggcatgcgcctcatgacatccaaaggggggacaatcaacctcccagatcaagtgatgtgtcttcatctccaagtgaatggcgctcaagttcctctcgttgggacttgggtgaaatcactaggagaatggacacccttgatgtgcagacgggggagatccagtacaacctcacggaacacatggctcaaacgcaagaatggcaacaatctgctgatgctcagttcgccaacatcaacaacatgatgcagcaacagcatgataacctttag

SEQ ID NO: 84559 - DNA, 246 bp, Oryza sativa
  Clone ID: PAT_MRT4530_83785C.1
atgagagctggaattatacaggttcgggccgctacggagcgtaataccctactcctgtgcgtgagatttagggttgagtgttacaaaggttcctcaactctagggagaactctaactcttcttcccctggggcttaggctaactgagagtcgtccccccttttcagtggggcggaacgtgggggcactgcgccgtccgatcggatgtgaccggccacaaaccggtcacaatccggtcatgcccgat

SEQ ID NO: 84560 - DNA, 415 bp, Oryza sativa
  Clone ID: PAT_MRT4530_83786C.1
atgacgtcagcgatgacgtcaccaccggcggcggcggctcggcggctcgggcgcgcatgctcgccggcgaacggcggcgcttcggcacgaacggagggcaccaacgggtagcggacggcacggcgaactcaccggcgaccaaagcgacggcggaagaggaacggacggcgacgacgacgaagaagaagcggcggcggagatcgggtcgacggcggcgacggtgctccggtgatcttcggcgacggcgaaggggcggatgaggacggcggcgacttggcgaccacgacggcggtcttcctgagcgatgacgatgaccgaaacggcagcggcgcacggctggagcgacggcggcgctagggcacacggcgctagggcgctacggacgacgagaggcgaaggcgagggtggcggcggg

SEQ ID NO: 84561 - DNA, 240 bp, Oryza sativa
  Clone ID: PAT_MRT4530_83787C.1
atggccggctgctgcgtgttcctccgatggccgtcgaccctgccctcagtcctcggctaccgcttcctcgacgacagcaaggtggccggcttgtcgtctccagtagtgacagtcgtcgtcgagaaggagtgctacccatcccggttgctcctcgagacagcggtgaggaaggatgagagcaaggcgacgctcttcgtcaacgtcaccatccttttcttgtcagtgttatgtgcaaagtaa

SEQ ID NO: 84562 - DNA, 225 bp, Oryza sativa
  Clone ID: PAT_MRT4530_83788C.1
atggccgtcaaggccaacacaaccggcgtcgtctctttctcgctcgtccttaagccgtcgcggggcgacttcgtcgtgcgcaagtggtttgactccgccggcggcggagacgactcggcggtgacgacatgggggactcgagtcctccctgcacccacgttggatccgcccctggcgacaaacactgccatggcacaagaggaggaaggaggaacaggaagttga

SEQ ID NO: 84563 - DNA, 1527 bp, Oryza sativa
  unsure (1)..(1527): unsure at all n locations
  Clone ID: PAT_MRT4530_83789C.1
ctctaagtcttccacccacccacgtacgtacgcacgcagagcagcaagaaatggatgcggtcgccggcgccgggcagctcgttggcctcgccgcggccacgctcctcacggcggccttcctcgtcgcagtgaagatggggtggcggcgccgccgccgccaacgggaggtcgcgccggaggggaacgaccgggttgttggcggcgatgggggtgaccggacggacatcgtcattgttggtgccggggtcgccggatctgcgctcgcctacacgctcggaaaggatgggcgacgagtgcatgttatagagcgggacatgacggagcctgatagaattgttggtgaactgctacagcctggtggctatttgaaattgatggagctgggtcttgaggattgtgttgaagaaatcgatgctcagcgtgtccttggttacgcnttgttgaaagatgggagaaacacaaagctttcttatcccttggagaagttccattcagatgttgctggtaggagctttcacaatgggcggtttatacagaagatgcgtcaaaaagctgcntctttgcctaatgttcatttggagcaaggaaccgttacatcattgctcgaagaaggtggcncggttaagggtgttcaatacaagacaaaggcnggtgaagaattaaaggcccttgcaccattgacatttgtttgcgatggctgtttctcaaacctacggcgtgtcctgtgctctccaaagcactgagattcgttgtttggttgatatccctgggcagaaggtgccttccatggcaaccggtgaaatggcaaaatatctcaagactgtggttgcacctcagattcctccagaactccatgattctttcattgcagcaattgataaaggaagcataaggacaatgccaaataggagtatgccagctgctccacttccaacccctggcgcgctgttgatgggtgatgcattcaacatgcgacatcctttaactggtggtggaatgaccgttgcgttttctgacattgttgtcctacgcaatcttctcaagcctctcggcaacctgcacgatgcaccttccctgtgcaagtaccttgaatcgttctatacactgcggaagcctgttgcttctacaatcaacacactggctggtgctctgtacaaggtcttctgtgcctcaactgaccaggctaagaatgagatgcgagaagcttgctttgattacttgagccttggaggagtcttctcaaatgggcctattgctcttctctctggcctcaatcctcggcctctgagtttagtagcccacttctttgctgttgctatctatggcgttggacgcctaatgctccccgtcccttcacctaaacgcatgtggatcggcgcgagactggtttccggtgcatgtggtatcatcttcccaatcatcaaagctgaaggggagcacagggtgagccgtacggccaagcgggcgtgggcggaagttacggttgggttaaaaacaacattgggaggcggcaagatgagggattag

SEQ ID NO: 84564 - DNA, 156 bp, Oryza sativa
  Clone ID: PAT_MRT4530_8378C.1
atgaccggcttcggccaacaggagagagatgacatagtcgataacaacaacggcttgggagatctgcttagctccagtgcaggaccaaaggttgatgagatgcgggcgtgccaattaggtgcttacacttacaagatcaaagtgtcgaagccctag

SEQ ID NO: 84565 - DNA, 727 bp, Oryza sativa
  unsure (1)..(727): unsure at all n locations
  Clone ID: PAT_MRT4530_83790C.1
agctcattccaacggtgcaggagagacaagcagagcacctcaaatattctaaaagagataatgagcaagacgcattagcaagttcagagggatatacaacttagtattgacaatcgatacacatcccaatttcctataggaagaacagactactctaatgagcacactcgacagctcaaaagaactaaagaacagcaaacaccataggctaacatggagattcttactccattggaggaggggcccggtaatatgcagggactgtagcagggaagaacatttgcctcacaccttcagctttgatgattgggaagatgataccacatgcaccggaaaccagtctcgcgccgatccacatgcgtttaggtgaagggacggggagcattaggcgtccaacgccatagatagcaacagcaaagaagtgggctactaaactcagaggccgaggattgaggccagagagaagagcaataggcccatttgagaagactcctccaaggctcaagtaatcaaagcaagcttctcgcatctcattcttagcctggtcagttgaggcacagaagaccttgtacagagcaccagccagtgtgttgattgtagaagcaacaggcttccgcagtgtatagaacgattcaaggtacttgcacagggaaggtgcatcgtgcaggttgccgagaggcttgagaagattgcgtangacaacaatgtcagaaaacgcaacggtcat

SEQ ID NO: 84566 - DNA, 1037 bp, Oryza sativa
  Clone ID: PAT_MRT4530_83791C.1
gcacgaggcttatcctctccccaccctctctctccttcgcactctcgccaccccgctcgcacaggccccgcccccccggccgcccccgcccccgcccacgcctggcatcctcctcctcttcgtccgctgagtatagcgagtcggcggctgagggagcgatggcctcagagcagagatggtaggctgggggaagtggacgagttctaggtggccgccactactccacctccactgctgcttcgacccctgcccactcctggccacctcctcctctctgtccatcgcctctcctcctcctcctcatctgcctcctcctcctcaccacttcctcgtcgccttcgagctctctctccctagccgcgcttgatctagccgcctagaggtcagggaccgtcggatctgacctccttgaggtcggagcacgctggatccagccgcagccgacctcactatcatggatcacctcacacgcactcgggggctggtgtggtctggctggaaggagatgatggtagcgacggctcgaaggagataagcagcaagggaatcgatgacgacggcagcagatccacatccactgggatggtgagtctgatatgttgggcatgtaatggttgggtatggcggaagattttgatctatgtgaattgttctgatctgggatgtgattagcttgttcttggcttcttgatatgtgatgtgcttttttgttgttgatgtgtgcatatgctataatattcttattgatttgtaatgtggatgaagaaaattgcaggctggggaatcttgggggcacttgagcccgggttacagttgattcgagcatcatacaatcatttaatttatatttttaaagaatatacgtggtggttctatactgtataactggcaccttatttgggaccgggaaaggtgcccttaaattggtccccatttaggaaaaacgatcccttataagggttcctaacccaacaccaatggaatgggcttttatgggtggcccattttttaaaaaaacaaaaatcacattcttacct

SEQ ID NO: 84567 - DNA, 721 bp, Oryza sativa
  unsure (1)..(721): unsure at all n locations
  Clone ID: PAT_MRT4530_83792C.1
ccacgcgtccgctgctacagcctggtggctatttgaaattgatggagctgggtcttgaggattgtgttgaagaaatcgatgctcagcgtgtccttggttacgcattgttgaaagatgggagaaacacaaagctttcttatcccttggagaagttccattcagatgttgctggtaggagctttcacaatggacggtttatacagaagatgcgtcaaaaagctgcatctttgcctaatgttcatttggagcaaggaaccgttacatcattgctcgaagaaggtggcacggttaagggtgttcaatacaagacaaagtcaggtgaagaattaaaggcctatgcaccattgacaattgtatgcgatggctgtttctcaaacctacggcgtgtcctgtgctctccaaaggttgatgtgccatcctgttttgttgggttggttttggagaattgtcaacttcctcacccaaaccatggccatgttatcctggctaatccttcacctatcctatgttacccgataagcagcactgagattcgttggttggttgatatccctgggcagaaggtgccttncatggcaaccggtgaaatggcaaaatatctcaagactgtggttgcaccttagattccttcagaactccatgattctttcattgnagnaattgataaaggaagcataaggacaatgccaatagggagtatgccagttggtccatttcaacc

SEQ ID NO: 84568 - DNA, 313 bp, Oryza sativa
  Clone ID: PAT_MRT4530_83793C.1
acggcacgaggaggcgacgaccgggcgggcacggcgaggcggcagcggcgagcggacgcggcggcgagtgggcggccgacgcgactgtggccgcggcggccgtcccccgcggcggtgaggggcggcggcgggtgggctcaacggcgacgcgatcgggtggccgtggctggtcacgacggctaccgaggggccgtggctggtaaaggaggcgaccggggcggcctggctagtcgcggcggcgcgacgatatcgacgatgagtagcggcggccggttcgcttgtgggccggcgggcgggcggcaatttttttaaa

SEQ ID NO: 84569 - DNA, 2226 bp, Oryza sativa
  Clone ID: PAT_MRT4530_83794C.1
atgaaggagaggctggatgtgtacatctacgactacctggtgaagcgcaacatgcacaacaccgctaaggccttcatgaccgagggcaaggtcgccaccgatcccatcaaatccagggaacagcagatgaggctccagctactgcaacagcagcagaatgcccaccagcagcgaagagatccccctctcaatgctgctatggatgctctcaactctgatgtttctgctgtcctcgcttctaaaatgatgcaagaccgaatgaggaaccccaatcccaccgattccgatgcttcccaccaactcctggacgctaacaggattgctctcctcaaaccagcaactaaccaaactggacaactggttcagggtgcctcggtcaacatgtcagctctacagcagatccactcaagaaaccagcaacctgtaatacccttccatcttctcaaactccattggtttatgtaccgcctctcacttcttactctctgtccaaccattttcaaggacatgaaaggtgatgctgccatgtcacaaagatcaatgcctacagacccttcaactttgtatggatcaggaatgatgcaaccaaaatctggattagtttccactggattaaatcaaggtgttggtagtgtaccactgaaaggctggcctcttacaaaaagcttacctactagttgcctgctgaaggtcccaggtattgaccaactccggtcaaatttaggtgtgcagaagcagttgatggcatctccaaaccaatttcaacttttatcgccacaacaacaattaattgctcaagcacaatcacagaatgaccttgctagaatgggttctccagctccatctggttcaccaaaggttcgaccagatgaatcagattatatgatgaagttgaagatggctcaaatgcagcagccctcaggtcaccgtcttatggaattacagcagcagcagcagcaattgcaacaggataatctggatagttttgttgattttgatgaaaacgttgattcatttttgtcaaatgatgatggagatgggcgggacatatttgcttcattgaagaaagggtcctcagagcaggattccttaaagggtctctcgttgagtgagtttggtaataaccgtacaagcaacaataaggttgtttgctgtcacttctccacagatgggaaattgctggctagtgctggccatgagaaaaaggtcttcctctggaatatggacaatcttaacatggatactaaaatagaagaacatacgaactttattacagatataagattcaaaccgaattcaactcagttagctacatcatcttctgatggaactgttcgactatggaatgcaatcgaaattttcacccgaaatctacagaggttctatgctcttgtgacgacaatggagaaatttgtttctggaaaattggtcaaaatgaaacagggtggtactggtagggtcaggtttcagcctcaaattggacagctcctagctgtggcaactggaagcattgtgaatattgttgatgttgaaaaggaggcaagtttgcactcactgcctaaggttcataccaatgaggtaaactgcatctgttgggatgaaaagggtgaacgtgtggcatctgtaagtcaggatactgtgaaggtttggtcggtagcatcaggcgcatgcatccatgagttaagatctcatggaaaccaataccagtcttgcatatttcatccaagatatccgaatgttctgatagttggtggttaccagacgatggagctatggagcttgtcagataatcacagaaacacggtccaggcacatgaaggccttatagctgctttggcgcactctcagttcactgggatgatagcttctgcgagccatgacagatccgtgaaactgtggaaatgaagaaggattggagatgaagaggagaaggggcctcagcgcgacggctgccagaatcttaacttgcatagcttcccagacgtgcgtacgtatagagtttgtgttgtttatttttgattcgttggcttcgttacagaaggtagcccgtaatttgttattatactagtttagacaaatgaatgacttttttttactttaggggtgaggtgtacatggttggggcaaaaatgttgacaatactaatctatgtggaacgtgctgtgtaaattaataattaatagaaagagccatggaatttgaagagaaaaaaaaaaaaaaaaaaaa

SEQ ID NO: 84570 - DNA, 539 bp, Oryza sativa
  Clone ID: PAT_MRT4530_83795C.1
tccccgggctgcaggaatcggcacgaggatttgtaacaaaaatgaccatcctatgaaaagccacacaaatagaggtgaaattttcttagaaagcagacattcataaaccatgcagtggcggaatactgttgaagcgggaaggtttcttttcttgtgaattgtgaagaccattccagattcaatggaataagtaactgtggataagtatcatacttggatgcatgtattgcaagttgccaagtttgttcctaggatttctacagtctgcatggaatgctaattttgtggcatttatacgacattttgtggcctaagtacgtgcagtatcaatctctagttcatccatgagaccatgactatatgttcttctcagaccctctgttggttttgaatttgttatatgatgtgaatgctatttcaccaatttaggcccacattcttccactgatctgaaacctctttctccaaattttcaaacgaccaatttgacttgcaaaattttgcatgcctgtattagttagtcaacatgacattcactt

SEQ ID NO: 84571 - DNA, 1465 bp, Oryza sativa
  Clone ID: PAT_MRT4530_83796C.1
cccaaattaactccacgccaaggaaacaaaacgcccccccaattccagacgccaacgcgaggtcgacgaaggccacgtctccgactccggctcgatttccaccccccccaaatcctcctccggcgagcggccggccgcgagacaccccggactctcccgcgcggcgattcttcggtaccccgatcggaggaggaggcggcggggagggaggaggaggatgagcttccaggacctggaggcggggaacgcccgcgggctgccgcggaggggcggtggcggcagggcgggcgccgcggccgccggggcgggggcgtcgcaggccgtggcgtcgggggtgttccagatcaacacggcggtgtcgacgttccagcggctggtcaacacgctcggcacgcccaaggacacccccgacctccgcgagaggatacacaagacacgtcaacacataacacaactggtgaaggacacatcggagaagcttaaacaagctagcgaggctgatcatcgtgtcgaagtcagcgccagcaaaaagattgctgatgcgaagctagcaaaggatttccaagcagttctgaaagaatttcagaaagctcaacggttagcggtagaaagagaagctgcttatgcacccttcatttctcaagcgggcttgccacaaagctataactcgagcgaggtgaacaatggtgctgataagttggctgagcaacgcacggcgcttctagaatcaagaaggcaagaattagtcttcttggataatgagatcgtgttcaatgaggccgtcattgaggagagggatcagggaatacaagaaattcagcaccaaattactgaagtaaatgaaatcttcaaagatcttgctgttctagtccacgatcaaggacaaatgattgatgacattgacacccatatcgagaatgctgttatagcgactacacaagcaaaaggccaactctctaaggctgctaaaactcagaagtcgaactcttcgctgatatgcttgttgctggttatattcggggtggtcctgctcatagtgataatcgtcctcgcagcctaggcagcagcctggaagaacatgggactcctagatctggttgagcttagagcgaagtattccttcctgatttaattttgctgtgaagtcgggaatgtatcctgatctcctgcctggaggagggggttgcgttctggtcttgtgccatggtggtgtatgtgatgatgaatggtgtgtctggaatgcatggtttatatataagtaattaagtataatcgcttggtgtcactctagtgcctcctgccttgctcgctcgcccctgtttatatcttgtgatgtatcgttgagtgagtgttgtaagaacgaggagtttggtctttgcattataatagttgcttaagttggtcagtaaaaaaaaaaaaaaaaaaaaaaaacaaaaaaaaaaacgccctcgccctcgtgcgaggg

SEQ ID NO: 84572 - DNA, 527 bp, Oryza sativa
  Clone ID: PAT_MRT4530_83797C.1
gcacgagggatgaagtgcccaatgttcctctgtggaaccctgttctcttccagcttccttctgggtgagatcctccttttctacaaggttggcaagactgtcgaaagttggagtggatgcatgaaatgctcatcggatggtggtgttatctggtcaaagagagagcaactcccacctggtatccttggccctatcaagaacaagcctttcttgctcaaggatggccacctgctctgtggaacatcagttgaaagctggaattcatggggtgcttggcttgaggtcaccaaggaccatggtaaaacatggaagaagtatggcccgatttacgtaagaggaaaaaccatgggagtgattcagccagtcctctaccagaccagcagtggcacaatccgcatgctgctgcgcccgtccgatgaagtaggtcgcatctgcgttgcggagtccaaggattctggtgtcaactggagctatgcgcaaccaaccgagctcccaaaacccaattctggtatcgatggcgttaagct

SEQ ID NO: 84573 - DNA, 1131 bp, Oryza sativa
  Clone ID: PAT_MRT4530_83798C.1
atggctaggaagacatttcacgagttcgctgctcccttcgctgacaacgtgcccgttggacctgaagtcagcatgggagatggtgactttgatatgaaaaccagcctaatcacgatggtgcaggctagctcattctgtgcaattcctggaaatctgcagcacggagtcactccagatactatcaggctccgaccgttcctattcttcctcctcaggagagcgaaacagtggttctacgccaaccgtgcaacggtgaatacccggaataagtgctcaacggcattcctctcaaaattcttcccgatgggcaagactaacgctcttcgtggaagaatatccagctttcaacagacgagggacgaaacagctcctgaagcttgggaaaggctgcaggaatatgttgtcacctatcctcatcatgggatggacaagaggctcatcctacaaacgaggaacgactccaaacccatcaacgggacagaaatgctcgccgctcaattggatctccttatgaagagaatggacaatgataagaaggacaccaagcagggtgccgttaaggccctgaattcttacatgacatgtgaggtctgtggcaatgatggtcactctgggacagatcgtccgaaaacccgtaaggacgtcatgaaaccaaggatggagcactgctccatggggaggatcaagtacggaccaaacccacagaactttaaggaggtcaagctccaaccccgaaggacggatagcctcatcgatttcatgatgaacttctcggagcgggaagaaaagaggaaccgtcagcaccttaggctggcatccaagaagccgggaacacaggcctgtcaaccttcgttcctagttacgaagaggtcgtcgtctgcacctaagataaagaaggtgtggcaggttaaggagaagacactgttcctgtacctccggaacagggtgcctcgtcaagctgaaatgttggaggtacggtcatgctcgttggacctaaaacaacgtcacccttgccaacaggtctggaagttcgatttagaaaaagggcatgtaaatgtggtcagcggtgctgatatagaggaaacagttcaagcacatgcaaacaatttaagcaaattaggcatgcagtga

SEQ ID NO: 84574 - DNA, 616 bp, Oryza sativa
  Clone ID: PAT_MRT4530_83799C.1
cggcacgaggctccccctccggatctggcggcccgccggcggcgacacggcgcgggagccggaggcggacgaccctgaggcgatctcgcccgaggcctcttcctactgctgctgctgctttctctctcgaggctgcttgctttgcttgcccctctctctctctctatctacaaatgttctcttcttttgagagaagagaggaatagctgcaacacaaaggaaggcactgcttgcactgtgcagtgtgcaggcacagccaagttttcaaaagaacccgccatcttctttctctctctactgtcctagcaattctctctctagctccagtattaatttctttccatcctccattttcttgggcaccgtgcgagcttagctctgcactgtttgcctcagttgggttggtttggttcggttgcttcttctctgcttcaacggttggtcgacttcaatgcaagaaagcatcggcagcaattgctcctcccgttgagtttttcgtcgtcgtttgaaagcgaaggagacggcgacggcgacgaggaggaggaggagggattaatgtcgtccatggcctccaacgaagaggtcggtaatgaagatgggaggcaggaggatctgc

SEQ ID NO: 84575 - DNA, 216 bp, Oryza sativa
  Clone ID: PAT_MRT4530_8379C.1
atgaggtctcgtgactcgggttggcagcgaccttcgcgaggaagacaaggtcacacggctttggtcggcaacgacctccgcaaggaagacgcgaaggaggcgaaccggcggcggaggcggtggcggtgcgtgagaagaggggaggccaagtctgttacaccaagctccatcgccgatggagggaggatgggagaggtggtgcagatgacggcgtag

SEQ ID NO: 84576 - DNA, 1009 bp, Oryza sativa
  Clone ID: PAT_MRT4530_837C.1
atgacacgtggccctcccccgaggggagttaggcccgaggtggggtggcggccactcccttccagagattggacggaggaggctgcccccaataccacgtggccctccgagtccctccagatctgcacgacgatcatagagatggcggggggtgatgaccaggtcatggcgagcttcttccccatgaccctcaggggccaagcgcggggttggctcatgaacctgctgcctgcctcggcttcccaagatggttcggaacccatggtggggggctctcttcgagctaaaggtttgaaaggtcgcgacatgcaagcaagccgtgcgccgccgtcgctacggtcgtcgtcgtcgctcgggaaggccaccgtcgggatcgccaagtcgtcgccgtccccgtccgccccttcgccgccgtcgaagatcgccggagcaccgtcgccgccgtcgacccgatctccgccgccgcttcttcctcgtcgccggcgccgtctgttgctcttccgccgtggttttggtcaccggggcaccccccgtgtcaggcggcaagatttgacaggcctcatcatcaagatgacgtgcgcttgcttcccaagtcaagagacaagacatgcatttaatgcaaagattgagggggggctggagcccctgatgatcaacaccttctaccccaacaaggagatcttgggattgaacccctcaaaatcacacagctttactcaccgaatcctcgaatctcacccgctgcccccggccgaactcacaaagaggggcctcacggttccctggtggaggagttcattctccgacagaggccgggtgattcaagctcaaaaacacaagctgtttgttacaagaaggcgcaacgagcaaccgagttgcaaacctgaccctaccccacgaccggcgccaccagcgatcttcgagtcctttgaagctcttgcggtgttcgcaacactcttaacatcaagatcaagagcaatggacttcacaaggccattcaacatctggg

SEQ ID NO: 84577 - DNA, 1425 bp, Oryza sativa
  Clone ID: PAT_MRT4530_83800C.1
ccacgcgtccgcctttattgcactcctgctcccgcgaaagcctcgcctcgccttttctccctaccaagccaccacgccacccaaaccgcgatttctgatcgatcgatcgttagctcgatccaagaacccatcttttctttgatccccaatcctcttttgccgaggattaattgggagaagatgacgatgatggggtgtgccgtgctgctcgtggtggtggcgtccatggcgggggaggcggcggggaggttcgtggtggagaagaacagcctgcgggtgacgtcgccggcggggctccggggcgtctacgagtgcgccatcggcaacttcgggatgccgcagtacgggggcaccatgcacggggtcgtcgtctaccccaaggccaacaagaaggcctgcaggtccttcgacgacttcgacctctccttcaagcccaagcccggcggcctccccatcttcctcctcgtcgatcgcggagactgctacttcacaacaaagggatggaatgctcaaaccgctggagctgcagctgttcttgttgccgatgatagattggagcctttgataacaatggactctccagagtctagtggcacagattacatagagaaaattactgttccttcagcacttgtaacgaagaagtttggggacgaccttaagaaagcactggaaaacggtgatatggtcaatgtccttctggattggagggaatctctccctcatcctgatgagcgtgtagagtatgaattctggacaaacagcaacgatgaatgtggtgccaaatgtgacatgcaaatgaattttgtgaggaacttcagaggaacagcacaggttcttgagaaaaggggttacactcagttcacccctcactacattacatggtattgtccggaagcttttgtcctgagcaagcagtgcagatctcagtgtatcaatcatgggagatactgcgctccagatccagagcaggatttcaacattggatatgatggaaaagatgttgtgcttcagaacctgattcagatttgcttgttcaaggttggcaatgaaactcacaaaccatgggtgtggtgggattatgtacacgatttttcaattaggtgcccaatgaaggagaagaaatacacgcgtgaatgcgctaatggtgttatcaagtcacttggattggaccttgagaggatcaacaagtgtgtgggagaccctgaagctgatgaagaaaatcccgtgcttaaagcggaacaagatgctcaaattggtcaaggctctcgaggagatgtcactatattgccgacccttgtcgttaacaacaagcagtacagaggtaagctggagaaaagtgctgtgttaaaagcagtatgctcaggatttgaggagacaactgaacctgatgtttgtttgagtcaaggttataagacgttttaa

SEQ ID NO: 84578 - DNA, 1475 bp, Oryza sativa
  Clone ID: PAT_MRT4530_83801C.1
gccgagctaagtgggtcggccggcccaaactcgcgcgcgcgcgggagggaggagagagagagccggtggaccgggctcagcacgcgcggtccctggtgggacccgcttgtcagcggctcggctcaccgtgcggagggagcatgcgacgcacgcgcgcgggcggggtcgggacgcggtgcatgcgcgcggtccgcggcggacgcagatgcgacgggcccacgcgcagcctcacggcttgcggtggaacgcgcgcacggggagggaccgaccggggtcggctcgacccggtctgagctgagctggcgccgacgtggcgcctacgtggctgccacgcaggacggcgggaggtagacgacgacccggccgcgaatggacggcgggcggcggcggcgagcggcggagcgaaccacggagatacgggcaaaagcgagcacaccgggcggttgttcgtgacagggggaggcgagccaacggctcggattcgccggaggtcgctcgacggcggcggattgcggcggcggcaaccggcggcggaagaaaagggaaacggcgacgaggccacgaggggtcgattcccggcggtgagagcatctacgcggcttcgggaactcgacgctagcgtcggattgggcggaactatgccgagcgaggccggcgacgagcgggtgctacggagctcgggcggcgacggcggcgagcacatggcgagcgagggcaacggggaaggagagggcgcggccgaagtccccttccgcgtcctcgaatgcaccggctctcccggcgctcggcgaaggacggcggaggtgagacagagcacggggcggcggctatggcgcggagacgaatggaagaggaggggtaaggggaggccggggccaaattggcgacaaggaggatgacgccggcagggaggaaaaggggaaaagaaagggggaaaaggggcttgcccctttgccgatttgggtaagaggaggaggggagcgggggcgacgcggcagagggaggggggcgctgcctccgtcccttggcggcttgcgcgcggagtggcgggggccgggcgatgacgacggcgatgacggcgggcggtttggagcggagcggcgacactggcggcaggcgcgggcaggcgctgacgacggtggcgactgggcggtcggccactcggcacgcgcgggctggcgggaccgggcggcatccacgcgggcgcgcgcgagcaactgcacgcggggagcggcagcgagggatggggagacggagagcgagggggcgctcggcgcggcggcacacgcgcggcggcacacggcggggcggagcggagcggagggagagaggcgctcggggcgactctcgcacgcgcgagcagcgcgcgggcgaggcagagagagagagagagagagagatagaaagagagcccgggagagagagagagatgggccgagcggaattcggcccatcgaaccccgggggaggcaaac

SEQ ID NO: 84579 - DNA, 1280 bp, Oryza sativa
  Clone ID: PAT_MRT4530_83802C.1
gccgcaggcgccccgcccccgcggcgggccgctgggaagagagtccccgccgccgcgcgccccggagcccgggctggggtgggcgctctcggcccccgtcggcggcgagtgcctcttcgaccacggcggccgcggtggcctccgctgccggagcgcccgcccggcgcgcgccggatgcgggggggggggcaagggttgccggctgaggtggatcaactacctgaggcctgatctcaagagaggcagcttctcccagcaggaggaggagctcatgcatcagcctccataaaatccttggcaacccgtgggccctgtgggcggcgctgctgcccggcggggctgacctccctctcgccagcccccgggaggggagcattctcacaggaagaagaagacctcatcatccatctccattccatgctaggaaacaagtggtctcagattgcggctcagctgccgggtcggacggacaacgaggtcaagaacttctggaactcttacatcaagaagaagcttcgccagcgcggcatcgatccggccacccacaagccgctcaagtggtccgattacgtgttcgacggctacaaccaccagctccctccgtacaaccatggcggcatctatggcggcggcgacagcaaggacacggcggtgcacttcgacgcccacgccctcggcaactggtgctagcagctacccctccgtaaaaaaaaaaaacaattctagctacaaacctggacatatgcgtgtctagattcatagctaaagtttgtttttttatgggacagagtagtaccatctagctaagctcgaatccaccccaaattaggcgcaacgagaccgacggcgagcgatgagccatagcaatgatcagccgatcaattagtaggcgccataattgcatgcaagcatgctgctacgtataaatgtacgtatacctacgggtcaagttttcaacgtgtatacgcgcgtgtgaattaattaagtcggcgcgtacgtaattaagatcatagctgatgtttggtgagaggtttttgggttgtcaaaagattttttttttttttggtttagtttctttcatttctcttctctcctttgatcgatcgatcgagagatatcgatggatcgggcattagtttgctgcttttgagtgacatgattgtgatgataattaaagtctttaatctcgatcgccggtacacgtacaacatgtaaagttcttcatatgatgatatatataaatatatatatagacattgatgctaaaaaaaaaaaaaaaa

SEQ ID NO: 84580 - DNA, 2759 bp, Oryza sativa
  Clone ID: PAT_MRT4530_83803C.1
atgccgtgcagcgccgctgatgcgaggcatgccaggaagatgttcacagaaatcatcttcccaagatttggtacccccagaatggtcataagtgacggaggttctcacttcattgacaaaaccttccgagacctcctacgagagatgagagccaaacacaatgtggccactccttaccatccacagaccagtggtcaagcagaaacatcaaacaaacagatcaagaatattctgcagaatatggtcaacaaaatgggaacaggatggaaggatagattgtcggacgcactgtgggcataccggacagcgtacaagacacccattggaatgtccccatatcagatagtttacgagacagcgtacaagacacccattggaatgtccccatatcagatagtttacgggaagtcatgtcgactacccgtagaacttgagcacagagcatattgggccatcaggaactggaatatggactttgaaggagcaggagaatggagaaaaatgcaaattgctgaacttgaagaatggagagagaaggcttaccacaacgcgaagatatacaaagaaaggacgaagcgctggcatgaaaaaagaatcaaaatcaagaaattcaagccaggagacaaagtgctaatgttcaactccagggttaagctttttggccacggaaaactgcgcagcaaatgggaaggaccgttcgacgtcatcgacacctcttcgcacggggcaatcacactccgcgacgactcaggtaacatatttaaggcacgtcgcctttttcaagatgacgggaaggctacgccgcctcccgccgagcgctatgtgggcaccctattcaccaaggcaggggatgagggagtgcgaactcctggcggtgggaatggcaaggggttactccggccattaacagcatcggagaagaagggggcagcggaatcccgtagccctccacctatgaaggatcaaactgactggcacgcccgcatctcaccaacttttgaacctgcactggaactaagcagatctcccaggctgatgtcccacctcaacagtggcttcgccttatataggcattacaactcactcagcccagaataccaggcccaacccaaaggaatagtctaccatacatccctcaagattacaagctcaagatgttcaaaggtggcttgccttgctcgagatctggagcttgatcctcgaaatcctcgcactgcggcggctcggctcaccgtgcggagggagcatgcgacgcacgcgcgcgggcggggacgggacgcggtgcatgcgcgtggtccgcggtggacgcaggtgcggcgggcccacgcgcagcctcacggctcgcggtggatcgcgcgcacacggagggagggactgaccggggtcggctcgacccggtcttggccgagctggcgccgacgtggcgcctacgtggctgccacgcgggccggcgggaggtaggcgacgacgccggccggaatggacggcggacgacagcggtgagcggcggggcgcaccacggcgatacaggcgaaagcgagcacaccgggtggttgcacgagacgaggggagacgagccaacggctcggattcgccggagggagtgcgtcagcggcggatcgcggcggcggcaaccgacggggagggaagagggaaacggcgacgaggtcatgaggggtcgattcccggcggtgagagcatctacgcggccacgggaactcgacgctatcgtcggattgggcggaactacgccgagcgaggccggcgacgagcgggtgctacggagctcgggcggcgacggcggcgagcacacggcgagcgacggcaacgagacgagaggccgacggcgcgggagtgatctctccagcctcgggccgaggaagagggaaaagagggcgcgcccggagtccccttccgcgtccacgaacgcaccggctctcccggcgcttggcgatggacggcggaggcgaggcagagcacgggagcggcggcaatggcgcggaggcgaatgggagaggaggggaaaggggaggctggggtttatagggggcggcaatgtcggtttgggaaccgacttgcgcggtcaagggcgcgagctggcgctccggctagcggccaaaacggcgacaggaggatgacgccggcgagaagggaaaaaggggagaaaaagaggaaaaggagggagagaaagggggctcgcccctttgccgattcgggaaaaggaggagggggcggggcgacgcggcagagggaagggagagctcggcctccgcctcttggcggcttgcgcgcggagtggcggggccgggggatgacgacggcgatgacggtgagatggtttggagcggcgcgacgacacgggcgacaggcgcggcaggcgctgacgacggcggcgactgggcggtcggccactcggcgcgcacgcgcgggaatcaacgggcggcgtccgcgcgggcgcgcgcacgcgaacacggcgcgcgggaagcggctttgcgagcggggagctcgcgcgaggggaggggcgctcggcgcgggcgactcccgcgcacgcgcgcgcggtgcgcgggcgggacggaggggaagcggggagagaggcgctcggggcggctctcgcatgcgcgagcagcgcgcgggcgagggagggagagagagagagaaagggagagaaagcgcgcccgggagagagaggaagagatgggccggggaagagagagatgggccgagcaagattcggcccatcgacctcgggggaggcaaaa

SEQ ID NO: 84581 - DNA, 1029 bp, Oryza sativa
  Clone ID: PAT_MRT4530_83804C.1
atggcgaagcgggcgggcggcgcgaggaagaagctgaggagagggctgtggtcgccggaggaggacgagaagctgatgaaccacattgccaagtatggccatggctgctggagctccgtccccaagcttgcaggccttgagagatgtgggaagagctgcaggctgaggtggataaactacctcaggccagacctcaagaggggagcattctcacaggaagaagaagacctcatcatccatctccattccatgctaggaaacaagtggtctcagattgcggctcagctgccgggtcggacggacaacgaggtcaagaacttctggaactcttacatcaagaagaagcttcgccagcgcggcatcgatccggccacccacaagccgctcgccgaggtcgtcgccgccgccgcctgcgcccgcacgccggcggtgttcagcgacgccgagctcatcctgtcctccatcggcgcccagccgccgccggagagctatgatggcagccggtacagcacggagtgcggcgccgcgagtgtcggcggcgacgggtcgctgtcgtcgctgtccgggtacagccaagcgacagcggagttcgcggtggacggcgccagcgcgagcgcgctgctgcactgcggcggcggcggccccacctcctccggtggtggcgccccgccggcgcccacggcggcggttatcccgtcggtgtcgagctccagcacgctgaactcgatggttggcctaagccccgccgccaccaccaccaccaccaccaccgacgagcagtacggcaacaccaaccacctcccatggctggagctgggcccaagcaccaccaccccctcctcctccgccgccgccgccacgttcgaccactacggcgccgcgctggacgagctcaagtggtccgattacgtgttcgacggctacaaccaccagctacctccgtacaaccatggcggcatctatggcggcggcgacagcaaggacacggcggtgcacttcgacgcccacgccctcggcaactggtgctag

SEQ ID NO: 84582 - DNA, 333 bp, Oryza sativa
  Clone ID: PAT_MRT4530_83805C.1
tcggtcttcttcttgtgtaccttacctagcagcagcagcttgcttgcttaattagctattacaagcatggcggcgacagcactgagcacacaggtccggttggcgatgtcccttcgggtggcgaacgggccagcgcccgcgcgcgtgtcggtgcttcccgcgagcaacaagctgggagacaagctggggatgcaagccaccttcaacgtggaggtgatcacaccggaccgcgaagtggaacttcaagtgcccgaccacctgtgcattcttgaccaagcggaggaaggagggatcgacctggcttaattctggcgggcgggcttctggttcttc

SEQ ID NO: 84583 - DNA, 1132 bp, Oryza sativa
  Clone ID: PAT_MRT4530_83806C.1
atggggcaagaacacagaaataacacgacacattgggccaaaattcacaagtctgcggagaagaacaatggagaaggccgccaaccgaaattgggctggattgggccggccccagggcagtgcatgactggtttcaacctgccagaaaacttcaaagaaattccagaagctttcttccggagcgtcaggacgcgagtcgttgctccgcagaaaactctaccgacagagaaaccagtcgtaccagcgccaccgaccttcaagactatggccagcaagactcttcgcgagttcgctgctccctctgctgacaatgtggccattgggcagcaggtcaacataggggacgtggatttcgacttgaagtccagccttatcacgatggcgcaggctagaccgttctgtggcaagcctaatgaggatgccaatgctcatctgcaacagttcctggagatttgtagcacgtataccatcaagggcgtcagtcccgatgccgtcaggctgcagctgtttccgttctccctcctcgggagagcaaagcagtggttctatgccaaccgtgcttttatcaacacctgggacaaatgctccacggcattcctctcgaaattcttcccgatgggcaaaaccaatgcccttcgtggaaggatttccagtttccaacagacaagggatgagtctattccggaagcatgggagcgtctgcaggaatatgtggccgcctgtcctcatcatgggatggacgactggctaatcctgcagaatttttacaatggactcaccccggtgtcccacgatcacttggacacggtagctagaagagccttcttgtctaaaacggttcaaggagccattgaactaatagagaagatagtctccaatatgggttggagcgaggaacgactccaatatgcgctaagcaaaaagcttgctgccaatgataagatcctagaaaacattaatgtcaagttagatggcttcacttctgcttttcaaaaccagctgagcttcaatcaaatgatagagacccagttagctcagttggcatccttagtccctgcaaatgatactgggaggattccggggcaacctaactcctccgttgaaaatgttaaggcgatcacgacaaggggag

SEQ ID NO: 84584 - DNA, 1776 bp, Oryza sativa
  Clone ID: PAT_MRT4530_83807C.1
atggccatggtcgtggcttccgttatgtgggcgtacagatggagccacccgagagcaaacggccggctgcctccgggctccctcggcctccctcttctcggcgagaccttgcagttcttcgcacccaacactacctgcgacatctccccctttgtgaaggagaggttgaacaggtacggcagtatcttcaagaccagcgtcgtcgggaggccggtggtggtgacggcggacccagagatgaactactacgtgttccagcaggaggggaagctgttcgagagctggtacccggacaccttcaccgagatcttcggccgcgacaacgtcggctccctccacggcttcatgtacaagtacctcaagagcctcgtgctccggctgtacggccaggagaacctccgcgccgtgctcctcgacgagaccgaccgcgcctgccgcaccagcctcgcctcatgggcggcgcagcccagcgtcgagctcaaggacagcatctccgccatgatatttgaccttacggcgaagaagctgatcagctacgagccgtcaaagtcgtcggagaatctgaggaagaacttcgtcgccttcatccgcgggctcatctcgttcccggtggacatccccggcactgcatatcatgagtgcatgaaggggaggaggaacgcgatgaaggtgctgaagaagatgatgagggagaggatggaggagccggggaggcaatgcgaggacttcttcgacgtgctgatcgaggagctggggcgggagaagcccgtgctgacggagggcatcgcgctcgacctcatgttcgtcctcctcttcgccagcttcgagaccacgtcgctggcgctcacgctcggcgtccgcctcctcgccgagaaccccacggtgctcgacgcgctaacggaggagcatgaggcgattgttaggggcaggaaggaggggtgtgatgccgcaggcctcacgtgggcagattacaagtcgatgaccttcacgtctcaggtcacgttggagatggtaaggttagcaaacatcgtcccggggatttttcggaaggccttgcaggacattgaattcaaaggctacaccattccagcaggatggggagtcatggacaaggttgagatcaccggtggttcgaagcatttcatggcctttggaggtggcctccgtttctgtgttggaactgatctcagcaaggcggcgtggacgccggtgaggaggaggggggcggcgagccacgcccagagcgagccgacggccgccgccgccgccggcgggagcccctccgctccaaatgcccctatctcctacgccgccgcgggctgctcctccaggctattctccacggcgcttaactaccacctcgattcgccggaaaacaactccgacatgccgtgggagtccaaggaggccaacatgaagaagggtgaggcggagctggtgcggcgaggcggagctcccgcggcggggcgggagcgccgtcggggcgcgggcggagtgcggccggcggggcgagtccgcggtggagcgcggtcgtcgcagttcccgctgctccgttccgagcatcgccgccacgaggatgaactgtgccgcgagccgccggcgggtgtgctccgcctgccaccgccgctccgccccgaccacagccgtcgcaaggagtcgtgccgcgagccgccagcgggcgcactccgccccgagcaacgccgtcgcgaggacgggccgcgccataagccgccggcgggagcgttccgcctggccatcgccgctccgcccctgtga

SEQ ID NO: 84585 - DNA, 497 bp, Oryza sativa
  Clone ID: PAT_MRT4530_83808C.1
ggcgcctatttggcgcgggctcgtgcgcttttgataatgcttttgctgctgctttggctttggcagttggcacaccggcgcaggaaggagaggcaagagcacgaggaaatcgagcaaatccggcgacactttattttctggtgattttctccctctattttgcgttagaaaaatcgttgacatccgaacgcgaaggcgcgcgccttccaagctccaaagcatgtggaaaaaggcaggcaaaaacgcatgcaaaaggtgaaaaaaacacaaaaccaaaaggcagagaggggttagctggtgcctcgctttcgcctttacgacgcagctcggcagctggctttgcttttgcttcggctgcaggagcgctcgtggctagcgttgataatttcgccgatgatggattcatacgcagccacgcaggctatcaccgcgactcgctagatctggcgccgtcctatcccgtgcgcacgccaacaaaaaaacctacgatcatggct

SEQ ID NO: 84586 - DNA, 402 bp, Oryza sativa
  Clone ID: PAT_MRT4530_83809C.1
atgtcggtttggaaaccgactttgggcggtcaagccagcgagctggcgctccggctagcggccaaatcggcgacagggcggagggaggatgacgccggcgggaggaaagaaaaggggaaaaggagggaaagaaagggggcttgccccttgcctctttgggaaaaggaggaggggagtgggggcgacgcggcagagggaggaggggctctgcctccgtcccttggcagcttgcgcacggagtggcgggggccgggcgatgacgacggcgatgacggcggggcggtttggagcggggcgacgacacgggcggcaggcgcggcagaggctgacggcggcggcgaccaggcggtcggccaccacggcacgcgcgcgcggcaaacaacgagcggcgcggcggtttga

SEQ ID NO: 84587 - DNA, 643 bp, Oryza sativa
  Clone ID: PAT_MRT4530_8380C.1
ccgggctccagcagagatccattccattgagaacttgagatagtgctgctcaacagccttctatagtgcatgcatacaatggggaaatcaccagcactaccactctactatcttcttatcaccttgttggcattctacttcttgattgttccttccaatgctatacctctctcaagagtgcaaaggctgcacttgcaagagtccagtgagatgccattagtcagaggcagcacagcaaagccaaagatggaaatggagagaccagttgttgccctagaggaggacgccatgatcaatgcgaggatggctttggagacacaggactatgcaccctcaggcccaaacaaccaccacaagccaccgggttggagctgagcagctagctagctagctaggattcatatatatcacctatatcaaagtgtgtgcttatatcttactcatgcagtctcatgtgcatgtgcccttcccttcatgacgattttgcaaaacctcttgattggtagtctgagtcttgtgacatagcttatgtatgagatgtggctgtgagtcagcacaggtggcaacgatcacgtgtaacaaaaggtgaattatattgccaaggcctcgtatttatttgagttagtttgggtatgtgaactct

SEQ ID NO: 84588 - DNA, 1239 bp, Oryza sativa
  Clone ID: PAT_MRT4530_83810C.1
atgcgcggtcccggcctcacggctcgcggtggaacgcgcgcacggggagggactgaccggggtcggcccgtcccgacctcggctgggctggcgccgacgtggcgcctacgtggctgccacgtgggctggcgggaggtagacgacgacccggccgcgaatggacggcgggcgacagcggcgagcggcggagcgaaccacggcgatacgggcaacgacgagcacaccgggcggttgcacgtgacaagggaaggcgagccaacggctcggattcgccggaggttgctcgacggcggcggaatgcggcggcggcaaccggcggcgggagaagagggaaacgacgacgaggtcacgagaggtcgattcccggcggtgagagcatcctcgccgccacgggaactcgacgctagcgtcggattgggcggagctacgccgagcgaggctggcgacgtgcgggtgctacggagctcgggcggcgacggcagcgagcacacggcgagcgacggcaacgggggcggcaatgtcggtttggaaaccgacttgcgcggtcaagggcgcgagctggcgctcggcggtcgcggccaaagcggcgacaggggggatgacgccggcgaggaggaaaaaggggaaaagaaggggagaaagggcttgtcccctgccgatttgagaaaggaggagggagcgggagcgtcgcggcagagggaggaggggcgctgcctccgttccttggcagcttgcgcggagtggcggggccaggcggtgacgacggcgatgacggcgggcggattggagcggcgcgacgacacagacgacagacgcgtgcagaggctgacggcggcggcgactgggcggtcggccaccacggcacgcgcgcgcggctcgcaacggaaggcgcggcggatggagtggcgtggctcgggcacgcgcgctggctcgcgggccaagcggctgcgcggctgcaggcacaggcagggcagcggggccagggcgacgcagacgcgacgcggcgacgaccacacgggcgcgcgcagcgaacgagcgcggggagcggagtgggaggactcaggcttggcgcggcaggctcacgcgcacgcgcgcaggccgagcggagggggagggagacagcttggctcagcaggctcacagcagcacagcgcgcgcgcgccaccagtgcccgagcaagctctgcttgcccccaccctcgcctacccgcagccattctcgatgctgccgtgctggtga

SEQ ID NO: 84589 - DNA, 573 bp, Oryza sativa
  Clone ID: PAT_MRT4530_83811C.1
aacctttgcagagggggtacactttacccacacgacgttactagccttggtcacccagcccgcatttcgaaagccgacacagggttaccatatgccaacgagaggggtcccagaccaacaacaggttaggtcccagaccatactgtgccaggaagcccgggggttctccccgacaccaccccgttgaatccacatgtttcttggcatcaaggctcccttgattagctatttactcagtcaggggtgtctcattccacccgtgtggtcgcactattgtatgctcggatgtaattccaaaggaatcggtccttagatgcgaccgcacaagtattccgcccagattttaagtttgaaggcgaccgtcgatactcgcacagagtgcacaaatatcgaggcgcaactagatggttacaagggaacatgatataacaattaacaatggaacttcacaaatcttcgagaattccacttgaagaaaaatatccggtaaccgcaactaggcgcaaacaatcaaaaacctaaacaaagaccaaataaaatatcctatttaggctaattaatagtgccattaga

SEQ ID NO: 84590 - DNA, 1386 bp, Oryza sativa
  Clone ID: PAT_MRT4530_83812C.1
atgggccggccggcccaaggcggcccaacgcgcgcgcgggagggaggagagagagagccggtggaccgggctcacctcgcgtggtcccgggtgggacccgcttgtcggtgacacggttcaccgtgcggagcgagcacgcggcgcacgcgcgcgggcgggggagggacgcggtgcacgcgcgcggttcgaggtggacacggatgcagcgggcccacgcgcagcctcacggctcgcggtggaacgcgcgcacagggaggggctgaccgtggtcggctcgacccggtcttggccgagttggcgccgacgtggcgcctacgtggctgccacgcgggccggcgggaggtagacgacgacgccagccggaacggacggcggacgacagcggcgagcggcggagcgaaccacggcgatacaggcgaaagcgagcacaccgggtggtcgcacaggaccgggggagaccagccaatggctcggattcgccggagggagtgcgtcggcggcggattgcggcggcggcaaccggcggcgagggaagggggaaacggcgatgaggtcacgaggggccaattcccgacggcgagggcatctacgcggctacgggaatccgatgctagcgttggattgggcggagctgcgccgagcgaggccggcgacgagcggcgcttccgagcttgggcggcgacagcggcgagcacacggcgagcggcggcaacggtcggggcggcgccggctagctacggggaggctactcgcactaccgtgcgggcgggcgcagtgacgagaggccgacggcgcgggagtaatctctccggcctcggggcagggaagaggaaggagagggcgcgcccggagtccccttccgcgtccttgctcgtgccggctcctccgacacgtgcaacgacgaacagcgacggcgaacagagcacgggaggcggcggcaatggcgtggaggcgaatgggagaggaaaggaaagggggaagcttgggtttataggagcagcaatcgcgtggagtggcgggggccgggcgatgacgacggcgatgacggcgggggcggtttgagcggcgcagctcgggcacgcgcgctggttcgcggggccgagcggctgcgcggtagggcagcggggccgggcggcgcagacggcgcaggcgcggcacgggcggcgaccatgcggctctcgcgcacgcgcgggcagagcgagggaggggcgctcggcgcggctctcgcgcacgcacgcgcggcgcgcgggtagagcagaggggggagggagagagagagagagagcgccggggagggagggggagatgggccgagagagattcggcccatcgaacccgggggaggcaaaatagacttttgcggaggaattgatttgggaaggattt

SEQ ID NO: 84591 - DNA, 162 bp, Oryza sativa
  Clone ID: PAT_MRT4530_83813C.1
atgagggtgacggtgatcagcacgtcgccggtgaagaggcaggaggccctggagaggctcggcgccgacggcttcatcgtcagcaccaacgccagtgagatgaagttctacattaatcgtgtagtcatatggaaggacatcctactgatgcagatgcagtaa

SEQ ID NO: 84592 - DNA, 1928 bp, Oryza sativa
  Clone ID: PAT_MRT4530_83814C.1
aagtaaaattgagggctcatttaaatgtgccatttttggatgctatgcaagtaccaacatacgcccgttatctcaaggtcatactcaacaacaagagaccgctcccaacaacggaggtggtcaagctaacggaacactgcagcaacctgatactccacaagctccaggagaagaagaaagatccggggtgtcccacgatcacctgctcgatcggggcacaacaattcgtccatgccttgtgcgaccttggagctagtgtcagcgtcatgccaaaaaacgtctttgacaaactcaacttcatggtgttggcaccaacaccgatgtgcctccaactggctgattcatcagttcgttacccggcggggatagtggaggatgtgcctgttaagatacggaatttcttcatcccggttgattttgtggtgctagacatggacatggggaaggagacaccgctcatactggggcgtccgttccttagcaccgcaggagccaacagtgacaacattcaagaggtcgaagtggagcaacccaagacggatagcctggtaaggttcatgcagaacttcctgggaaaggaaacaacaatgcccaggaaccgttattggaggacgctaaaaggtgtggaaggaaaagccaaagacgcccgctccattacctccggagacgggtggaaaatccgtgaactgaatcgaaaggaggggtcgggctctctatcaagtcgtcatgacgagtctagtactcgttcatcagccgatgcctcgatggaaaacgccgacgctccgcgacaactcctgagcgacactgacctcgaccttgtcagtgatcgggagagacaagcctactacatcctgagcgaccgggagtatgctcacacgcgagaatactcaccggagttgctgaaaaagataggtttggatgttgaatttcgttctatttggaaagctgttggttggcagagatttgctgtggtagatgagtctggttctcgtttgcttactttgcaatttctgtgcactttgaaagaaatagaagatggtatttcttttcgccttttcccgtaaggagttcacgctcacatgaaaggcttgagtacacttcttgtttttcacgattcctttaaaatcgatctccagaaaggaatttcttggttcaagaaaaataggttttgggaagatatttcgggtgctccaatttgcaagaaacctagaacgaatgatatccataatcctgcacttaggctcatgcacaaatggattgctatgactttgtttcctagaatgcaagggcatattttgaaacatggggtagatggatctttgatatacttttttcccggttgtacaaatgaaatcccgttgccaaatgcggggtatcatttgtacaactgccatgaactaaccattcccctgcagaccgtagaagaatcccgtgcagatggaacatacagggagacgcgcaagatgacaaggaacgaacaaggaagttcatcaccctcaacacccgtgcagatgtatgaggcaggttgggcaccaactggggatgcacccggatggacccaagctccacgccatagcatcggagtctcaacctggtcaagcgccagtgaggaccggtggcatgcgcctgatgacatccactggggggataatcaacctcccagatcaagtggtgtgcctccatgtccaagtgaatggggctcgagttcctctcattgcaacttgggtgaaatcactaggagaatggacacccttgatatgcagacgggggagatccagtatgacctgatggaacacatagctcaaacgcaagaatggcaacaatctgctgatgctcaattcaccaacatcaacaacatgatgcagcaacagcacgacgaccttcaagcatacttttgctttcaggggttcaatccttatcaagggccc

SEQ ID NO: 84593 - DNA, 1357 bp, Oryza sativa
  Clone ID: PAT_MRT4530_83815C.1
ggccgaccggcccaagacggcccaagacgcgcgtacgcgcgggagggaggagagagagagccggtggaccgggctcaccacgcgcggtcccgggtgggacccgcttgtcagcggctcggctcaccgtgcggagggagcacgcggcgcggcgctagggtgcggcgggcccacgcgcagcctcacggctcgcggtggaacgcgcgcacggggagggactgaccggggtcggcccgtcccgacctcggctgagctggcgccgacgtggcgcctacgtggctgccacgtgggctggcgggaggtagacgacgacgccggccggaacggacggcggacaacagcggcgagcggcggagcgaaccacggcgatacgggcaaaagcgagcacaccgggcggttgttcgtgatgaggggagacgaaccaacggctcggatttgccgggggttgctagacggcggcggattgcggcggcggcaaccggcggcgggagaagggggaaacggcgacgaggtcactaggggctgattcccggcggcaagagcatctacacggttacggaaatccgatgctagcgtcggattgggcggaactacgccgagcgaggccggcgacgagcggcgcttccgagctcgggcggcgacggcggcgagcacacggcgagcgacggcaacgggcgcgagctggcgctcggcggtcgcggccaaagcggcgacagggaggatgacgccggcgaggaggaaaaaggggaaaggagggggagaaaggggcttgtccttttgccgattcggaaaaaaggaggaggggagcgggggcgacgtggcagagggaggggggcgctgcctccgtcccttggcggcttgcgcgcggagtggcgggggcgcttgcaacgggaggcgatgacggcgggcggtttggagcggcgcgacgacacgggcgacagacgcgtgcagaggctgacggcggcggcgaccgggcggtcggccactcggcacgcgcgcgcggcttgcaacgggaggcgcggcggatggagtggcgcggctcgggcgcgggcggctcacgcgcacgcgaacacggcgcgcgggaagcggcagcggggaagcggggagaagggctcggctcggcgcgggcggcgcacgcgcgcgggcagagcggaggggcgcagggcgcggctctcgcgcttgcgcgcggcacgcgagggaggggcactcggcgcggcgacgcgcgctcgcgcgcgcggcgcggggcggagcggagggagagagggagaggggaaagggctgggggagaggggaagatgggccgagagaaaatcggcccatcgaccccgggggaggcaaactagacttttgcggagggatt

SEQ ID NO: 84594 - DNA, 693 bp, Oryza sativa
  Clone ID: PAT_MRT4530_83816C.1
gacgacgcgacggcggcggcgaccggttcgcggcaccacctcttccacgccaacaacgccaacttcgtgctgcaaagctgcaagcctctgctcggggacgagtgggcggcggcgcgcgagagcatcgtggagcggcacgtcgcgggctacgccgaggcttgctgggcaccggtcgtggcttgcttggaacccgcgggcaggaagccggcggcaaaagtcgtggccaagttcagcgccgcgtttgacagagcgtatgagagtcaggcgcgctgcgaggtccgcgatcccgcgctccgcgacgcgttgcgaagggccgtgtccgacaaggtcgtgactgcttacggcgtgtacctgaagacgcaccccaagctcgagaaaaaactcaggtacaccgccggggagctgggcgagcggctttcggaattgttcgaaggagaagctgcagagcacaacaaatgaaggccgatttcaactttttttttttcaaacttttaaatttttcgtcgcatcgaactttcctacacacacgaacttccaatttttcagttacattgttccaatttcttcaaatttccaattttagtgtggaactaaacacagccaaacaacagactatagttgtttaccatggattcttttgtaataacacatgtaattttagaaaaaaaaaaaaaaaaaactcgagactagttc

SEQ ID NO: 84595 - DNA, 588 bp, Oryza sativa
  unsure (1)..(588): unsure at all n locations
  Clone ID: PAT_MRT4530_83817C.1
ttaccagnttgtcncaaagaatgagggttgccccaatgtggctcaaggttntttttgggctcaaaatnncgtgaatcncatgcgttgccaggacgcctttggcaatgttctcagatttgtttgttatcaactgtgtattgtagccaattttggtcatagcaacactgggtacaaaacttgtaactcaagcaagagttacaaattgacaaacatgagtacaattgactagggcgtccaagtttttttagatggttagggcaatgcaagttgccactggtgcaacgtaatagttggagtctccttgtggtgaaataaggagggatgaccgaggatgtgctggaatgtgtgtgtggtgagcaaaatgaggccaatggatgtgtgtgcgtgcaacccctgtggtgtagatggagtgggcattgcgcatgtttcctggttatttcttgagggataaattgtgngcaacggttttgcttgctggaaatggcagaaatatgtgggtcttgttgggtaaactgttggtcttggactagtgccatgctattgcaattttgancaattcgcatcnggttgtaaaaaaaaaaaaaaaaa

SEQ ID NO: 84596 - DNA, 732 bp, Oryza sativa
  Clone ID: PAT_MRT4530_83818C.1
atggctgaggagctgaagctgctggggtcgttgtccggcgtgagcccgtacgtgatccgcgcgcagatggcgctcgccgtcaagggcttggcgcacgactacctccccgaggacctcacccgcaagagcaagctcctcctcgacagcaacccggtgcacaagtcggtgcccgtgctcatccacaacggcaagccggtgtgcgactcgctggtcatcgtcgagtacgtcgacgaggcgttccccggcggcgccgccgcgctgctccccgccgacccctaccaccgcgccgtcgctcgcttctgggccgccttcatcgacagcaaggtgttccctccgtgccttgccattctgaagacggcggcggcggaggcggaggaggagaaggcggcgaaggtgaaggagacggtcgaggcgctccagctcgtggaaggggccttcggtgagtgctccaagaggaagccgttcttcggcggcgacgccgtcgggtacctcgacgtcgtgctcgggtgctacctgtgctggttcgagggggtaagcgagatcgctggcggtgtgtcgccgccgctcctcgacgcgtcgaggacgccgcagctggccgcgtgggcggcgcgcttcagatcagcggccgatgcagtcggatgctcggttcctcgggtggacaaggttgaggcttacctcaacaacgtgctcaagccgaagtggagtgccgccgccgcggcgtccagccattaa

SEQ ID NO: 84597 - DNA, 1150 bp, Oryza sativa
  Clone ID: PAT_MRT4530_83819C.1
gacggcgcgagggggaggcggaggcggcggcgtgggagagggagagcgagcgggtggcagcggcgctctgcagcggcggcggcgcgaaggggtggtggtggcgcttgtggcggagaaggtggagaaggtggggctgattcaagagaaactggaggtgatggacaagaagttggaaaagcaaggagagaggctcgatcaagtgcaggccaaggtggatttgtcgctagaatcgctggggcaagttcttcaagaacagatccattgttgaaagatttaaaacaagagtttgctctcaaggatttaggtgatttgcactacttccttggtatagaagtcaacaaggtgagagatggtattttgttgactcgggagaaatatggttctgatctactaaaaagggcaggtatatcaagttgtaagcctgttgctacacttatttgtactacagagaaattgtcagttcatagtggttccaccctatgggaacatgatgcaacttgatacagaagcattgttggagctttacagtacttgactttgactagaccagatatttcctttgcaataaataaggtttgtcagtttttacataatcctaccacacagcattggatgacagtcaagaggattttgagatatattattaagtcttctgttggtcttggtcttaagattaacatatctccttctactcttgttagtgctttttctgatgcagattgggcaggatcagtagatgacagaaggtcaacaagtggatttgcagtcattttgggttcaaatctggtgtcatggagtgctagaaaacaggctacagtttccaggtcaagtacataagctaaatataaagcagtaacaaatgctacaactgaggtaatgtgggtgcaaactttacttaaagaaattggagttcaggttccttcagcagccatgctatggtgtgataacttaggagctacatatttatcagttaatcctgtctttcatgctagaactaagcatatagaggtagactatcattttataagagaaagggttgctaggaaacagttggagataaattttatctcatatgatgatcaagtagcagatggttttactaaaccaatctctgttcagagattttagacacaatcttgacttagataag

SEQ ID NO: 84598 - DNA, 130 bp, Oryza sativa
  unsure (1)..(130): unsure at all n locations
  Clone ID: PAT_MRT4530_8381C.1
aggcntcattgcctcgggcagagaccaagaacccgagaagcttacccgcaggttcctgaaatgcgggatcctgaggagccagtaatgctatttacaagaccaattgaccctgataagctgaagatggctg

SEQ ID NO: 84599 - DNA, 1627 bp, Oryza sativa
  Clone ID: PAT_MRT4530_83820C.1
ccgggctgcaggaatcggcacgaggcaacaccatcatctgatccatttccacaaagcttctgaaagccaacacatacctcactgccttgccttcttctcagcttcaagaagccttttgagcttgtgatttctacatcatccatccatttcatcaccatgatccaagaactccttggagggacaaccatggaccagctcaagggcgccagcgctctgaaccacgcctccctgccggtggtgctgcagcctatcgtgtccaacccgtcgcccacgtcgtcgtcgtcgacgtcgtcgcgctcgtcggcgcaggcgacgcagcagaggtcgtcgtcggcgacctcgtcgccgcacgggcaggggcagggtggcggcgcggcggagcaggcgccgctgcggtgcccgcggtgcaactcgtcgaacaccaagttctgctactacaacaactacaacctcacccagccgcgccacttctgcaagacgtgccgccggtactggaccaagggcggcgcgctccgcaacgtccccatcggcggcgggtgccgcaagccgcgccccatgccggcgccggtcgccaagccgcccatgtcttgcaaggccgcgccgccgctcggcctcggcggcgggccagtgtcctgggcctccgggcagcaggccgccaccgcgcacctcatggcgctgctcaacagcgccaggggagtgcagggccacggcggcagcaatgtccaccggcttcttgggctggacaccatgggtcacctccagatcctgccaggcgctcccaatggcgccggcgccggcacggcggcgtcgctctggccacagtccgcgccgcggccggtcactccaccgccgccgcacatggactcccagctcggcatggggacgctgggccaccacgacgtgctgtcgagcctcggcctcaagctgccctcgtcggcgtcgtcctcgccggcggcgagctactacagcgaccagctgcacgcggtggtgagcaacgcggggcgcccccaggcgccgtacgacgtcgccaccgcgtccctcccttgcaccaccgcggtgacctcactcccgtcggcgctgtcgagcgtctccgccgccgcgccgaccagcaacacggtcgggatggacctgccacccgtgtcgctcgccgcgccggagatgcagtactggaatggcccggcggcgatgtcggtgccgtggccggacttgcccactcccaacggcgcgttcccatgagatagacgacggcgacgacgtcgtctcatgcaagcatgacattactagctagtgtagctctcgatcggtttagctttaatcatcatcgatcttgtgtggtttcggttaatcagtgtgaggactctgaggggtttaatcaagggtgttttagttactggtgttttggctagtccgtgggcgccggccgccgcccctttttttctgtttacttattattaggtttttacctagggtttggtggtaactgggtatagtgtttaagtcgtgatcaatgcatagatggggttgtactatgagatgtgtacgtgtgttgtcggtttcgttcaggttgatccatgtatggatgtaaggtttacattccctgcaaaaaaaaaaaaaaaaaaaaaaaaaa

SEQ ID NO: 84600 - DNA, 387 bp, Oryza sativa
  Clone ID: PAT_MRT4530_83821C.1
atggcgacggcgcgcataggggaggaggaggtcgaggcggaggcggtgcgtccatgcgtgaggcggggtggcggcgctacgcaggtgagaagaggaggaggagggcggctagggttttggtgcggcgtggcgacatctgcgccgttcattcccgaaccgacgatcgcacggctgaggaaggggtatggagacataccttatttccaccatggtaatggtagtgccattatggtccatcttgataacggtagtgacattatggaagaggatatgaacccattacttactagtcctaaccaattcataccagaggggattgaggaagagatggcatgtgcacgcttcaggagaggtagcagtgaagctggaggcaaagaactcgtctag

SEQ ID NO: 84601 - DNA, 322 bp, Oryza sativa
  unsure (1)..(322): unsure at all n locations
  Clone ID: PAT_MRT4530_83822C.1
cggccggcaagctatcttctgcacacaggacaagggccctggccgcaaggataaaagcaacntcttccaccggatgtctaacactgacgcgagcacatcacgaaattcacttggaaggccctacgacaacaataaccaaacaggttacgctctcaagaaggcgaggccttcagatgatactgcgtccgcaagcggcaaaaaagaaccctccgctgcntacaaggacaangaacctctttcacacagactgaagaggggngagacntccaaacgaagccccctgcaaagaaacacgaaaagaagagagcttgatctttataga

SEQ ID NO: 84602 - DNA, 512 bp, Oryza sativa
  unsure (1)..(512): unsure at all n locations
  Clone ID: PAT_MRT4530_83823C.1
cggacgtcgngnnggccgttgactatggctcggtcacaatcttccacgacgcgcgctcgcccgagcacgtcttccaggacttctgtcgccgctgcgctggcatcatcaaggccctcaccaccgttgttgtgcagacgtgggaaagctctacaagctgaagttgtgcgaccatgggaaattcgttcattcactgtaagtatcaagggataaagattgtgcatccgcacaatgagctgtatcacggatgctgtaatgaaatggttcgatgggaacatagcatcaaccctgaaatctttatcaatgcatacgtttgctatgtcaatatgacgtgttagatttattttgatcccaaaatggacgccaggattgctgagatggatccaatggatgataatgaggatggtttcaccgagttggtatggcaggatatgttgatagacaacttctatgaaaacgatgtgattcttctttgtgcctgaatgttcgtttatgtatttaaaaaaaaaaaaaaa

SEQ ID NO: 84603 - DNA, 210 bp, Oryza sativa
  Clone ID: PAT_MRT4530_83824C.1
atggcaacggaaatcccccatacccacacccgtgtgggtgatgggtacccgtcgggcgcgcgtggcgtggagctgaggcagcgatggatgatcggctgcgtgggctcgcggcgcggaggcagcggccaccgtggcaaggaggccgcgacgctgcgtcagagaaggttcaaggctgcccccttaatccttaatttggatcagatccagtga

SEQ ID NO: 84604 - DNA, 1004 bp, Oryza sativa
  unsure (1)..(1004): unsure at all n locations
  Clone ID: PAT_MRT4530_83825C.1
atggccgccgcctcccctccactcctccccaccaccgtcctccccgccaacaccaccgccaccgtctcccctgcccccacctccgtctcctccgccgatgccaagcctgccgccacgcgcgccttcctcgcccgcctcctcgactccgtcaagcgcgcgctctccggggcccgcccctggccggagctcatcgaccgcagcgccctctcccactcggaatccctctccgactccggcgcccgcctccgcaagaacctcgcctacttccgtgtcaactacgccgccatcgtcgccctctccctcgccgcgtccctcctcgcccaccccttctcccttgccgcgctcctcgccctcctcgccgcctggtgcttcctctacctcctccgcccctccgacgcgcccccgctcgccgccttcggacgcaccttctccgacagggagaccctcgggggactcatcgtcgcatccgccttcgtcatcttcctcacctccgtcggatccctcatcttctccgcgctcgccctcggcgccgccatcgtctgcgcgcacggcgcattccgcatcccggaggacctcttcctcgacgagccagaccaggccaacggcgccgcctccgtcaacctgctctccttcatcaccagcgccaccggaggccgcgtctgatcctcctcctcgcgcatgcattccaagcaaaggtcataaattctttttatattatacctatgagacaaacactatcatttattcgtatggtgatcgatgtagancaaaaaaaaattaggggagaatgatactgctataagatgcatatatgattttgtcgatgatctagttttgtttccttttgcatttgatgtatgagaaacttgagagcaaaaagaagaattctgttattgatcctgatattgatgtgatccgtctcatcaatcgtgccggttctgttataaaattcncaaatttgttttggtttaaaaaaaaaaaaaaaaaaaaaaaaaaaaaaaaaa

SEQ ID NO: 84605 - DNA, 412 bp, Oryza sativa
  Clone ID: PAT_MRT4530_83826C.1
ccacagaatcaccaaaattgatattccttctaatgggtaagaaggggtgcccgattgagcaaatgaacttactgccatttacaaatcaccacgtgacacaaatcggggagcccatatccaaacaattatcttgtgtgaatcacagcttcccctggacggcgtatctcatgaagacgcccgatatggaggggtgcgcggcctgcttcattgggcggaccatagaggccatcgatggccggaggctcgggttctcgccgacgcacgacgccgccagcgacgcccaagtaacattcattttagcggccaaagccctgaaggaatttttggaagggactcaggaccggctgtttacagaaattagagtgccattgttcgtctttcgttgatccaaacccaggcgttggagaatttt

SEQ ID NO: 84606 - DNA, 194 bp, Oryza sativa
  Clone ID: PAT_MRT4530_83827C.1
acgtgatcgttctctgtacggtcatcaaggagcgcattcttatcagctcgtctctgaccacgctctcaatgacaacaacatggatagagaatgactactattgacgggatatcatctagctcaaccttaaccagctagtgagaagaggtctagcagggtgtagacatacactctagctcatctagagcgcaagc

SEQ ID NO: 84607 - DNA, 515 bp, Oryza sativa
  Clone ID: PAT_MRT4530_83828C.1
atggcgtggagccggcgcgcggcggtcgcggccggggcggcctcggggaggagggaggaggatgacgccggcgggaggaaaaaggggaaaagagggagaggaaagagggcttgtcccttgcctcttcgggaaaaggacgagggagcggaggcgacgcggcagagggaggaggagctctgcctctgtcctttggcagcttgcgcgcggagtggcggggccgaggcgatgacgacggcgatgacggcggggcggtgtggagcggagcggcgacacgggcgacaggcgcgggcaggcgcggcagaggctgacggcggcggcgaccaggcggtcggccaccacggcacgcgcgcgcgggaagcaacgggcggcgctgcggtttgagcggcgtggcttgggcacgcgcgctggcttgcggggccgagcggctgcgcggctgcagacgcggcagggcagcggggccgggtgacgcggacggtgcaggcgcggcacgggcggctaccacgcgggcgcgcgcg

SEQ ID NO: 84608 - DNA, 1095 bp, Oryza sativa
  Clone ID: PAT_MRT4530_83829C.1
atgggccggccggcccaagaggattcggcccagtagggcgcgcgggaggggaggagagagggagccggtggaccgggctcatctcgcgtggtcccgggtgggacccgcttgtcagcgctcggctcaccgtgaggagggagcacgtggcgcggcgctagggtgaggtgtggggcgcggtgcacgcgcgcggttcgcggaggacgcggatgcggcgggcccacgtgtagcctcacggctcgcggtggaccgcgcgcacggggaggggctgaccggggtcggctcgacccggtcttggccgagctggcgccgacgtggcgcctacgtggctgccacgtggaccggcgggaggtagacgacgacgccggccggaacggacggcggacgatagtagcgagcggcggagcgaaccacggcgatacaggcgaaagcgagcacaccgggtggttgcacgagacgagaggagacgagccaacggctcggattcgccggaggatgcccgacggcggcgaattgcggcggcggcatccggcggcggaagaagggggaaacgacgacgaggtcacgaggggccgattcccggcggcgagagcatctatgcggctacgggaatccgtcccttgcgccggattaggaggaaacgcttcgagggaggccggcgacgagaggcgttcccgagctcgggcggcgacggcggcgagcacacggcgagcgacggcaacggtcggggcggcgccggctagctacggggaggctactcgcactaccgtgcgggcgggcgcagtgacgagagccgacggcgcgaaacatgatcgtttcggcctcgggccgaggaagaggaggaagagggcgcggccgaagtcccctttcgcgtccttgctcgtgccggctcctccgacacgcgcaacgacgaacggcgacagcgaacaggggcgacattggtggcgagagacgaaaacgagggagattggagggggaggagcttgggtttaaatgggcgacaatgccccccgatggcgggcgcctagcgatacacattgacaaccccccgggccgttttcacgaatccgcacacctgcgactcgctgctccgaacct

SEQ ID NO: 84609 - DNA, 648 bp, Oryza sativa
  unsure (1)..(648): unsure at all n locations
  Clone ID: PAT_MRT4530_8382C.1
gnaattgtaatacgactcactatagggcgaattgggtaccgggccccccctcgagtttttttttttttttttttgagtaaatggcatgaattagtcatctaaaattactgattcataaagttacttgtatatttccataacttataagctttaaagcatatgtagatataaagcgattaagatagggctaaaccctaccaggtggagtctaatatccttcttcttcaccttcaccttcggcggtttcgataccgacttcttcgtaatccttttcgagggcagccaaatcttctctggcttcggagaattcaccttcttccataccttcaccgacgtaccagtggacgaaggctctcttggcgtacataagatcgaacttatgatcgattctggagaagacttcagcgatggcagtggagttagagatcatgcagacagctctcataaccttagccaaatcaccaccagggacaaaatggggggttggtattgataccanccttgaaaccatggggcccatcnacaattgaatggtcncttggtctgatggtgcaaggaacntgatccttgggaaaatcccnnntcttcttcacagcanttttccttttggttcccttnaccccggaggggtcaaacaattgttttccc

SEQ ID NO: 84610 - DNA, 198 bp, Oryza sativa
  Clone ID: PAT_MRT4530_83830C.1
gtttagaaattaatggtactggaaatgagtgattaacctggacccaaatgatgctgggcctgaccactttgtgtagatggcgccatgcgtacccccagttatctggaatggtaaaatcgaggctgggaaaggtccttttgaggagggttatgaccgatgatgatgatgatgaccgatgattaccgatgaagagttata

SEQ ID NO: 84611 - DNA, 1677 bp, Oryza sativa
  Clone ID: PAT_MRT4530_83831C.1
atggggtcggttggcatggaggccaagccgacgcctgattggctccaggcccgagtgcttggctggcagggaggccaggccgagcaggcccaagacaagacgacggcccacggcatcggcaccatgcgtgggcaagtgcgggagatcgcgcaagctctcaacctgggagtcctctcccttcctattcctcaaattgacataaaattccctataatccaatacgctgatgacacgcttatcattatgaaggcatgtcaaagagaagttttctgtcttaaaggcatcctgcaatcttatgccatatccactggattaaaaatcaacttccacaaatcttctatgatcccagtcattgttaatcaggataaaattgaactcctggcaaggacttttggatgtacaattggagcacttccgtttacatacttaggtcttccggttggaacaacaataccaaaaatctgtgaatttgcacctctcattgatagagtggaaagaagactcccggctataacgatgtttttgaatcagggacagagactaaccatggtcaactcagtcctgtcatccctgccaacattttacatgtgcactcttaaaatccctaaaaaggttctgctgcacatcgacagagcaagaaggcattgtctttggagaaagtctcatgaaattgatgcaagaactcactcactggcagcatgggacaagcatctcgacaaattctttaacaagaaaaatctccgatgggtaaaacttctctggacttcattctataccaatagatctatgccaccgcatgcattacaagactttggatccttttggtggaaagatatcactcgactaatacctctctttagaggtatcagctctattcaagtcaactctggagacacagttctcttctggaaagatctctggtcagataaattatttcaaaactccttgcccgctgtattctcttttgctattaatgaagatctatctgtcagagcttttcttcaaaataatttggctcaaaacttcctcctgcctctatctcctcaagctattcttcaattcaatgaattatcagacctcctggagaatattcttctcattgatcaaaatgatatttggacttactcatggggaccaatctacaagacaagaaaaatgtatgacctcttctttgctcacattacccctcaccctgttttgacatctatttggaaaagcaaatgcagcatgaaagggaaggcattcttctggctccttcttatggatcgattaaacacacgagacatgctacaaagaagacacctttctattcaggatggaccttcttgccgaatctgcaacttagatattttggaggatatgtctcatcttttcttcacatgcccatttgctcaaaactgttggaattcccttgcaatctattgggatgtgaatcttgatctttttgacatgatccaatctgcgtttggaaattttggtcaaagcttcttcatggaagtggtggggactgcatgctggcaaatttggttgaaaagaaatgccctcatttttgacaatgtccaaccatcacttactatttggaaagctgatttcaaggaggatttcactcttcttttgcatagagtgaaggaggaggacagacctagatatcaatcatggattgacaacattttttaa

SEQ ID NO: 84612 - DNA, 678 bp, Oryza sativa
  Clone ID: PAT_MRT4530_83832C.1
atgccattagatagatctcgagatttgagaaattttggaacggctcggctcaccgtgcggagggagcacgtggcgcacgcgcgcgggcggggttgggacgcggtgcacgcgcgtggttcgcgcaggaacggatgcggcgggcccacgcgcagcctcacggctcaccgcggaccatgcgcacgggaggaaaaacggagggagcagctggctgggtcagctgatccggtcgcggccgaggtggcgccgaggtggcgcctacgtggcagccacacgggccagcgggaggtagacgacgacgccggccggaacggacggcggacgacagcggcgagcggcggagcgaaccacggcgatacaggcgaaagcgagcacaccgggtgtttgcacaggacaaggggagacgagccaacggctcggattcgccggagggagcttgacggcgacgaattgcggcggcggcaagcggcggcggaagaagggggaaaaggcgacgaggtcacgaggggccaattcccggcggcgagagcatctacgcggccgcgggaatccgctgctagcgtcggattgggcggagctacgccgagcgaggccggcgacgagcgggtgctacggagcacgggcggcgacggcggcgagcacacggcgagcgatggcaacggtcggggcggcgccggctag

SEQ ID NO: 84613 - DNA, 2494 bp, Oryza sativa
  Clone ID: PAT_MRT4530_83833C.1
atgaacgacataatgattttcaatgacattataagcaatgttggtcttcaagaactccctctcaaaggacgctcttacacttggagtaacatgcaagaccaacccttactccaacagttggactggttcttcacctcccttgcctggaccttggcttatcccaacattatggtcactgctctcagtaaatatattgcagatcaagctccctgtgtagtctcaattgaaacctcaactccaaagtcacatatcttcagatttgaaaactattgggctgacttacctagttttttagatgttgtccaaacctactggaacctaccaatcagagcaacacaccaaggagtaattataaatgcaatgtttaaaaatgtcagaagaggtctcaaacaatggagtaaaagactgtcaaatctcaatacattgattgcaaactcaactgaggccgtcgacaccctggacaaaattgaggagcaaaggccactttttatccaagaatggaatttcaggaaaattgtcaaagaacacatccttaagctgcttcagtacaagcacagtttttggaaaaaaaagatgtacaatcagatgggtaaaattcggagatgacaacaccaaatttttccatgccgcagcaactcaaagacatagacacaacaaaatctcacacctgattcagtctgatgggagtacaatttccacacatcaagaaaaagcacatgcttttctatcttgtttcaaagccagaatgggaaccacagaaggaaatgaatgcctaattaatctccaagagcttatcaccccacatgaatccctttcccagctctcagtcatgccatctatagatgaaatgcatctatagatgaaatggacaagattatcaaacacatgccaaatgataaatctccaggtccggatggtttcaatgggctttttatgaagaaatgctggcacattatttctggagatttttacaaacttgctttggatttttttgtcagcaaatctctattcaaaatctgaacaaatcctttatttgcttggttccaaaaaaaacatccccagaaaccactaatgattttaggcctatctcactacaaagcatcagtttgaagttcctaaccaaaatcatggcagaaaggctccaatatgtgatcactgaacttattcatgaaaatcaatatggtttcataaagcaaaggacaattcaagactgtttggcatggacttttgagttccttcatcaatgtcatcagagcaaaaaagaaatcatcattctcaagattgactttgaaaaggcttttgatactgtagagcatgcttgcatcctggaaattcttaaggcaaaggactttgacaatatgtggatcaattgggtaaagaatatcttaacaacagcctcctcctcaattttactcaatggtgtcccagggaaaaatttcaattgcctcagaggtgtaaagcagggagaccctatctctccccttctgtttgtccttgctgctgatcttcttcaatctatgatcaacaaagctctcaacctgggagtcctctcccttcctgttcctcaagtcgacaccaagttccctataatccaatacgctgatgacacccttatcattatgaaggcatgtcaaagagaagttttctatcttaaaggcatcctgcaatcttatgccatgtccactggattaaaaatcaacttccacaaatcttctatgatcctagtcaatgttaatcaggataaaattgaactcctggcaaggacttttggatgtacaattggagctcttccgtttacatacttaggtcttccggttggaacaacaaaaccaaaaatctgtgaatttgcacctctcattgatagagtggaaagaagactcccgactataacgatgtttttgaatcagggacagagactaaccgtggtcaactcagtcctgtcatccctgccaacattttacatgtgcactcttaaaatccctaaaaaggttctactgcacatggatagagcaagaaggcattgtctttggagaaagtctcatgaaattgatgcaaaaactcactctctggcagcatgggacaaagtctgcagacaaaaaaaaaagacgggggctgagtgtcatcaatttagaattccaaaattgtgccctcttgatgaagcatctcgacaaattctttaacaagatcaatctcccatgggtaaaacttctcttgacttctttttacagcaatagatccatgccaccgcatgcattacaagactttggatccttttggtgaaaagatatcactcgactaatacctctctttagaggtatcagctctattcaagtcagctctcttcttgaaagatctctggtcagataaattatttcaaaactccttgcccactgttttctcttttgctgttaatgaagatctatctgtcagagcttttcttcaaaataatatggcacaaaacttcctcctgcctctatctcctcaagctattctt

SEQ ID NO: 84614 - DNA, 1421 bp, Oryza sativa
  Clone ID: PAT_MRT4530_83834C.1
atggagcggctcggccgagcttaacgggccggccggcccaagacggcccaagcgcgcgcgcgggaggggaggggagagagagccggtggaccgggctcaccgcgcgcggtcccgggtgggacccgcttgttagcggctcggctcaccgtgcggagggagtttgcggcgtacgcgcgcgggcggggctgggacgcggctgagctggcgccgacgtggcgcctacgtggctgccacgcgggccggcgggaggtagacgacgacgccggccggaacggacggcggacaacagcggcgagcggcggagcgaaccacggcgatatcggcgaaagcgagcacaccgggtggttgcacgtgatgaggggagacgagccaacggctcggattcgccggagggagcttgacggcggcgaatcgcggcggcggcaaccggcggcgggaaaaggggaaaacggcgacgaggtcacgaggggccaattcccggcggcgagagcatccacgcggctacgggaatccgatgctagcgtcggattgggcggaactacgccgagcgaggccggcgacgagcgggtgttacggagctcgggcggcgacggcggcgagcacacggcgagcgacggcaacgaggaagaagagggcgcgcccggagtccccttccgcgtccacgaacgcaccggctctcccggcgcttggcgatggacggcggaggcgaggcagagcacgggagcggcgacaacgggcggtcaagccggcgagctggcgctccggctagcgtccaaagcggcgacaggaggtgacgccggcgagaggggaaaaaggggagaaaaagaggaaaaggagggagagaaagggggctcgcccctttgccgattcgggaaaaggaggagggagcggggcgactcggcagagggagaggggctctctgcctccgccccttggaggctagcgcgcggagtggcgggggccgggcgatgacgacggcgatgatggcggggcggtttggagcggcgcgacgacacgggcgacaggcgcgggctggcgcggcaaagggtgccgccggcggcgaccgggcggtcggccactcggcacgcgcgcgtgggaaacaacgggcggcgcggctgggcagcgggaccgggcgacgcggacggcgcagacgacgcggctcgggcgggaaaccacgcgggcgcgcgcgcgagcgacggcgcacggggccggctttgcgagcggggagctcgcgcgagaggagggggcgctcggcgcggctctcgcacgcgcgagtagcgagtcggggggggggaacgcgccggggaaagcgagagagagagagagagagagagagcgcccgggagagagaggagagggccgggggagagggggagatgggccgagcgagattcggcccatcgacctcgggggaggcaaaa

SEQ ID NO: 84615 - DNA, 387 bp, Oryza sativa
  Clone ID: PAT_MRT4530_83835C.1
atgtgtagctgggatgtccttatcaacggcacatcaaggaggaggtctggtgctaaggaggccaccgagcaaccctcgatccactggtccgtccagaagaggatcaacacattatttcctggcacgaagaaggtggacgctgcaaacatgttggagacgctccgctcgatgggagccttcagaaattgcaggttattaggtgatggtttgacttctgagcttgctggccggttatcttctccatcgaggtggttgtttgctgttagcctgttactggttagtgcttactacttagtggttggtgctcatttctggtctccattgcacaatgtcgtcggctgcatcaactgcaattcaagccaatcaacagttgtgtctgtgtcttaa

SEQ ID NO: 84616 - DNA, 1535 bp, Oryza sativa
  Clone ID: PAT_MRT4530_83836C.1
ttggggcggctcggccgagcttaatgggccggccggcccaaaaggcggcccagagcgcgcgcgggaggggaggagagaggggaccggtggaccggactcaccgcgcgcggtcccgggggcggggttgggacgcggtgcacgcgcgcggtttgcggtggacgcggatgcggcgggcccacgcgcagcctcacggctcgcggtggaacgcgcgcacacggagagaccgaccggggttggcccgacccggtctgggctgagctggcgccgacgtggtgcctacgtggctgccacgcgggccggcggaaggtagacgacgatccggccgcgaaaggacggcggacggcggcggcgagcggcggagcgaaccacggtgatacgggcaaaagcgagcacaccgggcggttgttcgtgacgaggggagacgaaccaacggctcggattcgccggaggttgctcgacggcggcggattgcggcggcggcaactggcggcgggagaaggggaaaacggcgacgaagctacgaggggtcgattcccggcggtgagagcatctacgcggcgtcgggaactcgacgctagcgtcggattggacggaactacgccgagcgaggctggcgacgtgcgggtgctacggggctcgagcggcgacggcggcgagcacacggcgagcgaaggcaacggaagaggaaggagagggcgcggccggagtcctccttcctcttccgcgtccttgctcgtgccggctcctccgacacgcgcaacgacgatcggcgacggcgaaatagagggcggcaatggcgtggaggcgaaaatgagggagtttggagggggagggcttgggcttaaatggacggcaatgtcggtttgggagaggggaaccgacattggacggttaaggcgcgagctggcgctcggcgcttgcagccaaagcggcggcaggaggatgacgccggcgaggaggaaaaggggaaaaggagggggagaaaggggcttgcccctttgccgattcgggaaaaagagggggaggggaacgggagcatcgcggcagagggaggaggggcgcggctccatcccttggcggcttgcgcgcggaggggcgggggccgggcgatgacggcggggcggtttggagcgaggctgccggcggcggcgatcgggcggtcggccaccacggcacgcgcgcgcgggaagcaacgggcggcgtccgcgcgggcgcgcacacgctggctcgcgaggacgagcggctgcgcggctgcaggcgcggcagagcgaggggaaagggagggggcgctcggcgcggcggctcacgcgcacgcgcgcgcggcgtgcgggcgaggctgagcggggagagaggcgctcggggcggctctcgcacgcgcgagcagcgtacgggcgaggccgagcgggggggggggagatgggagagcgagagagagagagagagagagagagagagagagagcgcccggggagaggggggccgggggagagatgggccgagcggaaatcggcccatcgaacccgggggaggcaaac

SEQ ID NO: 84617 - DNA, 307 bp, Oryza sativa
  Clone ID: PAT_MRT4530_83837C.1
acccctgcttagaatatgattatcacaagtaatatataaattattagtcaaagttctctctacatgatcttcccatcacaggccattgatagagctatacttgcgctggtagtgatggctctgtgccttgcattcgtgcccacaaggttgcttgtcctcatgatgtttctggaggcattcacgaaccactccccaccaaggagagcaagcacagaaaggtggaccagaaggttaagagagtagtggttcagcattcctgcagctccagtagtcgtagagaaggataaaaaaagacaagaaaacaaaa

SEQ ID NO: 84618 - DNA, 570 bp, Oryza sativa
  Clone ID: PAT_MRT4530_83838C.1
aacctctgcagagggggtacactttacccacacgacattactaacccggatcacccagcccgcatttccaaagccgacacaggtttaccatatgccgacgagaggggtcccagaccaacaacaggttaggtcccagaccatactgtgccaggaagcccaagggtcctccccgacaccaccccggcgaatccacttgtctctcggcatcaaggctcccctgattagctaattactcagccaggggtgccccattccacccatgtggtcgcactattgtatgctcggatgtaattccaaaggaaaacggtccttaagtgcaagagcgggaaaccgtactcccggtacatttcccgatccgcgattttggaaattcatttagttcgcaagcaccgacccaggtgtcgggttttccaaggatcaaaggtgacttgccttgctcgagatcttgagcttgatcctcgaaatcctcgcactgcgggtcttcgggctccgaaactacacgcaaaacgggacaactcaacaaacaacgaaaataaagctctattattgacctctaaacgtgccattaaa

SEQ ID NO: 84619 - DNA, 2392 bp, Oryza sativa
  Clone ID: PAT_MRT4530_83839C.1
atgtacatgggcaacaacaacgggtactgtccataaggaggtcaggggtggaaccaaccacactcatattatcaaggaggtaacaacaacggtaatttttctaactagccctccttgaaggatctcgtttttgcgcaagctaaaaccactcatgcgctaagcaaaaagcttgcggccaatgataagatcctagaaaacattaatgtcaagttagatggcttcgcttctgcttttcaaaatcagctgagctttaacaaaatgatagaaacccagctagctcagttggcatccttagtccctgcaaatgaaactgggaggattccggtacagcccgactcctccattgaaaatgttaaggcgatcacgacgaggggaggtaagttcattcgtgatccgccgtatcctaaccctgcaggaactaatggaatatcaaaagaagtgccatctaatgacttggctgacaaggaagttcagccagaaaagatagtgccgcaggagtactacgacacacggttgctgccgtttcctcaacggatgaggaaactgttagtggacgagcaattcgcttgttttgttgaagtaatccagaagatccatatcaacgtgccattgttggatgctatgcaagtaccaacatacacccgttatctcaaagatatactcaacaacaagagactgctcccaacaacaaaggtggtcaagctgatggagcaatgcagcaacgtgatactccacaagctcccggagaagaagaaagatccgggtgtcctacgatcaccagcttgatcggggcagaacagttcgaccaggccttgtgcgaccttggagccagtgtcagagtcatgccaaaagacgtcttcgacaagctcaacttcatagaagagaagtttgagtttcaaccgaggacggaacaatgctccatggtcaggataaaaatttcctggagaaggaaacaatgatgcctaggaaccgttattggaagacgccggtaaaaccacccataccggccaagaagctagagcagtcggctcaaaagaagccgccatccgcaccaaagccaaggaaggtgtggagggagaagccaaagacgcccgctccatcacctccggagatgggtagaaaatccagaaactaaactgaaaggagtttgctctcaagttcagtcaagctttgatagtttccctcaaattcaaatatttagttgtatatatacaagttgctttggtgaaactaaccggcggaatgaggatgcgattgtctcgtctgttcaagggttccagctcttcatcaagtcatcatgacgagtctagcactcgttcatcagccgaagtctcgatggaagacgccgaggctccgcgactactcctaaacgacaccgacctcaaccttgtcagtgatcgggagagacaagcctactatatgctgagcgaccgggagtatgctcacacgcgagaatactctccagagctgctgaaaaagataggtatggatgttgaattttgtgctatttggaaagctattggttgtagagatttgttgtggtagatgagctgggttctcgtttgcttactctgcaatttctgtgcactttgaaagaaatagaagatggaatttcctttcgctttttccataaggagtacacacttacatggaaaggcttcagcacacttcttggttttcacgattcctgtaaaatcgatctccagaaaggaatttctgggttcgaaaaaaataggttttgggaagatatttctggtgctccaatttgcaagaaacctaggacgaatgatatccataatcctacacttaagctcatgcacaaatggattgctatgactttgtttcctagaggtgatcttagacccattaggggggttgaattgattatcatgtttgccatgaccatagaagaatctcgtgcatgtggagcatataaggagacgcgcaacatgacaaggaatgaacgagagagttcatcatcatcaaccccgtacagatgtatgaggcaggttgggcaccaactggggatgcacctggatggacccaagctccacgccacagcatcggagtctcaacctgggcgagtgccagtgaggaccggtggcgtgcgcctcatgacatccaatggggggacaaccagccttacagatcaagtggtgtgcctccatctccaagtaaatggcgctcaagttcctctcgttgggacttgggtgagatcactaggagaatgaacacccttgatatgcagacgggggagattcagggttcaatccttatcaaggaccctgaacgaaagacaagcttggggggagacatatctcccccattgagagttgttgcgagatatgagatagtaaataagagttgctatgatcctgatactagattgact

SEQ ID NO: 84620 - DNA, 306 bp, Oryza sativa
  Clone ID: PAT_MRT4530_8383C.1
gggtcgacaccacgcgtgttgtttgagggaaaggagaatcgaagcgctctcacgggctcaatgtcaaataggcgcctcggcgcactaaactcggatgctgagctgatgacctgcgagtactcctctcacgcgtgacagagcagactagggatgcacctttaagtagaacgcggcaaatgccatcaaggaaatcaggcaggcatcacatacagcaatgggatcgatggatatacgcaacgaatcgaggcttagcagggagattagcacgaaccaattccggtagaatccacggctagtcaagtgcag

SEQ ID NO: 84621 - DNA, 1413 bp, Oryza sativa
  Clone ID: PAT_MRT4530_83840C.1
aagaaggtggcccaaggcggcccaagacgcgcgcgcgcggaggaaggatagagagtctggtggaccgggctcaccacgcgcggtcagcggctcggctcaccgtgcggagggagcacgcggcgcggcgctagggtgtggcgggcccacgcgcagcctcacggctcgcggtggaacgcgcgcacggggagggactgaccggggtcggctcgacccggtctaggctgagctggcgccgacgtggcgcctacgtggctgccacgcgggccggcgggaggtagacgacgacgccggccggaacggacggcggtcgacagcggcgagcgacggagcgaaccacggcgatacgggcaaaagcgagcacaccgggcggttgcacgtgacgaggggagacgaaccaacggctcggatttgctgggggttgctcgacggcggcggattgcggcggaggcaaccggcggcgggagaagggggaaacggcgacgaggtcactaggggctaattcccggcggcgagagcatctacgcggttacgggaatccgatgctagcgtcggattgggcggaactacgccgagcgaggccggcgacgagcggcgcttccgagctcgggcggcgacggcggcgagcacacggcgagcgacggcaacgggcgcgagctggcgctcggcggtcgcggccaaagcggcgacagggaggatgacgccgacgaggaggaaaaaggggaaaaggagggggagaaagggggcttgcccctttgccgattcgggaaaaagggggaggtgagcgggggcgacgcggcagagggaggagggatgctgcctccgtcccttggcggcttgcgcgcggagtggcggggccaggcgatgacgacggcgatgacggcggggcggtttggagcagagcggcgacactggcgacaggcgcgtgcagaggctgacggcggcggcgaacgggcggtcggccaccacggcacgcgcacgcggcttgcaacgggaggcgcggcggatggagtggcgcggctcgggcacgcgcgctggctcgcggggccatgcggctgcgcggctgcaggcggcagggcagcgggaccgggcagcgcagacgcgacgcgacacgggcggcaaccacgcgggcgcgcgcgcgaacgagcgcggggagcggcagcgagggagcggagagggaagactcggctcggcgcgggcggctcacgcgcttgcgcgcgcggcgcgcgggcgaggcggagcggagctgagcgggggggggggggggggaatcggagcgcgccggggaggtgagggggcgagagagagagagagagcgagggcgcccgggagagagggggccgggggagagatgggccgagcgggattcgacccatcgaccttgggggaggcaaaatggacttttgcggaggaatt

SEQ ID NO: 84622 - DNA, 491 bp, Oryza sativa
  unsure (1)..(491): unsure at all n locations
  Clone ID: PAT_MRT4530_83841C.1
tcgttcttccacgacgcccgcgcagcaaccgaccacctcctcgcccgagcccgcgtccccattgtcgccggagggactggcctctacctccgctggtacatctatggcaagcccagtgtcccgcagtcttccatggacgtcacctccgccgtctggtccgagctctcccgcttccgggacaccggccgctgggaagaagccgtcgacctggttgccaacgccggcgaccccaaagctcgggacctgtcagtcaacaactggtcaaggttaaggagaagccttgagatcatcaggtcttcaggctcacctccctctgccttctccttgccctacaatgcttacaatctcaatcaccaccgtcgtctcagtctcaccaaccaagccgatcaacccacggagctggagctggactacgacttnctctgcatcttcctcgcgtgcccacgcgttgagctctacagatcaatcgatctgaggtgcgaagagatgct

SEQ ID NO: 84623 - DNA, 1469 bp, Oryza sativa
  Clone ID: PAT_MRT4530_83842C.1
acgggccggccggcccaagaaggcagcccagagcggcccaagacgcgcgcgcgcggaggaaggagagagagtccggtggaccgggctcactacgcgcggtcccgggtgggacccgcttgtcagtggcttggctcgccgtgcggagggagcacgcggcgcacgcgcgcgggcgggggaaggacgcggtgcacgcgcgcggctcgcggtggacgcggatgcggcgggcccacgcgcagcctcacggctcgcggtggaacgcgcgcacggggagggactgaccggggttggcccatcccgacctcggctgagctggcgccgacgtggcgcctacgtggctgccacgtgggctggcgggaggtagacgacgacccggccgcgaatggacggcgggcggcggcggcgagcgacggagcgaaccacggcgatacgggcaaaagcgagcacaccgggcttttgttcgtgatgaggggagacgagccaacggctcggattcgccggagggagcttgacggcggcgaatcgtggcggcgacaaccggcggggagggaagagggaaatggcgacgaggccacgaggggtcgattcccggcggtgagagcatctacgcggcttcgggaactcgacgctagcgtcggattggacggagctacgccgagcgaggctggcgacgtgcgggtgctacggagctcgagcggcgacggcggcgagcacacagcgagcgacggcaacgaggaagaagagggcgcgctcggagtccccttccgcgtcctagtgtgcaccggctcctccggcacacacgcgacgacgaacggcgacggcgaacaggggcgacagcaatggcacgggggcgaatgggagaggaagggaaagggggggaggcggccaaaacggcgacaggaggatgacgccggcgaggaggaaaaaggggaaaaggagggggagaaagggggcttgcccctttgccgattcgggaaaaggaggaggggagcgggggcgacgcggcagagggaggagggacgctgcctccgccccttggaggctagcgcgcggagtggcgggggccgggcgatgatgacggcgatgacggcgggcggcagacgcgacagacgctgacgacggcggcgaccaggcggtcggccacttggctcgcgcgcgcggcttgcaacgggcggcgtccgcgcgggcgcgcgcacgcgaacacggcgcgcgggaagcggcagcgagggagcggagagggaggacttggctcggcgcaggcggcttacgcgcacgcgcgcgggcagagcggaggggcgcagggcgcggctctcgcgctcgcgcgcggcgcggggcgaggcggagggtgagagggagagagacagagagagagagagagagagagcgcccgggagagaggggggagatgggtcgggggagaggggaagatgggccgagagaaattcggcccatcgaccccgggggaggcaaaa

SEQ ID NO: 84624 - DNA, 2352 bp, Oryza sativa
  Clone ID: PAT_MRT4530_83843C.1
atggcgcagactagcccgttctgtggcaagcctaatgaggatgccaatgctcatctgcaacagttcctggagatttgtagcatgtacaccatcaagggcgtcactcccgatgccgtcaggctgcgactgttcccgttctcccttctcgggagagcgaagcagtggttctatgccaaccgtgctgcttttccagcagacaagggacgagtctattccggaagcatgggaacgactgcaggagtacttggccgcctgtcctcatcatgggatggacgattggctgatcctgcagaattgttacaatggactcaccccgatgtcccgcaatcacctggacacgacagctggtctaaaacggttcaaggagccgttgaattaatagagaagatggtttccaatatgggttggagcgaggaacgactccagacccgtcagcgaggcatgcataccgtcaaggagacggagttacttgctgccaagttggacctcctcatgaaacgcttggacgaccacgagaaaagaccacaaggcaccgtcaaggccttggaggtctgcggcggcacgggtcattctgggaatgattgcccggaaacccgtgaggaggcgatgtacatgggcaacaacaacaatgggtaccgtccacaaggaggaggtaacaataacggtaacttctctaaccagccctccttgaaggatcttgtttttgcgcaagctaacaccaccgatgcgctaagcaaaaagcttgctgctaacgataagatcctagagaacatagatgtcaaattagatggctttgcttccgtatttcaaaaccagctgagcttcaataaaatgatagaaacccagttagctcagttggcatctttagtccttgcaaatgaaactgggaggactctggggcaacccgactcctccattgaaaatgttaaggcgatcacgatgaggggaggtaagtccactcgtgatccgccatatcctaaccctgcaggaactaatgggatatcaaaagaagcgccatctatggacccggcggacaaagaggttcagccagaaaagatagtgccgcaggagtactgcgacacacggttgctgccgttcccccaacatatgaggaaaccgtcagtggacgagcatttcgctcgctttgttgaagtgatccaaaagatccacatcaacgtgccattgttggatgctatgcaagtgccgacatacgcccgttatctcaaggacatactcaacaacaagagaccgctcccaacaatggagctcccggaaaagaagaaagatccggggtgtgccacgatcacctgctcgatcggggcacaacaattcgaccaggccttatgcgaccttggagccagtgtcagcgtcatgccaaaggacgtctttgacaaactcaacctcacggtgttggcaccaacaccaatgcacctccagctggctgactcatcagtccgttactcggcagggatagcggaggatgtgctagtcaagatatgggatttcttcatctcggttgatttcgtggtgctggacatggacacggggaaggagacgccgctcatcctggggcgtccgtttcttagcaccgcaggagccaacattgacgtgggaacgaggagtatccgtttccatatcaatgggaaagaggaaaagtttgagtttcaaccgaggacggaacaatgctccatggttagaataaagtacgggccaaacccgcagaatattcaagaggtcgaagtagagccacccaaaacggacagcctagtgaaatttatgcagaatttcctgaaaaaggaaacaacgattcccaggaaccgttattggaaaacgccgaccgtaggagaatctcgtgtaggtggaacatacagggagacgcgcaacataacaaggaacgaaagagagagttcatcatccttaacacccgtgcagatgtatgaggcaggttgggcaccaactggggatgcacctgaatggacccaagtgccacgccatagtatcagagtctcaacctgggcaagcgccagtgaggaccggtggcatgcgcctcatgacatccactggggggaaaaccaacctcccaggtcaagtgatgtgcctccatctccaagtgaatggcgctcaagctcctctcgttgggacttgggtgaaatcactaggagatcggacacccttgatgtgcagacgggggagatccagtacaacctcacggaacacatagcccaaacgcaagaatggcaacaatctgctgatgctcagttcaccaacatcaacaacatgatgcagcaacagcatgatgaccttcaagcgtactttcgctttcagggtttcaatccttatcaaggaccctaa

SEQ ID NO: 84625 - DNA, 640 bp, Oryza sativa
  Clone ID: PAT_MRT4530_83844C.1
cgcgccattgagtagcttatgccctagttcgcttgaagccggaacgggtacctcaaccgatacaattgagtgggcaatgtctctgctactaaacaatcccgatgtgatgagaaaagctcgtgatgaaatcgatgcattcatcgggcagccagtacgattactagaggcagatgacctcccgaagctacaataccttcgatgcatcatcatggagacgcttcgcctatacccaccggcgccacttcttgtccctcatgaatcatcctctgattgcactgttgctggtttccatattccacgggggacaatgcttcttgtgaacacatttgatattcacagggatcctcatatatgggatgaaccaacaagcttcatcccagaaagatttgaggatgggcgaagtgaaggaaagatggcaatcccatttggcatggggagacgcaaatgccctgcagagaacttgggcatgcaaatggtaggccttggccttgggacaatgattcagtgctttgagtgggaaagagttggagaggagctggtggacatgactgaaggatctggccttaccatgcccaagaaggtgcctttggaggccttctatcaacctcgtgcttcagtgatgcatcttctttcttaggct

SEQ ID NO: 84626 - DNA, 401 bp, Oryza sativa
  unsure (1)..(401): unsure at all n locations
  Clone ID: PAT_MRT4530_83845C.1
cccacgcgtccgcccacgcgtccggtcaactggagctatgcgcaaccaaccgagctcccaaaccccaattctggtatcgatggcgttaagctcaaggatgggagggtggtgctggtatacaacagcacctcaagaggggtgctcaaggttgctgtttctcaggatgacggcgacaaatgggaggatgtgctgacactggaggagacccatggtgtggagttctcataccctgctgtaattcagacttctgatgggctggttcatgtgacatacacatacaaaaggactcaaatcaagcatgtcgttctacaaccaagcgaggtttgatgcagtcagtaatcagacatgtggatttgtgtgaggagtgaagtttgaactgtaggaanggaatgtggaatggg

SEQ ID NO: 84627 - DNA, 2985 bp, Oryza sativa
  Clone ID: PAT_MRT4530_83846C.1
atggcagaaaccgcggtgagtgcatctaagggtgtgataggtgccctttttgagaagctcactaagctggtggaggacaagtgcaccaatctcgtaggcatgtcaaaaaatattgtgttccttaaagatgagctcccaaccatgagcgcgctactcgagaagctagaggatgcagatgaacttgatccagtggtgaaggcttggaggaaccaggtcagggagatggcatatgatattgaagattgcatcgatgactttgtgcaccacgtgggaggtggtgatgtggaagctggcttcatcgataaggtttctcactttctcagaactttgagggcccgtcttgagactgccgagcatatcaaggatctcaagattcagctaatagagataaatgaacggcacaagaggtacaaatttgatctagatgacactcctagttctagctttgtggccattgatcctcggttgccagcactgtacagtgaagccgctaatcttgtgggtattgaaggcccaagggaacaggttataaagtggttgacagatgcggatcaacaaataatggtcctaccaattgttggctttggaggtctgggtaaaactacgctcgccaaggaggtttatcaaaaaattggacagcaattcaacaccacggaatttgtttcagtttcccaaaggcctgatgtaacaagatttctcaaaggaatacaatcaaaacttccgataaggctgtcttctgaatattgtgaagttaaagacatcattgacaacatcagagcatatctacaacatagaaggtacctttttgttgttgatgacttgtgggatgcacctacatggaatattattcggtctgtttttccagaaaatggcatgggctgtagaataattgtgaccacacgatcggaagatgttgctagatgggtatgctgcaatcatcgacgattcatttacagaatggagcccctcagtgatgaaaactcaagatggctattctttaacaggatatttggctcggaagatggttgcccttcccaatttagagaaatttccgctcagattctgaaaaaatgtagcggtttaccacttgcaatcattaccattgctagcctattggctaatcagcctgcaccacacaagaaagaatattgggagagtattcgtaattctattggcacctgggggtctggcacaaatcccacgttggaagggatgaggcaaattttacaccttagctacaaggatcttcctcgtcatcttaggacatgcttcctataccttggtatttatcctgaggacttcaccatcaagaaggatgatttgattagacaatggctggctgaaggctttgtccatcatttccatggggggagttcagaggaagttgctaagagttatttcaatgaactgatcaatagaagcttaattcaaccagaagaaaccaaatatggggaggtagtttcttgtagagtacatgatatgatgcttgatttgatcttaagtaggtgtgcagaggataattttatctgcgtggcatacaatctagaagaattgtctggaaaacatgaattcaaagtccgtcgattattggtcgactctagagttggtgattcaggagataccaaaatatcaggaacacctgctcctagattgttgcaactcagatcacttcagctgtttggagtatctgtatccctgtctttgttgccactgtctaagtatatccgagtgttgatattacacttgggaaaaaccgggacaggaggcaatgaaagagttgatgtgaccgcaattgggcaattattccagttgaggtatttgaagattgtaagcctccatcatgcgctcgtactagagcttcctactgaaattcgaggacttcaatatttgtcaacattggaaatagattgcacaaatgagaacagtttgccatcagatattgttcatttgtcccgcttgtcccacctgattgttccaagtggtatagggttacctgatgggaagataggcagcatgaagtccctatgcactctccaaaaaattgagatattagatatcaagagcgccattggccttggtgagctgaccaatctaaaggaccttgagctgtacagtaaacaggctctgtcagagagagagattgatgcgctggtaacttcccttggaaaacttcataagctcatatctctgcgcatgtctaagtttgcagaatgtatctggtatgatgaggataaccggctcggttcattgtccaatcctcctctcaatattgagagactccacctgggaggatggaggttgcgtcgagttcctagatggatcaatggtcacctccaaaacctctgcttcctcgttcttgatgttacagagatgtcaactgatgaggttcggctccttggagagctaccttcactcagtgaactctgcctgagcgtgaagcgtttggctccatgcagcgcatccctcgtattcggtgcagggttcccagcattggagtgtcttgaattcttttgcggtggagatatatcacacctgtgctttgaggcaggggttatgcccaatctcagaaagatcattctgttttacatagatattgaatggagcggcaccgcaccagttggcattgagcacctactgaacaaacaactccgatacatccaattacatccggttactgacacagcagtggatgccgagcgtatcagcctcgcattcacagaagctataagagcacatacaagccgtggtggtgctgaaccttacctgcgcttcgcccggatccgaagtggtagcctcataggtgcaaactctttaatccggcacagttttacttgtcatagagtttctgctttgtttctcctgaatcacattcttgccattcttttttctaaatttatattgtgcatttctgttctaagtttacttttttggttgtacgcgtaccttgctgagtattggaaactcttccactttcagaatgactga

SEQ ID NO: 84628 - DNA, 105 bp, Oryza sativa
  Clone ID: PAT_MRT4530_83847C.1
atgaggaggaaactaagggcgtcgagattctggtggctgtatgatgatggcaatggcgggaatggttggaagcggtggagcttgatggcccaggaggaagcatga

SEQ ID NO: 84629 - DNA, 201 bp, Oryza sativa
  unsure (1)..(201): unsure at all n locations
  Clone ID: PAT_MRT4530_83848C.1
gancgagatcgngtgctaagctagctagagtcgacgatggcgnagtggtgcagcttcggcgtcgcgtcgtcccacctgctctgcctcgccatggcgcacgcgcgncgtcgncannggccgttgnccgttcgncgacgnntcgacgacgncgtcgtcgnntcccgtcgncgnngncgncgggcaccgtttgngngcgtggag

SEQ ID NO: 84630 - DNA, 413 bp, Oryza sativa
  Clone ID: PAT_MRT4530_83849C.1
tgctcctggtcgccgactcgctggccgccgtgacggcgtgcagctcctgtgccgaggcgttgacggccactatcgccatagccgctgccgccgtagacgctcgctcccgcctgcctaagcccgccgccaccgctccggagggtggaggcgagcggatccgcgtgctgccggtgctcccgctcacaccaggccgctcccgaggacggaggccgctggattcatgcgacgtcgtcgctcccgaggacgggaggcgacggatccacgcgccactgtccttccctggctatgcggcgaggcggggaagggcgaagaggtggctgggggcggagatggaggctccgcggtggatggaggaggagagggatggtggcggtgagggagtggatggtggcagcggtggcatatggatttag

SEQ ID NO: 84631 - DNA, 432 bp, Oryza sativa
  Clone ID: PAT_MRT4530_8384C.1
gaaaaaaaaaccacaattcgacaacacgatttgggtcgcgccatggaaaagagtccttccccccacgcccttattgtcacccccgtgtctttcaactgtgggccacaaccgtgacagattgggttccccggtgggttgccctacccttccatgcacatgcctacccctgctttcttttgaaagccgatcgaaactaaaccttgcagacaaagagggggaaaaatgaaaaagaagacggtttcttcaacacaatgattgaatgcccaacaacccgcgcgcgcgaaaaatctaggtccacctcccccagcaggtgatctggtggccctcccccctgacagctcccggaggttggtgaaggaggaggcgtccctggtccctaaaaaggacccccgcgcaggcggaattaaatcagagccctctgagatgccgggg

SEQ ID NO: 84632 - DNA, 417 bp, Oryza sativa
  Clone ID: PAT_MRT4530_83850C.1
atgtggaacaaagcggcggtggcgacggcagcaggatcctccttccccaccatcgcggcggtgcggagctcggacacgccgacactgcggcggccgctcccttccccttccctgcgcagagccatcggcccccttccccttccccatctgccccggcagcggggcctcgaagacagcgagggggaagaaggatcccgctacccgtgcgcccgcaggacctcgtgcgccgcttccactgctgttgccacagcctcgtcccgccctgacgagagcgacaggggaggcgaagctcgcttgggcggcaaatggcgccgcgccgccaccgtcgtcccaccgctgtttcgccgtcggtcggagccacgctcactgccgctcaccacccaccacagagagaagaaagaggatagagtgatttaa

SEQ ID NO: 84633 - DNA, 1335 bp, Oryza sativa
  Clone ID: PAT_MRT4530_83851C.1
atgcagaggagaaggggcaatgggagagacatccacgatgctcttgacgatggtagcccgagtgaagctagccaccgcattcgtctagtgcacggattgatgacccatggtgttgatccgttgtcagatatttatctctttgccgttttgattgttttgttcgagcaatccccatctgctcactgttcacctgctccatctgctcgaatccctcttcgcggattcacggattgcaggctaaaggcctctccgggctccggcagcttcacccgatggaggatctccccgtggggcggaacctggtggccagcctcaccgacgatcgacctcgtcgtcgacatcctccgccgcctccccgtccgctccgtgtgccgctccaagggcgtctgcccgtactggcgcgacctcatcgccgaccatgaccaccgcaagaagctgccgcagacgctgtccggcttcttctacacgagcttcagcgaggagcgctcggcggcggagcaccacttcaccaacgtcaccgggataggcatgcccctcatctccccgaccttcgccttcctgccgcagtgcaaagaggtcatccccttggactcctgcaatggcctcctcctctgccgctgcctgcagtttgatggtgttagcaagttccactatgccgtgtgcaatcccgcgaccgaggaatgggtgatgttgccggacgccaattgggctgatggcgagaaccgcattgcctgcttgtgctttgatccagccatctcatcgcatttccatgtggtcgagtatgtggagatgaagctgaatgcgtcacaggggtggagatcaattcgtctaaaactgggctatggagtgtccatcctttcggtcaatcgaagaagtgttttcctcaatggttttctgcactctgtcacgcctgctgatgagattgtggcggttgacatggaggggaagaaatggaggaaaattcctgtgccagaccgtgataatgacattggcataattcatcaaactcagggttgcctgagtgcttttaatgtcgatctgctcgatatcttcaaactgtcaatttggtttcttgaagactatgatacaaataattggatcttaaagcacactgttagctccttggacctgtttgaagggaagaattatcgacttgattttgagtaccaagtaattgcagttcatccagattgcaatttgatcttctttgtttatggattggacaatactttgatggcatatgaaatggatcgcaaggaagtgcgtgttatacgcaatctcggaatgactactgctggccatatctgccatatgagttgcgatcatctcctgtaa

SEQ ID NO: 84634 - DNA, 450 bp, Oryza sativa
  Clone ID: PAT_MRT4530_83852C.1
tcatgccgagctgcgtcccgaaccccagatgctgttgctgtccctgcgtctgctctgctgctgcacgttgacgttgtccagcggcacagggcacaccttgtggaccttgtatctgcaggaggagcagctgtagcccatcgtgccggctacgaggagatggcagatgtcgcaggcggaagtgcggcaggtggagttggtgaagtcctcctctggtccatcgaacgctcgcacctctcccactgtgtggtccgctgttgctgttccccatttgcacccaccgacgtacgtgctgtcgataattcgtggcggttgatggcaatggccggtgagcggtggtgagcggcgcttgaggcgaaggcactgcttcaggcctcgctgccgcatcatctgctttagatcaatgatgaagagatgtagtgaggcggtgacaacagcaacgctgatctccat

SEQ ID NO: 84635 - DNA, 396 bp, Oryza sativa
  Clone ID: PAT_MRT4530_83853C.1
atgcgggtgccaccactgaaaacaagaaaaggaggagggggacgcaaaatagacttattccttaacccccaaatcatctcattctcctctattcggaactccggcgtcgggcatggccatcggccgtcgccaagaacggcgcgccactcctcggccccggcggcggaccttcctccagctcgtctccgcgggctcatctaccgctgccacgcgcgcgcgcgcgcgcggggtgtcacaccgcgacgtcaagccacagcggagcaggaggccggccgcctccacgccagcttcgaggagaacgtacggcggccgcccccaagtccatcccattcgccgcgcgcggccttctccgacctcgacctcattgtcgtgtaccccgcgccggcggccgggtag

SEQ ID NO: 84636 - DNA, 216 bp, Oryza sativa
  Clone ID: PAT_MRT4530_83854C.1
ggagatcagaatggggtccaatcgattggaaatgagcactacaacaaacctaatggatctgttgcattatacttagccacatgcgagtatatctattttaaatccagattacatttaatctcgagatttcaattcggtagaaatcgcatgaatataatatgcatttattgatggaagcaaggtatcaatcctaaaaaccatatcctttctatattt

SEQ ID NO: 84637 - DNA, 182 bp, Oryza sativa
  Clone ID: PAT_MRT4530_83855C.1
gttcatggtaaaagttgtatacccacacattatagaaacggacaatacgaaagattttttttacagctcacacttgccgggcaaatagacaatgtggaccgcataaacgcttcctacacaggatgagcagcttatatagattatagcaactcaattagaaagggctcaacattagataacca

SEQ ID NO: 84638 - DNA, 236 bp, Oryza sativa
  unsure (1)..(236): unsure at all n locations
  Clone ID: PAT_MRT4530_83856C.1
gcncttttgttctanacgngntttctgttctngttgagctcatcttagccacatctgcgttatcttttaanagatgtgccgncncagncaaantccccaccctgacaatgnattcngcccggntcggccccgagggactcggcttctcagagcccaaaaggaggggccaggccncgnttccgnctcacggantaagtaaaataacgttaaaagtagtggtatttcacttgcgcccg

SEQ ID NO: 84639 - DNA, 191 bp, Oryza sativa
  Clone ID: PAT_MRT4530_83857C.1
aggacgcgtaggcggtggcagaacgccatcgacctatgctgaaactttaaatcagggccgacggtcccggtttgcttcggtgagccgcgcaacccaaccggcagctacaagtgggccctttttggtcaggagaaccgacttttcgggcggaactgcgagctcggctacggcgcccaactgcgcgctaacct

SEQ ID NO: 84640 - DNA, 907 bp, Oryza sativa
  Clone ID: PAT_MRT4530_83858C.1
tccgggctgcgcctttaaccagaacacgtgagccggcggctatatatcggcgaccccatctgcttccggcgatcgctaaggtaatcagtttccgagagcgagcgagagagagagagagagagagagttagggtttcgcaagtgatggcgacggggaacggagaggccgcggtggtggagaaggagggagagggcacgatggtgccggaggcgctggagaagaaggtggtgttggatgcggcggagaaggaggaggaggagaaggatagcgaggcggaggcggaggcggaggcgaggatctccaagctcgtcggcgacatgatcgacaacgtctgcgccgatcacgggatcccgctccccaaggtcgacataaagaccgtcaggaagatggccgagtacatgaacaagcacttcgccatcaccaacaaggaggaactcaagatctgggacgagggcttcatcaacgagcttgacggcgacgaggacaagtactccctcttcaagatcatccgggcctccgagcgcgtcggcttctatggactcctcgacctcgccagcgacatggtcgcccgcaagatcaaggcgggcaaggccatcgacgagatccgcaagttcctcggcgtcgagaaggacttcaccaaggaggaggaggagaagatccgccgggagaacgcctgggccttcgaggagtagacacctggctgttcttcgtcgtgattgttgttgtttcgtaggtgtgtgttgcgtacttgcatctctggtagattcagatcgaatcggggagttcgtgcatcccgtcccgtgcaagaagaacagagtcgattggctgtgttgttgaatgctttgaactgctggatcgcttgcatgatcgtgaataattttgcttccaaaaaaaaaaaaaaaaaaaa

SEQ ID NO: 84641 - DNA, 165 bp, Oryza sativa
  Clone ID: PAT_MRT4530_83859C.1
gttgaggtgggtgtagaggtggtgacagccctcgagatcactaaagtcttccttgtccgggtacgtagtagagcgacatctgggaacagcgggttgccagtgcctgaagtactgagtatgtgcttctccaacatttccatacgggtttggataaggagtctgcat

SEQ ID NO: 84642 - DNA, 3111 bp, Oryza sativa
  Clone ID: PAT_MRT4530_8385C.1
atggctggctccgtcgttgctgctgctgccgccgccggcggtggcacagggagctcttgcgatgcgttgtacagggagctatggcatgcttgcgctgggccgttggtcacagtgcctcgccaaggcgaattggtttactacttcccccagggccatatggaacagcttgaggcatctacagaccaacagcttgaccagcatctgcctttgtttaacctgccatctaagatcctctgcaaagtggtcaatgtagaacttagggctgaaaccgattcagatgaggtttatgctcaaattatgctgcaaccagaagcagatcaaaatgaactcaccagcccaaaacctgagccacatgaacctgaaaaatgcaatgtccattccttctgcaagactttgactgcttcagatacaagcacccatggtggattttcagttcttaggaggcatgcagaagaatgtcttcctcccctggacatgactcagaatccaccatggcaagagcttgtggctagagatctccatggaaacgagtggcatttccgtcacatctttcgagggtccccccaccactcccttattttaggacaacctaggaggcatctgcttacaactggctggagtgtttttgttagctcaaaaagattagttgccggtgacgcattcatctttctgagaggtgagaatggagagctacgagttggtgtcaggaggctcatgaggcaactaaataacatgccatcatcagtaatatcaagtcatagtatgcatcttggagtcctagcaactgcatcacatgctatatccaccggaactctcttttctgttttctacaaaccaagaacaagtcagtctgagtttgttgtgagtgctaacaagtaccttgaagctaaaaacagcaagatatctgttggaatgacccgtgcggcccctgggccccccccgcgcgtgcctaagccacagcaaccgcatccctccttccacccccaccacctcccccgccggccgccgtgtcccctccgtcagccggcccagcgtctgcctcagctccccccggcatcgccgctcgccctcccgtgtgtcatgttcaactttagtactgaccccgcaccagcggcgtcccgctccctggccaagagacacgcagccccggagaagaggccggccctctggccctcctaccacgaccgccaccactagacccccctccctccctctgtgggcaatgccttcaaccatccgcaccctcaaactcaacctcacccggcgcccgcggcacccgcggcctacgtgatcctgccacgccgccaatctgcgaagagagccgcttgacaaaggtccttgggtatgggaggcgacgtgggcgttacatggcggggtcaggttagatcggttgtgatatgcagaggaacatgttcgaagcgagcagcggtagtacagatcgcggctcgcgcaccgcgtcgcgatgcgttgttgcccgcagggtggtggatttgggagggatgcttgtgggggaggaggcttgggaggcaccttgatggatggggaggcggattcatatggactcctacgatgcagccatgctccttgccccaagctctaagctgcctgtcctaggtgactccatcaaattgagcagtatgaccaccgcccatgcagccttcgtctggggcagagtgctcacaagtaccttgaagctacaaacagttggctatctcctggcacgggtttgaagatgagattcgagggcgatgaagctcctgaaagaaggtttagtggaacaattattggtgttgggagcatgtcaacgtctccatgggcaaattctgactggagatctttgaaggtccaatgggatgagccttctgtggttcctcgtccagatagagtttcaccatgggaactagagccacttgctgtgagtaattcacagccatcacctcagccaccggcaagaaataagcgggctcggcctcctgcttcgagttcaattgctccagaactacctccggtcttcggtttgtggaaatcttcagctgagtccacacaaggcttctcattttcgggactacagcgaacacaggaactatatccttcaagccccaatccgatcttctcaacatcattaaatgttggattcagtacaaagaatgagccatctgctctaagcaacaagcatttttactggccaatgagagagacaagagccgactcttactctgctagcatcagcaaagttccatctgaaaagaagcaagagcctagttcggctggctgcagattgtttggaatcgagataagctctgctgtggaagctacatctccactggctgctgtttctggtgttggtcaagaccaactagctgcctcagtagatgctgagtctgatcagctctcacaaccatcacatgccaacaaatctgatgctccagcggcaagcagtgagccatctccccatgagactcagagtcggcaagtgaggagctgcaccaaggtcatcatgcaaggaatggcagttggaagggcagtggacctgacaaggctccatggatatgatgatcttcgctgcaagttagaagagatgtttgatatccaaggagagctctctgctagcctaaagaaatggaaggttgtttacacagatgatgaggatgatatgatgctggttggggatgacccttggcctgaatttgcagcatggtgaaaaggatatacatcttgatgcgttggaccctcactaccttgttgcaatgtctgatcctcctgtcgcgtgttctcgtcaatgcggccctcctgatactgtacatccaaagagctgttctcttcaacggtctgtgcttccaaatccactggatcaatgctggcggttttgggggatggaaggagggatactcgacaaagagggcaagtggtgtttgtcgagagccagtggtcgatgcaatcgatgtggaagggcctcagggcattgatatgcttgctattgcccttcggaaacattctctaaatgtagctcaaggctctaatttagaagcacttccattcattactgaactaattattgagatattggtggtccagacccaacggaaaacctacatcgaagtgctttcatga

SEQ ID NO: 84643 - DNA, 1397 bp, Oryza sativa
  Clone ID: PAT_MRT4530_83860C.1
ttggggcggctcggccgagcttaatgggccggccagcccaagacggcccaagcgcgcgcgcgcgcgggagggaggagagagtccggtggaccgggctcaccacgcgcggtcccgggtgggacccgcttgtcagcggctcggctcaccgtgcggagggagcacgcgacgcacgcgcgcgggcggggacgggacgcggctgagctggcgccgacgtggcgcctacgtggcggccacgtgggctggcgggaggtagacgacgacccggccgcgaatggacggcgggcggcggcggcgagcggcggagcgaaccacggtgatacgggcaaaagcgtgcacaccgggcggttgcacgtgacaaggggagacgagccaacggctcggattcgccggaggttgctcgatggcggcggattgcggcggcggcaaccggtggcgggagaagagggaaacggcgacgaggtcacgagagaccgattcccggcggtgagagcatctacgcggcttcgggaactcgacgctagcgtcggattgggtggaactacgccgagcaaggccggcgacgagcgggtgctacggagctcgggcggcgacggcggcgagcacacggcgagcgacggcaacgaggaagaagagggcgcggccgaagtccccttccgcgtccacgaacgcaccggctctcccggtgctcggcgatggacggcggaggcgagacagagcacgggagcgacggcaacgggcggtcaaggcgctagctggcgctcggtgcttgcggccaaaacggcgacagaggcggatgacgccggcgaggaggaaaaggggaaaaggagggagagaaagggggcttgtccccttgcctcttcgggaaaaggagcagggagcgggggcgcgcggctgagggaggagggaggctctgcctccgtcccttggaggctagcgcgggagtggcggggccgaggcgatgacgacggcgatgacggcggggcggtttggagcggcgcgacgacacaggcgacaggcgcgggctggcgcggcagagggtgacggcggcggcaaccagacggtcggccactcggcacgcgcgcgcggcttgcaacgggagggcgcggcggatggagaggcgcggctcgactcggcgcgggcggctctcgcgctcgtgcacggggcgcgcgggcggagcggagggggaaggaggcgctcggcgcggcttgcgcgctcgcgcacgcagcgtgcgcggcgcgcgggcgcggcggagcggagggagagcgcgccgggggaggggagggggagatgggagagtgcgagagagagagagagagagagagacgcccgggagagagggggccggggaagagatgggccgagcggaattcggcccatcgaacccgggggaggcaaac

SEQ ID NO: 84644 - DNA, 225 bp, Oryza sativa
  Clone ID: PAT_MRT4530_83861C.1
atggccgcatgtgttgttcatgctggtggcagcgatggcggcatccaagcccacatcaaggcctgcgccgcgctgggagcaatctgctcctccgttgtcaccgcacataacaccatagtcgttcagttaattttctatgagacaaacctcagggtctttagggctcagtatagacagataattgtgccgatattaagtgctatagatgagaaaagattcaattag

SEQ ID NO: 84645 - DNA, 3422 bp, Oryza sativa
  Clone ID: PAT_MRT4530_83862C.1
ttttcaacaaatgacaattttatagcgaataccgcaaatttacagcatctagacatctgacaaaaaagctggaccacaggcacagccacagccaataagatgtcaggaaatattttgtatgatacttaaatgttgatagatgctttgctattgagaaaagtctgaacaaacttccttctgaagtaacaaacaaatagtttaattctctggattaaccagaaacggagtaagcaaaattgtcatacaccacaacctacagcacatggattttggacaagtctttcgctttgttaggttgcccggcatttgacatcaaccacgagatgtcgtatatgcggaccgtaccatttgacgcgttcgacatgctccaccgtgacgttccaagacagtccatgtgttttggcaatgttagtgatggacttaacaacattgtccaaccagagcgactcatccgagtcgttgacattcccatgtatgtgcagcatgccaccttcagcccttaaagccctcacagcagtgtcccagctacattcactcgagggcaacaacccaagacaaacacggtcagcaatccctttaggtgctgtcaaacggttatctccttcaagtataatacatcgatctgccacatggttgtccatgacattacgttgaagagcctccagggcatgtggattccattcacatgcgtagactaacttggcattagccttcacaagaaatggtagaacaaagtatccaatccctgcaaacaagtccaccaccacttcatccctacaatcaagcttccccatgcgaagcttctcagaccggttaccagaagaaaacatgcattttgttgcatcaagtgagtaacaaatgccattttcatgatgtgtcaaccacccgtcattgcccactagaagttctaaagtgctatctcttgtgccatttggtgtgattttaccctggcgtgcaaggcgttgtgccccaagtgactttgcaactagtggccaaagatcatctctaactgattcccacagtggatccttaaagcaagtttttggaagcacaataatatcaccaagggtttcccacctagttggcagctgctccaataactggctaggcaatccttttttatccagtagaacagacacaagctctctcatgatggtttgaggagttttagaagctttgcggctgatcgctacttcatctttcagaatggaaccacggcataacaacaaaatttctagtgctttctgaagagaaatgctggccccaaaaagcttattttcagaaaacggcaatagttcttcaaaaacacatgaatcatcaggttgtaccttgagatgcttatcagtgattagggcatgaaaagttttactaacaggaaagagaacatggatgttatcctggcttactcgaacttttctagtaagatccaaccatccaaacttttttagaatgtcttttgctaatttggcatacttcttttctagctgaaggaccaaaggagatgaacctagagtagcagtatcaatcaccaccttcacattatcactgggattgcaattttcctcatgtccttctaataagtctacattcgacactgaaccgtgttgtacagacatttctttttccttgttgtatgcaagcttaaatattgactccagcaaatgcagatcaatttttattggctgactgaatctagttccaaatgcatagcaagacgcaccaccaccaacaatgacaagatcatcatcaatgatgactgatgagctacggacacaaaggcattggctcaatgatggaatggatacataaaaccagattttatgctttaaatttagcaatgcaatttcttgactgctttctctaataggacaacctccaagtatgccgagatagtctttgtagatgaacatgcaatgtgaaaatctaggggatggagctttcccattagtgttttctttgttccacttaagtgttgttgtatcaaaactatagaaatcattcagtgccctctgaccatcatgacctccaaacagaaacaattttgaaccataggacactagagaatgcgagtggcgagcacatggccatttgtcatcaggagaaatcacattccattggatacttgctgtgtccattatgttcatgcaagaacataagccatcatcacttagtccaccaaagacatatactttgcgatctactgcagcagcagcatgtcggtgccttggacggaaaaaatccccactgcagtccacttttgaccatctattgttagatctttccaaaacccagatatcattaagaatttctgaaggaccacttctgcctccaacaacataaatatcattgcctactacagtaattgtatggcccatccgtggtgaaggcgacccagtaacctttaattctgtcagcaatcctgacccaggattaaccagaagagagtaatttcttcttgcgtgcctccctggccctccaaaaccaccaaaagttaggatatggtgctctcttccaacagtgagtgcacaagcagattgtccccataagaagagcttctcaataggttcaccagtaatctccaatgcagcagtagaaaggcagtgagttgtatttcctgacaatgttggcaatgcttcctcttgtgttaatatgacaccatgaggggaaataaaagcaggataaaaggaaagagatatgagaacatgccgtttagcattaccaaaaccatgcttggcaccattttgaagtacagggtcttgactctccaaatatgatgcttctagtgaaatcttagcctgcaaaagatccaggaatccacccattcgcttcttgttagcctccattttactgttggcaattctaacaaggtacctaatataatcaggagagacaacgagctctttggtctgacctagtggcacctccatccgaattgagcatctcaatgctaccattacacgtttctgcaagcttgtgatgcctgactcacggaaccccgcgccaaccgcggcagccacgagcgccgccgccgcagccgcgtccctgcactccacggccacaatcatcggctcgaacctgaacacgagctcatcatcgcctccccctcccccttccttcacaccgaacagcacctccaccagggcctccgggtccgcggggtcgtgggagatgtacacccacccgccgccccgcgccttcttcttggtcttggccccgccggggtcggcctgctgcggcggcggcggctgcgcgaggacggagacgcggccggagcaggaggaggtggtgaagaggtccgggtgggagttcagggcgtcgaggagcggcgcgatgggcgcgtcgacgccgcccttcggcgacttgtccggcgccggcgacgcgagcgcggccagcgccgccgccttccggcgatcgaactccat

SEQ ID NO: 84646 - DNA, 930 bp, Oryza sativa
  Clone ID: PAT_MRT4530_83863C.1
ggagtgtttaaagagatcattgacaaggacgttgttgcttacacttcgatgatcactggttattcagaaattgtggattcagttgcatggaatgcatttgatattgccattgatatgctgcagggcaacttggaaaattcaaagggaactgcagcttcatggaatgctatgctttctggtcttactagagctggacagagttttgatgcaatccactatttgtctgtgatgctgcatgagcataaaataactccagattctgtcaccttcgcaaacgtgatttctgcttgtgttgagaaacatggggagaaacctgattccatgtctcttgtaactgctgttcaagctgtctctgagcttggccatctaaatggtctaaaacaaatccattgttttgtttaccgttccctaacgcatagaaatacacaactggcacttgctattagcaaagagctccttgagcatggaccacagaaaccagagggggtacactttacccacacgacattactaactcggatcacccagcccgtggggatcagccacgtcgggagacctccaagctttcatgacaaggcatttccaaagccgacacaggcgaccgtcgatactggcacagggtgcacgaatatcgaggcgcaactggatggctcaagatgttcaaaggtggcttgccttgctcgagatctggagcttgatcctcgaaatcctcgcactgcggggagggaagagggaaacgccgacgaggtcacgagggaccgattcccggcggtgagagcatccacgcgaccacgggaatctgatgctagcgtcggattggacggagctacgccgagcgaggctggcgacgtgcgggtgctacggagctcgagcggcgacggcggcgagcacgcggcgagcgacggcaacggtcggggcggcgccggctag

SEQ ID NO: 84647 - DNA, 156 bp, Oryza sativa
  Clone ID: PAT_MRT4530_83864C.1
atgaaggcaaagggcaacaagaaagaaaaaaatgatgacaacaaaacagaagctctacctcgtgctgcagcctcctctctccttttgatttcctatacagcaagtcagctggctcaggaggaagaggcgaaaggtgggtggccggtggagcactag

SEQ ID NO: 84648 - DNA, 564 bp, Oryza sativa
  Clone ID: PAT_MRT4530_83865C.1
atgcggcgggcccacgcgcagcctcacggcttgcggtggaacgcgcgcacgggaggggctgaccggggtcggcccgacccgatctcggccgagctggcgccgacgtggcgcctacgtggctgccacgcgggctggcgggaggtagacgacgacgccggccggaacggacggcggacgacagcgacgagcggcggagcgaaccacggcgatacaggcgaaagcgagcacaccgggtggttgctcaggacgaggggagacgagccaatggctcggattcgccggagggagcttgacggcggcgaattgaggcggcggcaaccggcggcgggagaagggggaaacggcgacgaggtcacgaggggccgattcccggcggcgagagcatctacgcggctacgggaatccgttgctagcgtcggattgggcggagctacgccgagcgaggccggcgacgagcggcgcttccgagctcgggcggcgacggcggcgagcacacggcgagcggcggcaacggtcggggcggcgccggctagctacggggaggctactcgtgctactacctga

SEQ ID NO: 84649 - DNA, 945 bp, Oryza sativa
  Clone ID: PAT_MRT4530_83866C.1
atggggcgaggaggaagaacggagggaggcatcaccgagatgaggaggggcgctgtgacgagaggccgacggcgcgggagtaatctctccggtctcgggccggggaagaggaaggagagggcgcgcccgaagtccccttccgcgtccttgctcgtgccggctccttcgacacgcgcaacgacgaacggcgacggcgaacagagcacgggaggcggcagctatggcgtggaggcgaaaacgagaggaaaggaaagggggaagcttgggtttataggggggcaatgtcggtttgggaaccgacctaaggcggtcaaaggagagggctggcgctcggcggtcgcggccaaagcggcgacagggaggatgacgccggcgggggaaaaaggggaaaaaggagggggagaaaggggcttgcccttttgccgattcgggaaaaaggaggaggggagcgggggcggcgcggcagagggaggaggggcgctgcctccgtcccttggcggcttgcgcgcggagtggcgggggccgggcggtgacgacggcgatgacggcgggcggtttagagcggcgcgacgacacgggcgacagacgcgtgcagaggctgatggcggcggcgaccaggcgtgccgccgcaccgccgccttcgtgctgccgcgccgccattcccgtgccgccgcgccgccgttcccgtgcccccgcaccgccgttctcgtgcgccgtgccgccactcccgcgccgccgtgcgccaccatcgctgccgccgtcgtcgccgctgccgccgccgtctgctggcggatgcccggttcggatgaccaggtgaatggcggatgcccgttccggatggccattgtgttcgtcgacttagttcatgccaacatagatctggcaccatcggccgagcgcggatttttcgtcaacaccgtcctcgtggagcacaaggcaccatga

SEQ ID NO: 84650 - DNA, 666 bp, Oryza sativa
  Clone ID: PAT_MRT4530_83867C.1
atggggcggtccggccgagctaaatgggccggcctgcccaagacggcccaaggcggcccagggcgcgcgcgcgcgggagggaggagggagagaaccggtggaccgggctcaccacgcgtggtcccgggtgggacccgcttgtcggtgactcggtttaccatgcggagcgagcacgcggcgcacgcgcgcgagcgggggagggacgcggtgcacgcgcgcggttcgcggtggaacggatgcggcgggcccacgcgcagcctcacggctcgtggtggaacgcgcgcacgggtggggctgaccggggtcggcccaggccgatctcggccgagctggggccgacgtggcgcctacgtggctgccacgcgggctggcgggaggatgaggggagacgagccaacggctcggattcgctggagggagtgcgtcgacggcggattgcggcggcggcaaccggcggggagggaagagggaaaaggcgacgaggtcacgaggggccaatccccggcggtgagagcatctacacggctacgggaatccgtccctagcgtcggattgggcggagctacgcctagcgaggctggcgacgagcgggtgctacggagcacgggcggcaacggcggcgagcacatggcgagcggcggcaacggtcggggtggcgccggctag

SEQ ID NO: 84651 - DNA, 1361 bp, Oryza sativa
  Clone ID: PAT_MRT4530_83868C.1
atgggccggccggcccaaggcggcccaagacgcgcgcgcgcgggagggaggagagagagaaccggtggaccgggctcaccgtgcgcggtcccgggtgggacccgcttgtcggtgacacggctcaccgtgcggagcgagcacgcggcgtacgcgcgcgggcaggggagggacgcggtgcatgcgcgtggttcgcggtggacgcggatgcggcgggcccacgcgcagcctcacggctcgcggtggaacgcgcgcatggggaggggctgaccggggtcggctcgacccggtcttggccgagctggcgccgacgtggcgcctacgtggctgccacgcgggccggcaggaggtagacgacgacaccggccggaacggacggcggacgacagcggcgagcggtggagcgaaccacggcgatacaggcgaaagcgagcacaccgggtggttgcacgagacgaggggagacgagccaacggctcggattcgccggagggagcttgacggcggcgaatcgcggcggcggcaaccggcggcgggagaagggggaaacggcgacgaggtcacgaggggccaattcccggtggtgagagcatctacgtggctacgggaatccgttgctagcgtcggattgggcggagctacgccgagcgaggccggcgacgagtgggtgctacggagctcgggcggcgacggcggcgagtacacggcgagcgacggcaacggtcggggcggcgccggctagctacggggaggctactcgcactaccgtgcgggcaggcgcagtgacgagaggctgacggcgcgggagtaatctctccggcctcgggccggggaagaggaggaagacgagcgcccggagtccccttccgcgtccacgaacgcaccggctcctccgacacgcgcaacgacgaacggcgacggcgaacagagcacgggaggcggcggcaatggcgtggaggcgaagagggggagggcgcccggggctttaagggcggcaatcgcgcggagtggcgggggccgggctatgacgacggcgatgacggcgggggtggttcgagtggcgcggctcgggcacgcgcgctggctcgcggggccgagcggctgcgcggctgcaggcgcggcagggcagcggggccgggcggcgaccacgcagctctcgcgcacgcgcgggcagagcgagggaggggcgctcggcgcggcgcacgcgcatgagcgcgcggcgcgcgggcagagcggaagagggagggggagagagagagagagcgccggggagggaggaggagatgggccgagagagattcggcccatcgaacccgggggaggcaaaatagacttttgcggaggaatttgatttggaaggattt

SEQ ID NO: 84652 - DNA, 198 bp, Oryza sativa
  Clone ID: PAT_MRT4530_83869C.1
atgccggtggggaggcccaggcacggcccggcggtcaggccgggccggcatggacccgacccaagtcgagccatgccgtgcttgggccgagccaaaatgccgtgccgtgggccggtagagcagagggaggagaggagcggggcgccggtgctccggtggctgggtggttgcgacgccggcggccaaacgtgttcctga

SEQ ID NO: 84653 - DNA, 1681 bp, Oryza sativa
  Clone ID: PAT_MRT4530_8386C.1
ccgaactcgcaacctaaacacctccctcttcgattcacttcatcttcctcttctcttctcgtctcttgtagtagtatatatttataaagcccccaaacaaaagagaagaccgcgctgctggttcgatcgatgcaggcaggcaggccttctagttctacaaagatgcctctaatggatcgttttcctttcctatcgatggcttgattgatacaaagccggttttttcactcctcgggcgtgcgtttcttgacaccggccggattgatctatcatccatccatcgagtcgagtcgagatcgatcttgatctcgatctcgatcgatggaggaagccaagatgggagacgttgccaccatccgagccgttctggcgatcctccaatggtggggcttcaacgtcaccgtcatcatcatgaacaaatggatcttccagaaattggagttcaagttccctcttactgtctcgtgtgtccactttatatgctcttcgattggagcttacatcgcaatcaaaattctcaagatgaaaccactgattgaagttgccccagaggatcggtggagaagaatattcccaatgtcatttgtgttctgcataaacattgtactgggaaatgtcagcctgagatatattccagtctccttcatgcagaccataaaatctttcacccctgcaacgacagttattctgcagtggttggtctggaggaagtatttcgagtggcgcatatgggcttctctggtaccaatagtgggaggaatcatgttaacatcaataactgagcttagtttcaacatgtttggtttttgtgctgctatggttggttgcctggcaacatctaccaagaccatccttgcagagtctctactccatggatacaaatttgatagcattaacactgtgtactacatggcgccatttgcaaccatgatactgtcagtaccagcgattgtgctggaagggagtggcgtcatcaattggctctacacgtatgattccatcgtccctgcactgatcatcatcaccacctccggagtactcgcattttgcctcaacttctccatcttctacgtcatccattccacaacggctgtcacctttaacgtagccggcaacctgaaagttgctgtggctgtgttggtgtcgtggatgatcttccggaacccgatctccgcgatgaacgctgtcgggtgcgcaatcacgctcgtcggctgcaccttctatggctatgtgaggcatctcatctcgcagcagagcgttaattcgagcccacgcacgccgaggagccggatggagatgcttcccctcgtaggagacaagcaagagaagatttaattggccaccaaattaaaacaagttgatactcaaaagaggagggaattgttggtgcatgatcaataggaataaaggagcatcatctaacagctttcaggattaatcctgaggcacttttgtcatagaaaattattcagagttttcagttgagttgttcgtatagagctaatagaacttccttcttgtcatctgaacatgctggggtgctcctcagctgtatctctctctctctctctctttctattcttttcttcctttttctcacaggattaaaagatttttgtttgctcgtaactatgctactattgctacacatttgatcacacagcattgttcagttgcctat

SEQ ID NO: 84654 - DNA, 324 bp, Oryza sativa
  Clone ID: PAT_MRT4530_83870C.1
atggtgcgcatggctggtactggacacatggacgtgcatggcacatgcgctggcatggtgcgcatggctggtactggacacatggacgtgcatggcacatgcgctaagaactccagggttaagcgcatggtgcgcatggctggtactggacacatggacgtgcatggcacatgcgctggtactggacgggttaagcgtgcttggcctggagcaatttgggatgggcatggtgcgcttggctggtactggacacatggacgtgcatggcacatgcgctggtactggacacatggacgtggccaagagaggacgtttctggcctag

SEQ ID NO: 84655 - DNA, 1457 bp, Oryza sativa
  Clone ID: PAT_MRT4530_83871C.1
acgcgcgcgcgcgggagggaggagagagagagccggtggaccgggctcaccacgcccggtcccgggtgggacccgcttgtcagcggctcggctcaccgtgcggagggagcacgcggcgcggcgctagggtgggggagggacgcggtgcacgcgcgcggttcacggtggatgcggatgcggcgggcccacgcgcagcctcacggctcgcggtggaacgcgcgcacgaggaggggctgaccggggtcggctcgacccggtcttggctgagctggcgcctacgtggctgccacgcgagccggcgggaggtagacgacgacgccggccggaacggacggcggacgacagcggcgagcggcggagcgaaccacggcgatacaggcgaaagcgagcacaccggatggttgaacaggacaaggggagacgagccaacggctcggattcgccggaggatgcccgacggcggcgaattgcggcggcggcatccggcggcggaaaaagggggaaacggcgacgagagcatctacgcggccacgggaatccgatgctagcgtcgaattgggcggagctacgccgagcgaggccggcgacgagcggcgcttccgagctcgggcggcgacggcggcgagcacccggcgagaggcggcaacggccgggaggtggagcgaggaggaagaacggagggagcactaccgcgatgaggaggggcgctgtgacgagaggccgacggcgcgggagtaatctctccggcctcgggccggggaagaggaagaagagggcgcgcccggagtccccttccgcgtccttgctcgtgccggctcctccgacacgcgcaacgacgaacggcgatggcgaacagagcacgggggcggcggcaatggcgcggaggcgatggaaggagaagagagggagggcgcccggggctttaagggcggcaatgtcgcgtccaaatcggcgacagggcggagggaggaggatgacgccagcggtgacggaaaaaggggaaaagagggagagaaaaaggggcttgcctccttgccgcttttggaaaaggaggaggggagcgggggcgtcgcggcagagggaggaggggctctgcctccgtcccttggtggcttgcgcgcggaggcggggccgaggcgatgacgacggcgatgacggcgggacggtttggagcggcgcgacgacacgggcgacaggcgcgggctggcgcggcagagggtgggggccaggcggcacagacggcgcaggcgcggcaagggcggcgaccgcgcgggcgcgcgcacgcgaacacggcgcgcgggaagtggcagcgagggagcggagagggaggactcggctcggcgcgggcggctcacgcgcacgcgcgcgggcagagcggaggggggagggagcgctcggtgcggctctcgcgcacgcgcgcgcggcgcgcgggcggagcggtggggggagggggggga

SEQ ID NO: 84656 - DNA, 256 bp, Oryza sativa
  Clone ID: PAT_MRT4530_83872C.1
ctgcaggaattctggcacgaggccgacctgctggatccgcactgtattttttttcaccttcgcaatactagcggagcatgagagataatctcttccatgagctcctacgggttgctcgctcctctcccccgccacttccggtctcccgccgaaatctcccttctccaaacgggcctcgaatggcgccgccctccgatgccgcgctgcgttctcgggggacgccgctctccgcgccttccgccggcaccacctcgac

SEQ ID NO: 84657 - DNA, 1402 bp, Oryza sativa
  Clone ID: PAT_MRT4530_83873C.1
atgggccggccggcccaaggcggcccaaggcacgcgcgcgcgggaggggaggagagagagggccggtggaccgggtccatcccgcgtggtcccgggtgggacccgcttgtcaacgactcggctcaccgtgcggagggagcacgcggcgtggcgctaggatgggggaaagacgcggtgcacgcgtgcggttcgcggaggacgcggatgcggcgggcccacgcgcagcctcacggctcgcggtggaccatgcgcacgggggaaaacggagggagcggctgccggtcgcggccgaggtggcgccgacgtggcgcctacgtggcagccatgcgggccggcgggaggtagacgacgacgccggccggaacggacggcggacgacagcggcgagcggcggagcgaaccacggcgatacaggcaaaagcgagcacaccgggtggttgcacgagacgaggggagacgagccaacggctcggattcgccggagggagcttgacggcggcgaattgcggcggcggcaaccggcggcgagggaaggggaaacggcgacgaggtcacgaggggccgattcctggcggcgagagcatctacggggctacgggaatccgtcccttgcgccggattgggcggagctgcgccgagcgaggccggcgacgagcggcgcttccgagctcgggcggcgacggcggtgagcacacggcgagcggcggcaacggtcgggccggcgccggctagctacggggaggctactcgtgctactacccgacgaggcgcagtgacgagaggccaacggcgcgggagtaatctctccggcctcgggccggggaagaggaaggagagggcgcgcccgaagtccccttctgcgtccacgaacgcaccggctctcccggtgcttggcgatgaacggcggaggcgggacagagcacggaaggcggcggggagcggaagcgacgcggcagatggaggaggagctttgcctccgtcccttggcagcttgcgcgcggagtggcgggggccgggcgatgacgacggcgatgacggcggggcggatttgagcggcgcggctcgggcacgcgtgctggctcgcggggccgagcggctgcgcggctgcaggcgcggcagggcagcggggccgggtgacgcggacggcgcaggcgcggcatgggcggcaaccacgcgggcgcgcgcgcgaacaacgccgcgcggggccggagagcgaggggaagggagggcgctcggcgcgagcggctcacgcgcacgcgcgcgggcagagcggagggggagagcgcgagagagagagagggcgccggggagggagggggagatgagccgagaaagattcggcccatcgaccccgggggaggcaaaatagacttttgcggagggatcgatttgggaaggattg

SEQ ID NO: 84658 - DNA, 2241 bp, Oryza sativa
  Clone ID: PAT_MRT4530_83874C.1
atgtacatgggcaacaacaacaacaggtatcgtccacaaggaggtcaggggtggaacaaaccatgcccatattatcaaggaggtaacaacaacggtaataaccagtcctccttgaaggatctcgtttttgcgcaagctaagaccacctatgcgctaagcaaaaagcttgcggctaatgacaaggtcctagaaaacatatgtcaagttagatggctttgcttctgcttttcaaaatcagttgcgctttaataaaatgatagaaacctagctagctcagttggcatccttagtccctgcaaatcaaactgggaggatcccggggcaacctgactcctccattgaaaataagggccatcacgacgaggggaggtaagtccactcgtgatccgccatatcctaaccctgtaggaactaatgggatatcaaaataagtgccatctaatgactcggctggcaaggaagttccgccagaaaagacagtgccgcaagagtactgcgacacacggttgctatcgttccctcaacggagtaggaaaccgtcagtggacgagcaattcgctcgttttgttgaagtaatctagaagatccacatcaacgtgccgttgttggacactatgcaagtgccaacatacgcctgttatctcaaggacatactcaacaacaagagaccactcccaacaacggaggtggtcaagctgacggaacaatgcagcaacgtgatactccataagctcccggagaagaagaaagatccggggtgtcctacgatcacctgctcgatcggggcacaacagttcgaccaggccttgtgcgaccttggtgccagtgtcagcgtcatgccaaaagacgtcttcgacaagctctacttcacggaagagaagtttgagtttcaactgagcacggaataatgctccatggttagaataaaaatttcctagaaaagaaaacaacaatgcctacgaaccgttattggaagacgccggtagaaccacccataccggccaggaagctagaagcagttggctcaaaagaagccgctgtccgcaccaaaaccaaagaaggtgtggagggagaagccaaagacgcccgctccgtcacctccagagacgggtagaaaatccgcaaactgaactggatggagtttgctctcaagttcattcaagctttgatagtttccctcaaattcaaacactagttgcatatatacaagttgctttcgtgaaactaactggcggaatgagaagacaactgtctcgtctgttcaaggggtccggctcttcatcaagtcatcatgatgagtctagtacttgttcatcagcagatgtctcgatggaggacgccgaagctccgcgatgactcctaaacgacaccgacctcgaccttgtcagtgatcgggagagacaagactactacatgctgaatgaccgggagtatgctcacacgcgagaatactcaccggagctgctaaaaaacataggtatggatgctgaatttcgtactatttggaaagctgttggttggcagagatttgctgtggtagatgagcctggtgctcgtctgcttactttacaatttctgtgcactttgaaagaaatagaagatgtaatttcctttcgttatttccgtgaagagtttacacttacatggaaaggcttaagtacacttcttgattttcacgattcctgtaaaatcgatctccagaaaggaatttctgggttcgagaaaattaggttttgggaagatatttatggtgctccaatttgcaagaaacctagaacgaatgatatccataatcctacacttaggctcatgcacaaatcgattgatatggctttgtttcctagaggtgatctgaggcccattagggcagatgaattgattatcatgtttgccatgaccatagaagaatctcgcgcaggtggagcatacagggagacgcacaacatgacaagaaatgaacgagaaagttcacacccgtgcagatgtatgaggcaggttgggagccaattggggatgcacccggatggacccatgctccacgtcacagtattggattctcaacctgggcaagtgccagtgaggaccggtggcgtgcgcctcatgacatccaatggggggacaatcaaccttccagatcaagtggtgtgcttccatcttcaagtgaatggcgctcaagttcctctcgttgggacttgggtgaaatcactaggagaatggacacacttgatatgcagatgggag

SEQ ID NO: 84659 - DNA, 474 bp, Oryza sativa
  Clone ID: PAT_MRT4530_83875C.1
ttgttggtatgttcaaagccagcgtatttataaagcatacctgagagccacaggaaacagtatcatcaaattgaaataagaaacggacccgatggtcccttaacccaggcccgtgtcgacatcagccccccaaatacttgactaacaaaggctcgcggtgaccaggcacattgggaggcccaccaaactggctgattaccgaccaccacgggggcggggcaccaggtggaggggggactccttttggacgttgtagtcggagagggtgcgtccattcatcaggtgcttgcacagcgaagatcagacgctggctggtctgggggaatgtcctacttgacctggaaataggccttcaaactatccatggtgtcggagctctcaaactccaaagagatggtctgtccagtcaaggtcttcacgaagatctgcatccatcacggagactaagcactaggtggagggtagactcctttt

SEQ ID NO: 84660 - DNA, 273 bp, Oryza sativa
  Clone ID: PAT_MRT4530_83876C.1
atggtgtggggcgggttcgtgcggacagtgcggcggagccgcgagggaggcgtcggagcgaatgcgactgcaaagtccgtgaagaggggatgcaagatcaggagtggccgccaccccacctcgggcctgactcccctcggggagggccacgtggcattggggggcggcctcctccgactagtctttggaaaggagtggccgccaccccacctcaggcctgactcccctccggggagggccacgtggcatcgggggacggcctcctccgactag

SEQ ID NO: 84661 - DNA, 315 bp, Oryza sativa
  Clone ID: PAT_MRT4530_83877C.1
tttttccgccctttctttttttttttttttttgtgatttggacttcaaaaggcaccgcccaggtattattatttataccaaactcagcctcaaggatttttgtgtagtaccaaacagggtggaaagtttcgaacaccccacaaaaaattaaattaaattaatgactacaaaggtgaaacaacaaaaaaaatgtttttttttcaaaagtctataacttgaatggggtaaacttaacaggtaaacccaatggttaaaagttaaacaacttaaacaaagaatggaaacaaccgaagtaccatgaaaaaaacccttttg

SEQ ID NO: 84662 - DNA, 789 bp, Oryza sativa
  Clone ID: PAT_MRT4530_83878C.1
atggccaccatgaaccactctcgagtctgccgcggccaccacatccgcctccgccgccggaggaggggagccggagccggagggaggagagccggcgccggccgccggtggagggaggaggggatccggagccagagtggcctcttgagtggcgatgcaagcgagatgcgggaggcgaagcggtgcggtgggagaggaaaaggagacgacgcgaacataggggtagttggggaattaagttgtggatttgttgggctaggtcacctgcactgtgggcttgcgtgggacggggggccagcagcggcgggagggcagacgagcgagggcaggagcaggggccagatcttcggcgacggcggcggacgggggccggagcgtcggtggccggcgcctcctccaaccccatccacagccttctccacccctccccgcggcatcgttgccggcggtagcgaccccatctctctcccactcctgccttctccacgtggtgcggcgacgaggagcggtcacggagcacgattccggcgcggagacggcgatggcgcgatggagaacggcccacttctgccgccaccctactgtcgcactaccgctccgccgctctactccctcgagctccgctgccgccgccgccgcgctgctgtcgcggctgccaccgccgcagctctactgtcgcggctgccaccgtcgccgctgccgaacgccgccgccaccagatgccgacgacctaggagctgcaaaaagactgcattatgtcaccagaaatgcatccagatggagaaataa

SEQ ID NO: 84663 - DNA, 733 bp, Oryza sativa
  Clone ID: PAT_MRT4530_83879C.1
ctgtttgtttttcggtatcgcgcggagtgcgcccacacgcccccccagcggcgccggccacatccccggccggccccacaacccacccccccccgtcaccccccgcaaaatggaacggatagtccaaactgcgcccaccccgcaccactgagcgcaccggcgccaccgaccccccccccaccgccccacccacgccccccgacccaaacaccggccgaacccgcctctcgcaccccggggcccgcaaacccgcccagaccacccacggaacgccgccccccccccgcccccgcccccggcacgatcccaacccccccccccggcgtccgcgccgcgaccgtcgccccacccacgcccccggcggcgcccagcaccacacaacccgcgaccccccccccgcccccgccccccacccccgcaaagggcccgggacggcgcggccaccaagcacatccgagcagacccgcccccagttcggcgcagccaagcgtccccccccagcaagccgggcgctgtcatcccccgccctaaagcgcccccagaccgataaccccccggggcaccccgctgaggccgccctgccccccgttcccacccggctccgcacccccgccacccccaatcccccggttcaaacccccgccacccactcagaccctctttcgccgtcgcatgcctcctccccgcctccttctactgttgtagccgtggccaccatcctcccttcctgccg

SEQ ID NO: 84664 - DNA, 260 bp, Oryza sativa
  Clone ID: PAT_MRT4530_8387C.1
aacgccaacgcctccgccgccaccggcggcggaggagggaaagggcggctaccctttccgtcggcggacgtgatggagacggtgcacgaggtggccatttacatacaccgcttccacaacctctactctttcagcaagggggggaccaaatgaagagtagtgcactcgggaggaggtgttccaagacaccagcttcatctgcaaggggtcgtcgcaatattaagcttcttatgttggttgcgacgacgcattgggcattt

SEQ ID NO: 84665 - DNA, 704 bp, Oryza sativa
  Clone ID: PAT_MRT4530_83880C.1
atggcttatcatcaatcccaaatcaaatcctttgcaacagcgaagaggaggagctgcttggtgttggctgctggagcggcggcgccggctgggtggtgcggctcgccgcactcatcgtcgtcgtcgccgtcggtggaggtcgacgccacggcgaccggggccgctagcgtcgtggtggaggtggaggacggcacgcggcgaagcgccggggccggcgcgtctgtcgttgtttcgacggcggctgctgccgcgtcggagttgcacaggagctggtcggcgacggtcagcggcgtgctgccaacaaacttgttgatgacgagcgtcgagcggtgcatcttggccgtgttgggcgtctgcggctgcgtgctcaccttggccgcgtgggcatctgcggatctgctcctcgccggaaaggaagaagacgccggcggatgtggccgggagcggaggcggcagtgctggatgtagtggtgacgcttccgccgggggagccagctcgatcctgagcagcgcggccggcgagcaggaggccgcgggtgacgctcctcgtcgtgctgccccaccgccgcatcctccttcacgctctcaactgtgacgcaggtagcgcggggagagataagcctcttcggcgtggggcccaccaatggagaggcaacttgggctggccaagtttggccattgaggagatgaatttggctagtcat

SEQ ID NO: 84666 - DNA, 852 bp, Oryza sativa
  Clone ID: PAT_MRT4530_83881C.1
atggacctcgctgacgtcatcaagggggaggggcggcgccggcaagcgggccccaccggtcagcggcacaagggcgccggtccaccgtggaccgggaccaccgaggcgcagccggcgacgtggaacggcggcgggcggccggaggacagcggcgcgcacggggacggcgacgcaccccaagaggcggcgagctcaccggcgacagaggaaggaggagctccggcggatttccggcgaagaggggcggcggccgaggtcctcctcgtccttgcggagctgagggaggcaacggcgcgagtcgacgtcgaccggagtggcggcgcgacgcggctggagtcggcggcggcggcggagagaggtggttcgcgtggctacggcgctacggaggtggagaggggaaatggagcggtggccgattttgcccgggcggcggcaaagctggcggtggcggcggagcagtgcggcggcgaccctagcgacgggaaacggcggccggagttcgccggagtgtggcggcgcgtgggagtggcgtggggagagcgagggagggcgcggcggcttggggaaaattggggaaatgggagaggagaccacggggatcgtttttattggctcggggcggtgggatcatggccgcggaggacggaatcgaccggcaacggtcttcggagtgggctccggcgacgtgggcgaagtggggtggttcggcgccggttttggagggggaaaaagtgggggaggagagtggaggaggtggggcgacgcggtcccgcggtcggggcgagcgcgcgggtggaggaggaggcggaatcggcggcgacgtggggaggccgtggcggcggtttcggctga

SEQ ID NO: 84667 - DNA, 1560 bp, Oryza sativa
  Clone ID: PAT_MRT4530_83882C.1
atggctggacaaggttcccaaaagaagaaatcttgtgattggtccaaaagatatgtggaccatttgaatggaaagatgaagtgcttccacctgcaaatgagtgctaattttgggcatagcatgaccataccaaacaagttcttggaccattttggtgggacgttgtcaagaaccattgaactagtatcccccaagggtattgtgtatattgtcaaagtcaccgagcacatgaataagacaatcctacagtgcggatgggaggcatttgtagatgcccatcacatagaagagaatgactccttattgttccgtcacattgagaattcccgctttgaggttctgatccttgattctgatggttgtgagaaagtctttacctgtgctggcataaaaaagacttctagtgttcaagaaagaaatgcagctccagttgatatttcaaggagcactcatgatgaaaccacacaatcatcagggagtaaaaaatttgttagatgccaaagggctagtgacagtcagcgtggaaaaactgcaaaattggcagaaacatcttcgtctggggaatcaggagaggagggcactgacagcagtacttctgaagatgagtcatcctatgagctagatgatcctcagatgcctccaggacgtaattatgtcttatcgcgttggactagtctatctgaagcacaggaagaaaaagtagatatgcttgtccaggacattcaacctgaaattcctgtatttgtggctatcatgaagcatagcaatgttaactcacgtcgtgcttgtcttgtaattcctaagcgctatgcatctgcacacttcccacttgaaagtcaaaccatcacacttcagcggcaaggcaagaacaagaagtggtatcccatgttttacattaggaaagatggatctggatacatgctttatgggtgttggaaaaactttgttcgtgacaaccatgtgaaggagggagacatgtgcatctttcacctaacaaagtttactgggggggaattcggagcaacagtccatctactccgtgaaacaaaatctggttccttaggttcattccatactagtcataaaaggtttgacttaagggatggcagaacgtggccgaaagtgactggtgttagaagagtaagttctaggccttacctgacagcagacagagtttctctgactgaagaacaggtcaggaaagtggaagaagttgttcactccattcaatctgaaggtcccatgtatgtgtcaataatgaacaagagcaatgttggtaccgatgggctctacatcattatctttggcaggcaattcgcgacaaggtacctcccggaaggggagcaaactttgacgcttctgatgacggggaagagcaatgcatggcaggtcaagatgcgccctcggagcggcgatgcgcagatgatcaccacaggctggcgccattttgtccatgacaaccatctgcaaattgaagacatctgcctcttccagctgatgaatgatgagagtaagcttaccatgacagtccatatcattcgtcgcaacgagaagagctag

SEQ ID NO: 84668 - DNA, 2511 bp, Oryza sativa
  Clone ID: PAT_MRT4530_83883C.1
catcaaaggggaggggcggcgccggcaagcgggccccaccggtcagcggcacaaaggcgccggtccaccgtggaccgggaccaccgaggcggtccaccgccggtccacgggatccgacggcccggatcggcccaaagccgatcggacggccacgaggcggcgcggctggggcacgggcacggcatgaagccggctcggccgagacatggcgcggcggcggcaagggggaggcggcaagggggaggcggcaaccggctgcagcagccggcgacgtggaacggcggcgggtggccggaggacagcggcgcgcacggggacggcgacgcaccccaagaggcggcagtcggcaagaaaggggacgggaaaaaaggaagggaggagagatcctcaccggaagcggcggccgacgcggaggaggaggacggcgacgacgattgcccaatggcggcttgcgaggacggagggcggacggggtcgcccttgaccttcagaaggagaagagggagttagggaggggaggaccgatgcgggagaggcggcggccgaggtcctcctcgtccttgcggagctgagggaggcaacggcgcgagtcgacgtcgaccgaagcggcggcgcgacgcggctggaggcggtgaaaggggcggcggcctcgggtgtgcggtgggagtggtgctcgaggggtggagagggggaaataagaggcggccggacttccccttgcggtggcgaagctggcggtggcggtggctcggcgcggcgacggctgtggcggcgggaaacggcgaccggagctcgccggagtgtggcagcgcgtgggtgcggcgtggggagagcgagggagagtatgccgggctcgggaaaaatggggaaacggacgaggggagcacggggatgctttttatgggctcgggaaggcgggatcgaggccggacgtggcggaatcggccggcgaagtggggcgggttcgcccccgtccccagcaggcaacgggcagcccccctttcgtgccgcggtgaatccggaagccgatcaaccggacaccccggccgacccaactccatcacgcccaccctcgcctgggaaaaggctgtgctgacgtcatcaaaggggaggggcggcgccggcaagcgggccccaccggtcagcggcacaaaggcgccggtccaccgtggaccgggaccaccgaggcggtccaccgccggtccacgggatccgacggcccggatcggcccaaagccgatcggacggccacgaggcggcgcggctggggcacgggcacggcatgaagccggctcggccgagacatggcgcggcggcggcaagggggaggcggcaagggggaggcggcaaccggctgcagcagccggcgacgtggaacggcggcgggtggccggaggacagcggcgcgcacggggacggcgacgcaccccaagaggcggcagtcggcaagaaaggggacgggaaaaaaggaagggaggagagatcctcaccggaagcggcggccgacgcggaggaagaggacggcgacgacgattgcccaatggcggcttgcgaggacggagggcggacggggtcgcccttgaccttcagaaggagaagagggagttagggaggggaggaccgatgcgggaggtagagctcaccggcgaccgaggaaggaggagctccggcggatttccggcgaagagaggcggcggccgaggtcctcctcgtccttgcggagctgagggaggcaacggcgctagtcgacgtcgaccgaaacggcggcgcgacgcggctggaggcggtgaaaggggcggcggcctcgggtgtgcggtgggagtggtgctcgaggggtggagagggggaaataagaggcggccggacttccccttgcggtggcgaagctggcggtggcggtggctcggcgcggcgacggctgtggcggcaggaaacggcgaccggagctcgccggagtgtggcagcgcgtgggtgcggcgtggggagagcgagggagagtatgccgggctcgggaaaaatggggaaacggacgaggggagcacggggatgctttttatgggctcgggaaggcgggatcgaggccggacgtggcggaatcggccggcgaagtggggcgccgacgtggggtggtggaggggttaaccggcgccgattttcgcggggagagtgggggaaatggtggaggacgtggaggggatcgtgcccacgtcgttggatgcgagctcgggtgcgggagggcgccggattttgcggcgacgtggacggctatggcggttggggtcggccggcgaaaggtagaagaaggagctgacgggtgggaccgccggtcccacctgtcggcgaagggagagaagaagggacgcaaaacagacttttgcgagcgggccaagagagaggggagccggcccgagagagggagaaggcgcgcggcccgcgggagaggaaagaagacttgggccgaaaatggcccaaagagaggaagggggaaattttatttgttttctttttatt

SEQ ID NO: 84669 - DNA, 1905 bp, Oryza sativa
  Clone ID: PAT_MRT4530_83884C.1
atggcttcttgcggcgcttcctgcctgacaattgcggcgctgctgctagcggcgtgcgcctcctccgccgccgccaccagctacaccgtcggcgacgcgtccgggtggacgatcggcgttgattacaccagctgggccggctccaagtcgttcaaagtcggagacagcctcgtgttcaagtacgcgagcggagcgcacacggtggtggaggtgagcgcggcggggtacctggcgtgcgcggcggccaacgcgctcggctccgacagcagcggctcgaccaccgtcgccctcaagacgcccggcaagcactacttcatctgcaccatcgccggccactgcgccggcggcatgaagatggaggtggacgtctccggctcctcctcctcctccagcggcggcggcggaggtggaggtggcggtggctccaccccctcctcgccatcgtcgccaacaccgaccacgccgaatccgtcgaccccgacgccgaccacgccgtatccgtcaaccccgatgccaaccacgccgtatccttcgaccccaatgacgacgcccaccacgccgtacacgactccgacgtctccggcgtgctctggcggcgccggcgccacgccggtaaccccggtgacgccgggcaccgtcccgttcatgtcatacaatggcgccggcgggctcggaccggtggcgctggctaccatcggaatggatgctgctgacgtcatcaagggaagaccagcgccgacacgcgggccccgcacgtcagcggcacaaaggggcggcgcacggtggaccaagtccacacgtggcctcgggggcgcgtccaccacgtggacggcccagatcggcccgagccgatcgggcggccgaggggagcggcggccaggggcacagcacggcacaaggccggcttggctgagccatggcgcggcggcggcgcacgagagaaagtggcgacgcggcgcggcaagggggaggcggcaagggggaggcggcaaccggctgcaccagccggcgacgtggaacggcggcgggtggccggaggacagcggcgcgcacggggacggcgacgcaccccaagaggcggcggtcggcaagaaaggggacgggaaaaaaggaagggaggagagatcctcaccggaagcggcggccgacgcggaggaagaggacggcgacgacgattgcccaatggcgacttgcgaggacggagggcggacggggtcgcccttgaccttcagaaggagaagagggaagctcaccggcgaccgaggaaggaggagctccggcggatttccggcgaagaggggcggcggccgaggtcctcctcgtccttgcggagctgagggaggcaacggcgcgagtcgacgtcgaccgaagcggcggcgcgacgcggctggaggcggtgaaaggggcggcggcctcgggtgtgcggtgggagtggtgctcgaggggtggagagggggaaataagaggcggccggacttccccttgcggtggcgaagctggcggtggcggtggctcggcgcggcgacggctgtggcggcgggaaacggcgaccggagctcgccggagtgtggcagcgcgtgggcgggatcgaggccggacgtggcggaatcggccggcgaagtggggcgccgacgtggggtggtggaggggttaaccggcgccgattttcgcggggagagtgggggaaatggtggaggacgtggaggggatcgtgcccacgtcgttggatgcgagctcgggtgcgggagggcgccggattttgcggcgacgtggacggctatggcggttggggtcggccggcgagaggtaggaggaggagctgacgggtgggaccgccggtcccacctgtcggcgaagggagagaaggagggatgcaaaacagacttttgcgagcgggccaagtga

SEQ ID NO: 84670 - DNA, 2016 bp, Oryza sativa
  Clone ID: PAT_MRT4530_83885C.1
atggcgccgcccaccctcctccctgactccgctcgcgcggccctcgacgacgccgtccaagccgtcgccgacgccgtccgcacgtcctttactccccgtgaaggcagcgccgtcgaccctgccaccgggtcctccgttgccaacctcgctgcaaaccgggcctccaaggcagcgcatgccgctctctccgacgccctcaccgcgtttgtcctctccaccaacatcgatggatcgccgatatctgcttcctcctcggcgtctacctccgatacggtgctctcttccttgacttcatcctcgacctcgacgtcggctccggtttcttcctcgactccgcccgccccggcagttcctcctccaacttcatcatcaccggatcctgcggtgttgctcctgccggccctggaagccatcctcgacccggtgcggtttcctggcactcctcaacagccttcacggtgcccacctgctgcgccggcgctcggccccgacgccctcgcggccctccatgcgcaggccgtctcagtcctcaacatcaaggccctagttcccatcaccctcgacgtcgctaccgccaacttcacgcgctggcgcggcctcttcctcatcgccctcggcaagtatgcgttgacggcacacgttctttccgacgagcgccgccccgacctcgctgaatggatccagatggactgcgtggtgctaggttggctctatggcaccatctcctccgatctgcttcaagaggtcatgtcgcacgacgccaccgcccgctcggtatggcgcgcccttgagctacagtttctcggctactgtgagcagcgcgccctcaacctcaccacggagttccggaccttccaccaaggcgacctttccgtcaacgactactgccggcgcatgaagacgatggcggactcacttggtgaccttggcgatcctctcaccgaccgtgctctggttcttgctactctcaatggtttgaatgaaaagtttgataccttgcgtagcctcgtaaccatgcagcgtcctttcccgtccttcgccgacgttcgctcgcaactcttgttagaagaactcaccaaggccagtcgcccctccgggcagtccaccgtcctcctcgccggcgcttctagaggcaagccgccatcgacgcccaaccctgcccacgtcaccggctacggcgcgggcgcgtccggcggctccggcaacagctccaacaacaagaatcgccgtcgtcgcggcggcggcagtggcaacagcggcggcgggacgaacaccggcggcggcggcggcggcggcaacacaccatgcggccccaagactccagcgcaaggctgtcacgcccagaaatttaccccaaatttccagaccattttgcgtattaaatccctgtccaggaccagccagggaaaaggactgccgctgacgtcagcaagagagggggccggcgccgacaagcgggtcccaccggtcagcgacacaagggcgccggtccaccatggaccgggaccaccgaggcggtccaccgccggtccacgggaaccgacggtccggatcggcccaagccgatcgggcggccaggggcggcgcgactgggcacagcacggcacaaagccagctggccaaacgacggcgcgcggcggcgcggccacccgcggcgacggccggcaacagctcccgtgggcgaaagcggcgcacgcgagagagcagcggcgcggcgcggcaagggggaggcgacaccaccggcaacggcgcgggcacggagcgccggagcgcggcggcagcgacccggtcggacggccaccggcggcggcagcgcgtcgcgaggacgcccgggaggcggccgacgaaggggaggaaaagggagagggaggggagtgctcaccgagatgcacgacggcgaaggagcggccgacggcaaggaacggtggcgacggggctcctcaggaagacgacgcgacggagctccggcgacgggcgtcgctcgggatggggcggacgggctcggcctcgatctga

SEQ ID NO: 84671 - DNA, 1226 bp, Oryza sativa
  Clone ID: PAT_MRT4530_83886C.1
tcacttggcccgctcgcaaaagtctgttttgcgtccctccttctctcccttcgccgacaggtgggaccggcggtcccacccgtcagctcctcctcctacctctcgccggccgaccccaaccgccatagccgtccacgtcgccgcaaaatccggcgccctcccgcacccgagctcgcatccaacgacgtgggcacgatcccctccacgtcctccaccatttcccccactctccccgcgaaaatcggcgccggttaacccctccaccaccccacgtcggcgccccacttcgccggccgattccgccacgtccggcctcgatcccgccttcccgagcccataaaaagcatccccgtgctcccctcgtccgtttccccatttttcccgagcccggcatactctccctcgctctccccacgccgcacccacgcgctgccacactccggcgaactccagtcgccgtttcccgccgccacagccgttgccgcgccgagccgccgccaccgccagcttcgccatcccgcgccgcacgccggtcgccactcggtttccttcaaccgccatcggaaccacctccccaccgtgtaacctctctccgccgcttgctgccgactccagccgcgtcgcgccgccgcttcggtcgacgccgacccgcgccattgcctccctcagcttcgcaaggacgaggagaacctcggccgccgcccctcttcgccgaaaatccgccggagctcctccttcctcggtcgccggtcaagggcgaccccgtccgccctccgtcctcgcaagccgccattgggcaatcgtcgtcgccgtcctcttcctccgcgtcggccgccgcttccgccggttgccgcctcccccttgccgccttccccttgccgccgccgcgtcatgtctcggccgagccggcttcatgccgtgcccgtgccccagccgcgccgccgcgtggccgtccgatcggctttgggccgatccgggccggcggttcccgtggaccggcggtggaccgcctcggtggtcccggtccacggtggaccggcgcccttgtgccgctgaccggtggggcccgcttgccggcgccgcccctcccccttgatgacgtcagcgaggcaagggtgggcgtgatggagcggggcgggccctgcgacggcctctgtcgcttccggattcacctaggcacgagaggggactgcccgttgcccgttggggacgggggtgaaacctga

SEQ ID NO: 84672 - DNA, 468 bp, Oryza sativa
  Clone ID: PAT_MRT4530_83887C.1
cccacgcgtccgcccacgcgtccgcccacgcgtccgcccacgcgtccgtgttaacaccataatatgccatgccaatctttgaaccccttttttgctattcttagttttcaccagaaaaaggaaccttataatcatgttacacaatgtccactagacaggattcacaatgcaataaagtgaccacaaatcttcaatttgttagcatcacttgtggatatagcaacattgcatataaaaattgccatcttgctcagcatcagcaaacagaccaatagaaatccccaataatacacgctaggcaccaagaagtcaaaatccaatggatccatcattgaaaagcttgccctctatgcaactagttcaccacccttctccttcccaaactagcaaggccatgaaccaaatggcggcaatgagctcttgccatcacctttcttcctccatttccaccccaagatttggcacaag

SEQ ID NO: 84673 - DNA, 1351 bp, Oryza sativa
  Clone ID: PAT_MRT4530_83888C.1
ttggtcctctaactccatcttcagctcagaagcactacacttctaaaaagggggaataatagcaagactgagtacaaccaccgtactcagcaagccacaccaacgatgcagatgtgcaaggggaattttctcaaaggaaaaggctgtgctgacgtcagcaaaggagatgggcggcgccggcaagcgggccccaccggtcagcggcacaagggcgccggtccaccgtggaccgggaccaccgaggcggtccaccaccggtccacgggaaccgacggtccggatcggcccaagccgatcgggcggccaggggcggcgcggctggggcacagcacggcacaaagccggctggccaaacgacggcgcgcggcggcgcggccagggggaggcggcaaccggctgcccggcaccaccggcaacggcgcgggcacggagcgcggagcgcggcgggcggcagcgcgtcgcgaggacgcccgggaggcggccgacgaaggggaggaaaagggagagggaggggagtgctcaccgagatgcacgacggcgaaggggcggccgacggcaaggaacggtggcggcggggctcctcaggaagacgatgtgacagagctccggcgacgggcgtcgctcaggatggggcggatgggctcggcctcgatctgcgaccgaggaaggaggagctccgacggatttccggcgaagaggggcggcggccgaggtcctcctcgtccttgcggagctgagggaggcaacggcgcgggtcggcgtcgaccgaagcggcggcgcgacgcggctggagtcggcggcggtggcggagagaggtggttcgcgtggctacggcgctacggaggtggagaggggaaatggagcggtggccgagcttgcccgggcggcggcaaagctggcggtggcggcggagcagtgcggcggcgaccctagcgacgggaaacggcggccggagttcgccggagtgtggcggcgcgcgggagcggcgtggggagctcgagagagcgcgcgggagggggcaatgagttgggggaaacggatgaggggaggtcggggtgcatttttataggccccggagggggagatcgtggccgtggcgggcggcaacggccggcggatggagcttcgacgacgtgggcgagtggggctcgaacggcgccgattttttggggggggaaatgggggagaaagtggaggaaggggaggacgtggggtggaccacgtctgcacgcgcgcgggagcgtggaggcgcgcggaggaagcagcgtcgtggggtggctcaggcggccatggcggcagttccctttgcttgaacccaaagtgtcacagcgctatacaattcatcccatcc

SEQ ID NO: 84674 - DNA, 511 bp, Oryza sativa
  Clone ID: PAT_MRT4530_83889C.1
gactcaagctgatcactgcagtgtacaatgagggtcaagaataagtaggttattgttggagacccttaacacttatataattcttactccttagtaaaaaattgatcgttggagcaggtaagcatataactatacatactgggaccaaattatttgcgataagagtagttagtcgttgcagcgaggtgccaaactggaggccaaaccataggtgttgataatcgatttgctttatttgatggttgagcttaacatcctgcacgggaggagcagttgaggatgtactagggaccaccgcgtctacggcacctggaaaacgagctctaccgattaagggatgttcttgagaaccatatcaactcaactcagggcagccatcagttgttgctcattgtgggggtcaaggtgtccgagcctaggcaccttgacgatcatcttgataaggccaaggccccggctaaggttgcaccgcttacaagcgtgcttcactatctcgcgactgtagatgtac

SEQ ID NO: 84675 - DNA, 349 bp, Oryza sativa
  Clone ID: PAT_MRT4530_8388C.1
gttgatgtgaaaacacgaggcctgggagatctgcttaactccagtgcatgtccaaaggcttgcctttaggtatgtgagcgtgccagttgatttgatcctgcaatcaacaagaaataaagacaaagaaaccacggttaaatccataaacgatagccgatcagctaggactctattcatgcatggcaatcctcatgaagcacattaactcaacccgataacgtgtaccgagtcacattgtcggaatcggcttaatcggccaaccttgtccgactcgaactctgccgatcctagtcacagccgattcggacttagccgatttctgctctgtttccagaacaatctctgtctt

SEQ ID NO: 84676 - DNA, 186 bp, Oryza sativa
  Clone ID: PAT_MRT4530_83890C.1
ggttatccgaattcgagctcgctctaatggcgtcgcatctctgcgccgctcagattagtagtgtatacaagatgaaatccgagacctaggagaaatcaggctactacatttacaacaaaaacttctcgggttcaatctacaagatcgaggattatacaagcccgaaaacttcaatttttgttttcg

SEQ ID NO: 84677 - DNA, 136 bp, Oryza sativa
  Clone ID: PAT_MRT4530_83891C.1
tccccgggctgcagtgcatcttctctaaaactactgcccgtaagccctccaggacgcccctttacactggctcctttcacctgtttttcttggttggatttttgggggaatttttcagtggatgtgctgtgtgctt

SEQ ID NO: 84678 - DNA, 279 bp, Oryza sativa
  Clone ID: PAT_MRT4530_83892C.1
aatgcatctcccaactcgacgattatttacacgtgcgtttaacacattcttccacccttcttaaactcctcccggcgtcttccccgggtaagattaaaatgaagaagaggccagtcagcgccgccggaggtgagaggggacaggctgggcgtacaaatcggggagcccgaaaagacggagagcaggaagacgccgtaggggccgatgaggagcttggagaggtgctcgacggggccctcgccggggcggggggctggagaagaaccccccatggagaac

SEQ ID NO: 84679 - DNA, 2514 bp, Oryza sativa
  Clone ID: PAT_MRT4530_83893C.1
atgggcaaggtggctgccatggacaatccccaccttgttcatactatcctcctagcacaatctctgcttctcttcacctgcttgttcctccattccaattgtgaaacaatcactagggatgatgagaaggccgtcctcctaagccttgaaagaagctggggaggttcggtgaccgtgaattggagctctgtcatatacgaagatcaatgtaattggccaggtatcaattgcacagatggctttgttacaggaatctcacttactggccatggactcaacaacttaccagcggctatctgttcattgacgaaactttcacacatcgatctctctcgcaacagcatttcaggttctttccctacagctctttacaattgttcaaaccttcggtatctagacctctcatataacactttagttaattctctcccatccaacatcgatcggctatcaccaaggcttgtgtatctcaaccttgcatcgaatagtttatcagggaacatccctagttcaatcggccagcttaaagtgcttactaatctataccttgatgcaaaccaatttaacggctcctacccagcagaaattgggaatatttcagcacttcgagttctgcgcctaggtgacaatccatttctttctgggccaatctatccacagtttggaaatctaacaaacctggaatacttatccatgagtaaaatgaatatcattggcaaaattccagctgctatgtcaaaggctaacaatgtaatgttctttgatttatctggcaaccacctcagtgggtcgattcctagttggatttggagtctaaagaggctggtgaccctccaactatatgcaaaccacctgtctggccagattaatgcgccaattgaatcaacaaatttggttgagattgatgtttcatcgaataacctctcaggacagatcccagaggatatcggtcagcttgaggaactagaaagactgtttttgtccaacaatcatttcactggttcaatccccgatagcgttgccttgctcccaaaacttactaatgtgcagcttttccaaaactccttcgaaggcatcctgccacaagaactggggaagcattctttactctttaatttggaaacccattataacaatttctctggaacgttacccgagggtctttgctctaagggggcccttgcttatatctctatgtcagccaacatgttttccggtgagcttccagcatctctcttaagatgtaacagtttgaattatgtctggctttccaataataatttctcaggaacgtttccagctggcttaaccgaggtacagatccaagaggttaacttatctggcagattgcctagcaactgggcatcaaatctggtagaaattgaccttagcaataacaaattctcaggtagactcccaaacacaattaggtggctaaagtcacttggagtcctagatctttcagaaaacagattctctggccctattataccagaaattgaatttatgaacctaacttttctaaatctctctgataaccaattttctggccagattccgcttctcttgcagaatgaaaaatttaaacagagtttcctgtccaatcttgggctgtgctcgtccaaccactttgcagactatccagtatgcaatgaacgacacttgaagaacagacttttgatcattttccttgcccttggtcttactagtgttttactgatatggttgtttggattactaaggataaaagtgttacccagaagacaaaacgaaaatactacaacaccgcggtggaaattgacagcatttcataacatcaattttaattaccaagacattatctgtggtctggctgataacaatctaatcgggagtggtggttcaggaaaggtatacaagatatgccttcataacaacagttacaggtttgtggctgccaagaagatagttagtgatcggagccggtccaatatgctggaaaagcattttcaagctgaggttgagattcttgggtccatccggcatgccaatgttgtcaggttgcttagttctatgtcatccactgaatcaaaagtgctgatctatgagtatatggaaaatggtagcttataccaatggttgcatcagaaagatatgcgtaataacaatgaaccattaagttggccaagaaggatgtcaattgccatagacgcagcaagagggctctgctacatgcaccatgattgttctccaccaatagctcactgtgatgtcaagccaagcaacatcctattggactatgagttcaaggcaaagattgcagatttaggtttagcccgtgcgctggctaaagccggagagccagagtccatctcaacaatggtcggatcatttggatacatggcaccagagtttggaagctcgagaaaaatcaatgagaaagttgatgtctacagttttggggtggttctcttggagctgacaacagggaggtttgcgaatggtgggggtgggtatgagaatttggcacaatag

SEQ ID NO: 84680 - DNA, 340 bp, Oryza sativa
  unsure (1)..(340): unsure at all n locations
  Clone ID: PAT_MRT4530_83894C.1
ctgtaagtgnccctncgtaggttcgggcgcgatcgccgataggtgaggtgaagccaaagccgtgtcgagttgtatccatcagattcagcgacgagccgacgagggatgggcgcgggatcatgcatgccgcgatggtgattggtgaatcgcctcgaaatgggagtcttgaaatttaccggtggtgttttttgctgttttggagttttgcacttggggatcgggagtgtttgcgtgctgtggccaatgatcgccgttgtactgtacataacccaggaaatgaataactggaagcgcacaatgcgctgttccaaaaaaaaaaaaaaaaaaaaaaaaaaaaaaa

SEQ ID NO: 84681 - DNA, 1635 bp, Oryza sativa
  Clone ID: PAT_MRT4530_83895C.1
atggttttgactccggttttatccaatgtgacgggccggccggcggtggtggcgcgaccgcgtgcctcgccggggagaccggccagcgagtaccggcgccagctcggctccgccgtcgacatgccgctcgacgccgacgtcttccgcgccccgcccggccacaatgcgccccagcagctgctgcgcgcgatcgagatgatgatgacgctgtcggctgctggcgcggatgggctcctcccgggcctcaggttcaatcccctgagcgcgccgccgccatggatgcttctcgcggatcacggccggggcgacgaggccgcgttcttggaggacgcgcgggccaagaacgccaatgggaagcgccagaatcacaccgccgatggcggagggttctggcaggggaagcggatgtgcgtcggtggccctgatgacggcggcggcggcggcggtggtttggctttcttgccgccgacgatctttccctcgccaccacctgctcgccattgctcgacgccgctgtccccatcctcaccgccgtttcagccgagaggactgctcgtccggtgggcgccgccgcttgctccccgctgctcgacgccactttcgccttactcgccgccatttcgtccggcgaggctgatcgtgaggtgggcgcggccgccgccggggtggcacaagctgaacttcgacggatcggtgttccacgacgggtcccgacaagcgagcatcggcggcgtcatccgcgggtgcgacggcggcgtcgtgctggccttcgccgagacgacggagcaccggggggtgggcgtggtggaggcccgcgccatgatgcggggcctgaggctcgcgctgtcgtgcggcgtggaccggctcgtggtggagggcgacgacctggtgctggtcgagctcctgcgcggcgagaagccgcacacgaggatcccggcggcgatgcacgaggagattctctccctcctccgccgcttcgccgaggtggaggtgcggcatatctaccgggagggaaactcggtggctcacacactctgccggcaggcgtacgtgtgtcccggcatttggtcggagggaggaggagggatgccggcggtcgtctgggacaaggtggacgatgatcgacgcggcgtgcgggttcttgacaatattgtatcagggccgtcgatttgtggggtttctggtgttgagatggtgtgtgatagcaccgatggccagagaagcggtcaacagcttgatggaggtgcttccgaacgtgatgcccaccacctgttcggtgaaatgccgagccaattgggacatgactcaagtgctgttcttcacgtcgctgtgagccatggtctattcccggtgacccacgaggtgcttagtcaggtctatgacgcctatggtgcagtggcagtgcagcgtgcgcagctcttccctcggaacggggctgacgtgacacccaccaagagttcggcgtcgggaacaagtggcaccatcaccaaaccagtagctgagagcaccgcagttgcagtagaacacgtgttcccagccaccccggcctcatctgcacccttaatttcatcgacggccatgatgacaccgatttccctcaccatgaccaaggaggctgatgctgacatgggcaag

SEQ ID NO: 84682 - DNA, 609 bp, Oryza sativa
  Clone ID: PAT_MRT4530_83896C.1
tcggtagttgttgggcccccggcccatttagcccactcccaccccagcctccgcccccacccccgtgtgccggcggcggtgtagatggtcgtggcgtggtggccgtcgcgaggatttcgggtgcagagtacggtgacttgggtgccgcactgaatctatgattcgattttacctgttttggttggatggaggagaaccggagaagtggtgtttcgagtatttaggttgtctttgaaacatttactcaggtgatgttgccagttgccacactattatataccagtggaacaccaaaaggagtgaagccttagtgctgaaatctcttgcatgtggtcgaaagagcagtaacattcacttcttttacctgaaagtaatattgaaatataaactgtacttttcttgatgtgatttcttgccatgtgaacatcagaacccctgttcctcttctatccaaattaagttctatgcagttatgtttgtagatgaaaactttctgggatagtattagcagtacctggtgatagtttcctaagcatgcttccaccatggcatgtgtatgaacgtgttatcaagcactttattttagcttatggaattaacatgttacat

SEQ ID NO: 84683 - DNA, 583 bp, Oryza sativa
  Clone ID: PAT_MRT4530_83897C.1
aacctctgcagagggggtacactttacccacacgacgttactaaccttggtcacttagcccgcatttcgaaagctgacacaggttcaccatatgccaacgagaggggccccagaccgacatcaggttaggtcccagaccatactgtgccaggaagcccgagggttctccccggcaccaccccattgaatccacatgtctcttggcatcatggttcccccgattagctaattactcagccaggggtgtcccatttcacccatgtggtcgcacttgtcttatgttcggatgaaattccaagggaaacggtccttaagtgcaagaacgggaaaccgtattcccggtacatcccccggtccgcgattttggaaattcattttagttcgcaagcaccgacccaagtgtccttttttccaaggatcaaaggtgacttgccttgctcaaggtcttcacgaagcttcacgaatcttcgagaaaaccacgatcaacgaaaatccggtaaccgcaactatacgcaaacaattaaaaacctacacaagacccaaaataaagatcctatttagactaaataatagtgccattaga

SEQ ID NO: 84684 - DNA, 1000 bp, Oryza sativa
  Clone ID: PAT_MRT4530_83898C.1
atgccacgacatccgaaaacacagaggaccagtgttgtgcttgaggatcagataaacgactctgatcaatcctccaccatagctggttgttctgcttgctgtgaccatgccatgacatctgaaaacaaagaggaccagaggtttcagtcaattgcaaataaaataagattggttgacttaaaaatgaggatggagtggtttgacacctttggattgcataacagaattttctatgttcttcagctctcaataattcatcttaagaggagaaagggaagtgaggaaaatttgagaaaatatctaaggctatgtttggtttctcaggattccaggagttggagccatgtatacatgtatcatgctaatgtaatcctgagcttcctgagtaggccatgctgtattaatcaatatattcagtgttatgatggcattttttctattcgtgaggatattgcgcttcctgattaaattggccttttttgtaagattgtggctttagaaatttttttcagttatttatcagtcaagtacattctggaagcgattgtgagtcatacttattttgttttggacttcctaatatttgggatagattggaagcacttgtttacatataaggatgtacactgtgggataaaaagtcccattaaccaggaaggatgtgatgcgatgctgaatctaatattggaaagtcgagccctttgttcttcaattgtcctatttgcaaagattatgacctttaaatttgtcatcaattatttatgaaaacagtcaaggacattgtggaagccatggtgagtgatgcttcagttgttttatacttccaaatctctgggcatggtatgtgctccttttcatttgaacatgagtaagcagaatgctgttgattggtacgatagctttcaaggctacattttatttccatctcattatttactcaaatgaatctcgtggatattttttttggaattatcaagtatttttttcaaatatagtagtt

SEQ ID NO: 84685 - DNA, 981 bp, Oryza sativa
  Clone ID: PAT_MRT4530_83899C.1
cccacgcgtccgggctaacctatttaagctcatggagaagcggggatacggcgaggattatattaatcggtataaaatgatgaccagattccatcatcaaagagtaccactagtagttttagtgtgtggaactgcttgtacgggaaaatcaacaattgctacgcaactagctggaaggctgaatttaccaaatgttttgcagacagacatggtgtatgagttgctacggacatcaacagatgcccctcttacttcggtgcccgtgtgggctcgggattttgattctcctgaagagcttatcacagagttctgcagagaatgcagagttgttcgcaaaggtttggctggtgatttgaagaaggccatgaaagatgggaagccaattatcatcgagggaattcatttggatccaagtatttatttgatggacgaggaaaagagagatgataattccaaaatggagaagaaggtagctgaatctgaaaattcaccagcaactgtaaagagcaagacagaaaagcaacaagaaaacgaactacatgagaagagaatggatgacagtcaggagtgcatgtctgaggagggtagaataagtgaagggctatcttgtgctaaaagccacgtaattagctcttctgatcctgcatgttctaaagagaaaaatcccagagctgaaggtgaaggacataaggatttggacctacagaaaaacaacgccaccaagaaggacaaacctgctgctaaaccaataatagtcccaattgtgttgaggatgtctgattttgatcacaaggcattgttagaggaatggatagccaccagggcttccagggataattgtcttcctcaggatcatcgaaagcttataaacaaccttaagcttattcaggactatctttgttcttttgaatcacagggattgaccgttgttgacatttcagcgaactcattccctcagacactagattggcttcacagcta

SEQ ID NO: 84686 - DNA, 456 bp, Oryza sativa
  Clone ID: PAT_MRT4530_8389C.1
atggccgccctcgggcgtgccgagtggctgccgcgtggggcctggccgtcagccgcccgcgccctcgggctgggctcgaggtgcatggttttgatggtagcacctcggccatataaggaccggtcttcgggcctctgttgcaaagcactaccgtacttccacatgtctagtggggcaaatgaaggctacacgagctacggcccggtagtcgagatgtcatggcacaaggccgttggaaattttggcaatggcaatgaaaggcagactccagaagagaagaaccagtccgaagatgaaggcgatgtcgacggaagtggatctcatgctacagaagccaagacgataccggcgacctctaaaaattattccatcgcacttgttgatagaaactcgacgcacccctacctggcgtgccaactgtcgaaacaaattttcggcaatatgaaaagggggtag

SEQ ID NO: 84687 - DNA, 712 bp, Oryza sativa
  Clone ID: PAT_MRT4530_838C.1
cttaaaatataaagaatgccccatgatcattactttatagtgcatgtaaacttccacttgggaatagctattcttacaataccaatttctgaaatgatctgaaactttacaggtagactttgtgtatcttgaatcatgtacacaataatacaggtaacatggaacaacaaaagggggattcaccatcttctatccatggaaatttcaagtcagcggacagctcgatagaggttagcatacactcgcttggtcctgtgaacgacgatgaggctaaggccagctccaacaatgcagaatgctgacatgatcaatgagctgacaaagaagcaaacagctccttcacacttcagaggaccctctgcgaggaagctcatgtcgaaaagagatcgtccagacaaagaactctggtggtgcgcttgcttctcagcttcatagtcatacaagttactagcgatgacacctgagaagatcagtgaccctgtggggtttgctactgtgagaaaattgtacattgcgccgaagtgttttacaccgaaaagttcagagacagcagctggcacaatagcccaatgagctccatatccaagcccaaccaggaaggttgccacatattatggttccaggccaagccattgcaaagaggaaatgcccagcagccatcaggatctgagcaaaagccagtgctatgtgccctgggtatggtacgttccct

SEQ ID NO: 84688 - DNA, 441 bp, Oryza sativa
  Clone ID: PAT_MRT4530_83900C.1
atgcggcgggcccacgtgcagcctcacggctcgcggtggaacgcgcgcacgggaggggctgacaggggtcggcccgacccgatctcggccgagctggcgccgacgtggcgcctccgtggcgcctacgtggctgccacgcggtctggcggaaggacgaggggagacgagccaacggctcggattcaccggaggatgcccgacggcggcgaattgcggcggcggcaaccggcggcgggagaagggggaaacggcgacgaggtctcgaggggccgattcccggcggtgagagcatctacgcggctacgggaatccgttgctagcgtcggattgagcggagctacgccgagcgaggccggcgacgagcgggtgctacggagcacgggcggcgacggcggcgagcacactgcgagcggcagcaacggtcggggcggcgccggctag

SEQ ID NO: 84689 - DNA, 842 bp, Oryza sativa
  Clone ID: PAT_MRT4530_83901C.1
atgccacgacatccgaaaacacagaggaccagtgttgtgcctgaggatcatttaaacgactctgatcaatcctccaccatagctggttgttctacttgctgtgaccatgccatgacatccgaaaacacagaggaccagaggtttcagtcaattgcaaataatatgagattggttgacttaaaattgaggatggtgtggtttgacacctttggattgcataccagaattttccatgttcttcagctctcaataactcatcttcagaggagaaagggaagtgaggaaaatttgagaattcttctgctcccattaatacttcctcagggtccaggagttgaagccatgcaaacatgcatcatgctaatgtcgtcctgagcttccagattaggccctgctgtattgatcaatatattcaggctggaggctatagaaaaatatttcagccttgaaatagtcaaggacattgtggaagccatggaaagtgaagcatctaagttagatgaggattgttgtaccttggccatgaaatgattgagagagccctatccagttctgttgagagcctcacagtgtttgatgaattgcaagctacaaatgctttgctgtagatatgaattgcaagcttacagaaaaggttgtgcactgtgggctaaaaagtcccattaaccaggaagctgtgagaagatagaatggcatcacttcaagggatgtgatgcgatgctgaatctaatattggaaagtcgagccctttgttcttcaattgccctatttgcaaagattatgacctttcaatttgtcatcaattatttatgacaccaatgcattctcttggtgtatgcacc

SEQ ID NO: 84690 - DNA, 969 bp, Oryza sativa
  Clone ID: PAT_MRT4530_83902C.1
atgggatctggcgcagtgacggcagctgagggggtacactttacccacacgacattactaacccggatcaccctgcccacggggatcagccacgtcgggagacctccaagctttcatgacaaggcatttccaaagccgacacaggcgaccgtcgatactcgcacagagtgcacgaatatcgaggcgcaactagatggttacaagggaacatgccacgcgggccggcgggaggttgaagaagacgccggccggaacggacggcggacggcggctacgaaaggcggggcgaaccacggcgatacaggcgaaagcgagcacaccgggtggttgttcgagacgaggggagacgagccaacggctcggattcaccggagggagctcgacggcagcgaattgcggcagcggcaaccggcggagagaaaaggggaaaacggcgacgaggtcacgaggggccgattcccggcggtgagagcatctacgcggctacgggaatccgttgctagcgccggattaggaggaaacgcatcgagggaggccggcgacgagaggcgcttccgagctcgggcggcgacagcggcgagcacacggcgagcgacggcagcagtcggggcggcgccggctagctacggggaggtgacgatgggccgacggcacgggagtgatctctccggcctcgggctggggaagaggaagaagagggcgcgcccggagtccccttccgtgcccttgctcgtgccggctcctccgacacgcgcaacgacgaacggcgacggcgaacagagcacgggaggcggcgacaatggagtggaggcgatgggacaacgagaggagaagagagggagggcgcctgggctttataggatggcaatgtcggtttgggagaggggaaccgactttgaacggtcaagccagcgagctggcgctccggctagcggccaaatcggcgacaaggaggagggaggaggatga

SEQ ID NO: 84691 - DNA, 1578 bp, Oryza sativa
  Clone ID: PAT_MRT4530_83903C.1
atggcggcggcggcgtcatacgcgcacctcgtcctcgctgccaccctcgcgttcctggtgctgagctcgccgccgcagtcagcggcgagccgcgtcgacgtcttgaaggaagtagtagcaggcgagccaccagctgcggccatcgaaccagttgtcaacgatccgtcgtcgtcgccgccgccggcggtggcggcggtggtccacacgtcggagccatggccgccggatatacgcgagactgaggaaaaagagatggagacagggatttttatacaggttcgggcccctgagctatcagtcgacaacagggtagccttcctcctcgagctcacgcccgacggaatcagagacagtgctagatccctacggccagcctctaaaggatccgacaaggccttatcggctctgggcgtccccagccaaagttcccttaggttcctcggaggtcttgtcaagacggcgtaaaggaacagtaggataggtttcaacgctatgtgtcttttgtggtaagggatctctgggtaaaacacttggcgatattgtgtatctgatgtcaactttgttggagtagaggtaatggaagaatcgccacacctctggtcgaggaccaggtggtagtcgcaactctaccactagaagtagaaatagtgggagaatcgctacaccgctggtcgagaactcgaccatctgaggttgcggtgcgagaggttcgaggaccagcgagcgagtagaattatctctcgaacaccaatggaggttggcggtgtgagagattgcaacgtatggttcgaggaccagcgagcgagtagaattatctctcgaacaccaatggaggttggcggtgcgagagattgctacgtactggttcgagaaccagcgaacgtgtagagttatctctcggacaccaatggaggttgcggtgcgagagattgctacgtgctggttggagaaccagcgagcgagtagagttatctctcggacaccaatggaggttgcggtgcgagagattgctacgtgctggttggagaaccagcgagcgagtagagttatctctcggacaccaatggaggttgcggtgcgagagaaatctacgtactggttcgaggaccagcgaacatgtagagttatctctcgagcaccaatggaggttgcggtgcgagggatgtcatgtactggttggagaaccagcgagcgagtagagttatctctcggacaccaatagaggttggcggtgcaagagattgctacgtgcttttctcgagtagtccagccatggccggtgctatgagataggtcgtcggtcttcgttggtaggttgggcgcgacaactctgcatttgttgagatcgttctcgataatgcggtgtacttgaccacaacctactcgagtgctcaattgttccttgttgcgtactcgttcgatatcatgcgatctgacatcttttggtacgccgcggagcttgaggcttggatgatctcgatagaccaagttgtcgatgacgatgatggctccgatctggttaggttggatctccccctcagctgaagtcgtcgagtagctcgttgtcggagaatccat

SEQ ID NO: 84692 - DNA, 200 bp, Oryza sativa
  Clone ID: PAT_MRT4530_83904C.1
ttgtggggaagtgataatttaaatacttaatagtaatagactctttgatggagtattacaacatgcagcagtggcattaatacgccagtacattaattaagttacacatatgcaggctccatttttggttttctttttaattttattcgtattacaagaattttcttgtagccctttgcttgattgaatcaactttggaa

SEQ ID NO: 84693 - DNA, 573 bp, Oryza sativa
  Clone ID: PAT_MRT4530_83905C.1
aacctctgcagagggggtacactttacccacacgacgttactagccttggtcacctagcccgcatttcgaaagccgacacaggttcaccatatgccaacgagaggggtcccagaccgacatcaggttaggtcccagaccatactgtgccaggaagcccgggggttctccccggcaccaccccgttgaatccacatgtctcttggcatcatggctcccccgattagctaattactcagctaggggcatcccattccacccatgtggtcgcacttgtcttatgttcggatgaaattctaaggaaacgatccttaagtgcaagagcgggaaaccgtactcccggtacatcccccggtctgcggttttggaaattcatttagttcgcaaacaccgacccaggtgcaggatgatcaaaggtgacttgccttgctcaaggtcttcactgagcttcacgaatcttcgagaaatccacgatcgacgaaaatccggtaaccgcgactatacgcaaacaatcaaaaacctaaacaaggatcaaaagagaaatcctatttaggctaattaatagtgccattaaa

SEQ ID NO: 84694 - DNA, 1318 bp, Oryza sativa
  Clone ID: PAT_MRT4530_83906C.1
aagaaggtggcccaaggcggcccaagacgcgcgcgcgcggaggaaggagagagagtccggtggaccgggctcaccacgcgcggtcccgggtgggacccgcttgtcagcggctcggctcaccgtgcggagggagcacgcggcgcggcgctagggtgcggcgggcccacgctcagcctcacggctcgcggtggaacgcgcgcacggggagggactgaccggggtcggctcgacccggtctaggctgagctggcgccgacgtggcgcctacgtggctaccacgcgggctggcgggaggtagacgacgacgccggccggaacggacggcggtcgacagcggcgagcgacggagcgaaccacggcgatacgggtaaaagcgagcacaccgggcggttgcacgtgacgaggggagacgaaccaacgggtcggatttgccgggggttgctcgacggcggcggattgcggcggcggcaaccggcggcgggagaagggggaaacggcgacgaggtcactaggggctaattcccggcggcgagagcatctacgcggttacgggaatccgatgctagcgtcggattgggcggaactacgccgagcgaggccggcgacgagcggtgcttccgagctcgggcggcgacggcggcgagcacacggcgagcgacggcaacgggcgcgagctggcgctcggcggtcgcggccaaagcggcgacagggaggatgacgccggcgaggagaaaaaggggaaaaggagggggagaaagggggcttgcccctttgccgattcgggaaaaaggaggaggtgagcgggggcgacgcggcagagggaggagggatgctgcctccgtcccttggcggcttgcgcgcggagtggcggggccgggcgatgacgacggcgatgacggcggggcggtttggagcggagcggcgacactggcgacaggcgcgtgcagaggctgacggcggcggcgaccgggcggtcggccaccccggcacgcgcgcgcggctcgcaacgggaggcgcggcggatggagtggcgcggctcgggcacgcgcgctggctcgcggggccaagcggctgcgcgggcggctcacgcgcacgcgcgcgggcagagcggagaggcgcagggcgcggctctcgcgcgtgcgtgcggcgcgcgagggaggggcactcggcgcggcgacgcgcgctcgcgcgcgcggcgcggggcggagcggagggagagggggagaggggaaagggccgggggagaggggaagatgggccgagagaaaatcggcccatcgaccccgggggaggcaaaatggacttttgcggaggaatt

SEQ ID NO: 84695 - DNA, 828 bp, Oryza sativa
  Clone ID: PAT_MRT4530_83907C.1
aaactcatcgtaaccggcttgctcctggaagaactcctcatcagcaggatccgcttcatcttcttcagcagctggggaaataagtgtttaatgcaggcttctttgttaacctctgcagagggggtacactttacccacacgacattactaacccggatcacccagcctgtgggaatcagccacgtcgggagacctccaagctttcatgacaaggcatttccaaagccgacacaggtttaccatatgccgacgagaggggtcacagaccaacaacagttttacccaagaagtttttcagattttaagtttgaaggcgtccgtcgatactcgcacagggtgcatgaatatcgagacgcaactagatggttacaaggggacacggccgagctggcgccgacgtggcgcctacgtggcgccaggttgctgccacgcgggctggcgggaggtagacgacgacgccggccggaacggacggcggacgacagcgacgagcggcggagcgaaccacggcgatacaggcgagagcgagcataccgggtggttgctcaggacgaggggagacgagctaacggctcggattcgccggagggagtccgtcggcggtggattgcggcggcggcaaccggcggagagaaaaggggaaaacggcgacgaggtcacgaggggccaattcccggcggcgagagcatctacgcggctacgggaatccgttgctagcgtcggattgggcggagctacgccgagcgaggccggcgacgagcggcgcttcggagctcgggcggcggcgagcacacggcgagcggcggcaatggacggggcggcgccggc

SEQ ID NO: 84696 - DNA, 3147 bp, Oryza sativa
  Clone ID: PAT_MRT4530_83908C.1
atggccagcaagactctttgcgagttcgctgctccctctgctgccaatgtggccgtcgggccgcaagtcaacataggagatgtggatttcgacttgaagtccagcctcatcacgatggcgcaggctagcccgttctgtggcaagcctaatgaggatgccaacgctcatctgcaacaattccaggagatatgtaccacgtacaccatcaagggcgttagtcctgacgccgtcaggctgcggctgtttccgttgtccctcctcgggagagcaaagcagtggttctatgccaaccgtgctgctatcaacaccagggataaatgctctacggcattcctctcgaagttcttcccgatgggcaaaaccaacgcccttcatggacgaatttccagtttccagcagacaagggacgagtctgttccagaagcatgggaacgactgcaggagcacatggccgcctgtcctcatcatgggatggacgactggctaatcctgcagaatttttacaatgggctcaccccaatgtcccgcgatcacttggacgcggcagctggaggagccttcttctctaaaacggttcaaggagccgttgaactcatagagaagatggtctccaatatgggttggagcgaggaacgactccagacctgtcagcgaggcatgcacaccgtcaaggagacggagttacttgctgccaagctggacctcctcatgaaacgcttggacgaccatgagaaacggccacaaggcaccgtcaaggccttggactcacacgtcacgtgtgaagtctgcggcagcacgggtcattctgggaacgactgcccggaaacccgtgaggaggcgatgtacatgggcaacaacaacgggtatcgtccacaaggaggtcaggggtggaaccaactaagcccatattatcatgaggatcttgtttttgcgcaagctaaaaccattgatgtgctaagcaaaaagcttgctgctaatgataagatcttagagaacataaatgtcaagctagatggctttgcttccgcatttcaaaaccagatgagctttaataagatgatagaaacccagttagctcagttggaatctttagtccctgcaaatgaatccgggaggattccggggcaacccgacccctccattgaaaatgtcaaggcgatcacgacgaggagaggaactaatgagatatcaaaaggagcgccatctagtgactcggttgacaaggaggttcagccagaaaagaccatgccgcaggagaaaccgtcagtggacgagcaattcactcgttttgttgaagtaatccagaagatccacatcaacgtgccgttgttggacgctatgcaagtgccaacatacgcccgttatcttaaagagatactcaacaacaagagaccgctcccaacaacagaggtggtcaagctgatggaacaatgcagcaacgtgatactccacaagctcccggagaaggagaaagatccggggtgtcctacgatcacctgctcgatcagggcacaacaattggaccaggccttgtgcgaccttggagccagtgttagcgtcgtgccaaaagacgtcttcgacaagctcaacttcacggtattggcaccaaaaccgatgcgccttcaactggctgattcatcagtctgttacccggcaaggatagcagaggatgtgccagtcaagatacgggatttcttcatcccagttgattttgtggataaagtacgggccgaacccacagaatattcaagtggtcgaagtggagccacccaagacggacagcctcgtgaagtttatgcagaatttcctggaggaggaaacaacgatgcccaggaaccgttattggaggacgcaggtaaaatcacctgcactcgccaaaaagtcagagcagccagcttagaagaagccgtcttccgcaccgaaatcaaagaaggtgcggaaggaaaagccaaagacacccgctccatcacctccggagacgggtggaaaatccgtgaactgaatcaaaatgacgcgaccttcgcaaacagtgatcgggagagacaagcctactacatgctgagcgaccgggaatatgctcacactcaagaatactctctggagctgctgaaaaagataggtttggatgttgaatttcgttctatttggaaagctgttggttggcagagatttgttgtggtagatgagcctggttctcgtttgcttactttgcaatttctatgcactttgaaagaaatagaagatggtatttcttttcgcttcttccgtaaggagttcacactcacatggaaaggcttgagtacacttcttggttttcacgattcctgtaaaatcgatctccagaaaggaatttctgggttcgagaaaaataggttttgggaagatatttctggtgctccaatttgcaagaaacctagaacgaatgatatccataatcctacacttgggctcatgcacaaatggattgctatgactttgtttcctagaagtgatctgagacccattaggggagatgaattaattatcatgtttgccatggttagaaagatcaaaatttctcctatgaaatgtatgataagacaatggttagaaagtataaagttctctgctcctattgagtgcacttctctgattactcggatagcaaaagggctaggggtcgttagcaaccagattgcttttatctcagccgctcgtccgcatatttatgaggcctatctagtgcaagggcatattttgaaacatggagcagatggatctttgatatactttttccccggttgtacaaatgaaatcccattaccaaatgtggggtatcatttgtacaactgccatgaactaaccattcccctgcagaccatagaagaatcttgtgcaggtggaacatacagggagacgcgcaacatgacaaggaacgaacaaggaagttcatcatcctcgacacccgtgcagatgagaatggacacccttgatgtgcagatgggggagatccagtatgacctcacggaacacatagctcaaacgcaagaatggcaacaatctgctgatgctcagttcaccaacatcaacaacatgatgcagcaacagcatgatgaccttcaggcgtactttcgctttcaggggttcaatccttatcaaggaccctga

SEQ ID NO: 84697 - DNA, 396 bp, Oryza sativa
  Clone ID: PAT_MRT4530_83909C.1
atggaggacgccggccgccgcctgcgtgcgcggccccaccaagcgccctccgccgctggccgcccgccgcgcgcccgtcaccgctggccgcaggccgcctacccgctgtcgccgccgccagccgcctacccgcgccgaccgtcgcttggcccggcgctcgctcgcatcggccgtagctcggcccgccgttcgccgctcgcttgcgccggcctccgcctggcccggcgctcgcccgcgccggccgcggctcagcgcgccgctcggccgtgcagagggatgagggggagtagaggggaggaggaagggaagaagggggaggaggagaggggaggggaggaggaagagatcggatctgaggggaggagagatcgagagaacttaactgatcttatctag

SEQ ID NO: 84698 - DNA, 452 bp, Oryza sativa
  Clone ID: PAT_MRT4530_8390C.1
gtcgaacaaattttctacataaacgaccccgcaaacaagaagatgcacgtcgttagggatggcaagcaaagaattgtgggggtggacaacgtcgtcaatgaagaagaatataacaagaatcttcatgtcagacctcagatcgaccttgacgatgatcccgaagatgaagtggcttacgccgtcgcctcccgaccacagccgcctccctccacgcctcctggttcaagatccaccgccgcctccctccacgccccctggttcaagatccaacgccgccgcctcctcctccaagccatcacctcccgaccgccaccgcctccctccacgcctcccggttcaagatccaccgcctcctcctcctcgacgccgccaccgcctcctggttcaagatccaccgctgcctcctccctcgccgtggatccggccttcctgaccaccgccgccgcctcccg

SEQ ID NO: 84699 - DNA, 1430 bp, Oryza sativa
  Clone ID: PAT_MRT4530_83910C.1
atgtctctcggcatcaaggctcccctgtgggacccgcttgtcagcggctcggctcaccgagcggagggagtacgtggcgcacgcgcgcgggcgggggaggaacgcggtgcatgtgcacggtctgtggaggaacggatgcggcgggcccacgcgcagcctcacggctcgcggtggaacgcgcgcacgggaggggctgaccggggtcggcccgtcccgacctcggctgagctggcgccgacgtggcgcctacgtggctgccacgtgggctggcgggaggtagacgacgacaccggccggaacggacggcggacaacagcggcgagcggcggagcgaaccacggcgataccggcgaaaatgagcacaccgggtggttgcacgagacgaggggagacgagccaacggctcggattcgccggaggaagcttgacggcggcgaatcgcggcggcggcaaccggcggggagggaagagggaaacggcgacgaggtcacgagcggccgattcccggcggtgagagcatctacgcggctacgggaatccgatgttagcgtcggattgggcggagctacgccgagcgaggctggcgacgagcgggtgctacggagctcgagcggcgatggcggcgagcacactgtgggggcggcgccgggagagggctagcgctcggcggtcgcggccaaagcggcgacagggaggagggaggaggatgacgccggcgggagggaaaaaggggaaaagagggagagaaaagggggcttgtccccttgcctcttcgggaaaaggagaagggagcgggggcgtcacggcagagggaggagggaggctctgcctccgtcccttggaggctagcgcgcgggctggcgcggcagagggtgatggcggcggcgaccaggcggtcggccactcggcacgcgcgcgcgggaaacaacgggcggcgcggctgggcacgcgcgctggctcgcggggccgagcggctgcaggcgcggcagagcagcggggccgggcgacgcggacggcgcagacgacgcggctcgggcggggaaccacgcgggcgcgtgcgcgcgaacgacggcgcgcgggggccgtcttcgcgagcggggagctcgccagggagaggagaaggagagcgaggggaggggacgctcggcgcggcgcttgcgcacgcgcgggcagagcgaggggaaagggagggggcgctcggcgcggcgctcacgcacacgcgcgcgcggcgcacgggcggggcggagcggagcggagggagagggggagagggagcgcgcgggggaggggagggggcgagagagagagagagagggagagcgggagcgcgccgggggagaggagagggccgggggagaggggaagatgggccgagagaaattcggcccatcgaccccgggggaggcaaaatagacttttgcggaggaatt

SEQ ID NO: 84700 - DNA, 573 bp, Oryza sativa
  Clone ID: PAT_MRT4530_83911C.1
atgcaggaggggaagcttgcccactggcgcaccgccaccggccgacggtgcgcgccgccgacggggagccccgcgcaaagctgcgcagctgacggctgccgaatgcggaagatcgagccggagaattgctactacttcctcctctttctcgtcaccactcaccccaccgacgccccctccgactccgtcccgggacgcggggcagccgacgacggcggcagtgtggaaggcgaggaccgcaaggagcacaagcaggaggaggacgcggcggagctcctcttcctcaagtcgtcgccgcctctctctctctccctccgcccgccgctgccggattcggtgggcagcgcgagttcctaccgcgccgccgccaccggatctggtgggaagcgcgagctcccacctcgtcgccgccaccggatctggtcgtcgccgtcacgccatcgttggctcctccaccacctctccgcctccgaatcctttccaccgtcggccaagggggggacacgtccctcggagaggagtcgtgcccctctgctgggagacggctttggtcggaaaagtgacagacgttag

SEQ ID NO: 84701 - DNA, 516 bp, Oryza sativa
  Clone ID: PAT_MRT4530_83912C.1
aatggagtttatagctcgaaaagcgcttattttctacaatttcagtgcatcttccccaccactaattttgaaaagatttggtcagctcctgctgagccaaagtaacgttttctgggttggcttgttctgcataaaaaaactctaactgcgcaaaaccttcttcagtgacactggagcgattggatctatcctctttgtagggaggcatttgaaggcacttctcacatgttcaaggaatgttctttcatctctgaagtgtggaacaaaatctgtatttggaaggggttagatcacaactctttgcctaacaacttggatttgaaaagctggtggtgctctctttcagccattcaaccaaaaccccatcaaaaaagaattatgggttgtttgatcacttcctggtagaacatctggttggagcggaataagcgtatattccaaaaaactttgtcatcggctgatagggtggcttccttgattctgcaagatcttgacctgagacattcagctttccaa

SEQ ID NO: 84702 - DNA, 874 bp, Oryza sativa
  Clone ID: PAT_MRT4530_83913C.1
atcgtcgattccttgcagcaaaccacccgaactaggccgaaaccctaaaactcatcgtaactggcttgctcctggaagaactcctcatcagcaggatccgcttcatcttcatcagcaacttgggggggggaatatttatatagagcaaggtttgttaatctctgcagagggggtacactttacccacacgacattactaacccggatcacccagcccgtggggatcagccacgtcgggagacctccaagctttcatgagaaggcatttccaaagccgacacaggcttaccatatgccgacgagaggggtcccagaccaacaacagttttacccaagttgtttttcagattttaagtttgaaggcgaccgtcgatactcgcacagagtgcacgaatatcgaggcgcaacagggtggttacaaggggacatcgctgagctggcgccgtcgtggcgcctacgtggctgccacgtgggctggcgggaggtagacgacgatccggccgcgaatggacggcgggcggcggcggcgagcggcggagcgaaccacggcgatacgggcaacagcgagcacaccgggtggttgcacgtgacaaggggaggcgagccaacggctcggattcgccggaggttgctcgacggcggcggattgcggcggcggcaaccggtggcgggagaagagggaaacggcgacgaggtcacgagaggtcgattcccggcggtgagagcatctacgcggcttcgggaactcgacgctagcgtcggattgggcggaactacgccgagcgaggccggcgacgagcgggtgctacggagctcgggcggcgacagcggcgagcacacggtgagcgatggcaacggtcggggcggcgccggc

SEQ ID NO: 84703 - DNA, 577 bp, Oryza sativa
  Clone ID: PAT_MRT4530_83914C.1
gcacgaggcctctcgtccaccctctccctctcccgccgccgtcgccgagcgccgcctccgcctctccctcgtgtcgccacctccgcctcatgccgtcgccatcgtcttccccgtcgcctcgcgtcgccgtctccgagcgccgtcactgtcacctagcgtaggcgtctcagcctccggcaggggcggagctaagattatgccaaaacaagttccttggtattttttctttcaggtgtggggctcaagcctaacctgccccacacctggctccgcccctggcctccggtctccgtcggcaacgaggtcggagcgccgacggccgcaccacaggcggcgcgaaaagctgagggcccagatcctcgtgctgccgcctccgccttcccctagggccgccgtcgcgtcgccgtaggatggggaggcgcacctgggcggcgtcttcctggcaatagcagcggcgacatcttcctggagacagtagaggcggcgtcttcctggcgacggcatcaactgcatcttccctgcggctacggcgtcttcccggcgatggcaacggcagcggcagcgacgtcatctctcc

SEQ ID NO: 84704 - DNA, 1203 bp, Oryza sativa
  Clone ID: PAT_MRT4530_83915C.1
atgcatcggggctgcccagccgcggctccgcctggtcaatacatccatggtgctcagctcgctcctgtttcctccctgtcttgctcccttatggttgcggccactgctcaacccgcggtcgccgccacaaccgcggcccaaccccgcccacaacatcgagcgtggagagctcgtgcgcgccacgtgcattctcctgccagtagccagcctcaaggtcctgcgctacccagccccccggccatgccgctcctgctacgtggatctcggcggcgggatttgacaacggggaacgccgctcgggccctggctcgtgctggcacagctgttggggagaactacctcgccacccatgcttggctttggtgaggagttgacgcggttgggagcgtgcaccccatctcccccaacgcctttcgtcgcgccatcgccgtctccgccgcggtcagccgaaaccgtcccgcgcaagagttgggcatcactgcggcgcccggctcgctcactcattccccgcagctatcgccacgtaggagcgccctcgatctccaccagcgcgccaatgtccgcgccgccgcaacacccaagccagcgacgccaccgatccgcgccgccggaacacccgcgcctctcgctctcgtctgtgccgctccccccaccccctgcgcccgccccagcctcaaggccctgcgctacccagccgcccgtcgttgccgctcctgctacgtggatctggcggcgggatttgcaacggggacggcgtcgcgccctgctcgtgctggcacagaggttgcaatttacaaggatctcttttggcaggactaccaagttgcctggaatctggggatctgctctcgcatcgccacgcccgccacaagagctgccactgccgttgcatcggtcctccatcatcgcttcgacctgccgaccccgtcttttcgcgcaccgcctcgcaggtccaccaccggcatttcacacctccgctacggcgtgcctcttgggctgcacgtggaacgcgagggcatcggcggcgaccatggtctcgcagtgctgaacatggctgacctgcacctccttgttgtggagaggatgggctgcccggaaatcagccttcatggcgacaacgtacccacggagattggccctctcccctcggcctctccaacgagcaggaacctgcatcgatgcctttcaattgaaatacgctaa

SEQ ID NO: 84705 - DNA, 333 bp, Oryza sativa
  Clone ID: PAT_MRT4530_83916C.1
atggggatcgccggagccggagccggaggcggcagcggtgggcaagagcaaactaaagaggagggcaaggttcttctccacgtcggcgcacaacaacctcaggttggcagcaacggcggcggcgatgctggaatgcaagaggcgggtgaggctggagaggaaggcgacggcggcgtcaggcttgcagggagagctgaggtgggagagactattggtcaccttccatactttgtccctggtgaggctgtaggtggtgaccaggtagtcctcgacggtaatggatacaacgactgctctctctcggaagaggaggccggtggagttcacggctag

SEQ ID NO: 84706 - DNA, 542 bp, Oryza sativa
  Clone ID: PAT_MRT4530_83917C.1
ctttttcgcgttctcttccttcctcccgttttcccctttatctttctcgctctcttctctccctggcgcacgagcgctgcgctcccagggcgcatcgccgccgcttcctcctctcccccccttccttccttcctctctttccctgttcaaaccctaactatccctcgcctctccaatagccgctgctgcccgggagatggccggtgccaagcactgcgcaactccggcggccctgttctatccccatgagtgtgctctcgggtctctacttcttcctctccccctctaatttctagtgtttatattggatctactctcctcccctattttaatttttggttacctctgatgattctacagtgattgaaaaatctgtggttcagcccctccttcagaaacccaagtcttctcttctactgctgctcttctggatcaatggtaactctgctagaacaccacttgctccttcttcaggttggtctctctgctgtctcacttcagcatcttcttgctgctttggtttacatgcctctcctggctgc

SEQ ID NO: 84707 - DNA, 663 bp, Oryza sativa
  Clone ID: PAT_MRT4530_83918C.1
atgaggcagtgggaggaggagctctgcctccaacccttggaagcatgcgcggtggtggcggggccgggtcgtgacgacggcgatgacggcgggggcggtttggaagggcacggctacagggcggcaggcgcggggtcaggcgcggcaggcgctgacggcggcacgcgcgcgcaggaagcaacggagcggccatcgacgctcaggccgccaccgtcctctgccggccccactgtcgtccgaaggagctccgtcaccaacgcctcgccaatacccaccaccctcctgaccacctcctgccgtaaccaagccgcgtggccagacgtgtgcctggcttcctctggccgctacctccaacctcccgtcgccgccatcctagccgccgcctatgtgggggcaaccatgctgaacctttcccccctactactcacttcagacatgtgggcagttctcatccccatctttccgtaccatgagaaggtggactggatctacttcgtcggcttcgccggcacggcggcctggcctcctcatatactcatacaagagctacaaggaggcagaggagctagtgacgagcagggcaaagcaggtgatgaagaggccggaatgcagaatccggcgtttagggcgaagagtgagggtggacaggcagccattgattga

SEQ ID NO: 84708 - DNA, 396 bp, Oryza sativa
  Clone ID: PAT_MRT4530_83919C.1
gaaaaatattttttccttttattttaggaattttgggaacatcctacttctctgttatgcttttgtaggatttttttagttgatggttaggttaattcaccaatcttgagagggtttagttggtcatgatttctgttttctctttttgttcactattttgagcttgtattaacttgttgtattagtcttatcttcttaattttttctcctgctgattctagtttttgacatgcttgaaatatattccaacctagctcatgtaatacaataccttggttagcagaaatgtctaactactgtcaattttcaaagcctaaaatggtttatcttaaatccgtcctcaaacatatcttctctggctcaaatgtatggggaaatatgtaacctggaaactac

SEQ ID NO: 84709 - DNA, 185 bp, Oryza sativa
  Clone ID: PAT_MRT4530_8391C.1
ttgttcgaacttttggtcaggctagtaacggatggatggcacaaagatgcgcacactttgtgtgaagcatcttctgctgatgtcttctgctgtttttgtcagtttgtggtagccagagacaagatgctgatgtcttctgctgtctgtattttaatactccaagcaacgctgcaaaatgttaactg

SEQ ID NO: 84710 - DNA, 118 bp, Oryza sativa
  Clone ID: PAT_MRT4530_83920C.1
gggaagatatgaacaatcatggccaacgaggggctaacaccagtttaccacagtccaaaaggtaaacacacttaccaggattatgcattgcaccggacccggagtatactgacaaacc

SEQ ID NO: 84711 - DNA, 423 bp, Oryza sativa
  Clone ID: PAT_MRT4530_83921C.1
gaaggaatgggaattaattccccccaattaattttggaatccatggtttgatttgcgcggattagagggagcaagaaactagggttcacgggagagagaggagctgtgcgggaggaggacgatgacccaggtggtggggcccacgcaggcgcgccgtcagcgcacgcacgtgcgcggcacaggcgggagggcgccactcggcttgggcccggaggcggcccaggaggagaggagggagaggcagcccgggagggagagggagaaggagggagctgggccgaggggaaggagggagggcggcccaagagagagagagagggaaggaaaaagagagggaggagggaaggactttggccgcgggccgagagagagagggaggcttggggattatttttagctttttttttctttttaataaacttt

SEQ ID NO: 84712 - DNA, 399 bp, Oryza sativa
  Clone ID: PAT_MRT4530_83922C.1
atggcagcgaaggggaccgaaggaaatcaatttccccacctaccctcggacaacgacccgtcttctcttctcgctttcacctcctccatcgtcttctccgctctacttcctcccacgccaccgctcctcctcctcctcgtctcgtcccgccccgcccctactcctccgctcctgcatggccgctggccccctccttccgccctccccaccgccaccgcggccccctccttccgcaccccctcttcactggccccgcacgggagcgtggtggacgggctcggtgcggcagtgttggctgcggagctcggcgacgacctggccaaggcggcggatctggcggacgcggcgttcttcggcgcaaggccctgtagcgacgaggaggaggtggtgggggcgtag

SEQ ID NO: 84713 - DNA, 1677 bp, Oryza sativa
  Clone ID: PAT_MRT4530_83923C.1
atggcaatggatcgagccatgcgacaatggcaccatctgctgctggtgctctgcttcgtcggatcgagctcgctgctgctggtgagctcgcagacgacgtcggactcgtgcaccgccgcgctcagcctcggcaacctcatctccttcaacaccaccggcctcaactgcttccaagcatggagctcgcagggcttcatcctccggctgcattggtttcgctcgctcgacgtcatcaatggcgatgcgttgcagttcgggaaggacgcgtcgtcggcgggaagcaacagcgtgtggaacttcgtgctgtcggcgccggacagcggcgggtacatcgccgtcgggttctcgccgaacgggaagatggtggggggcagcgcggtggccgggtgggccacgccgggcgccgccggcacggcgaggcagtactacctcggcgggacgacgtcgtcgttgtgtccgccggaccaggggaagctgtcgctgtcgcgcggcgcggcggcgcccaccatcgtgtccaagggctccaggctctacctcgcgttccagctctccggccaaccgctcaccaacgtcatctacgccgtcggccccgccggaaccctgccggggcccagcggcctcctcgcgcagcacaaggacatggcagccggcaccatctccctctcgggcggcaccagcggcggcggcggcagcgggacgcccgctaccggcggcggcggtgacggcgacgagggccatgaggaccacgagggcggcggagaagggaagggcaagagtgatcagtcgggcggagtcggcggcgagagcggcagcgacgggaacggcggaaggagcacgacgacgacggcgtcggcgtcaagctctggcagcgcaagcgggagagttttctgtgcccagtggacgaaatgcagcctggtcgttcagatgttggccgaaaccctaaaactcatcgtagccggcttgctcctggaagaactcctcatcagcaggatccgcttcatcttcttcagcaactggggggattatttatatagagcaagggaatcggtccttaagtgcgagagcgggaaaaaccgtatacccgattttaagtttgaaggcgaccgtcgatactcgcacagagtgcacgaatatcgaggcgcaactggatggttacaaggggacatgcctcacggctcgcggtggaacgcgcgcacgggaggggctgaccggggtcggcccgtcccgacctcggctgagctggcgccgacgtggcgcctacgtggctgccacgtgggctggcgggaggtagacgacgacgccggccggaacggacggcggacaacagcggcgagcggcggagcggaccacagcgataccggcgaaaacgagcacaccgggtggttgcacgagacgaggggagacgagccaacggctcggattcgccggaggaagcttgacggcggcgaatcgcggcggcggcaaccggcagggagggaagagggaaacggcgacgaggtcacgaggggccgattcccggcggtgagagcacctacgcggccacgggaatccgatgctagcgtcggattgggcggagctacgccgagcgaggctggcgacgagcgggtgctacggagctcgagcggcgacggcggcgagcacacggcgggcgacggcaacggtcggggcggcgccggc

SEQ ID NO: 84714 - DNA, 399 bp, Oryza sativa
  Clone ID: PAT_MRT4530_83924C.1
atggcgccctccctcctcgacgccgcctcgcccttcctcctctacagcgccgccgccgccggtggcagccgcaggccgctcgccgccgccaccaccggtcgccacgccgcctcctctctccgcgtcggcgccctcaagtactgccggatctacaagccctaccaccggatctacaagccccggagctccggtcgctgcctccttcaccctccgccccaaggtcgccggtcgcctcatctccaccatcccgagctcctgggcaccagatccggtctctatgtggttagggaccaccggatctggtcgcccccatgctccggccaccgtctccttcgtctactccgccgccgtcgtctcttcgtctactccgccaccgagctcgggtcgccgtcgccgtag

SEQ ID NO: 84715 - DNA, 1328 bp, Oryza sativa
  Clone ID: PAT_MRT4530_83925C.1
gcgtacaaaaactcagtgcatttaacttttgaactcatcactattacaagaggaaatgaaaatcaaagaacaccagaacgtttaaacaatattcacttcactcacacaaactgaattaaatgagctaattaaaccacaatgaagaactctcatccacaggagaaggtaattaattaacatacttaagcactattaattcattcggaactcatttaatttaggccatctcgcgttcttgctagtagtagttcaccttcctgcagttgacgcggacctcgccttggctcccgacgagcgggctcaggctggccatcctcaccatggactcggcgaagtctcgccggaacgcgtccgggttggcggcgtagaacctgacgagcccgtcggtggcgccgaggccgccgccggcgaacagctgctggtccgagtgcaggagccccctggcgcgcagcagcgaggcgtagtacgcggcgtcgaacctcgccggcgtcgggtcgagcggcgcgaggttgtcgtcgccggcgccggcggtacgcgggcaggtccccccgagcgacgcggcgagggaggcgtcgagcgtggccgtctcgttgtagaggcggtcgcggaagttggtgcagcgggagaagcccagcgtgtgggcgccggagaggaggacgaggtcctgcacggagaggccctgcgcggcgaagctggagacgaggccgtcgaggttgagcgtcggcgccgggatgctgctgttcgccgccgcctggctcgccgtccgcgcgtccctccggcccagcggcacgtggtacgacggccctcccagggtgacgatggagtcgcgcgcggcgacggcgacgatgtcggcgcaggagacgacgttgcggcggcaggcggcgttgacggcgtccttgatgcggtcgatgacgtcgaagccgcggacggagttcatgttgggcgccgcgttcttctcccccgtgaagaatggcgtgtcgtccagcaggatggacccgtcgcaaccgttgacgaagcagtcgtggaagtgcaggcgcaggagcgaggcgcccatgcggggctccgccgcgacggcctcctcgacgatccgcttgatggtgggcagcgccgccgggcacaagccgtcgtagaagtgcgggtcaagttgcgcgctgctcatcgtcgcggccaccactacagcaaacgccaccgccaccgccgccatagcagaggacaccatggcaagctagcgagctatagatgacacggctaacagcacaagctcaattaattgattagctggtcgaggcttaatttgctactgatggttacgaccgtaagctcgatcg

SEQ ID NO: 84716 - DNA, 1274 bp, Oryza sativa
  Clone ID: PAT_MRT4530_83926C.1
ggccggccggcccaaggcggcccaagcgcgcgcgcgagaggggaggagagggagagggccggtggaccgggctcaccacgcgcggtcccgggtgggacccgcttgtcagcggctcggctcaccgtgcggagggagcacgcggcgcacgcgcgcgggcgggcgggcccacgcgcagcctcatggcttgcggtggaacgcgcgcacgggagggactgaccggggtcggctcgacccggtctaggctgagctggcgccgacgtggcgcctacgtggctgccacgtgggctggcgggaggtagacgatgacccggccgcgaatggacggcgggcggcggcggcgagcggcggagcgaaccacggtgatacgggcaaaagcgagcacaccgggcggttgtacaggacaaggggagacgagccaacggctcggatttgccgggggttgctcgacggcggcggattgcggcggcggcaaccggcggcgggagaagagggaaacggcgacgaggccacgagaggtcgattcccagcggtgagagcatctacgcggcttcgggaactcgatgctagcgtcggattggacggagctacgccaagcgaggctggcgacgtgcgggtgctacggcgctcgagcggcgacggtggcgagcacacggcgagcgacggcaacgggcgcgagctggcgctccggctagcggccaaaacggcgacaggagggagaggggaatgacgccggcgggaggaaaaggggagaaaggagggggagaaaggggcttgcccctttgccgatttgggaaaaaggaggaggggagcgggggcgacgcggcagagagaggaggggcgctgcctccgtcccttggcggcttgcgcgcggagtggcggggccgggcgatgacgacggcgatgacagcggggcggtttggagcggcgcgacgacacgggcgacaggcgcgggctggcgcggcagagggtgacggcggcggcgaccgggcggtcggccactcggcacgcgcgcgcgggaaacaacgggaggcgcggtggttttgagcggcgtggctcgggcgcgcgcgctggctagcgggaccgggcggctgctcggctgcaggcggcagggcagcgggaccgggcggcatccatgcgggtgcgcgcgcgaacgagcgcggggagcggcagcgagggatggggagacggagagcgagggagaggagggaattgtgcggaagaaacaaagcatgcacgcgcaggaggatggagtagtagaatggatggatggatgg

SEQ ID NO: 84717 - DNA, 504 bp, Oryza sativa
  Clone ID: PAT_MRT4530_83927C.1
atgatcctgttcaacatccgtcgcccctcgtcctgcatatttgcagtggccatcccgctcgcaatcgcctctctcccgcgcacgcgctcgtttcccgcccgcgcgctcctgcccaatcggtcccgccgcctcgccctcccgccgtgctacgccgtcgcacctgtcccgccgtcccgcgccctcgccgtcccgtgccgtcgtcggtcccgccgtctagtgcccccgctcttccgccatcgcgccgctctggccccggccttcgtctcgccatgtggaggccgccgcatcgtgcttcaacggcggctaaggacttggatcaggatgctcatcgcccggaaggggacttggattagtcgggtattggatcgatgcgccattgggtggttcctccaacaggcgtcgatggttggaaggcacaaggtctgttcatcggtgagcaagtcaccgatgaggaggtctgcacaggtttctggaaataaaattgttgtctttcttcgcacctga

SEQ ID NO: 84718 - DNA, 1405 bp, Oryza sativa
  Clone ID: PAT_MRT4530_83928C.1
atgggccggccggcccaaggcggcccaaggcacgcgcgcgcgggaggggaggagagagagagccggtggaccgggctcaccacgcgcggtcccgggtgggacccgcttgtcggtgacacggttcaccgtgcggagcgagcacgcggcgcacgcgcgcgggcggggagggacgcggtgtacgcacgcggttcgcggtggacgcggatgcggcgggcccacgcgcagcctcacggctcgcggtggaacgcgcgcacggggagggactgaccggggtcggctcgacccggtcttggccgagctggcgccgacgtggcgcctacgtggctgccatgcgggccggcgggaggtagacgacgacgccggccggaacggacggcggacgacagcggcgagcggcggagcgaaccacggcgatacaggcggaagcgagcacaccgggtggttgcacgagacgaggggagacgagccaactgctcggattcaccggagggagcttgacggcggcgaattgcggtggcggcaaccggcggcgggagaagggggaaacggcgacgaggttactaggggccgattcccggcggcgagagcatctacgcggctacgggaattcgatgctagcgttggattaggaggaaacgcatcgagggaggccggcgacgagaggcgcttccgagctcgggcggcgacggcggcgagcacacggtgagtgacggcaacggtcagggcggcgccggctagctacgaggaggctactcaagctactacccgacggggcgcagtgacgagaggccggcggcgcgggagtaatctctccggccttgggccggggaagaggaaggagagggcgcgcccggagtccccttccgcgtccttgctcgtgccggctcctccgaaacgcgcaacgacgaacgacgacggcaaacagagcacgggaggcggggagcgggagcgacgcggcagagggaggaggagctctgcctccgtcccttggaggctagcacgcggagtggcggggccgggcgatgacgacggcgatgacggcgggggcggtttgagcggcgcggctcgggcgcgcgcactggctcgcggggccgagcggctgcgcggcagggcagcggggccgggcggcgcaaacggcgcaggcgcggcacgggcgacgaccacgcgggcgcgcgcgcacgcgaacaatggcgcgcgggcagagcgagggagcggagagggagggctcgactcggcgcagctcacgcgctcgcgcgcgcggcgcgcgggcagagcggcgaagagggagagagagagagagagagcgccggggagggagggggagatgggccgagagagattcggcccattgaccccgggggaggcaaaatagacttttgcggagggatttgatttggaaggattt

SEQ ID NO: 84719 - DNA, 894 bp, Oryza sativa
  Clone ID: PAT_MRT4530_83929C.1
atgggcgggggcagaaagtgtgtgtgggtgtgggaaaacgctgcatttatgcgtttctcaggtgcctgtgaacgagaaacacgagatgttgctactgtgctattcatcggttgtgcccaattaatcagcggtgccgcggcaccagtcaagattggacgtacaacggctttgccgaacaacctcttcccccgtcgtcggtcgtacacgtgcactagcagttggggtatgcgtcagatcggatgcatcatccccttccattccgcttccattccgcacagcgagcacgagatgcctggccgcaatgccgccttgtccgctcgcttttgcatcgagccagacgagagacaacaacagaagctaaaagctcgccgacgaacgcgaacccggtcgagccggacgccgggtttgattcggcgagcgcgcgactgcatgagccgatctcgggttggccccaaaccacacccgtcggtgcggcacaacgtcgtagatcctgcctgcctgcacgttgcaaacgcgttgaagggaggcagggagctgcgtttttcaaggcggcttgtgcaatgtgcacatgaaccgaactaccgaacgtctggagatctgcgagagagagagagagagagacagaggggctcgatcgctttgctgcgacgccgaactcgacgttcgattcaatggtccacggcccaagtcaacacataccagcaatgcgagcaagtcaaatgtttgttcatcagccagccacctttggttgagctgaaggagttattgcctcctgagtcaagtcactgtccggtgtcggccgcaacgagctcgcttgtggcctacaaggctacaactagaccgcggcaactagttgctgcctacagacgattggggaactgggtggtgcttaag

SEQ ID NO: 84720 - DNA, 917 bp, Oryza sativa
  Clone ID: PAT_MRT4530_8392C.1
catacgttttatgctgcgcaaagattcaatcagtttaattttggccatcacattttaattctccactgcagttctaccgacattttcagtgagcatcgaaacgcctaaatacattctagccggagcttattcagtggtctcgacaataaatgctcagtacgtatttggcaagcctgtgcttggccgctatacctttaagtatggcgttatccaggatggtactgttcaagagctgggagagaggcaaggtctgattggtgatactggaagggctgtagttactttggatgatctcagtaatgattttgatggtccagactggtttgatcggttcagaggtcgccatttccatgcaaaggcaatcgtacacgaatcagcgactcagttcagtgaagcaagcatcaacacgaaggcaattttcgtcgactcaccatacaaattcagtagaaagcgaactgtgcagtacttcaaggctgggctcaatctgcaagtaaatctggatttaacatttgcaaatggagatgtggccaccgatgttcctgtaagtgtcatagcaactgccagatttctaggtggtcgagaggagccactacggaggactgatatatatggtagtcaggtagacctgagatccaacactgatgatcaaggaggagtcagtatggattttggtgtccaatcaagtataaggagcattaacattgtggcatcaactcatgatccgcaatatccgaacaaccaagccgatatgtcctttggagtaagtctagcagactcggccaatgggaatgattacttggtcatcagaccccgatatgcagattaccgtagcctgaatgttgatgtgacaactgatttcttggttcagagaattggaacaacaggaaatgaagacatagacctccactttcttgtaa

SEQ ID NO: 84721 - DNA, 698 bp, Oryza sativa
  Clone ID: PAT_MRT4530_83930C.1
atgaggaggcgattgtctcatctgttcaaggggtccggctcttcatcaagtcatcatgacgagtctagtactcgttcatcagctgatatctcgatggagacgccgaagctccgcgatgactcatgaatggcaccgacctcggccttgttggtgatcgggaaagacaagcctactacatgccgagcgaccgggagtatgctcacacacgagaatactctccggagctgctgaaaaagataggtatagatgttgaatttcgtgctatttggaaagttgttggttggcagagatttgttgtggtagatgagcctggttctcgtttgcttactttgcaatttctgtgcactttgaaagaaatagaagatgtaatttcctttcgctttttccataaggagtatacacttacatggaaagggttaagcacacattttggttttcacgattcctgtaaaatcgatcttcagaaaggaatttttgggttcgagaaaaataggttttgggaagatatttttggtggtttaatttgcaagaaacctaggacgaatgatatccataatgctacacttagggtcatgcattaatggattgctatgactttggtttctagaggtgatcttagacccattaagggggatgaattggaccatgatgtttgccatggttagaaagataaaaattgctcctgtgaaataaacaca

SEQ ID NO: 84722 - DNA, 1405 bp, Oryza sativa
  Clone ID: PAT_MRT4530_83931C.1
ccaagaaggcggcccagagcggcccaagacgcgcgcgcgcgggagggaggagagagagagcctgtggaccgggctcaccacgcgcggtcccgggtgggacccgcttgtcagcggctcggctcaccgtgcggagggagcacgcggcacggcactagggtgggggagggacgcggtgcacgcgcgcggttcgcggtggacgcggatgcggcgggcccacgcgcagcctcacggctcgcggtggaatgcgcacacggggagggactgactggggtcggctcgacctggtcttggctgagctggcgccgatgtggcgcctacgtggctgccacgcgggccggcgggaggtagacgacgacgccggccggaacggacggcggacgacagcggcgagcggcggagcgaaccacggcgatacaggcaaaagcgagcacactgggtagttgcacgagacgaggggagacgagccaacggctcggattcgccggagggagtccgtcggcggcggattgcggcggcggattacggcggcggcaaccggcggagagaaaaggggaaaacggcgacgaggtcacgaggggccaattcccggcggagagagcatctacgcggctacgggaatccgttgctagcgtcggattgggcggagctacgccgagcgaggccggcgacgagcgggtgctacggagctcgggcggcgacggcggcgagcacacggcgagcgacggcaatggtcggggcggcgccggctagctacggggaggctactcgcactaccgtgcgggcggggcgcagtgacgagaggccgacggcgcgggagtaatctctccggcctcgggccgaggaagaggaagaagagggtgcgcccggagtcctcttccgcgtccttgctcgtgccggctcctccgacatgcgcaacgacgaacggcgacggcgaacagggaaaaggaggaggggagcgggggcgtcgcggcagtgggaggaggggctctgcctccgtcccttggcggcttgcgcgcggagaggcggggccgaggcgatgacgacggggatgacggcgggggcggtttgagtggcgcggctcgagcacgcgcgctggctgcggggccgagcggctgcaggcgtggcagggcagcggggccgggcggcgcagacggcgcaggcgcgacgcgggcaacgaccacggggcgcgcgcgcgcgaacgacgcgcgggggccgacttcgcgggtgaggggcgctcacgcgcacgcgcgcgcggcgcgcgggcggagcggagggggaggggaagagggagagagagggagcgagcgccccgcccccgggggagatgggccgagagaaattcggcccatcgaccccgggggaggtaaaatagacttttgcggagggatttgatttggaaggattt

SEQ ID NO: 84723 - DNA, 515 bp, Oryza sativa
  Clone ID: PAT_MRT4530_83932C.1
gcaaccatatatagaaatcaagagaaatcaaagtgtgatagctagccttaactctgctcatggctcttctgaagtgcaatggctcaagggcttcgtccctagtgaccctcctgctgattgcagctctgctctttccagctgtttgctacgcacatgttgaggcgaagacagtgtgccagaagacggaatacgggtgcacgcaggagaaatgccaccagatgtgcctgggtgacggccggacggtagcatctcagtattgcaggcattatgatacccaatgctgttgcacttatgagcttcaagcaaatgacaacgataagatggatgatggccggcttcatgcttagttaattagaatatcgccaatttatctcctgcatgttttactagctatgcgtagatctgcgtgatgcagatccaataaagttggtatatatggttaatcctagaaaaaataatgttggtcttgttgtcaaggagttaatttcatgatcaatgcacaactacctcccccc

SEQ ID NO: 84724 - DNA, 825 bp, Oryza sativa
  Clone ID: PAT_MRT4530_83933C.1
aaactcatcgtaaccggcttgctcctggaagaactcctcatcagcaggatccgcttcatcttcatcagcaactagggggggaatatttatatagagcaaggtttgttaatctctgcagagggggtacactttacccacacgacattactaacccggatcacccagcccgtggggatcagccacgtcgggagacctccaagctttcatgacaaggcatttccaaagccgacacaggcttaccatatgccgacgagaggggtcccagaccaacaacagttttacccaagttgtttttcagattttaagtttgaaggcgaccgtcgatactcgcacagagtgcacgaatatcgaggcgcaactgggtggttacaaggggacatggctgagctggcgccgacgtggcgcctacgtggctgccacgtgggctggcgggaggtagacgacgacccggccgcgaatggacggcgggcggcggcggcgagcggcggagcgaaccacggcgatacgggcgaaagcgagcacaccgggcggttgttcgtgatgaggggagacgagccaacggctcggattcgccggagggagcttgacggcggcgaaacgcggcggcgacaaccggcggggagggaagagggaaacggcgacgaggccacgaggggtcgattcccggcggtgagagcatctacgcggtttcgggaactcgatgctagcgtcggattggatggagctacgccgagcgaggctggcgacgtgcgggtgctacggagctcgagcggcgacggcggcgagcacacggcgagcgacggcaacggttggggcggcgccggc

SEQ ID NO: 84725 - DNA, 1153 bp, Oryza sativa
  Clone ID: PAT_MRT4530_83934C.1
ccccattcggtgagtcgtcttcgtcgtcttgggtactcgcgcgcgccagctcactcccagatctcccccctcctctcctccccgtctcagatctccaccgccgccgccgccgaaaccctagcccagccccccgccttccgccgcgcgcgcgggggtgacctccgcgccgccgccgccatgggcatcgtcttcacgcggctcttctcgtcggtcttcggcaaccgcgaggcccgcatcctcgtcctcggcctcgacaatgccggcaagaccaccatcctatatcggctgcagatgggggaggtcgtctccacgatcccaacgattgggttcaacgtggagacggtgcagtacaacaacatcaagttccaagtctgggatctcggtggtcaaacaagcatcaggccatactggagatgctactttccaaatacccaggctatcatttatgttgtcgattcaagtgatacagataggcttgtaacggcaaaagaagagtttcatgctatccttgaggaggatgagctaaaaggtgcagttgtccttgtatatgcgaataaacaggatcttccaggtgcacttgatgatgctgccataacggaatcattagaactccacaagattaagagccgtcaatgggcgattttcaaaacatctgccataaaaggagagggcctttttgaaggtttggactggctcagtaatgcactgaaatccaaaagcagctaatttaggagcctctgttccatggatcattgcttgatggtaaagaacagggacactgctcccttttcctcacaagtctgcgtgagaacccccattctctttgttttaactccagaagttttataccatcgattatctgtaaagtgcttgttaaagttttcggatacgactttagatgtacctccatattgagatcaagaatagatttgtagaaaatgacgagcaaactgtcaggactcttggtcactggtggctttacccgtaaatcccttctattgtgacatttttttccgatgattgaacacgcctaatttccaccttgtcgcagagcttcaggacatttacaaaaaattctcttacctggttgacactaacgcttggggctattcttctaccgtcatttcttaataatgttagattgtgatgaatg

SEQ ID NO: 84726 - DNA, 1506 bp, Oryza sativa
  Clone ID: PAT_MRT4530_83935C.1
atggtctccaatatgggttggagcaaggaacgactccagacccgtcagcgaggcatgcacaccgtcaaggagacggagttacttgctgccaagctagacctcctcatgaaacgcttggacaaccatgagaaacggccacaaggcaccgtcaaggccttggactcacacgtcacgtgtgaagtctgcggaggcacggatcattctgggaacgactgcccggaaacccgtgaggaggcgatgtacatgggcaacaacaacaacggttatcgtccacaaggagttcaggggtggaaccaaccacgctcatattatcaaggaggaaataataacgaaacccagttagctcagttggcatatttagtccctgcaaatgaaactgggaggattccggggcaaccctactcctccattgaaaatgttaaggcgatcacgacaaggggaggtaagtccactcgtgatccaccgtatcctaaccctgccggaactaatgggatgtcaaaagaaacgccatctaatgactcggctgacaaggagattcagccagaaaagacagtgccacaggagtactgcgacacacggttgctgccatttcctcaatggagtaggaaaacgtcagtggacgagctgttcgctcgttttgttgaagtgatccagaggattcacatcaacgtgctgttgttggatgcaatgcaagtgccaatatacgcccgttatctcaaggacatactcaacaacaagagaccgctcccaacaacggaggtggtcaagctgacggaacactgcagcaacgtcatactccacaagctcccggagaagaagaaatattcggagtgtcccacgatcacctgctcgatcggggcacaacaattcgaccaggccttgtgcgaccttggagccagcgtcagcgtcatgccaaaggacgtctttgacagactcaacttcacggtgttggcaccaacgccgatgcgcctccaaatggctgactcatcagtccgttaccaagcagggatagcggaggatgtgccaattaagatatgggatttcttcatcccggttgactttgtggtgctagacatggacacgaggaaggagacgccgctcatcctagggcgtccgttccttagcaccgcaggagccaacattgacgtggaaactagtagtatctgtttccatatcaacgaaaaggaggaaaagtttgagtttcaaccgaggacggaacaatgctccatggtcagaatcaagtacgggccaaacccgcagaacattcaagaggtcgaagtggagccacccaagacggatagcctggtaaggtttatacagaacttcctagagaaggaaacaacaatgcccaggaaccgttattggaggaagccggtaaaatcacctgtaccggccaagaagtttgagcagtcggctcagaagaagccgtcttctgcaccgaaatcaaagaaggtgtggaaagagaagctgaagacgcccgctccatcacatccggagacgggttga

SEQ ID NO: 84727 - DNA, 493 bp, Oryza sativa
  Clone ID: PAT_MRT4530_83936C.1
actcctattgggagtgctgctgcgcctgccggcacgcgctcgcggacggtattggccgggacccacccacgccggccgttttttggaaccatgaccctgtgcattcatctcgcctcgaggaaatgactggggggtaggaggtcaacttgagcgccgaaggctatgatcacaactgctcaagatgttgtgtctttgtttgatcgcaggatacattatacgcaggcctctacagcaaacatatgtgatggttgcgttattaaaatgacggacctcaagcctttagtgtcgaagacacttagattgaacaaaatagagacgcagctgcgtatttaacatggtttatgtgagtcatatctgtattctcataccttcggacagaacactgaggccagctacactaatgggcactaaggacattgtgcagttggaccatgggcagccatgcatttctgatcctgctggaacgaagcgcagataccaaggcaggctatag

SEQ ID NO: 84728 - DNA, 681 bp, Oryza sativa
  Clone ID: PAT_MRT4530_83937C.1
atgtcggttcccctctctcaaaccgacattgccacccttttaaacccgtcttccccctcccttcctttcctctcccattcgcctcctcaccgttgtcgccgctcccgtgctctgccttgcctccgccgtccatcgccaagcgccgggagagccggtgcgttcgtggacgcggaaagggactccgggggcgcccccttcttcctcttcctcggcccgaggccggagagatcactcccgcgccgtcggcctctcgtcactgcgccccgtcccgcacgttccgtccaatccgacgctagcgtcgagttcccgacgccgcgtagatgctctcaccgccgggaatcgacccctcgtagcttcgtcaccgttttccccttctcccgccgccggttgccgccgccgcaatccgccgccgtcgagcaacctccggcgaatccgagccgttggttcgtctcccctcgtcacgaacaaccgcccggtgtgctcgctttgcccgtatcaccgtggttcgctccgccgctcgccgccgccgcccgccgtcctttcgcggccggatcgtcgtctacctcccgccagcccacgtggcagccacgtaggcgccacgtcggcgccagctcagccagaccgggtcgggccgaccccggtcggtccctccgcgtgcgcgcgatccaccgcgagccgtga

SEQ ID NO: 84729 - DNA, 2517 bp, Oryza sativa
  Clone ID: PAT_MRT4530_83938C.1
atggtccgcaacaagcccatcaggaacgaacaatgtgctcaggtgccaagcgagccttcctcctctttcttggggcacaagcccatcctgatcaacatgctcgagtgggccaaacgagccatcccccaatccccccatctctcttccttgcagtataagaagccctccctcctcctccttccgttccgtggcttccagaagcaaaagggaatcaaacttgtaacagacaccgcagcggtgagcgtcccgtgcaatttgccaccaagtccaccccaacctccccttcccctcccgtctcccatggctgcctctccgccatgggcgaacctcgtcagcgccgtcgtgggcgagatcgccaaccacctcccgtgcgagttcgaccgcgtgcacttcgccgccgtctgccgatcatggcgcgcgtccctcgagcagcaagcgcccgtgcccctgcctcccgctcttccggttctcatcctaccgcttgctgagcggcctgccgtctccttcgtcctgagcaactgcgccatccaccccgccgtcctcccggagtggccgcacgacgcacgctacatcggcgcgtacgacgatggctggtcatcctctccattgctccacctcgaggacggagcgcccgggcaggaatggcagttgccgttctccatcgtcgccgccaccctctcgtcccaaccagacgtcgacggatgcgtcttcgccggcatcatcagcgttgaccccgtcccccggggccagcggacgattgggttctggcgcgcctccgatcgggtgatccctcacttgttccagacacataatccaccatgggatgtggaggacgtcgtgttctacgatggagccttccatttcctcacccaaggggagcacatcatcgtggcaggtccggacttccatggtggggatccggtcgactgggagatgcgcgccttcgaacacattgggcgagaatacgatcagtacgtcgaggcgcgctacctcgtggagtcccgcgaagacctgctcatggtggtgaggtgctccccttatcctggacagccgacgtcggagttcagggtgttccggatggcgcaagccgggccggacgacgtgttcccgtatcagcactacgtctggctggagctgccctcgctggaaggccggatgctgttcgtcgggcgcggctgctccagatcctacgacgcggatcagtaccctggcttcgagggcggcgtctacttcttcgatgatgacatccaggatccggcgatgctgccgctgggcgtcgcgacgctattctccttcaacgactgtgagaaatggacgagaacacctgcctccatggtggagcgctgcttcccggcgataggctacaccccccaagcatgtcccaccactcttgaacgctttggcatgggtcccaatggttcagatccaattgctgataggcaactcagctggccgttagcctccaaatactcatggtgtatctacaagaggcgaccagatgaatcggctgcttcagcgaataaacaaaagggttgctcaatcccagaccttccagaggatatctggcgtcatatacattccctaatgccaatgcgtgatgctgctcgcactgcttgcctgtctcattcctttctatgttcctggaggtgctatcccaacctcaccttcaataagtatgtgtttagacccaaagcatttacgtatggaggggatatcagccacagaattgactctattctgggaaaccactcaggcattggtgtgaagacattgaagcttgaattatctggtaccgcatatcacaatcttgacaattggcttcaagttgctgttacaccaggcattgaagaactcacccttatgcggttcagctgcctgagggttcatggatgcgtgaggctgaaattgatagagagcaaagttccaaatctctccactttagaccttagcggaaaggcggaactgttgcttggggaaacattgcaaatgaagaacttaagcatgcgccatccaaatgttgtctgttatgctcgttctgagcttccatccagtatgccaaatattgatactcttgccttaagctcctatgatgaggtggttaatacaccaatgctgcctaccaaattcctctacctcaagcacctgaccatttgtttgagctccggaaccttttcgccgtcctatgactatttttctctggtttctttccttgatgcgtctccttccttggagactttgaacttggatgtaacaaatgatcctatgaagcatgaatcaattctaggacattcctcaaagtcacatttgaggcagatggctgaagaccaccattgccacctcaagaatgtggagatcacagggtttagctctgctaagagcttggttgagctaacttgttatatcctcaagaactcggtgtcgctcgagtgtcttactttggacaccctgtatccgtatgattttaggtgttctgacgaaagatttgaacggtgcagaaccatgcgcatagtattttga

SEQ ID NO: 84730 - DNA, 1425 bp, Oryza sativa
  Clone ID: PAT_MRT4530_83939C.1
ttggggcggctcgaccgagcttaatgggccggacggcccaagacggcccaagcgcgcgcgcgcgcgggagggaggagagagagtccggtggaccgggctcaccacgcgcggtcccgggtgggacccgcttgtcagcggctcggctcaccgtgcggagggagtatgcggcgtacgcgcgtgggcggggctggaacgcggccgaggtggcgccgacgtggcgctacgtggcagccacgcgggccggcgggaggtagatgacgacccggccgcgaatggacggcgggcgatagcggcgagcggcggggcgagccacggcgataccggcgaaggcgagcacaccgggtggctgcacaggacgaggagagacgagccaacggctcggattcgccggagggagtccgtcggtggcggattgcggcggtggcaaccggcggagaggaaagggggaaacggcgacgtggtcccgaggggctaattcccggcgacgagagcatcttcgcggctttgggaactcgacgcttgcgtcggattgggcggaactacgccgagcgaggctggcgacgagcgggtgctacggagctcgggcggcgacggcggcgagcacacggcgagtgacggcaacggtcggggcggcgccggctaactacggggaggctactcaagctactaccgaaagctagggggaggagatggagcgaggaggaagaacggagagaggcactaccgtgcggaggaggggcgctgtgacgagaggccgacggcgcgggagtaaacttctccggcctcgggccgacgaagaggaagaagaaggcgacggcgaaacagagggcggcaaaggcgcggaggcgaaaatgagggagggaagggaggaggagacggggcgacgcggcagagggaaaggagagctcggcctccgcctcttggcggcttgcgcgcggagtggcgggggccgggggatgacgacggcgatgacggtgggatggtttggagcggcgcgacgacacgggcgacaggcgcgggctggcgcggcagagggtgacggcggcggcgaccagacggtcggccactcggcttgcgcgcggcttgcaacgggcggcgtccgcgcgggcgcgcgcacgcgaacacggcgcgtgggaagcggttttgcgagcgggaagctcgcgcgaggggaggggcgctcggcgcgggcgactcccgcgcacgcgcgcgcggcgcgcgggcggagcggaggggagcggaaaaagaggcgctcggcgcggctctcgcacgcgcgagcagcgagcgggcgagactgagcggggggggggaggagcgcgccggggggagagagagagagagggagagagagagagagagagagatgggccgaggaagggagagatgggccgagcgagattcggcccatcgaccttgggggaggcaaaa

SEQ ID NO: 84731 - DNA, 147 bp, Oryza sativa
  Clone ID: PAT_MRT4530_8393C.1
atggagctgttggggctgagttggtctgcccttccaggtcagcccataagcgggtggcctagcccaagcgtgtgtgaggccagggctggaggtagcaggaggtggcagacgatgagcggcagggagctcatgtctgttgatgactaa

SEQ ID NO: 84732 - DNA, 954 bp, Oryza sativa
  Clone ID: PAT_MRT4530_83940C.1
atgtcgggtgaagacttcacctcctcaagagatgatgaggagctcccaacaccattcacatcatctcattacttaatggcaaatggtaagaatgaggtaaataaagattctcttgatattactattgaaagtagtaatggtgatgatgatgatgatgatgatggtgatgagccttcatatgatgaagttttggacatgcttagggaggctactagctcatgcattacatctaagactaatatgtccacctcttgtgatgacttgcaagacataccttatagctcaaacatagatgaaaactcttgttcttcctcctctatgtatgttgttgctaaccttgtagaggaaaacaagcaattacaagccaaagtcaaagatttaaaagaagacttggatagaaactacataaggaagaacacacttgacgaaatcctaagcaagcaaaagagctcaaatgacaagtgtggacttggcttccaccacaaggagaatgctaagaagacaaggcacatgcctagatatacaaggaagcatgcatacttaagaaaggatggaaagaaaaatgtgagtaagaaccatcctcacattacatgttgtggttgtcatgagaagggacactttgcctcgttgtgccccaaaatgaaggatgaaaagtacaactccaaattgagacaaactggcaagaagacaagtcatagaggtcaaagcctaacttgctacaattgccgcaaaaagggatatattggtaaaaattgtctcataggtaatacttctaagcctaatattatttttgatgattatgtgcttaggaaaaataggcaaggcaatgtgtttgccagttatgttggtttacctagacttgcacctagaaggaggaccatttgggtgccccgtattttggtaactaacattgatggacccaattttgttggggaccaaaatgtgccaaaatga

SEQ ID NO: 84733 - DNA, 422 bp, Oryza sativa
  unsure (1)..(422): unsure at all n locations
  Clone ID: PAT_MRT4530_83941C.1
cagcttgctgatgggagaaggagacgtgggacaggggaagagttcatagagcctgttcatgcgacggtgcaggcagagttggtgttgtgcagcttaatgtgcgtgtggtgatagtgtcatgccccttgggtgaaatgggagaaggcgaatttgtnaggaagcacatgcaatttaggcgagatggtgtgtgttgcatatgacttgtgatagttcattggtgaaagaatgggcaatacctgacctntggatncaagtaaacacgttggtggcttacgattatagcaccgctaactgaaacntgattgccactggngctcctgtacatctgccngaagacatgtccagttgcaggcttcagctatgttcaccgtgtggactttaatatggtttgaatccagattactgancgcatcgaaaaaaaa

SEQ ID NO: 84734 - DNA, 296 bp, Oryza sativa
  Clone ID: PAT_MRT4530_83942C.1
ggggggggtaagagtttcattaatgatttatagggactatggagaattcatcataatctccattgcttctaattcagatctcttttggttcattacatacactattgttccaatgatacccgctaagggtgaaatacataatataactataagtgctatgataccacctggtaaactgccatttggtgttttggatgaatcaaagggaatgttttccactggtccttttggaactggctgggaaggattaggacttggttgtttagcagggggagggctctgttgtggcggaattg

SEQ ID NO: 84735 - DNA, 1464 bp, Oryza sativa
  Clone ID: PAT_MRT4530_83943C.1
atgggccggctggcccaaggcggcccaaactcgcgcgcgcgggagggaggagagagagagccggtggaccgggttcaccacgcgcggtcccgggtgggacccgcttgtcagtggctcagctcaccgtgcggagggagcacgcgacgcacgcgcgcgggcggggaagggacgcggtgcatgcgcgcggtccgcggtggacgcaggtacggcggggccacgcgcagcctcacggctcgcggtggatcgcgcgcacgcggagggaccgaccggggtcggcccgacccggtctggctaagctggcgccgacgtggcgcctacgtggcggccacgtgggctggcgggaggtagacgacgacccggccgcgaatggacggcgggcggcggcggcgagcggcggagcgaaccacggcgatacgggcaaaagcgtgcacaccgggcggttgcacgtgacaaggggaggcgagccaacggctcggattcgccagaggttgctcgacggcggcggattgcggcagcgacaaccggcggcgggagaagagggaaacggcgacgaggtcacgagaggtcgattcccggcggtgagagcatctatgcggcttcgggactcgacgctagcatcggattgggcggaactacgccgagcgaggccggcgacgagcgggtgctacggagctcgggcggcgacggcggcgagcacacggcgatcgacggcaacggtcggggcggcggagcgcccggagtccccttccgcgtcctagtgcgcaccggctcctccggcacacacgcgacggctgcggtcggcgagagggacggcaatggcgcgggcgagtggcggtcaaggcgcgagctggcgctccggctagcggcgaaaacggcgacaggagggagggaggatgacgccggcgggaggaaaaggggaaaaaggagggagagaaaaggggcttgcccttttgccgattcgggaaaagggggagggagcggggcgactcggcagaggggagaggggctctctgcctccgccccttggaggctagcgcgcggagtggcgggggccgggcgatgacgacggcgatgacggcggggcggtttggagtggcgcgacgacacgggcgacagacgcgtgcagaggctgacggcggcggcgaccgggcggtcggccactcggcacgcgcgcgcggcttgcaacgggcggcgtccgcgcgggtggcttacgcaggcacgacagagcgaggagaggggaagggggcgctcggcgcggctctgcgcgcacgcgcgcgcggcgcgcgggcgaggcggagcggagctgagcggggggggagggagagcggagcgcgccgggaaggggagagggccgggggagagggggagagagagagagagagagagagagagcccgggagagagagggccggggaagagatgggccgagcggaattcggcccatcgaactcgggggaggcaaac

SEQ ID NO: 84736 - DNA, 1443 bp, Oryza sativa
  Clone ID: PAT_MRT4530_83944C.1
atggtcatgtcgtcagcagacagccatgttcccacgtcgcgcctgcttccggtggaagtggaggtagatgtgggcttttctcatgctttggatgaccgtgctccaacaagtgggcaagagaaatgcctatatctcgatgctcaagctactaatgctttattttgtgttttgagtgatgacatgtttaatgaagtatgcaatctcaagagtgcacatgctatgtgggtaaagcttaaagaaaaatatgaagtgtccacacttgttgagaatggttgcacacaagaatggatgtcaggtgaagactccacctcctcaagtgataatgaggagctcccaacaccatccacatcacctcattgcttaatgacaaatggtaagaatgaggtaaacaatgattctctcgatagtactattgaaaatacttgtgttgttgatgatgatggtgatgatgatgaaccttcatatgatgatctttttgacatgcttagggaggctagtaaatacattgccaaagagaagaagaaaaatcaaattttagagaaaactcttctctctttgaaagactcaaatgtggagctaataaattcttataaggaactttgtgattcttataagaagataaaagaagcttatgagtctcttctcattggcaatgcatttagtaagctaaaggtggacataggcatcacatctagctcatgtagtacatctaaggctagtgtgtccacctcttgtgatgacttgttagatgtaccttgtagctcaaacatagatgaaaattcttgttcttcctcctctatgtatgttgttgctaaccttgtagaggaaaacaagcaatcacaagcccaagtcaaagatttaaaagaagacttggatagaagctacaaagggaagaactcacttgacgaaatcctaagcaagcaaaagagctcaaatgacaagtgtggacttagctttcatcgcaaggagaatgctaagaagacaaggcacatgcctaaatatgcaaggaagcatgcatacttaagaaaggatggaaagaaaaatgtgagtaagaaccatcctcacattacatgttttggttgtcatgagaagggacactttgcctccgtgtgcgcaaacacgaaggatgagaagtacaacttcaaattgagacaaaccggcaagaagcaagacaagaagacaagtcatagaggtcaaaacctaacttgctacaattgtcacgaaaagagacatattggtaaaaattataccataggtaatactcctaagtttactattatttttgatgattatgtgcttaggaaaaataggcaagacaatgtatttgctagatatgttggtttacctagacttgcacctagaaggaggaccatttgggtgcctcgcaatttggtaactaacattgatggacctaattttgttggggaccaaaatatgctcaaa

SEQ ID NO: 84737 - DNA, 357 bp, Oryza sativa
  Clone ID: PAT_MRT4530_83945C.1
catgagtaaattgcttgcactctcgggcgatccaggctgtcaaatgagcaactagcgaggcataagctcgatcactagctctgatctgatcttcagctagcgccggcagagctgcagaggtctccatccatggcgccggcggtcagcgcatcacatggtgacatcatgcggtccctgacgagcaagctcgactcgctgctgctgcaaccgtcacagtcgccgacgactgcgcaaccgtagtggttgctgagggggagaggacaagatcctcctactgaaaggcgatctccgacaactgctagatgactactacctactcgaggagccggccgtcagacaccgtgccaccgtcagact

SEQ ID NO: 84738 - DNA, 255 bp, Oryza sativa
  unsure (1)..(255): unsure at all n locations
  Clone ID: PAT_MRT4530_83946C.1
atttgttttctgggtantgtcctancgtttttanattgcctatttggtnccctaacgtagcctnacatcttccagttcnctgtaatattgtccagttagtncatgnggctatgcgtctgggttccctttccaanaagaggagngcnaagtttttanactttcagtgcncgtttctattgtnanttcttcttcattttgnatgtngcttgttttcaaaaaaaaanaaaaaaaaaaaaaaaaaaaaaaggggggggg

SEQ ID NO: 84739 - DNA, 1158 bp, Oryza sativa
  Clone ID: PAT_MRT4530_83947C.1
cccacgcccccccaacccctcctcccacttctcgaaccttctccgcctctcctctcttcctccccacctccgtctcctctcttccgcaccggcgaatcagcaatctagccttagtacagcttcgacagtgctgatgtcccccttagatatgatgcagcagccatggcatccgtcatgcagaagatcaaggacatcgaggacgagatggcaaggacgaagaagaacataagattgatcagataacacttgaagagctggaaatcttggataaaacttccccactactgcccaattagtgctcatcttgagtggaatctcgatggtcttctagagatgatctgggaatacctggatttggttaggatatacacaaaaccgaaaggtttaaacccagattatgaggaccctgtaatcgtatcctctaagaagaaaacagtggaagacttctgcaacagaatccacaaggacatggtgaaacaatttaaatatgcattggtgtggggttctagcgtgaagcataagcctcagagagttggcaaggaacatgagcttgaggatgaggacgttgtccagatcatcaagaaagtttaggtatattgtagtggtcacgttctgcaaacctggaaggaggtatgagctatgagaattttgagaagcagtcacttttactgcgtgttattttgctagctatgatgcccatagatgattggctgttcccatgaacgtttcaatgcaatcaaaatgtagacggacagattttccttctgtcaagttagccttgtaattgtgatctttgtctgatcttcctgttgctatatatatggtgagtcaccgatgaacacagcagttgaacacatggaaagatgctttgcttatcttcagaaagatgaaaaaaaaaaaaaaaaaaaaaaaaaaaaaaaaccggctccgccgccgccgcctgctgtcccggttcgcgctccacctcctctcgtcgtcgtcaccaccgctgccttcctcggtccgccgcgcgcgcgccgcgctcgccgaccgtgacgagcgggccccggcgtcgcctcccccgccgctcccttctctcccgttcgaccagccccgcgaccgcgtctccggcgccgcgaccgtcctcctcgccgtcgacgccgtctcctcgctcgcagc

SEQ ID NO: 84740 - DNA, 334 bp, Oryza sativa
  Clone ID: PAT_MRT4530_83948C.1
gtagggcctccctctcctggtgatggtggtggctcagttactaggaggggaggcgttgtccacaacaatgaggagacgtacttcttaaaatgctattcttaaaataaaattcccaggaaccctttctacacttattaccaccctactgcaattgaggatccccatgctactccattacacatcaacaattatgacacataccaaagtttctttaccgattctactatctttagggtggatcaatattttttcattgtcctttaccctttccaccagtgtcttcatcattccccaattttctctttagctcaaaatttaaatggacccatatact

SEQ ID NO: 84741 - DNA, 1179 bp, Oryza sativa
  Clone ID: PAT_MRT4530_83949C.1
atggcgaccgtcatgcagaagatcaaggacatcgaggacgagtggtcttttgtcaaaggctgcatactgcagatggcaaggacgcagaagaacaaggccactgcacaccatcttggtcttctgaaggctaaacttgcaaaattacgccgtgagttgctgactcctacatccaaaggtggtggtggcggtgctggcgagggatttgatgtgacaaaaagtggagatgcacgtgttggtttggtgggctttccttcagttggaaaatcaacattgttgaacaagctgacaggaacattttcagaggttgcagcctacgaattcacaactttaacatgtattcctggagttataatgtacaaaggggctaaaatccagcttttagatcttccaggaatcattgagggtgctaaagatggaaagggtagaggaaggcaggttatcagcacagcaaggacatgcaatgtcattctgattgttcttgatgccattaagccaataacccacaagcggcttattgagaaggagcttgagggatttggcattaggttgaacaagacaccccccaatttgacatttagaagaaaggacaagggtggcatcaattttacatcaactgtgacgaacacaaacttggatcttgaaacagtaaaagcaatctgcagtgagtacaggatacacaatgctgatgtctcccttagatatgatgcaacagcagatgatctcatagatgtgattgagggaagcagaatttacatgccttgcatctatgttgttaataagattgatcagataacacttgaagagctggaaatcttggataaacttccccactactgcccaattagtgctcatcttgagtggaatctcgatggtcttctagagatgatctgggaatacctggatttggttaggatatacacaaaaccgaaaggtttaaacccagattatgaggaccctgtaatcgtatcctctaagaagaaaacagtggaagacttctgcaacagaatccacaaggacatggtgaaacaatttaaatatgcattggtgtggggttctagcgtgaagcataagcctcagagagttggcaaggggatatctcctaatattaatttgggaggctttgtgcaggaacatgagcttgaggatgaggacgttgtccagatcatcaagaaagtttag

SEQ ID NO: 84742 - DNA, 958 bp, Oryza sativa
  Clone ID: PAT_MRT4530_8394C.1
gcgaaatggtcttttgtacaacaaacattaagagggagattggttttgattaattctgtgatttcaagtttaactatgtttataatatctttttttaatatttcaaaaggggttcttcaaaaaaatgattattatagatctcgtttattttggcaaggagatgattataaaaataagtatagatttacaagacaggatattatatgccaacccaaatattagatggatcctggagttcataatttggaagtttagaataaatgtcttttcagtaaattgtcatttaagctaataaatgagcaaggtgtttggatcggcttattgaaaagaaaatattttaataatcaatcaatatgtcaagttgataggaaacaaggggattcccattttttatcaggtctcatgaaagttaaaagtactttattaaacatgggttcctggataatgaataatgtttaacatgttagattttgggagcataaatggataagtaattataattttaaagacaggtacatgtctttataagctatagttcgaaggagaaattattcaatcgcaaatgttataagttcagttccgctaaatgtttctcttaggagagctttaataggttagaatctggctaattggtgtaatttgtgtgcctcaatagtgcatattcatttgtctaaagaaagtgatatatttagatggaatttttcattaaaatggtcagttctcagttcgttcaatgtacttaggtttaataaataatgattatattgagagaaataagattatctggaaacttaagaagcctctgaagattaagatgtttatttggtgcctacttaaggggtagtgttaataaaggacagtttagttaggagaaactggaatggtagtttgagatgttgtttctatatgaaaaatgagactattcaacatctttttatagagtgtcattatgcacaat

SEQ ID NO: 84743 - DNA, 284 bp, Oryza sativa
  Clone ID: PAT_MRT4530_83950C.1
gtaatatggacaaggccaccatgcttgatgattagggagaacttgaaagagcaaacgggtcactctgcgatgttaacatttagctgagttatttatttactggagtcctatttctctcttgaaccgcgaagagattccggattcgattgtttagtcttctccttcccctgtactgcggtcgtccgaatttatccacgccccgcccgctcgctcgctcgctcgctctgtgagccaacacagacatctcaccttattgcttttctagcgtttttttgctcaaattt

SEQ ID NO: 84744 - DNA, 2079 bp, Oryza sativa
  Clone ID: PAT_MRT4530_83951C.1
ttagggacgacggcgcccggcgaagagcatttccgctgccgggtcagcgagcgggtcgacgttcgcgacgagtggatcgttggctgccgccgccgccgcagcggcgtgctgctggcggcagagcttgaggtggtgctggacggcggcgagctcggcgtgcagcatctcgtactggcggcagagctcgacgacgacgcgcgccgcgccgccgacggggtcgctggcgcgcgcgttggcctcgaacgtgagcgcctgcatggcgtcggcgtggagctccggcggcgtgtcccgcagcgtcttctggatcttgctgacgccgaacaggtggtgcgcgttgaggaatcgccgctgctcgtcggcggggaagtagcgcgcgagcgggcagtccgcgttgcacttgcgccgctggtacttgcacgcggcgcacgcctggctctgccctacgccgccgccgccgccgccgcagttcctccaatctgcacgatctgccatgcttagcaacccagccaacacctcacggccaaactgagcagggaacttctcattactgtcaaccaaatgtaaaagcactgaaccttctggtagctcaacataaaacaagcttgatttgctgtcacactctgatcttaacaattccctggcgcggttagcatcaccatctggattcactacagaaaattcaaatcccagtctctgtgctgctaaatggaatatctttttaacacttgatgctttagacaatggtactggaacagcctgaaggtttgcatggcgggactgctgagaaacccactcgaagtatatagctatctttccttgtttctcaaaatacttggccagagcatccttatatctcccaagctctgcctcagcttccacgggcatctttagtgtactagagcagtgctcaactggtataactagaacatggtttggaacaagtggcccttttgcaagtgcacagtagtaaccttctccaatgctgataacaagatgtgattcaacatctggacttgacaagcagaaccagcaactgctctcaacacgtcttcgttcgattcctattgtaatgctccctggcctcctcatcatgcctataattgcatttactccctcgaggacaggatcctgatgatgtaaatttgaaacatagacgattcccaccggcttcaccatgtctttgcttcttgacatcgtaacgccagtattgcaaatcagcatcctcagcaggacgctttggagtttcttcaacaggaactgactttgctgcttctctttgtttccaacattagcaagtccaataaaacgggtaacatgtgcagcggaatcactcacatatggttcccttgcatagaatacacctttagaaccatggagggtgaagcgggcgctgcctctgagccagaagaggttggggcatatctggatgcctccgggggagaagcctcgggcgctggacgcggccttcgcgagaaggcgaggcgccgcggggccgtagtccccggtgaagtaggtcgggatgggcacggcggcgcgtccctccaggtagtccgcgacctccccgccgccgccgccatccccgtcgccggcatcgggggagaagaactgcccgacgcagagcagcgcgtggaacggccccgtcgactggttcaccgaggtgacgcgcttgaagagctggtggaggcggccgttcgcgtcgccggcgaggaggatccgcggcggcgtcggtcgagacgtcgatcggagttagtacaacagcatgtgtatagatgcccttccccagaagacgagaatcccagatcaggacggtcttaaccatgataaagagtctacaactaataataccacaagttgttttggtaacctctgttgtactgtaaatttttcccccttcagttttgtgttttgacagcaaacaactgtctaactgactggttagttcctcgtcttttcctcgatgggacaatcaccgatcctgtaaaatttcctttcttttgatgacagaatcatacactgtttctatgatatattctaaaattttgcagtcaatacaaagagataatacatcccagtttttac

SEQ ID NO: 84745 - DNA, 282 bp, Oryza sativa
  Clone ID: PAT_MRT4530_83952C.1
atggatgttgctgcgaattggaaggtggtagtgatccatgtgttgtaccatctgtgcaaggcattcaagaaaatccatgttaggcttgtcaaggagcttgagaagaagttcagtggcaaggatgtggtctttgatgcaacaaggaggattgtgaggcctctcaataagggttcagctgttcatcatcctcgtacaagaactttgattactgttcatgatggaatcttggaggatgtagtctcccagctgagattgttgggaagtatatcagatatcgcctag

SEQ ID NO: 84746 - DNA, 1089 bp, Oryza sativa
  Clone ID: PAT_MRT4530_83953C.1
atgacggcgtcttcctccaccaccaactcctcctcctccgtctccaccgccgacacctcctcctccaacccaccgccgcaacacgcgctccaccgccaacacatcgccagcagcagcgctagcagcggaggcggaggcgccgcggcgccgcttccgccgcgcgcgcccccgcgcgtaggcggcggcggcggcggcggcgtagggcagagccaggcgtgcgccgcgtgcaagtaccagcggcgcaagtgcaacgcggactgcccgctcgcgcgctacttccccgccgacgagcagcggcgattcctcaacgcgcaccacctgttcggcgtcagcaagatccagaagacgctgcgggacacgccgccggagctccacgccgacgccatgcaggcgctcacgttcgaggccaacgcgcgcgccagcgaccccgtcggcggcgcggcgcgcgtcgtcgtcgagctctgccgccagtacgagatgctgcacgccgagctcgccgccgtccagcaccacctcaagctctgccgccagcagcacgccgctgcggcggcggcggcagccaacgatccactcgtcgcgaacgtcgacccgctcgctgacccggcagcggaaatgctcttcgccggcgccgtcgtccctaaccagaacgacgacgccatggtcgacgcgttctacgccgaccaacaaaccgccggcgacggcgaccaagagcaatacctcgtcaaggacgaggcactagctgcgcaaccgccgccgcaacaaccctacgagtacttgaactacgggacggccggcgacgagggcagcagccacgcctggtacaccggcaacggcggcgacgccgacgcctcgccgccgatgggtttgagcgatcagctccagcagtgccagatcggggccgcgccgccgttcgatgtgaagcctgagctgccggcgacgatggaacacggcggtagcgtgttcgtcgaacagccggagcagaagattctgccggcggcagggtcgtcgtcgtcggcggcggcgcattgccagctggagcttgggtgctcttctaatgcttggaaagttggaacacacgttattaattaa

SEQ ID NO: 84747 - DNA, 1092 bp, Oryza sativa
  Clone ID: PAT_MRT4530_83954C.1
aaatttattcatgcaatttctcctactccagcatctaccatgtccagtgttgatattcacgcaaggcctccaaatactactttatccccatatatttctccagcaaagtcagttcctgttgaagaaactccaaagcgtcctgctgaggatgctgatttgcaatactggcgttacgatgtcaagaagcaaagacatggtgaagccggtgggaatcgtctatgtttcaaatttacatcatcaggatcctgtcctcgagggagtaaatgcaattataggcatgatgaggaggccagggagcattacaataggaatgtctgttttgatttcttaaacaaaggaaaatgtgagaagggtcctgagtgtaggtttgctcatagcctttctgatgagggtgctgttagggatacaaaaccacgtagcgaacgaagacgtgttgagagcagttgctggttctgcttgtcaagtccagatgttgaatcacatcttgttatcagcattggagaaggttactactgtgcacttgcaaaagggccacttgttccaaaccatgttctagttataccagttgagcactgctctagtacactaaagatgcccgtggaagctgaggcagagcttgggagatataaggatgctctggccaagtattttgagaaacaaggaaagatagctatatacttcgagtgggtttctcagcagtcccgccatgcaaaccttcaggctgttccagtaccattgtctaaagcatcaagtgttaaaaagatattccatttagcagcacagagactgggatttgaattttctgtagtgaatccagatggtgatgctaaccgcgccagggaattgttaagatcagagtgtgacagcaaatcaagcttgttttatgttgagctaccagaaggttcagtgcttttacatttggttgacagtaatgagaagttccctgctcagtttggccgtgaggtgttggctgggttgctaagcatggcagatcgtgcagattggaggaactgtaaggtttctaaagaagaagaaatccagatggtggatgattttaaacaagggtttcgtgagtttgatccagctgaatga

SEQ ID NO: 84748 - DNA, 965 bp, Oryza sativa
  Clone ID: PAT_MRT4530_83955C.1
taagttgatttggccaaatatagatgtacctgcttctctttgtttccaacattagcaagtccaataaaacgggtaacatgtgcagcggaatcactcacatatggttcccttgcatagaatacacctttagaacctgcaatatgatatcgtggcttaatctcagcaaccaattcagcaactacaggatcatatccatgaggatccgatatctgagaaggtgcattagaagtatcaactccattcaccactccagcaggccattcgttagtgcaatcaatccccggctcttcggcaagagcccgtagtgcatcaacatcatcctggctgtagcagccaggccctcctggccctttccttcccgacaagtaaacgacagataaaccatggagggtgaagcgggcgctgcctctgagccagaagaggttggggcatatctggatgcctccgggggagaagcctcgggcgctggacgcggccttcgcgagaaggcgaggcgccgcggggccgtagtccccggtgaagtaggtcgggatgggcacggcggcgcgtccctccaggtagtccgcgacctccccgccgccgccgccatccccgtcgccggcatcgggggagaagaactgcccgacgcagagcagcgcgtggaacggccccgtcgactggttcacctgtgccgacggcagccggtgagaggatacgacgagatgggaggggaggacgcggcggcggcggaggaggaggttaccgaggtgacgcgcttgaagagctggtggaggcggccgttcgcgtcgccggcgaggaggatccgcggcggcgtcgccggagacggcgaggcagcggcggcggccatggtggggtttgggtttttgggtgaagcgaagaggcctctggaattctggatctgcgttactaagttgggcctcaagaaacataaaaatggcatcgttcattgggaaatggccttataa

SEQ ID NO: 84749 - DNA, 520 bp, Oryza sativa
  Clone ID: PAT_MRT4530_83956C.1
actgtcattgcatagacgtgtccattgtaaaaatcttctttcgtcgatgggatgatgtgcatgcaagattgcgacagccaattttttttactttgtcaattcgggtgaaaaacctttcttgttgccggaaacaattgataagaggcactgagctttatcctaatttcttttaggcattgttcaattttattgtgtaattctaaagctttactgttagaattcaataaagggcctactgcctgcatccccatgtgaaatgtggttgcctagctctcttttggtttggagtttcttttggtctgtttcaggtatagcatttactgcaattgatcctattgtgtgcccactgcccgctatagtgtttaattgcaagttgtaactgagtgattgctgtggcagttttgtattccttgccacaattacaaattgtagatactgcacattctatctttgaggggccataaatttcttgatgcttgagatatatgaacttcaagtttgttaccgctgtataccagaa

SEQ ID NO: 84750 - DNA, 318 bp, Oryza sativa
  Clone ID: PAT_MRT4530_83957C.1
ggacgggaaaggaacccaaacaaaacgcgggccaaattttttcccttctttacaaaggggacacaaaatttgggttttacccggaactgggaaaaaaacaaaccatcccaaagaatgccgggaaaaaaaaaggccccgaaaaagtggggcgttaagaaagaaccttaagcccaccactaaaaaatcaagggaaatatccccgaaaaacaagggacagggggggaacccctccaaaacttaaaggacccctgtggcctttagcgaaaaaaaacccctaatccgcccccaaaaataggactttcggctaaaggaaaaacc

SEQ ID NO: 84751 - DNA, 306 bp, Oryza sativa
  Clone ID: PAT_MRT4530_83958C.1
atggtgggttgtgagcacatggttttgagagtcgtgcttatgacaattaaggaccggttcgcgagctactgttgtgaaacattaaccgtgccaaccacaagccagcgtgggcaacggctttaccttttgtataacatgattcattgcggagcaccccgactgaaaaagggcggagataacccccccggggtcgctggggagtccatgccttgttttataagggggggatttgaaccccgaatggggcccggggggagttgggttttcccagggattggcccacccttatcggggccttttccagaa

SEQ ID NO: 84752 - DNA, 422 bp, Oryza sativa
  Clone ID: PAT_MRT4530_83959C.1
atgaaggctgcacaacgagcacgacctctggacaccggtggaccgctcgactccaatgctccccctcgccccgcccacctggcgcaacacgacgtacgccgcccggcgcacggccgagctggtgcaccgcgccccccaaaaaaatcgcgccccacgcacggccgcacggtcgctgccgccgcgcggcctgaggccgacgcgcgccgagctcatggctgctacgtccccgcacgcaaccgcctcgcgcccccccttcctcttcttaacccccccggctgctccccactccacacctgctcgctggccagccaccggcggcctgccgtcccgggggagccgacgacggtgaccgccgacgaccccaccccggatgcctgtcttagtggtcgtcgtccgtcgacgtcggccggcccgaccgaccg

SEQ ID NO: 84753 - DNA, 272 bp, Oryza sativa
  unsure (1)..(272): unsure at all n locations
  Clone ID: PAT_MRT4530_8395C.1
aagagagccggagcgagcaaaaacgagaggcacagaagccccacccaacaacaaanaggcgnaagaagaaccacccacagcaagagcgacagagagaacaggggaaacaaacacaaaaggagggcacgggcgggggaancccaagagggggagaaaccggggccccgcgaacgcggggggggacagcagcgaaacagagagggacaannaaacaaggggacanagggcgacgacggcacaggngccacacgaagccncgaagaccgggggca

SEQ ID NO: 84754 - DNA, 399 bp, Oryza sativa
  Clone ID: PAT_MRT4530_83960C.1
atggcggatgcaactggacgagttgagccgcgggtggttgtgcgtcgttcttcagtacggcagaggaaatttgaaaaaaccaagcgtgattgggcagcagattttcctcgctcagccatagaagggctaggaggaaccctatccaaggagacggcagcaatgtcacgcagggtgacggctctcttcggggacagagcagcaagatctaaactctctggaacaaagatctcaccatcttccaacgagggaaaaggaacgctcaactggggcagggattggggaggtggggaagagctagaggagaagcgctcaaggatgggggaggagagtggtagacgagcaacaggggatctggtggccgccgtcgcacgccggcgaatgggtgggtgtcggggctga

SEQ ID NO: 84755 - DNA, 166 bp, Oryza sativa
  Clone ID: PAT_MRT4530_83961C.1
gtatgagtcatccagaacatactagaatggcagtgcgtatattacagacagcggcaatgcaagtccgctatggcaaaccagctaacaactcagacagaagtggttaccagcaacaggaaacacgtgtttgcataacaaaagttggtacttgcattcaagtgataca

SEQ ID NO: 84756 - DNA, 958 bp, Oryza sativa
  unsure (1)..(958): unsure at all n locations
  Clone ID: PAT_MRT4530_83962C.1
tgatactcctgccgcgtaaccgggganacnccgtgcgcacagtacccgngggatgtacccncgagcctacctcccncgagcctcgtgcatccgctttggtccccatattttgaagccggtcggctctggttttccggccggcgttctccatcatggtttcctccaanacggggtgcgcttttctttggccatgtgtccggcttgttcttggtttttcctcccaggtgcctccacaaaggagtctcacatggaaagggcccattggtcggtctggtggctggggcaggcngcggtgcaaacaccccctgggtgcgcttggccatggaaaggccaagggccatgccccccggattgtccntgtcaagggttgncccttgtggccatagtcttggcgataccccgaggtgagctgcctgcgtggcgtgtgctgcctgtatctgtgcacctagccgtattggcctactgtgcccgcccttgcgattgttggacttgctgttccatactggttgaacctgcgctgctattgcctgtgtgaacgatgcgtgcatatgtntgtggggacaattggctatttattgggttcttgggatgaggatgaactggactggctaatgtgaggttgatgatcatgtgctggataatgggggctgatgaccggtgaccaatgctggtggtgatgatggactgcatggtgcccgatctgcaacctgattggtgtgttgactagctgccctatgagagatgaagctggatgcctgaagggatgctaacttgcccatgaactgatttattgtttgcctgatgctgccatgatgaggatgaagctgattggtgtaagggattgatggatgagaagtagttggatcagtcttataaaagacgcataactattgttttcctatctccatagagataagctgattgtaataattaatggattcctatcaaaaaaaaaaaa

SEQ ID NO: 84757 - DNA, 2972 bp, Oryza sativa
  Clone ID: PAT_MRT4530_83963C.1
ttaatgaggttcaacgtttcaatccagttgatgctttccctggtgatgcaattatattcatgagggtcccgaatcttcttagagggctatcagcatcactaaatgttaggatagcttatctagacatcatgaggccatttgctgaatcaactttgctagggagtatgacacgtgggcccacagctaacagtcagtggatttatgactcacctgttaactcagaggtggagtctaaactgcggaaccttctgcttgagttgggaagcaacaaaattttaggaatacaagtttgtgcttataaagatggccttgtttatatacttcgactataagaagcagattaacatcttcgagggaattaagttgacagttcataagagagttaaaagggtttgctctggataaaaaaatgctttagggagaaaaacacacgagcgaaatgctcgtcgtgtactcaacttgattatagagttagaagctttatccgtgaaattgggataatagtaatcaacaagcacagatgtgcttcctgatcgattcttaactgtccaaacgcatttgtaagtctcgcagccacctagccctcatgaagaggttcttgtgcccatagagaaagaacgtgggaaacccatgaagcatctggtacgttagggaagtatgatccacgtcctgttcaacctgattctctctttccagttttctcagtgacaaagggtatcactgctggcatggtgcattggcttgttgacaaagggaagttgaagtatgaggagactgttgccaatatatggccaaaattcggaactagcaaaaaagagctaataaaggttctttaacccgatgatagatgaatggtgcaaggaggcaccaaaggaacttgatttcaaccatgaggcagagaacacaaaggctgtctccagtaatcttagtcgaaaaaccaattgcgagagtggtgctgtctctagtgctgttgacgtactgattccagaagttattcagtgcactgaggtggaatcatagaggctgcgtccggaaagaagcttcaagaggtcctagaagaggccattgttcatcctcttcacattaacggggagctatatattggcattcctccaggtgtcgaatctcgccttgcggcactgacagtcgacatggaggagctcgagaagctgtcaggattcagagcaggaccagacgtcccacaggagctgctcagcaatgtcgcccagatggccaccggcctacctgtcctcttcaacacgctcaacatccgccgcgccatcctccccgctgccaatggccactgctcggcgcgcgctctggctcgatactacgccgcgctgggggcaggcggcgccattcctccgcgggattccggtggtggttccaagccgccactcggcagccatgtccacaccccaaagtttccaaccatgcagtccacagaagaagaggaatgtcaaggcacttcaagaaaagatgaaaatgaataaaaaggaggttcaacgtttcagcaccagcgatgccttcgacgaggaggcgacgatgtccgcggtggttttcgggaacggcagtggcagcggcagcagcatgttcgtcgacggcggcgccaagatgctcgacgcgttcatgggcgtcggcgacttctccggcatgatccacccgaacggcaagttcgggctcgggttcaggaggtacggctatggcgccggcgctggcgagaaggtggcgacgacgacgttcgggcactccgggatgggcgggtcgacggggttctgcgacgtggagcacgggctggccatggccgtgacggtgaacaagatgtcgctgggcggcgtgacgcggcgcgtggtccggctggtgtgcgaggagctgggcgtgccggtgcccgacgagttctccgtcgccggcgacaagggccccgacatggtgctcaacctcgcgccgccggagtagcaccaacctgccaggccactactactgacatttcatcatacactttgatacatatacacatgtagctaggtaagagtaaactcatgatgatataacaaaatgaggggaaaaattaatgttctttccgggtatacgtattagtacaatatagtagtacaaatttatgccatttggatgtggcttcgtcatatatactccaaattatacatgtatacaagatttttgtttcactttcaggattcagagcaggaccagacgtcccacaggagctgctcagcaatgtcgcccagatggccaccggcctacctgtcctcttcaacacgctcaacatccgccgcgccatcctccccgctgccaatggccactgctcggcgcgcgctctggctcgatactacgccgcgctgggggcaggcggcgccattcctccgccgcactccggtggtggctccaagccgccactcggcagccatgtccacacccccaagttccccaccatgccgtccaagaagaagaagaagggaggttcgaagaatgatgtcggcgtcgctgacaaggacgggtacacccagctccgcaccagcgacggcagcgacgaggggtcgacggtgtcagcggtggtggccgggaacggcagtggcagcggcagcagcatgttcgtcgacggcggcaccaagatgctcgacgcgttcatgggcgtcggcgacttctccggcatgatccacccgaacggcaagttcgggctcgggttcaggaggtacggctatggcgccggcgctggcgagaaggtggcgacgacgacgttcgggcactccgggatgggcgggtcgacggggttctgcgacgtggagcacgggctggccatggccgtgacggtgaacaagatgtcgctgggcggcgtgacgcggcgcgtggtccggctggtgtgcgaggagctgggcgtgccggtgcccgacgagttctccgtcgccggcgacaagggccccgacatggtgctcaacctcgcgccgccggagtag

SEQ ID NO: 84758 - DNA, 1195 bp, Oryza sativa
  Clone ID: PAT_MRT4530_83964C.1
tctcccggccggaccgccccggccgccgcgcatcgccggaggagcccggagaggcggccggccacgggcgccgccattcccaaccaagcagttcgctcaactgcgtcatcgtgtcacatgttttaccatcctcagataacatcgtacaaccatctacttcctgtacttcttgtgctgatcttgatgtacttcttgcgctgatcttgatgagaacaactgatcctttcctgggaggtggggctttgctttgtacagacattaagttaaatggtcaaaattatcgaactatcagcacttatgcttttgcggtcaattggtcaagcatcacacctcacagatgatcctcctgatgagaaaacagatgcaacaaaggtaaaggcttggaaaattgctgatgatcgtgtgatgggattcatatttatgagcgttgatgtggctattcggataggttttaaggctcacacaagtgctaaggagatgtggaactatctcaaacagagatacactcaagaaagtggagccttacgcttctccttgttgcaaaatctgaacaacttacagcagcaacaaaatcagtccattgaagagttttacaatgtttttactcggttaaccggacaatttgaggtacagattcaaaaagttgtttaaggatgtgcacaatgcaaggcgagagagaagcatgatcaggaaaatttagtatatcagtttgccatgcgacttctccctaaatttgaacctaaacgggttcaattgcttgcgcgtagtacacttccaactatgacagaggctcttgcagatctgattgctgaggagacgcgtcttagcaccctagaaattacttccactcattcggttgctcataatgtcctggcagcaactcatcgtgttggagttcctatggggagtgtccctagattcggttacaattatttgctcttattgcaagaaggtcggtcatactttccatgattgctttcatcttcacccaaagaagttggttgattatcaagcgaggcgtgcaatcacttcacgtcctcatgtggctgctagtgttcctggtttctctgactccatagctgctagatctagtatgagtgttgttggtactatctccggtgcagccttatgtgctcctcagctcgcaatagtaggaccatcttatttgagcagtgactggtcatggccttcaccg

SEQ ID NO: 84759 - DNA, 732 bp, Oryza sativa
  Clone ID: PAT_MRT4530_83965C.1
attcctccaggtgtcgaatctcgccttgcggcactgacagtcgacatggaggagctcgagaagctgtcaggattcagagcaggaccagacgtcccacaggagctgctcagcaatgtcgcccagatggcccccggccgtcctgtcctcttcaacacgctcaacatccgccgcgccatcctccccgctgccaatggccactgctcggcgcgcgctctggctcgatactacgccgcgctgggggcaggcggcgccattcctccgccgcactccggtggtggctccaagccgccactcggcagccatgtccacacccccaagttccccaccatgccgtccaagaagaagaagagggaggttcgaagaatgatgtcggcgtcgctgacaaggacgggtacacccagctccgcaccagcgacggcagcgacgaggggtcgacggtgtcagcggtggtggccgggaacggcagtggcagcggcagcagcatgttcgtcgacggcggcaccaagatgctcgacgcgttcatgggcgtcggcgacttctccggcatgatccacccgaacggcaagttcgggctcgggttcaggaggtacggctatggcgccggcgctggcgagaaggtggcgacgaacgacgtttcgggcactccgggatggggcggtcgccgggggttcttgcgacgtggagcacgggctggccttggccgggacggtgaaccagatgtcgctgggcggc

SEQ ID NO: 84760 - DNA, 246 bp, Oryza sativa
  Clone ID: PAT_MRT4530_83966C.1
tttttgttgtgttttttttttgaaaaaggcaggtgccctctcggagacaaaagttggatacgactaaagaagggaataaacaacagagcgttctatggactacaaagggaatgtgcaacaaacattaggctattcgatggactgctacaaaatattcattgaacttaagtcgcccgcatggccaaaatgaccattaagcagactttgtcttggacagaaacaaaacgtttcccaactcctgaggga

SEQ ID NO: 84761 - DNA, 1512 bp, Oryza sativa
  Clone ID: PAT_MRT4530_83967C.1
atggaggagttgaaggcgccctcatcctccacgaagctctggaccgtcttgccgtggaggatctccacactcatgatggcgatgaggatctccacccaattccatctgccgccgccgctgacagtagcgccgggcggcaggcgggcaacagcggcgggcgggctcgcgcggcgggctgcgacgggcggcagcggcggcgggcggcagcggcgggcgggctcgcgcggcgggctgcgacgggcggcggcggcggcgggcgggctcgcgcggcgggctcgagcggccacctcgtggcgggcggcgacgggcggcggcgggcggcgacgggcggcggcgggcggcctcgactaccgcgaccttgggagcgggtgcggcaacggcgtcggtgggcggcgacggcaggcggctgcggcgacggcttcggtgggcggcgacgaccggcggcgggcggccgcagcggtgcggatctggcgccgggccacacggcggccggcgaaaaaccgcctccaccacacgtcgtctctgatgagggtgctcctccacgcgttccgcggcttctaccttcggtcgctggcccggctgcccgccggcgagctgcgcaaccgctaccaccaagtgatcgtcaaggccggtcactgctacgggcccatggacccagtctccaacatcatcctcaacactgtctggtacgacgccgcgttcccggcggcagccccgccaccagtgctcgacatgatcggcccgcacatcctcacccgcattgagagtcgatccatgtacggcctcatctccttcctgcagagccggtaccatcacctctccgagcacgagatcgtgcagtgcctggttgcctgccgcggcgacctgcccctcgccgccgacgaagccatggtgatcaaggcggggcaacagagcccgtgcgccggcttgcaagaagcctacgaggcggcggcgactgcggcgtggcaccccaaccctacggcgcaagcggcgttcctcacctcctgcaaggcgaagctgcaggaatcaccggctgccatgttgttgctgcagcagggtggagaccgcgttctctcgccggaggatgtccggtacctcgccggcgtgttgctagctgagcagaagccatctccgcaagaaatccacatggccgagtattattgctccaagcaggaagattacctttcctttgcaccttgcgagtataaatacacgcatgtcaacttcttggccacggagaagacggattgctcaccatcttccccggtgctctttttcgccgagtttgacaataagaaggctgagggtgaaccggctatcatgtgttgcaaggtggacatgccattgccatttgctgctctggagaaatttcatggtggagacaaagagtttgaggaggtgatccgtggaaaacattctctcacaaatagtcggattatttgccttaacgaatacgctgtccagcgcttgtatgcacatgacgaggatttcatgtatgttgatgtcgcgtag

SEQ ID NO: 84762 - DNA, 240 bp, Oryza sativa
  Clone ID: PAT_MRT4530_83968C.1
ccggccggacggcggggcggcggctgggctcccttgatctccctcccctgagccgcggcccggaatggacctccaggatccagccggggaccccgccgcggccgatccaccttaccatggccgagacccgacgaccaaccgacgccgtcagcgccgcctttggaggcggagggtgttgccgtcgcggaggaagacccgctgtcagatccaccccttgaggtggtggaggaggatgtggcc

SEQ ID NO: 84763 - DNA, 2575 bp, Oryza sativa
  Clone ID: PAT_MRT4530_83969C.1
atgttggacctcctcctcgcgtaagtcgaggacgaccgaggcggcggtggtgcgagcttctggatccggtcacttccgcagccccggccaagaattagcgggaaagatacagtttaccgtcccttgagcatggagctctgcacctcttctgtatcaggttcggtacaatggtctcgtatatcagcatttgactatcgaactcggtcccatggatacgcgagttcaagttgctgggtttctcaaaggaggagaaaaacatccttttatgtcatgaatgctgcgtcgactggtgctctgccccctacaaagaagctaatcccacgaactaatgtcagaaacatatccggtgataagcccagcagtgcactggagcaacttgatatagaacgtggcgtctgtatccctttccggaagtacactccagagatggtcagaaatagagtcttgggatcaagaggttctgtgctgtccctcgctagtcgaggcgtggagataatttggaaacttggcctttactggtcagctctaatgtatgacttcttggttgggcgagatgaagggaaacttggcctttactggtcagctctaatgtatgacttcttggttgggcgagatgaagagattgttccattccgtgcccgccagctccgcaatcttctgtgtgatttgggcccttcattcattaaagcaggacaggttttagccaacaggcctgatattattcgagaggattatatgaatgaactctgtatcttgcaagatgatgttcctccatttcctaaccaggtagctttttccataattgaggaggaacttggacagccattagagagattgttcagcagaatctcatcacggacaatagcagctgcaagcttaggccaagtttaccgtgctacacttagagaaactggcgaggatgttgctattaaggttcagaggccaggaattgagcccatcatatatcgagatcttttcctgttccgaactctcgcatcctttttgaatggaattagccttcaaaaactaggctgcaatgcagagcttattgtggatgaattcggtgaaaaacttttggaagaacttgattacacccttgaagctacaaacatcgaggacttcttggaaaatttcaaggatgatccaactgtcaagatccctcaagtatataagcagtattcaggttctcgtgttttagtaatggaatggatagatggaatcagatgcactgacccacaggctataaaagaagcaggtattgatgtggagggctttctcacagttggagtaagtgctgcattgcgtcagttgcttgaatttggccttttccatggagatccacatcctggaaatatctttgcgatgcgtgatggtcgtattgcttatgttgactttggcaatgtggctgtcctaagtcagcaaaacaaacaaatcctaatcgatgctgttgttcatgctgtaaatgaagactatgctgaaatggcaaatgacttcacaaggcttggctttcttgctagtggaacagatgtgtccccaattgtcccagctctggaagctatttggcaaaactcagccgggaaaggcttagcagacttcaatttccggagtgtaaccgggaagtttaatcagcttgtgtacaattaccccatccgcatcccagaaaggttttctttggttattcgttcattgttgacacaagaagggatttgcttcactctgcagcctgattttaagtttcttgaggttgcatatccatatgtagcaaagcgtctcttgacagatccaaaccctgctctccgtgaacggctgatacaggtattattcaaagatggtctgttccaatggaaacggctagaaaaccttatagttcttgccaaggaaaacgtgtccaagatgagcagcaatcctgcactaaaaaagaatagctcgcaaattgagagaaatcgacaaatggagaagaaattagatctcaccgacacaataaaagacggagcacgtttgttccttatcgacgctggcatcaggagacaacttattatggctttcacggaggactccaagttgcatgtagaagagcttgttgatgtgtacagactggtcgaagatcaaatcgacattccatcagttgctctcgaggttatccaagatttaccatccgtcgcgcgcgatttcatgctttcttggagcgattccatcctgtcagatcggcaatactgatctcaggttaacagtttagagcagcaagcagaagtgctgtcaagacctgcaggagccattcttccttcagttaacctacactaaaatagatagatatagatgactacatttttcctctttgctgtacacaatttggtttgctattcttttctatagtatatcattgtataggaaacttgccatctgcatttcatttatatattttcgatggctctgtatatgccgtttgtatagcggaagaaaaggaacttgtatatagaatgagcttgtattgtgggagaaagtagctatatgtgtacatcgaggaaacttacattataagatcagatcatatgttttgcaaaaaaaaaaaaaaaaa

SEQ ID NO: 84764 - DNA, 1389 bp, Oryza sativa
  Clone ID: PAT_MRT4530_8396C.1
cggaattcccgggtcgacccacgcgtccgcaattacaagagaagaagaagggaagggaatcctcctcctcttcaataaaaaggaaggaagggcagagtgcagagagaaaggagatcccctgatccctcttcctcgccggcggcaatcgctcgccggagtcaaggtaggatgatggcggcggcggggctggagtcggcgtgggagtacctcatcacgcatttcagcgagttccagctggcctccatcggcaccttcctcctccacgagagcgtcttcttcctctccggcctcccctctctcctcttcgagcgcctcggcctcttctccaagtacaagatccagaagaagagcaatacacccgattaccagaacagatgtgtagtgcgtctcgttctctaccatgtctgcgtcaatctccctctcaccattttatcatatcgcaccttcaaattcatgggcttgaggagcacccttccgctgcctcactggacagttgtcgtctcccaagtgctcttcttttttgtgcttgaggatttcatattctactgggggcatagggcactgcataccaaatggctgtaccagcatgttcacagcgtccaccatgaatatgccacaccctttggcctaacatctgaatatgctcaccctgctgagattctattcttgggctttgctaccgtggccggccctgcccttactggccctcacctcttcactctctgggtgtggatggtcttgagggtcttggagacagttgaggctcacagtggctaccacttcccatggagcccgtccaatttcttgccattgtatggcggcgctgaattccatgactatcatcaccgtgttctctacaccaagtctgggaattactcgtcgaccttcatctacatggactggctgtttgggactgataaagattaccgcaagacaaaggccctagaggagaaagaaaggacgaagcatctgtaaattcaaaacggcaggcaggcgttttaaccactgctaccttgattagggcacatgtgtatgtatgcggtgctcctcctgttattagttttcttcatgctgtaattctccattgtaattttggactgcagagttgggggtagaggtgtcctgcgattaatttgaagcaaaataaaaggttaagttttgctgaggatcgatgtttgtttgcactggtgttgctcagatcgggatatgacgactttgtgtcttgtttgttgggatgttagaaatgcaaaattattactgtatatatgggccctggctggagtgtttcaggatgtcccaaattgtaaacggcctggacctgcctggcccatctaaaacggggcctttcgcttcttcattgcagtatccatctatcactcacttggtttt

SEQ ID NO: 84765 - DNA, 699 bp, Oryza sativa
  Clone ID: PAT_MRT4530_83970C.1
gttctggaatccttctatttaccattcttgggagcacgattaacttcttattcttattagataatattttgtacagagacgcaagcggcacagcgtccttatcggcacgctgtttcgcacacctgccacgactaatacaaacacttatactgctgctaaatccctgaaccgtatagcaccaagatgggtcagaatcttgtttatggtatatggcaggttcactttcaccacgcagaactaggatggcgactggcgaggtaggcgtacactgttgcagagctgctgttgtagtcaggttgtgaaattgcggacctccaaacaaccgtatcaattggtcgcgtaccaacgcgaccaaagtctagcaatgtcccattctcctttttttttcttctttgctgtacagaattccgatttcaagccaattccccgtccacctacacacctttttgcggcaaaaacaggtcgattagagcttccttgggtaaaatagcgcgaatccaccatagcaagctcacgactcgagaaccccgttgccttcctgcagcatccgatcccctatcttcgagctcaaagcaggatatgtgaagactatgagctgcttgtcagctgtcgaaacaagagattagtgttatctttctgtaacgcaattgctgtaacgttctgtccttccccaattttagcatatgaattatctcaagt

SEQ ID NO: 84766 - DNA, 436 bp, Oryza sativa
  Clone ID: PAT_MRT4530_83971C.1
ttttgttttttttttttttttttttttttttttgacacaaaaatgcttgatgcttttatagttttatatgcagtttctgcacaactgagttgcaagtaacaaccaacttttccccacgaaaactaattgacaatcccaacctcgcgtgtaacgtaacgacagagattatttagctacctgctctttatcgccactcgctatttactactagtacaagttctaccactaacaaacacgggcactggggatgattggcccgcgacaccttaccgggctgggatcccgccgttgctggcgacggacaccctttcgcccgagtagtcgccgaagcttttgtctgccttcgacagcgtgtacgccacgtccaccatgctggggcgctttgccgcccacgcgttcgcggacccgtgggcggacccgtgggcggacccctggg

SEQ ID NO: 84767 - DNA, 724 bp, Oryza sativa
  unsure (1)..(724): unsure at all n locations
  Clone ID: PAT_MRT4530_83972C.1
tttttttttttttttttttacgtgctaccaaacttcataccattaggtaaggcatcagagcatctgtatatacaaatacattaaactcaacctcactcgcattcacatcaaccaaaggtgacatttcaacctcactcacaaagccacaagacagaaacatcaatacacacaagaaaggcatataaacatctgcctattttgtccttctattttttttgccccttcaatcttgatgccattgaaatcatgctgttctatacagaggtaatggccgagtaaacggcaaaatcacagaaaattcatagctgccatcatccttgctctgttcttcaagaaccctagagcttcagcttcatcagagctgggtgacggtgcgaatccaccaatatggaccatagaacatgcacatcctcatcctggcaagacttgacatccttgtacagaatgtgcattcccctccggtttcgacgtgcggaatgcgcacgaacccagagcttcctcagaggggagaagagggagtggagccaccccatgaggaagccctgctgagacctccggctatggcctcatagagaggaggtgaaaggaggaatggagcaagctatgcggacgcgtgggtcggcctaatagtgagtcgnattacgggnggtnaatgggcgtcgttttacaanggtcggtgactngggaaaacctgggcgttacccaactttaatcggcttggaaa

SEQ ID NO: 84768 - DNA, 530 bp, Oryza sativa
  unsure (1)..(530): unsure at all n locations
  Clone ID: PAT_MRT4530_83973C.1
gtttgtttttttttttttttttttttttttttttttttcttttttttttttttttaatttaatgattttatttatatttattgacattgaagaggaaactgaaacgcaagatgaggcaaggactgatttttaaacattaaaaacgggggggggggggggggctataattccataccggtccctgcaggaaaaccaggccaccctatagtgaggcgaaaaaaaagatgggccaaaccacggacagaggagggccctgtgctaaatgaaaatgcgaacacagcccgggcaacacacgagacgtacccgcaacgtccaaagccaggcccgcctatcgagagaggggagccaaaataaatgcgtggcgctgacggcacagtccgcagtcggggaagaaaacgtgccggccccnctaacgaaaagaaaaacccaccgggagaggagaggagaaaagcggggggcgcggcgggggggctctcccccaaaaaaaggggaaagggaagagcgcccttccccgccgggcccagcccggg

SEQ ID NO: 84769 - DNA, 344 bp, Oryza sativa
  Clone ID: PAT_MRT4530_83974C.1
gctggcgctacgaaaagctgagcttgttcaccaaaggcctcaagaccatcgtgaagcatggcctcgacaccggcggcaaaaagggcggcatggacctgaacaagaaatagatcaaatcatgatgatgatgatgcatacatacataggttttatcatcaatagccagcatgtgctgaatataccagagctagtatgtgagacagtattaaaggcatgcatgtcgatgatggagtttattgctaagaactacagtatgcatacataggcggcggtggacggcttcgtttccttaaatttccttgtatacaacggtggttatggaagtgcggatcgaattgttcgct

SEQ ID NO: 84770 - DNA, 1749 bp, Oryza sativa
  Clone ID: PAT_MRT4530_83975C.1
atgagtcctcgggtcagaatgtcggtggcgcggtggctgccaagcagcccagcgcacggcaagaccaagagccggcgctcgtcgtcggccgtgcgcccgacgctgctggtgatcgcggtgaccgtgattgccgtgctgctcgtcgccgtcgtcttcggcggcgccggccggtggacgctctccggcggcggggacaccagctgggtctccgccggagcccgcgtcgtcatcaacgccgtgtccggccaacaacgcgacggcgacgatcccgtcgcggcggcggtggagccgcggaacgacaggctcctgggtggcctcctctcgccggacttcgacgacagctcctgcctcagccgctaccgcgccgggctctaccgccggcagtccccccacgctgtctcgccgcacctggtcgcctcactccgacgctacgagtccatccaccgccgctgcggccccggcacctccgcctacgagcgcgccgtggagcgcctccgctccccgccgccgtcgaacacctccgacgccgagtgcaggtacctcgtgtggacgccgctcgaggggctcggcaaccgcatgctcacgctcacgtcggctttcctctatgcgctcctcaccgaccgcgtcctcctcttccaccaccccgccggcgaaggcctcagggacctcttctgcgagccgttcccgggctccacgtggacgctcccggagggggacttcccgttctccggcatgcagggcttcaacgcgcgcacccgcgagagcctcgggaacgcgctgcggcgcggcgagggcgccgccaaggaccacccgccgccgccgccgccgtggatgtacgtgcacctgcggcacgactacaaccgcaacgccaacgacccgcgcttcttctgcgacgacgggcaggacgcgctgcggcgcgtcggctgggtggtgctcctctccgacaactacttcgtgcccgggctgttcctggtcccgcggttcgagcgcgcgctgtcgcggatgctgccgcgccgcgacgccgcgttccaccacctcggccgctacctgctccacccgagcaacacggtgtgggggatggtggcgcggtaccacgcctcgtacatggcctgcgccaacgagcgcgtcggcatccaggtgcgctccttctactgggcgcgcatctccaccgacgagctctacggccagatcatgtcgtgcgcgcacggcgagaacatcctcccccgcgtgacgcagcaggggcccaacttcaccgccgccggagaccagccgcagccggcggcgcggccggggaggcgcaaggcggtgctcgtggtgtcgctgcacggcgcctactccgagaggatcaaggacctgtactacgagcacggcgcggcgggcggggagtccgtgagcgtgttccagccgacgcacctggaccggcagcgctccggcgagcagctgcacaaccagaaggcgctcgccgagatgatgctgctgagcttctccgacgtggtggtcacgtccgccgcctcgacgttcgggtacgtcggccacgggctcgccgggctgaggccgtgggtgctcatgagccccctcgacaagaaggtgcctgacccgccgtgccggctggccgccaccatcgagccgtgcttccataacccaccaaactacgactgccggacgagggccaaaggcgacaccggcaagattgtccggcacatccggcactgcgaggacttcgagaatggcgttcagttagtggactga

SEQ ID NO: 84771 - DNA, 1051 bp, Oryza sativa
  Clone ID: PAT_MRT4530_83976C.1
gcggcacgaggctccccctttgctttccacgactctctttcgccgcagtctctgcttccgtgcatccatcggcgttcggcgactcggtgtatagtagtattgccaactgtgcgtagcaagctcgatacagcggcgatcatggggttccctctggtgtgctactgcatggcgatccccaagccgctcatcgccttggccaagctcctcgccgccatcagggaggccctccagctgatgctcttcgtcgtcgggatctgccaccacccggagcgatcgggccgcccggctgccgtcgacgccccgctgcccgacgaggtgaaggaccgcctcccgcccctcgagttcgcccagctgctcgcggcctcggagcacggctgtcatggctgcgacgacgacgaggcggtggcggggtgcatcgtgtgcctggagaggctggaggcggatgacgtggtgcggcggctgggcaactgcgcgcacgcgttccaccgcggctgcatcgaccggtggatcgacctcggccggttgacgtgcccgctgtgccgctccaccctgctgccgcgcgcgcgccccgccgccggcccgcgcgggcgactgggccgcctcgccacccgcctcacgggcgtcgtttggtgaatcaatatttggcccgcgcgaccgcgacgcgacacgggatcggttgggtgggagggcagtcgcgccatttcacagcctaagctagcttactgctgctgttaatcaacggagacaaagctctctttccctttcgtttcctttttctttttctgccgaggattatccagctggaggagagtggtacgtgtcggaatgcggtggaatatatcgatgattagacggtaggaacaattaattagaagcaggcaagcagctggttggttggcccggcctggcacctggcatgatcattgggaggttcatgtaattactgcgatgattagatactgcatgtaagtaaatcatgtcatagagataatacacctgtgtacagtggtataatgataaacggttcatttggtaaaaaaaaaaaaaaaaa

SEQ ID NO: 84772 - DNA, 352 bp, Oryza sativa
  unsure (1)..(352): unsure at all n locations
  Clone ID: PAT_MRT4530_83977C.1
ttttctctctacttctctctcaatctagaganagaaaatttataggagaggagggaggataacaaatctgctgtttgtagcagtataccattagatgcatagggagcatggagccaaacagaaaggctgtttcgccattaatggctctcccactcacctctctctctagaaacacatagccaagatcatcatcatcagcaaccatattagtgaattaagaggaaatcaaatcagtatcattccatgaacagcattatcaaatcagtaagagaggggagtttgcaagtggggctagtgttcaaggggccattactaactagagttctatatagagctagaggtcatgcatggg

SEQ ID NO: 84773 - DNA, 951 bp, Oryza sativa
  Clone ID: PAT_MRT4530_83978C.1
tgtttttttttttttttggtgtttaagagggaagaaatggcatgaacgccagtaatcttaatgcagatctaagcattttcacatgctacagtttgttacaaaaattacttgtccatatttaagtacaaaccctgtcaaataactcgtctagctatagagagaaccgcaataatctggtgagacgagcctcaacatattggtaccaacaagtataaaaatatcaaagcacataattatttcaagcaagtagccctgggttcaaccaatctttgctaatatcatcgaggtggtcatcgaaatcaacaacttgctgccatttcttcgttgtaacatgatcggctaagaccatattggttgatggttcttttaaagtcagctgactacttccatctgatccagcctgacgccagctttttgatgaatccctagtgtatagctgaacgactggctcgcgactcttccccttgactgcctcctccagcttcttgttatcaagcaggagtacggcggcgcgggggaagttgcggaagacgtggtccccgacgcgcttggcgacgggcgggaggtcggcgtcgtcgcggcgcgcgttggcgtggtagtagccgacgaccgcgaggccctgcgcggcgaagtggtcctcgacgagcgtgagcgcgagctcgagggtggggagcagcgggaggtggtgcgggtggtgggagagcggcacggcgtcggcgatggagacgacggcggcgggggaggcggccccgtcgaggaggcggccgacgaggaggccgttgacggcggcggcggggtgcttgagggcgtgcagcgcgagcttgacgtacgccacctgcgccacctcgtacttgcactccgctcccatcgcgatccgctcctacggcgactgccgcttccgctaccgccgccgcgcctgcttccgatcggagaagagaggaagaggaaggc

SEQ ID NO: 84774 - DNA, 885 bp, Oryza sativa
  Clone ID: PAT_MRT4530_83979C.1
atgggagcggagtgcaagtacgaggtggcgcaggtggcgtacgtcaagctcgcgctgcacgccctcaagcaccccgccgccgccgtcaacggcctcctcgtcggccgcctcctcgacggggccgcctcccccgccgccgtcgtctccatcgccgacgccgtgccgctctcccaccacccgcaccacctcccgctgctccccaccctcgagctcgcgctcacgctcgtcgaggaccacttcgccgcgcagggcctcgcggtcgtcggctactaccacgccaacgcgcgccgcgacgacgccgacctcccgcccgtcgccaagcgcgtcggggaccacgtcttccgcaacttcccccgcgccgccgtactcctgcttgataacaagaagctggaggaggcagtcaaggggaagagtcgcgagccagtcgttcagaaaattcaactgccaaacattagtttgcacagtgatatctgcaaaaaggcacaccctcctggcccttgttccacaccatggcatccaggcgatgaggtccagggccttgtccagccatccaacactgaacttttaattggcaggccatatttagtacttatctcagcaatggagttctcaagctttagacagatagaggagaggaggagctctgacaatattagatctttcatgctatacactagggattcatcaaaaagctggcgtcaggctggatcagatggaagtagtcagctgactttaaaagaaccatcaaccaatatggtcttagccgatcatgttacaacgaagaaatggcagcaagttgttgatttcgatgaccacctcgatgatattagcaaatttgtagtagcatcaaccactaaagttacaaacaacagagggaaaacatag

SEQ ID NO: 84775 - DNA, 482 bp, Oryza sativa
  Clone ID: PAT_MRT4530_8397C.1
tatttcttgccattgtatggcggcgctgaattccatgactatcatcaccgtgttctctacaccaagtctgggaattactcgtcgaccttcatctacatggactggctgtttgggactgataaagattaccgcaagacaaaggccctagaggagaaagaaaggacgaagcatctgtaaattgtgagctcttatccctttgctggcgccttattcccaatgagctttcatgtgttgtagtactgatgatgagacattccgttgattgaagcaaaacggcaggcaggcgtcttaaccactgctaccttgattagggcacatgtgtatgtatgcggtgctcctcctgttattagttttcttcatgctgtaattctccattgtaattttggactgcagagttgggggtagaggtgtcctgcgattaatttgaagcaaaataaaaggttaagttttgctgtgatttcttcaaaaaaaaaaaaaacaaa

SEQ ID NO: 84776 - DNA, 327 bp, Oryza sativa
  Clone ID: PAT_MRT4530_83980C.1
atggctacggcgctatgccacgcaggagccgcgctgaggtcggcaggggcggcgggagattggcggttttcagacgcgcgtccgcgtctccgcgaggtctcggcgctgactgccgcagaaacggctaccgatgatatcctcgtggcttcacctgatgttgtcatgacatcagttgctggaaaaatgtcttggtcaactggcgagagggatgttgagggcgggcgcaatcgagaaaagagaaaaaaggaggatactgattatgcaattgcaaccggcaaagctcattacgtagtcatagttgaagagctcaattcagcggcagcataa

SEQ ID NO: 84777 - DNA, 385 bp, Oryza sativa
  Clone ID: PAT_MRT4530_83981C.1
acatagttcagacaggattcagtgagcatgacatccatctcacattcacagtgcaggcggaacaacctggggcgctcgacttgatatgctgctcaagaaatgcaccgaacaacacagtgcgtgatgtaatgacacaactcgctagccgatataggaagaaaacgctatggatatggccaaatgggatacgactgctgaatctaacatgctttctctaacatgagcagatctcttgctcaccaaaagaactgtgtatcgaggagccaggtatctcaagagcaaaccgcatacgcttgagctatacatgaacatggctgaggcaaggacgcagaaaccctatataaaaagtgaaatggcaccagatacataccacgacaaagctgct

SEQ ID NO: 84778 - DNA, 255 bp, Oryza sativa
  Clone ID: PAT_MRT4530_83982C.1
atggcgaggaccacggagctcgtcgtcttcctggccggcctgctcctctccgcggccgccgaggaagccgagacctacttgcatgttgaaattaagctagccactttgcttgccaccaggaaaagaattttcaccatccgtactaacattaagcttcaaattcttataagattgtaccaaatgcatgagcggtggataaaatcagcctacatgctcttgacacttgagacaagccttggacctgcactggagtga

SEQ ID NO: 84779 - DNA, 696 bp, Oryza sativa
  Clone ID: PAT_MRT4530_83983C.1
atgacgtcggcgatgacgtcatcatcggcggcggctcgggcgtgcatgctcgccggcgaacgacggcgcgacaacgcgaacggaggacaccaacacatagagggcgtcgtggcgaactcaccgaggggcggacgaggttggcgacggcttggcgaacccgacggcggctttcccgagcgacgacgacgaccgaagcgacggcggcgcacggctggagcgacggcggcgacggcgacgctaggctgcacggggctagggctctacgggcgacgagaggcgaaggcgagggtggcggcgggacggcggtggcgcctcggggacacgcaggcggcggcggaacggccgacgatggtagggcggcggctcaggacgcgcggcggcggcggtcgaatacagctattggaagaaattgagaactcaaacaggactaggatgggacaacacaaggcaaacagtgatggcgactgcagaacgttggaggaaattgaaatcgggaaatattatcttgtcgatgttggatatcccaatcgtccagggtacttggcaccatacaagggacaaagatatcatgtccctgaattttggagaggttcaacaccaactgctcccattgaagttggagtttggagccttaccaaacgggccctcaatcatgagtgcgggagcggctcgggcaggatgcgtggaagcttctga

SEQ ID NO: 84780 - DNA, 657 bp, Oryza sativa
  Clone ID: PAT_MRT4530_83984C.1
atggaggctgcctacctcaggtataaacagagggggagcgtgaggcttcccgaccggcagcaagcggcggtcagaccggcggcaagcggcggtcagatcggtggtggcgacaggcgcggcaggcgatcttggcggtcagaccggagattcaacaccggtcagaccgcggcatctactcggtcagactggcagatcaatctcggtcagaccgacttccgtcgatttcaaggcggcagtagcggtggcagcggcggcccggcgaagggggccgcgccctcccctccaccagatctggccgaagggggggtggtgaacctcggcgacgataccggcaagggcggtggccgggtggaggcgacaacggcggccgtgcccctccatcctcctcgatgcctccaagccgcatggcgccagatctggccacctagaggtcgggggctgctcgatccgacctacttgaggtcggggctcaccggatccggcgccgccgcgcaggcctcggccatgtcgccgtcaaccgccagccgctgcgcaggcctccgcgtggccacaccgccctccgccggccaccgccctccacgccgccacactgtcgccaaccgccgcgcaggccacccccacccccgcctggccgcctgccctcccggcacccgatag

SEQ ID NO: 84781 - DNA, 1993 bp, Oryza sativa
  Clone ID: PAT_MRT4530_83985C.1
aacgaacgaccgagatccatcggtctacgaccggtctacaacggacggcaacgatgacgtcggcgatgacgtcatcatcggcggcggctcgggcgtgcatgctcgccggcgaacgacggcgcgacaacgcgaacggaggacaccaacacatagagggcgtcgtggcgaactcaccggtgaccaaaacagcggcagacggtgatcggacgacgtcggcgacgaggaagaagcggcggcgaccttcggcttgacgacgacggcgatgctccggcgatcgacagcgatagcagaggggcggacgaggttggcgacggctgggatggctcaaaatgagtcttcaaaaggtgttaagatggcaatggattgtgctgattagaatgaccacaacactagaattgtatgtgagctttttgttgatcaagtagtaagtggtaatcgaccaaattgccatttatcaaatcctaggtacgatgaagtcattgaacaatttgccgcaatagcaagtttgaggtacactaggcttcaaattaagaataaacgggataaacttaaggtcgaatacagctattggaagaaattgagaactcaaacaggactaggatgggacaacacaaggcaaacagtgatggcgactgcagaacgttggaggaaattgaaatcggacaaacccgggtgtgcaaagttcatgaaggctagctagcaaaatgaagagctacttgagaagatgtttgaagacattcgcaatactggtgctgaccattggtctttaggacaaggcaccattccgacaaacaccactcatgcaattcatattgccgatgataatgaaattgatgaggaaactgatgaggatgaatcaactgccaagataaagagggatggtggtggatcaaagatggataaggggaaaagagcaagagtggatcccaaaagatggtacaggagatgtccaagagtaatgaactctcagcacagacattatcatccattcaatcatttgctagtgaagatggttcatcggatgaggaatatgattatgatgagtttaccatgcatttgttcgaaactgtagcatccaatctttcttcgactagaaaagctgtagagagttataacacactctacttggaaaaggctccgccaaggacatcacgcctcagtgggatggaatgggtgcaagaaacgttagccacatgaggtgaatgctataagatgcttcgtatgaatgggaacaccttcattgtattacatggtcttttggttacaagcttgaatctactatacatatgcatacaatggaggcacttgcaatttttctatacatacttggtgatggctcatcaaaccaaagagcacaaagccatttcaagcattatggtgagacaatttctaggaagtttgaagaagtattgcttgctgtggtagaattggggcgtgatatcgtgcgcccaaaagatccaaacttccctactacccatgatagaattaggagggatcatcgcatgtggccacatttcaaagattgtattggagctgttgacggtactcatatccttgcagtagttctagatgaagataaggttaggtatattggtaggtctaaattgaccactcaaaatgttatggctaattgtgatcatgacatgagatttacctatgcatctattggacaacctggatcgatgcatgacaccactgtgttatttaatgcactggaaaccgatatagctatcttcccacatcctccccaagggaaatattatcttgtcgatgttggatatcccaatcgtccagggtacttggcaccatacaagggacaaagatatcatgtccctgaattttggagaggttcaacaccaactggtgagaagaaaaattcaacttcttacactcgagtttgcgcactattattgagtgatgctttggtgtatggaagatgaagtggcgagttctcctaaatatgcctagctttccgctaccaaagcaaaagatg

SEQ ID NO: 84782 - DNA, 396 bp, Oryza sativa
  Clone ID: PAT_MRT4530_83986C.1
ccggcagcgggccgtgactgaattggcgtcgacccacgcctccttcgtgtggagggagcatagagacacgactggcgggcatggtgattactaggtgcgccagacactgactccttcattcagaccgagtcgacgacggcggtggagctcgccggagtgtactactgctcgaccaagagcgaggcgccgagtgagacagaggtgcgcctagacccgcgcccgcaattctcgagccttgagacgccaccaaggcacaacaagaaggacgtactcaggtcctgagaggacacgccggataagaaggaagcaagaaaccaggagcacttcttcaactacatagctgaaaagactgtgactacacagattgagagatacaaccatgaagcatatggtgag

SEQ ID NO: 84783 - DNA, 265 bp, Oryza sativa
  unsure (1)..(265): unsure at all n locations
  Clone ID: PAT_MRT4530_83987C.1
tnacctcgncgccgccgccgccgtcgtcgttgctccgccgnctcccgaccacgcgctgctgctnntttgcctccgcgtcgagcgnctggagcgcgagtccaagcntgcggctcggatccctcggcgggaagcagcggcgggggcatcgcggcgtggcggtgatggnggcggcggcggcagggggagnaggcttcaaggcgcgcttggcggtatcgcttccaccatccgcttnatncccnanttccccaagccaggnattatattt

SEQ ID NO: 84784 - DNA, 440 bp, Oryza sativa
  Clone ID: PAT_MRT4530_83988C.1
tttagcgtacaaatttaaggccacaaaatcttttcgagttgggtaatggagtaattatgctgagtaaaaagaagtgaatgcctctaatgctctgcttggaacaacaagatttgtatatttggtatccttatccatgaattgatggagtgaagattttcatctaccagatttcagctgttactgtcagagttcttatggccaaccagtcaatggatccacatattcaatcacagcaaatggcacatagcctaaagctctgtgcctacgtattgctcctattccttgatcatagtgattctcctgttaatgaaagcacgacacagttttgtatccgtgcttccagcagccgtcattctgtctggcctcgttcacattattgctgctccaaaatacctccagatgatacatggtcaggcggcgtctggaactgagctcacagt

SEQ ID NO: 84785 - DNA, 444 bp, Oryza sativa
  Clone ID: PAT_MRT4530_83989C.1
atggggtcaaaactatctgatcagctgcgcgggcgggcagacgacggcttcgaggtcgacgaggccgtcgagcagcgagcagcagggctcatacggcgccaccgcgccgaccttggccttaacgaggccgagcacgttggcgcacacgcgcagcttcagcgcgtcgcgtggaacgacgacgacccggtgctaggcgtcggcgtcggcgtcggcctcgacgccggcgggcagtcggagtcgcaggcgctcgccgccacggtggggcgacgcgaccgcaaggcgttcgtcttctgggacacgtaccacaactccgacgccgccaatcgggtcatcaccgacctcctctgggacggcctgccgagcgccgggagcaggggcgctgccaccacctccgacgccgccaaccgcgccgtcgtcccactccgcctgggtcgaggagcgtga

SEQ ID NO: 84786 - DNA, 270 bp, Oryza sativa
  Clone ID: PAT_MRT4530_8398C.1
aaattatcacatatatataactgatttgatcaaaggtggccgacaaaccaaatgtcgatggatacaggttagcttatcttctttacaagccaaaaagtacactcagggccatttcattacgattgttccaacttacaagtcggtagattggaaaacaaaatgcaactcattttcccaactagcatgatcagagggggcgggtcctgcgtgaacccccgtctcgaactatttcacccgaaaaccaacccatgcgcccagtccactgttgat

SEQ ID NO: 84787 - DNA, 429 bp, Oryza sativa
  Clone ID: PAT_MRT4530_83990C.1
atgacgcgctccacctgcgcgcgctcgtcgggcggccgcggcgtcgaggctgtcgaacacggcggcgtagttctgcccgacctcgacgacattgccaaggtcgccctccactccgacgccctcgacaccgtcaagtccgatggcatggcgctgttgttcgagtcgctggccgccacgggcgtgctggagccggacgacgcgctgctcaccgagatgcgcgtgcgaatcgatgaggaggtcctccaagctgtcgtcgtcccccaggccgcctttgtgtactcgaccaactgggagaatggaatcctcatcaggaagaagagacagtggcaggcagatcagagctactgccaaccaattcttcaattcaatgtcaccttcagagcttacactgggtctggtcctcagcagcaggagctgcagaaatcatga

SEQ ID NO: 84788 - DNA, 493 bp, Oryza sativa
  Clone ID: PAT_MRT4530_83991C.1
tgctcgatgatgccatggggcatgattgtatcagcctggcaaagcaagaagttgcaaccgaaatgaaattataacgcagtaatttgagatgtcagtttgatgtaaggtaatcggtatgaaacgccagtctgaagcaaggaaaacctggacaaatacatgatcacatgatgatcatacagcccgatattcttgttaagtgttgacataagacttaaaataataagcgattttgagaaatgatgtacaagaaaaggaaattctacaaagacttagaaggagaaaacaaaacatcaaccaaggccatagcttgtaaaagacagtgccaacattatcatgaacagaaaaaaaaagcatttggttaaataagtcaatgcaatagagtcaaattgtcaaatgtattattaaaattctgtgactgtattatttaacatggaaaataacatttgtaagcactcaagtttgcttgcgttatcctcccaaaaaaaaaaaaaaa

SEQ ID NO: 84789 - DNA, 201 bp, Oryza sativa
  unsure (1)..(201): unsure at all n locations
  Clone ID: PAT_MRT4530_83992C.1
tggagatacccatttttcttttaaaggtgatggagttttcctcttctctagtttcaagttgagaatgtaacgtcagtcgtatcgtacgagaagagagtgacctattactcccattgctncttccactggtgcctttgaataattacgcttggtncttgatataatttcttaaacatgaaatcgattgtttccccactnttt

SEQ ID NO: 84790 - DNA, 1113 bp, Oryza sativa
  Clone ID: PAT_MRT4530_83993C.1
atgggccccacatgtcagctggccacgtcatcaccctctccccttctctccctttctctcccctctctctctctcttctcgtttgggcaggcagctggagaggacgtcggcgactcggcgggctgctgccttcggcggggcggggtgggagaggacgagggcgtcggcggccggcgacgggcggtgcggtggcgcggcgacaccggagaaggggctctgcgaggttcaccggcctgggggacgacgacagcttggaggacctcctcatcgattcgcacgcgcatctcggtgagcagcgcgtcgtccggctccagcacgcccgtggcggccagcgactcgaacaacagcgccatgccatcggacttgacggtgtcgagggcgtcggagtggagggcgaccttggcaatgtcgtcgaggtcgggctggatcgaggccgtggtcgtcggcagggcggcccaaggggcacctgttcaaccggccgccatcggcgctggggaaggagccgccaccgcaccagaactacgccgccgtgttcgacagcctcgacgccgcggccgcccgacgagcgcgcgcaggtggagcgcgtcatggtgggcgaagagaacaagggcgtcctactccgggatggcgcgcaccggcgggagcggcacgcccggctgcagcagtgggcggcgcgcatggagatggccgggttcaccagcgtgcctccagtccgcaccgcctcggctggtgaggaggacgcagcccccgtcgccgcgcacctcgacgccggggtcacgctcctcgacccaggcggagtgggacgacggcgcggttggcggcgtcggaggtggtggcagcgcccctgctcccggcgctcggcaggccgtcccagaggaggtcggtgatgacccgattggcggcgtcggagttgtggtacgtgtcccagaagacgaacgccttgcggtcgctgcagggccgcgagttcggcaggcacaggccccccaccgtcatgcccaccgtcgccccaccgtggcggcgagcgcctgcgactccgactgcccgccggcgtcgaggccgacgccgacgccgacgcctagcaccgggtcgtcgtcgttccacgcgacgcgctga

SEQ ID NO: 84791 - DNA, 117 bp, Oryza sativa
  Clone ID: PAT_MRT4530_83994C.1
gtcgtcttcgtcctcaccaagtacccgtcctacgagagcgactggtactacctcctagccgccaattaacaccaccactacttcttggctagtacttacgccgtcgttagcctaatc

SEQ ID NO: 84792 - DNA, 246 bp, Oryza sativa
  Clone ID: PAT_MRT4530_83995C.1
cggcggagtccggcgcacaccgtgacgctcgcggggtactcccccgtgtcgacgactagacccgtcctgggagctctcccgccaccggaggcgcccccccgcatcgtttggagcatccacagctccggcactggcatctgactgtacagtttaaaatattagataatatagtggatctttcgtcgcatactgtacagctaccagcgtatctgacactgatccgagagtatctgataaaaaaaaaaa

SEQ ID NO: 84793 - DNA, 405 bp, Oryza sativa
  Clone ID: PAT_MRT4530_83996C.1
tagaggattggtgaggttggggataatggcttgaccgggtcgacgtggatcgacgcgggcaaaggagatcgggcgcaccgcttccgccgcgtggcgtgcgtgccccacccttccgcgccgctccggctcaccgcggcggaagaagagggaaatggtccaatggataagaacgcgcacgcccccgtgtccgtgcggatgagggtgtgtgtgctcgcggtgacggaagccgcggccgccccccgccctgggcccgatcggattcacgagagcaccaaacgaccgtggccttggcgctatccgccgcctgattccgcgcgtgcgctcgtggacaccggatgcgattgggttttcctcctcccgggcggctcacttcgcttcgtttcgtctcaggattccagcgaggta

SEQ ID NO: 84794 - DNA, 950 bp, Oryza sativa
  Clone ID: PAT_MRT4530_83997C.1
ggaatttgtttaatctacgttacattggcttacggaggaccaaggttaagtcactcccagactccattgaaaagttgctgaacctccacactctggacatgaagcaaacaaagatagagaagctaccacgaggaatcactaaaatcaagaagctaagacacttgtttgctgatagatgtgttgacgagaagcagtcggagttccgatactttgtaggaatgcaggcacctaaagatctatccaacctgaaagaactacaaactctggagactgttgaagccagcaaggacttagctgagcagttgaagaaactcatacaactaaaaagtgtatggattgacaacataagctctgctgattgtgataatatttttgctacactgtcaaatatgccgctactttccagtttgcttctttctgcaaggaatgagaatgagccactttcttttgaggctctcaagccaagttccacagaactccacaggttaattgtcagagggcaatgggccaagagtacattggactacccgatattccgtagccacagtacacatctcaaatatttatccctaagttggtgtcatctcggggaagatccattggggatgcttgcgtcgaacttgtcggacctcacttatctaaaactgaacaacatgcagagtgcagcaacattagttcttcgtgcaaaggcattccccaaactaaagactcttgtcttgaggcagatgcctgatgtcaagcagataaagatcatggatggcgcccttccatgcattgaatgtttgtacattgtgttgctgccgaagctggacaaggtccctcaaggcattgagtcccttaactccctgaagaagctctccctgttgaacctgcataaagacttcaaaatccaatggaatggtaatgagatgcacaagaagatgctgcatgttgcagaaatctgtgtctag

SEQ ID NO: 84795 - DNA, 666 bp, Oryza sativa
  unsure (1)..(666): unsure at all n locations
  Clone ID: PAT_MRT4530_83998C.1
gtagaagacatagtagtagnaatcctacaaaaatgaagcatcattttcgtataaagctctccttagactattagtaagcatagcaacagctatcatagcacagagatantagatagcacatatagatcaaagttataagacaatatcaactacaatcagcatctcctagctacagcaacaagtagctcagacaccatagcagtagaaatacgtaaagagcaaacaagcaataagacaatangatagggcaaaacccccccctatacatagggcaaaacccaagccctaacagataatccaaaatttagaataaaaccaaaccaaagtcatagcaaacaacagtgttaagccaacagctacagagctggtaacacaacaatctcactaccagagccataagtcacgtacaggcgattgtgcagcaactacagctgcagcaggtcggtgttgtctactttgatcagactcaagcacaagcacaagctaagctggccttaaacttgccatccatatgtggtatctatcctaactactacatagctccgaagagcatacccaccgtaggtggtgtctggtactgaatagtaatagtataatggtacaaatgttaaaaataaagtcatgcatcatcatgcgtgacaatagacacccacaaaaaaagcggtc

SEQ ID NO: 84796 - DNA, 510 bp, Oryza sativa
  Clone ID: PAT_MRT4530_83999C.1
atgatgcctcccagatcgaagagatcaaacaaagtttcagaaatcaagaagaagaagaagaaaatccatcaagaagatgattcaaggcggaaagattactactactgccaccactccccaacactaacaccaacccaaaacccaccaaaaccacctcccaaaaaaaaacaaatcaagaacacaaacagcaaacagcaaagaccaagaacaccatcaaaaccaaatccacctaaaagaaaccccccaaaaactccggaatcaaaaccagaacatgaacagaggggcaaagaacgtacgagatcgacggactcgttgagcacggcctccagattgtcacccttctcggccatctcccccctcctccgcctctgcgctgctgctagggggagagagaagagagagaccacgaagccaccagcctctccaagccggcgccttcgcctgctgcgtttgctgctgctgctgctgctgctgcccttggacggccacagcctttgctgccctatatag

SEQ ID NO: 84797 - DNA, 162 bp, Oryza sativa
  Clone ID: PAT_MRT4530_8399C.1
atggtgctcattatcatcggctatcgccgccgcggggcttccctgcccagctgctaccgcatgccgccctgctacttccacctgccgccgctcggctgcccttgccgctgcgagctgccgcagctgtgcgcctatggcacggtcccccagcagcggatttga

SEQ ID NO: 84798 - DNA, 4258 bp, Oryza sativa
  Clone ID: PAT_MRT4530_839C.1
atggggaaggtaggggagaaggtgagggcgttcgcgacgaacaggtggctggtgttcgtggcggcaatgtggctgcagtccatggccggcatcgggtacctcttcggggccatctcgccggttgtcaaggccgcgctggggtacaaccagcgccaggtggcggcgctcggcgtcgccaaggacctcggcgactgcgtcggcttcctcgccgggacgctctccgccacgctgcccgcctggcgatgctgctcgtcggcgccgcccagaacttcctcggctacggctggctctggctcatcgtcaccaggcagctgtctgcgtttctcctctccatggtactactttgcaatggccaatggattgatgtgccttcctttctttgttggaatcattggcgagatatacatcaacacagcttcacttattacatgcattcagaacttcctaaagagatgtggcccaatagtggggttcattatatggtttgcttccctgaggagtgctagtttgacgcaactgtattcagtattgcacataccttccaatgtctcacttgtcttcatgggtgcggtaagaacgtcagggggagccattggcctgatgttttggggtaggcatgttggaggtcaccgtcagttgcgaccatccgacaataacagcttgatgctcaactatgccattagtttgctcctggcttcatatctgttcggcgtcatgatcgttcaagatgttgtgccgctgagtgacaacaacctagtttttatcacggcggttcgtttcatccaggatctcttacaaattgccattccagtcgtcttgacactttcgccaaaaactgaacatccgatggaggaggctctcctggctgaaccatcaaaaggacaggcaagtacttcacaagaaaaagagccagatgtatttttaagtgaggtggaagacgagaagcctaaagaaattgattcattgcccccatctgaaagaaggaagaggattgcagaattgcaggccaggctagtgcaagctgcagcacgaggtggtgttagaatcaggaggcgaccgcaccgaggagagaacttcaccctgatgcaggcattggtcaaggctgatttttggctaatttggttatcgcttctgcttggctcgggatcagggttgacagtgatcgacaacctgggtcagatgagccaggctgttgggtacaaagacgcccatatctttgtttcattgacgagcatatggaatttccttggtcgtgtcggaggtggctacttctctgagaatattgtcagggaacgtacatacccaaggcacatagcgctggcttttgctcagatcctgatggctgctgggcatttcctctttgcaatggcttggcctggaaccatatatgtggcaaccttcctggttgggcttggatatggagctcattgggctattgtgccagctgctgtctctgaacttttcggtgtaaaacacttcggcgcaatgtacaattttctcacagtagcaaaccccacagggtcactgatcttctcaggtgtcatcgctagtaacttgtatgactatgaagctgagaagcaagcgcaccaccagagttctttgtctggacgatctcttttcgacatgagcttcctcgcagagggggcgcgcgcaacgtacgcgatcaaggcgcagaacctctgcccgtccctcgaggggatatcccagatggtgtcgacgctcgaggttcatctcgccgcggagtccaagatcgacggagagagcgactggtaccggatcttgtctctgaccgcctttgcggacgaagaggaagtgaagaagcagtacaggaagctggctctccagctgcaccccgacaagaacaagtccgttggcgcggaggaggcctttaagcttatctccgaggcgtggagtgtgctgtctgataatagcaagaaggtgttatatgatcagaagaggaaggatcattctgttgtcaatgtaaccaatggcatgtatacttatgataagaaggcaaacaagagatctcgactgctgtctcctgctttatcggtggcaaacacttcggcgcactgcacaatttagtctcacagtagcaaaccccacagggtcactgatcttctcaggtgtcatcgctagtaacttgtatgactatgaagctgagaagcaagcgcaccaccagagttctttgtctggacgatctcttttcgacatgagcttcctcgcagagggtcctctgaagtgtgaaggagctgtttgcttctttgtcagctcattgatcatgtcagcattctgcattgttggagctggccttagcctcatcgtcgttcacaggaccaagcgagtgtatgctaacctctatcgagctgtccgctgacttgaaatttccatggatagaagatggtgaatcccccttttgttgttccatgttacctgtattattgtgtacatgattcaagatacacaaagtctacctgtaaagtttcagatcatttcagagattgtattgtaagaatagctattcccaagtggaagtttacatgcactataaagtaatgatcatggggcattctttatattttccgacccggaactagcaaagcaggaaaactagtcccatactcatgtatttttttagccagaaaaaaagcaaggaaaggtatatcccagtgataacaacataaagcagaatgggggcctctctgacaaacatgtcaaagggctcaagcaatgcagctcaagaagtgttgatacccaagcacctacggttgatgaaaagaacccggaacagaggcgtgttccggtgtcaattgatgtcccagatcctgactttcatgattttgacaaggatcgcacagagcgtgcttttgatagtgatcaagtatgggctacatatgatagtgaggatggtatgcctcgtctgtatgcaatggttcagaaagttctttcaatgagacctttcagaatccgcatgagtttcctcaactccaagtccaacagtgaactggcaccaataagctgggttgcctctggttttcagaagacatgtggtgatttcagggttgggagataccagatttctgaaacagtcaacatattttcgcacaaagtcagctggactaaaggcccccgtgggattatcaggatcgttcctcagaaaggtgatacatgggctttataccgaaactggtctcctgactggaatgagttaacacctgatgatgtgatatacaagtatgagatagtagaaattattgatgatttcactgatgagcaagggctgacagtcatcccattgctgaaggttgctggtttcaaagctgtgttccataggcatatggatccgaaagaggccaggaggataccaaaggaagagcttttccgattctcacatcgggttccttctcgcctgctgactggggaagaaggcaacaatgccccaaaaggttgccacgagctggaccctgcagcaactccagtggaccttcttaaggtcattacagaagttacggaagatacagcaacacaacctgctaagtagaagagggcaactatgaacactgaagatagcttggatgtctcaactgtcaaatgcacttcactgaactcaacatttgttggtcacttaagttctagtatgtcatcttatttttggctgatgacttggacaactctaccagggcaagcagcttatgtcgcagaattctgacataattcttaggcattttctaacattttggttttactgcaatacggatatcttcctgagagtaaaagactatttggaggccagttttggcaattgacgaggcgaccaagtggtgcttgctgaggctattagtcaacggaagctaagaagcctcatgaatcgctgaaggtgctacttgtttgtcactctttaaggtacggcgctctgcatccacagctgaatttgaggggagaaccactaggcttccccatgtacccgagtttgtgtactggtttacttattaagatgttgtacttcctttaatctatagtaattcatccctataatgttgaacgtgatgattcgaaattctagttaaattctgaggaccagttcgaaatttttaatatcattatattttagtagatttttttttctattttacattcttcttttgttgcttgatctgatcgaaaatatggacatgaaatcattatgctgatggatggtgtatcaaagtataaactcgtaatattctgtggtgctgtcagtgtatgatgttttatttct

SEQ ID NO: 84799 - DNA, 244 bp, Oryza sativa
  Clone ID: PAT_MRT4530_83C.1
gccacaacctggtcacaaacacttgggttttactttggctttttaaagcattccgggaacagaaaaacataaccctctttgcttagagggcctggggaaaagaccaagaaatttatttttttttaaacacactgaggctgagtaaataaacacccctgcggtttttggaaatttggccgttgtccccggggaggggggtgatggtgcccattttcaccatggatctgccaagaacccagaaaaa

SEQ ID NO: 84800 - DNA, 1521 bp, Oryza sativa
  Clone ID: PAT_MRT4530_84000C.1
aactagaacttcgaccagaagtgcgcattggttagtcatgtgcatgtagtaggtagactctaacatatgctgctgaaatggtgaatccttttgctggcgatgatctgtaagctgaatgtttgccagatccatgcctgcttccctttcgctattttttctttttttccgtgtcagctcctccttgatgtctgctgaaaggaggtcagccgtattgaacttctgatcgaaaaccctcgcgttacgttccttccacacgagccagcaaacaagcatgaaaaacgtatcaaaggctttactgtagcgcgtctgaaaacgagtccgtgcgagttgccaccagtctgccagggatagatctagtcgcccggggatgtcaaagtgaacattgatcctatctctgagtagggaccaaactctgtttgtgtaagggcatttcaccaagagatgatggcagtcttccatatcaattgagcagagggcacaaagtgggtcatgaggccatccacgtttggcgagattatccccggttaagcagcgccctttcaccgccagccagatgaagaaacactctttcaagagttctttaattagaaattgaatagttcttttaagagttatgtttggtttgtaagatgggacgatcccaattttttgtttggttgaagggatgagagagggaagggatggacgccgtttgcaatcaccgtcaaccgatcgccggatctgccaccacagtcctccccatcgccggaggaagagcaagaggatgagccgacggcgagcaagagcaagaggaaaagccggcggcgagcaagaggaaaagccggcagcgagcaagagcaagaggaaaagtcgccgccgctccttcccatcgccggatccgccgccgtccctcgacttcctcctcgcacgccgccgccgctccttccccgcgagctcctcgtcgcaagccgccgcagcttctccccatcgccgaatccgccgccgccccatcgccagatccgccgccgcccctagacctcctcctcgcacgccgccgccgctcctcccccgcgagctcctcctcgcgagccatcgcagtccccatcgccgaatccgccgccgcccctcgacctcctcctcgcatgccgccgctgctcctccccgtcgccgaatccaccgccacagtcctccccatcgccggatcagccgccgctgccctccccaccactggatccgccgtgccatcgccgatgccccgccgccgcggtcgtcatcgccgagccccgcgtggtcaccgtcgccgagcctgccgctgtcgccgtcgcccgagccgtctgccgttgctcccgagggcgaacagcgcgagcgcggtaggaaggcgtcgtcacgccgttcgctcgtcccaggtgggacgagttcgtccgccacattttccccgatcagttggtcccggatctgagaggaatattcctctccagggaccaacccatcccactcacccctcaaccaaacacccctaaaagtgggttcgtcccatcccat

SEQ ID NO: 84801 - DNA, 305 bp, Oryza sativa
  Clone ID: PAT_MRT4530_84001C.1
cccacgcgcgcgcctcctagcaagaccagcgttcgctgcacaggagcgaggtaccatggggagggtgccggccgccccccaccccgatctgcctccggcgctccgctcctccgcgcctgcgaaagctaccaacgctaactcagcaagatgggtgccggcggcaggatgacggataacgagcgcgaggagcagcagagctggtcgggcgcgcctggcaatggcgcgatcgtgcaccggtctgcgacggacaagccgtcggtcacgctggggcacatccagaaggccataccgcctcactgcttcca

SEQ ID NO: 84802 - DNA, 658 bp, Oryza sativa
  Clone ID: PAT_MRT4530_84002C.1
aaaaaaataattaaatataggatatagagtagaaataggagaaataaaggataatataaaaaataatagtaattttataaataataaagaataataaaaaataagataaaggaagataaaagatagagaaataaataaagaaataataaaaaaaagaaaaatagaatatgaaaagatagaaaaatagaaaaagcatttccgcttaccagtaagcaatgctcttctgagttgtattgatggcctgttttgtcggattggttctgtttagtgcttttctgctatccaaacgagcgaccccccacgccgggccctccccctcacctaaaaaaataaaaaaaaaaaagaaaagaaaatataaaaaaataaaagaataaaaataataataaaaataaaataaaaataagaataaaaaaacctccaccaccggccatggaccagccggatcaccgccggcgcactccaatcgaggtggttggaaaccaaatcgcgcccaaaaccgccgcagtttctaggctcacactcgcggaggaggaggaggagaaaaagggggaggaattctggctggcgccacggcggtggtggtgttagtagagttgttggtgcgacgctgacgctgacgagcgcgcgcgagagagagagcggcgcgcccacgcgtccg

SEQ ID NO: 84803 - DNA, 425 bp, Oryza sativa
  Clone ID: PAT_MRT4530_84003C.1
gtttgtggttttttttttttttttttttttttttttttttttttttttttttttttttttttttttttttttttttttttttttttttgggggaaaaacggggaccaccccaacaaaatctcataaaaacaaaaaaaaaaaaggacggcccaagggggggggggccccccacaacaaatgccccaacaagggaacaaaattcacgagcaaaatttttcaatttcaaaggaaggcccaggaaaaaaaacccgatactgaaacaagcagctttaattttgagccccaaattttttttaacccaacaaacagctccttctctgctccaaaaaattttttgaccccacccacaaaactccatggttccaaaaattgaccaatccccccccccaatccaaggggatactttgctgaatccccctcccaaa

SEQ ID NO: 84804 - DNA, 2090 bp, Oryza sativa
  Clone ID: PAT_MRT4530_84004C.1
atggccggcgctagatctgctccaagtgtcgctgccgcccccttacccatgccgctcccgaggcccagcagcagcggatccactctccagaagctcgttggccctgccgccccttcccttgcgccgttgacgctgagagccgcgtttgtctccttccccgcgctgcttccgaggcccggcactagcggatccgccctcccaaggcctgcccgcgccggattccctcctcggtgccccctctcccatgcctctactgccgcccccttccccacgcagccaccctttccctcatcattgccattgcccagctcgacccgctttggccagccagatccactagcagggaggttgggtcgccagatccggaagccctctcttatgcgaggcggtactgggcggcggtggagagagaagggacgccggagggaggagggagaagggtgggagagaggtgtagagagaagggaggcggaaggaccgagggaagagggagagagccgaagggagtttggtgggtgttggattttaattgcgtcaaaatttattttgcagtggcgtcctttacctaccgttagcgaaaacccgatttttgctggtggacacttaagaggagtaaaacccatgagctttgggaatcttggaggaggaggaggagcaggggggagcggcaaggcggcggcgtcgtcgttcctgcagctgccgctgtccacggcggcggcggccaccgcgtactacggcacgccgctcgccttgcaccaggcggcggccgcggctggcccgtcgcagtaccacggtcacggtcacccccaccacggcggcggccaccaccacagcaagcacggcggcgccggtggtggggagatctcggcggcggaggccgagtccatcaaggccaagatcatggcgcacccccagtactccgccctcctcgcagcctacctcgactgccagaaagtcggagcgccgccggaggtgctggagaggctgaccgccacggcggcaaagctggacgcccgccctcccggccgccacgacgcgcgcgacccggagctcgaccagttcatggaggcgtactgcaacatgctggccaagtacagggaggagctgacgcggccgatcgacgaggccatggagttcctcaagagggtggagtcgcagctcgacaccatcgccggcggcgcccatggcggcggcgccggctcggcgcgcctcctcctcgccgatggtaaatctgaatgtgttggttcttctgaggatgacatggacccaagtggccgcgaaaacgagccgcctgagatcgacccgcgcgctgaggataaggagctcaagtttcagcttctgaagaagtacagtggctacttgagcagcctaaggcaagaattttccaagaaaaagaagaaaggaaagctgcctaaggaggccaggcagaagctgcttcactggtgggagctgcactacaagtggccttacccctcagagacggagaagattgcgcttgcggaatcgacaggactagatcagaagcagatcaacaactggttcatcaaccagaggaaacggcactggaagccatcggaggacatgccgttcgtcatgatggaaggttttcacccacagaatgctgctgcattgtacatggatggcccgttcatggcagatggaatgtaccgcctcggttcgtgaacctcgatctcgatcatcggcgtgtttgatgagagatccaatgccaagataaattgatcatggaatgtattcagcatgcgttgcaatgcatggacattgttatggaatttttggtttatttacctttcaccgtggattgacaaggtctcgatcatgttagtgttgatggcttatagttctccagtaatgttgttgtttttcctttcgatggcttgtaaaagtttaggtgtatcggaatttcgatcaacttgctcgtacgctggtaattaatttggtgatggtctatatgttgtatggttgtgcgtttcagattggtgttcaaagttgcctatctgaaacaattatatatatttatattgcttctcattttaaaaaaaaaaaaaaaaaaaaaaaaaaggggggcctcg

SEQ ID NO: 84805 - DNA, 2599 bp, Oryza sativa
  Clone ID: PAT_MRT4530_84005C.1
taaaatttgattccttaaaacagccccccccctcgttttcgtaatcatttaatttagcctcggtaggccttgttgtttacatctagttgtgttttttttaaaacccccccccccctcgcttttttaaagctaagtgcttgctcgtgctgctggttttcgcctcccggggttttgtcttgctctgctggatcatctcctggctgtggggcccgttcctacggctccgatctcgaccaatgagtcattccgttttttcttttgttttttttttttttttttgaaagtcaatttttctttcatttgcctctttatactcttagagtatacagaaaatatgaaaaagttatttcattggtttcttcatgcactttctcacaccagcaaccataccagccactagcttctaaataatagcttttatgctctcatgtgcatccttcaactatctatcacacacaaactactgtacatgtatcacacaccagcactgtacatgtttcaagaaatatacaaatatgtgtaacagcaatggccgctcccccagcctcccagggaacaaaaaaattgatcaggtgaagagaaataataaaagagaaacaaaacaattgaccaattcattatgtattgagagcatcgcaggtaactccataacttccactctagtatgcttttcacttttcacttggggggaaatgatcgattcttataccgaggtggcctcatctcattttcaggggcatcactcttgccgctgctgctcttgcctcttaatggctcggtttctgaattattagagatgtggttctgtcgttgtcttctttcctcttgaggaatgggttcattagagtccaacatccggaccacctggtccatccttggtctcttctcagaattcaaatcgatgcacctcagagctgtcaaaagggcacgtttgagctcctttgtcgatggtcttctctccaggtttggatcaacaacttcttcagatcgtctgtgggcaaccatcattttaagccagtcaactaggtttacctcatctgtagggcgatcatagtcaatgggatctctacctgtaatagcttccagcagaaccaccccaaaactgtagacatcactcttttcattcaaaagtccactgttagcatactcaggcgcgacatagccaaaagtacccataactcgagtagcaatatgacttttaccagcacctagcatcttggccaaaccaaagtcagatattttggcgttaaactcatcatcaatcaatatattactggccttgatatcacgatgcacaacttttggttcaattgcctcatgtaagtaagcaaggctttgagtgccttcaacacagtaccccaaaaggcgaaccaaattcttgtgtcggacatgaccaattgcttcaacttccactctgaattctctctcagcttgtcctagattgttaaggatttttttgacagccactggggtgccatttgataatctgccacggtagacaacaccatatccaccctcaccaattacattatcctttgaaaaacagttggttgcaagttccagatccctgagagtgaaccaatgaccccagccaaggtaagagaactcaggtaagcctttggtgaggaaccagaaattggccttcaagaagtgaatacggtagtgaatgctgaagagcgacctgagcgagatccagacgcaggaagaagagaaagcttgcactttggagattgcttgcttggtgcaggactgctcgaggccccccgctgcagcttctgcctgctcccactgccgactggcggaggctgcggcggcgcccgttggctggagtctctgccgacgcggccggcttccattgaaccccttaactctcttgtggcacgctaagcagcggccgtcatcttttccaagcctctccccaagctcccagaccctgcttacttggtgacctctaacctttcccccaatttgtggcctgtatgccgggaaataaagcttcaaatagtcatggatcgcatggcaggtgttctccatatgggtcgtagcttcatcttctcccaatggagtatctctctttgcattaacccaatcccggatttctttcaaaacaccaccgttgacaaaggcacttccggtatctccattgtgggtgttcttaggtactcgcaaaataacgatctcgggatgagcaacataaatgtcttggggtggcgcgtcaggtacagggccattgatggcttcaccattacggaccatgcgcgtcagccgccgcagagctccctcccaacgatgttgttccaacaaattatccaaactcagcttgtcatcctcatcttgatgtggctcaactggattttgctgatctgcagcggcttctggttgggctttcaccagttgctctaattcatcaagggcttcttgttctatcagctctgcaaccgcagcgtctatctcctgatgcacttgtatccctccgccaggcaattccaagatctcaggttgtttctcttctattatcaactgtaggatctgctggcgttcatcgttttctcctgagtatgcctctttctcgttggcggtgaagccccacaaatgagac

SEQ ID NO: 84806 - DNA, 411 bp, Oryza sativa
  Clone ID: PAT_MRT4530_84006C.1
atggagctcgacgtcgccgccacatggagtggggaggagctcgtcgcaacagcggggaggagcccgtcacggctctcccgtggccggatcggctgcccgcggcccagtagtgattatgtcgtcgtcgcagcggcctccctaccctatcgggctcccccgtcgtcgtggcggcggatccggccaccccccgtcgtggtagcggcggctccagcctcccccgtcatcgtggctacggatctggctacccacgtcgtcgcggcggcggatccagccacccctgtcatcgcagcggcagatccggcctcccccatcgacgcggcggtggtggcgatggcagccctcggcggtggtggcgatggcagcccgcggcggtggaggaaggagagagagaaggagaggaggagagactga

SEQ ID NO: 84807 - DNA, 732 bp, Oryza sativa
  Clone ID: PAT_MRT4530_84007C.1
gaaagtcaatttttctttcatttgcctctttatactcttagagtatacagaaaatatgaaaaagttatttcattggtttcttcatgcactttctcacaccagcaaccataccagccactagcttctaaataatagcttttatgctctcatgtgcatccttcaactatctatcacacacaaactactgtacatgtatcacacaccagcactgtacatgtttcaagaaatacaaatatgtgtaactgcaatggccgctcccccagcctcccagggaacaaaaaaattgatcaagtcaagagaaataataaaagagaaacaaaacaattgaccaattcattatgtattgagagcatcgcaggtaactccataacttccactctagtatgcttttcacttttcacttggggggaaatgatcgattcttataccgaggtggcctcatctcattttcaggggcatcactcttgccgctgctgctcttgcctcttaatggctcggtctctgaattattagagatgtggttctgtcgttgtcttctttcctcttgaggaatgggttcattagagtccaacatccggaccacctggtccatccttggtctcttctcagcattcaaatcgatgcacctcagagctgtcaaaagggcacgtttgagctcctttgtcgatggtcttctctccaggtttggatcaacaacttctccagatcgtctgtgggcaaccatcattttaa

SEQ ID NO: 84808 - DNA, 1353 bp, Oryza sativa
  Clone ID: PAT_MRT4530_84008C.1
caaaactgtagacatcactcttttcattcaaaagtccactgttagcatactcaggcgcgacatagccaaaagtacccataactcgagtagcaatatgacttttaccagcacctagcatcttggccaaaccaaagtcagatattttggcgttaaactcatcatcaatcaatatattactggccttgatatcacgatgcacaacttttggttcaattgcctcatgtaagtaagcaagggcctttgcagtacccaaaagaattttcatgcgcgctagccaagtgagagaactatattgggataactctccatgtaaccaactttcgagattcccattgttgacatactcatacacaagcatcctttgagtgccttcaacacagtaccccaaaaggcgaaccaaattcttgtgtcggacatgaccaattgcttcaacttccactctgaattctctctcagcttgtcctagattgttaaggatttttttgacagccactggggtgccatttgataatctgccacggtagacaacaccatatccaccctcaccaattacattatcctttgaaaaacagttggttgcaagttccagatccctgagagtgaaccaatgaccccagccaaggtaagagaactcaggtaagcctggcaacagaacagagtcgacgggagcatgcgaggaagactgttcacatgtggaaacagattgaattacatcatagttgtccacgtaatgaagaggaacaggactgttttcttctccttgtatcgtcttgtcctcttgagcaaactgattcacatctttatccactggttcaacaggttcattctgaatggcgagtagaagcccatcatgtacaacgaaatcattgggcaaaaattcctccactgccctcacttccttgatatctttggatgcagaaggtatttgggtaattggaatttccttgaatgtcctacgtgaccgtttgatccaagtttgtaaggtgaggcatacaataagtatgagaagaacaccaagtagggatgctccaacagatatcccaattacaacccaaagtttcaggccaaaaacaattgttctctcatgaagagaatctgtcagagtggagtttgatgacatcttcggatcatcaagtacctttggtgaggaaccagaaattggccttcaagaagtgaatacggtagtgaatgctgaagagcgacctgaatccagagccatggggagtggcaggcagaggagaaacctgagcgagatccagacgcaggaagaagagaaagcttgcactttgcggacgcgtggggcaggactgcaggtgaggtaggggtgataagaagacgacgcccacgcgtccg

SEQ ID NO: 84809 - DNA, 220 bp, Oryza sativa
  Clone ID: PAT_MRT4530_84009C.1
atgagtacctactttacattatgttcttgttgtacagaatatacggctagcttatctgggagatgctttggtgcaggtataatgtttccttatgcaattactctatgtcatgacgatgatattagagtagtatctggtagttttgatgtggtgtctagccccggttgtatggtcataacgggctgtcttaaggaactcggcaacacgcacctaatgtggt

SEQ ID NO: 84810 - DNA, 675 bp, Oryza sativa
  Clone ID: PAT_MRT4530_8400C.1
atggagccgggcgcccctcccccgcgccctataaacctcccccccggtcgcccttccatcccacaccaccacccccctcattccctcctttttccccccttcccctccaccgcgccgcgctgccgccttcgtgccgccgtcgtcgcgccgccctcacgccgccgcaccgccgccttcatgccgccgcgccgtgcaccgtcgtcgtgccgccgtcgccgccgccgtcgtcggcaggacccacatgtcagtgaagcacggggtggccggtctaccgtggaccgggaccacgcgggtggtccaccgccggtccacgagatcgacggcccggatcggcccgggactgatcggacggtgcagcggcgacctggctcggctcggctcggcacaaagccggccggccggccatggcaaaggcggcggcgcgcgcgcgtcgccggcgacggcaaccggcggcgggagacggcggcgcaaaggcgctggcgcacgaccggggcggcggctcgacccgacgcggctaggagggagagggaggggaaaagaggagggggatgcctcaccgagagtggccggcgcggaggaggacgacggcgaacggcgacggcgagccacaggaggacaacggcggcgggcggacgagctccgagatgccctaagagaggcaaggagagagattag

SEQ ID NO: 84811 - DNA, 333 bp, Oryza sativa
  Clone ID: PAT_MRT4530_84010C.1
atggcggcgatgcgtcgtttggctgttgcttccctgacgccgccgcggatccctcgtcttctccgtctccgacgccccgatcgaacgccctctgctttctcgacgtggactcctcatcgtcgtcctcgtccccacgccgccgatcccacgcccatctatctgccggcaattgaaaagattgagaagatgaagacggtttcttctctgaccaaggatgccttgaaggttcttcaagacgctggggacaaggccaagacgcatctcaggatcatgcacaaccagtacattgaggagtacgtactaactgtttctactttatccattacatcttga

SEQ ID NO: 84812 - DNA, 346 bp, Oryza sativa
  Clone ID: PAT_MRT4530_84011C.1
aataattctagttctttttgtgtttggctttagatatattcccaatccccaacctcccaataatgcgatctctcccagatctgttcggatcaaaggttgtgtcgatcgcaaaaaagaaaaaaaaaaaacaatttccttttggggaggttcatctgtggatcacttctttgtttcccgcgttttgttggggattcgattttcgggttaagattttttacacgatggccttgaacttggctcatagcgccgcggtggtagcgagctttgcgaacctcggtgatgcccggcgagcttcttcggtggtcgtcatgccctcctttgtcttcgtcggccacaaccagcctga

SEQ ID NO: 84813 - DNA, 2505 bp, Oryza sativa
  Clone ID: PAT_MRT4530_84012C.1
atggtgtcgtgctgcggctggaggccggcggaggtggtgtggagcccggcggaggaggccgcagccgatgcggaggagatggtggctgctgcagtggagttgaccggagcgccggctgacggagtgtccggctgcgaggatgtggacgccgagagcttctcgatgaaggaaatcaacgctttccgtgcggctgtggaggagattgcagccgccgattcggcgacattggcagcagtggtggggtcaatgccatgtcgagcgtcgggttggaaggccgcacggacggcggcagatgcggcgtcgacggcggtcacaggagtgatggacggtggtggtggttcgtcggccatcgtgaggcggcgcggcgaggagggagaagacggcgcggcggcgtggggtgcgcggcggcgcgcaggagaggagatgcgccgcggcgtgggagacgcggcggcgcgggagcagaagcggcgcggcggcggcgcaggcgggacgcggagggcgcgtcggttagctcacacatgttctaggctattggaggatctttgcttcagatggctggggctctgcatatttcttgttctccggctccattattgcaatgcattctacttgcctggcagctacatgcacacatactcccaaggtgaggaaatatgggccaaggtgaactcccttacgtccatcgagacagagatgccattcagctactacagcctgccatactgccggccccaaggcggcattaagaagagcgctgagaacctcggtgaacttctcatgggtgatcagatagacaattcaccctacaggttccgtgtgaatgttaacgagtccctctacctctgcaccacaaaagggcttaatgagaatgatgcaaagctcctcaagcagcgcacacgtgacctctaccaggttaacatgatgctggataatttgcctgtcatgcgttttactgagcagaatggtatcactgtacagtggactggctttcctgttggttacactccagctggaatctcggaagattacatcattaaccatttaaagtttaaggtgttggtccatgagtacgagggcaggaatgtggagatcattggcactggggaagaaggatctggtgtcatctcggaatttgacaagaaggggatgtctgggtatcagattgttggttttgaggttgtgccttgcagtgtgaagcgtgatgccgaggctttctccaagagtaacatgtatgacagcattgaacctgtgagctgcccaatggagcttcagaagtctcaggtgatcaggcaacaggagaggatcactttcacttatgacgttgaatttgtgaagagtgacatcaagtggccatctaggtgggatgcttatctgaagatggaggcaggtgctaaagtccactggttctccattatgaactccctaatggtgatcctgttcttggctggtattgtctttgttatattcttgagaactgtcaggagggacttgacgaggtatgaagaactcgacaaggaggcgcaggcacagatgaatgaggagctatctgggtggaagcttgttgtgggagatgtattcagagagccaacttgccctaagctgctgtgtgtcatgattggtgatggtgttcagattttgggcatggcaatagtaacaattattttctccacacttgggttcatgtctccagcatcaagaggaatgcttctcactgggatgatcattctctatcttttccttggtattgcagctggatatgtcagtgtgcggctgtggaagactattaagggcacatctgaagggtggagatcagtgtcctggttaactgcctgcttcttccctggtgtcttgttcatggtccttactgtcttaaacttcgtcttatggggaagcaagagcactggagctttacctatctcactatttttcgcccttttagctatgtggttctgcatatctgtgccgttaactcttgttggtggctttgttggtacaagatcagcgcagatagagtttcctgtccgtaccaaccagatcccgagagagatccctgcacggaaatacccatcatggcttcttgtccttggtgcaggaacactgccattcggaaccctgttcattgagctcttctttattctgtcaagcatttggcttggaaggttctactatgtgtttggctttctgctaattgtccttgtgctgcttgtcattgtctgcgctgaggtctctgttgttctgacatacatgaacctctgcgtggaggactggaggtggtggtggaaagctttctttgcctcaggatctgttgcaatctatgtgttcctctactccatcaactacttggtatttgacctcagaagcctgagcgggcctgtctctgccatgctttaccttggttactcattcctcatggcatttgcaatcatgctggccactggaaccattggatttttgacatcattctccttcgtgcactatctgttctcatccgtgaagatcgattga

SEQ ID NO: 84814 - DNA, 319 bp, Oryza sativa
  Clone ID: PAT_MRT4530_84013C.1
aaaggataaagaggggtttttttattttttgtcgaaagactggccagtccatagcaacaaaacaatgggtggcaatttatttatttagtttttttttatccgcaagccgacctaaaaggattttgccgaattataaacgttttggtagcttttgttttggattggagggaatgcccccaactcatttcctttattatgcttgagcctttgagcctttttttttgaaatgcgatttgcatttgctaaaacatcatttgggagagcacggaaaatggaactttttcctgcaatggggcttaccataaaattaggattggtc

SEQ ID NO: 84815 - DNA, 195 bp, Oryza sativa
  Clone ID: PAT_MRT4530_84014C.1
atggcattattaacgacgagtagcagcgcggttaaggcggtgaaggtgaaggaaaggaagggaaacggagacggtgtcgtctcggggatcgtgcgcgagatgggcgccgcgggtggtgacgcgtggagagggagagagagaggtggatgctcagccgttggattcttggtttgggtttggacggacggagattag

SEQ ID NO: 84816 - DNA, 505 bp, Oryza sativa
  Clone ID: PAT_MRT4530_84015C.1
ttggttgttgttttatgggatgaaaaaggaagtgctcctttactatgattaatatttcaattaaaacataagcacttagctattatgtttccctgtttacatggtgattaaacacaacactgatcacggtcacacctaatctaaactttacaacgttttcatctacatttttgtacgctttctgggcataaaaaacaagcgaaagcgaactgataggcagacacgcgcagactgaatacaccaacgctctgaagagcggaagaaaacgccagtaaaaatacatgaagcaaaccaagccgcgtaaaggcaacagaaacaaaagaaatctcgatcagaaatcaagcaacgcctttcgatcagaaacatcaagcaacgtgaatcagcaagtgctgaggacccaaatcttgcatgcttgttggcttgctgttccaaagatgtgcaaaaaatgcgaacgttgcatccttttttctatgatgatactcacacctggtgaatgtacatgcta

SEQ ID NO: 84817 - DNA, 502 bp, Oryza sativa
  Clone ID: PAT_MRT4530_84016C.1
aggcggcggggtgaggaggagcggcggcgacgacgaagtggggaggagaaggagcgacgcccgtgggagaaaaaagaagcgtttattgtcctgcaaggactagtatctacccatgggtataaatatgtacacccggggttattgtaataaatctctcgatcaatactactctcagcgcatcgccaccctctttaccgaggtttttacttatcttccagcggaatatggcacctgacgcggggctgcatcggttcagttcgatctccggtgaaggggtaagtcctacgttccactggccctggtgaatctatcggctacattagtgttgttcaaggctgcattgcttcgatctcttagatcgctctggtttggttgatatatttgtctacctaatatctcaattctatttctagttgcattgtgtttagagacgcatcgacttagttgtgactgtctcggttaggtccgatcttctgtcttagccgatatatctctacaatca

SEQ ID NO: 84818 - DNA, 200 bp, Oryza sativa
  Clone ID: PAT_MRT4530_84017C.1
acagcccacgcgtacagtttatttgatacaactacacacgtgactgaagagtgtacaagatacccatacgatcaatatgtcttgcggtggaagtggtaactgaggttcctgcgaatgcggtggaggatgacgaaagatatcacttgtcctggctgtgaagatcaccaccaccaccactactggaaccactgggctagggg

SEQ ID NO: 84819 - DNA, 1895 bp, Oryza sativa
  Clone ID: PAT_MRT4530_84018C.1
gagcggggccgtgccccgtcgtcaggttcgagatgggcgacttcgacgtcgctgaccgcgtcagcgtcgggctccacgggcggtcggacgagatgatcttcgaggccacggtgcgcgatccgagcagtgagctgtacggttcgacggtggtgctgcggcagctgatgagctttcaggcgaagcgcaggggccggcgcgcgctggaggtgctgaagaagctggctcgccgacagatgatgtaccactcttacgcgatgcaggtccatggatatgttactccaggcaatgacgtggagcaggacgatggatccttcatcctggtgcacggggttggtattcttgggaatgctgttgattttcatgacaatgatcctagaaatagcacattagcaagtaatgatgaaaggagaaaaatgatgattgcatttgacatgaggatggtgatgatagtagggttgcatcttcaagatcttctaggagataccttcgtgaaggtgctgcaagagatccgcactcagaccccgccagaaatgtttgatttatcaaaaattgtttgtgggacatacgttgatgcaaggttgatgattcttcgtggtgttaacggagtccagggtggaagcataaagagggttccaagttccaactctcaatcagaactcgagcatgcagacgaaggagatggccaagcgaaggcgcagtccactgctgtcaacctcgatgacctaaccatcggttttcggaacgacgactacgcggggctggtgatgttggagtcggacatgatgtgcgacaccatgaggcgataccacgacgtcggctttacgcttccacatacgcgatcattgcacatggaagaatttatattcacgaacaggatggtgatgatagtagggttgcatcttcaacatcttctaggagataccttcgtggtaagtggagaaaagtttctcaaatgaaaaagctgcctgctagccccccccctgtaaacattaccatgcatgatctcgaccgatcaatgagctgcagctcgactttaaatgtcagttctgcgcagaaagtggtgcaagagatccgcactcagaccccgccagaaatgtttgattgtatcaaaaattgtttgtgggacatacgttgatgcaagcttggatgattcttcgtggtgcgaccgggtcctcgttatttttcaccacatcatcattctagagctgatccgcgtgccgtcgttctgcatcgacggcggcgagcatggcagagccagagcggacggcgtggtcgtcgtcagggccgaagcaggggcgtgcgccgcgatccgggatggcctgcgcaatctgatatggaccgagcggcgcgtcctgggaaaggtcgattttgatgtggaggggaacctggggaaggtgtccagtactggcctcgctacaaatatgttccggtgggcgcgggcgacgtacatgcataggagtcggcaatgcagccagccagccatgcagtacttagtacttatggcacctatcatcgatgggccaccggaccctagcttctccgttcggctcgtgggcgtcgaggggctcgacgtcgacgccgacgcacgcctatctggcccaaggtcgtcatcgccggccgcgctaccgggcctgcggcgggggcagggacgacaccgcgctgcgcgtctcgtaccacggcatgacggcatcgtcctcgcccgggctcccgtgccgtcgttctgcatcgacggcaagctgttggagggcggcggcgcggtaggcgtggtcgtcgtcaaggccgaagcggcggcggcaaacgccaagatgcggaagggcctgcgcgatctgatatggaccgagaggcgcgttctagggaaggtcgacttcgacgtggaggggaacctcggagagcag

SEQ ID NO: 84820 - DNA, 232 bp, Oryza sativa
  Clone ID: PAT_MRT4530_84019C.1
aaggataaagagaggctgtattattttttgtcgtaagagggacccgaacttattattatttcttcagcctgccactatttatttagttatacaatatgcacttttttatttattaggattttttcgaaaaccatacttatcaatccaagctttttaggaacgttttttgtgtacccacctcaaaatttgtattgtgctttattgtctgcatctcttggattgaaaacccata

SEQ ID NO: 84821 - DNA, 636 bp, Oryza sativa
  Clone ID: PAT_MRT4530_8401C.1
gattttattcacacctatttcagaggaaattaccaaccatgcattgtgccttccaagcaaaagtttttcttcctcctatatctgtccgttagactattaccttacaaaatatcctctcttttgcattttcgctggttgataacatgtacacacttacggaagcaacagaaacatgttagagtcagtcgtccatttaagaataggtgacattaggaaagaagcacattggacaagcaatacatcttgatcatagattactcagtagaggtatctagcttgatgacctagacgaagaggactgtcttggtagccgacctgatatccacgaaccagcaagccctagtcgacgagagcgtccgccttcatgtggtccattaccaccaagatggccacaacttctaatgacagatggggacatcgacgggaagagaaacatcttcgggtgccaggagaagtatgggatagtggtgacaccgtgcattgcgagccgagcaaatgcatagggaggccagtgcaggaacgaccgaatgaggcttggaacacttgtatatctctcaacaatgagtataatccgtttcctttgaagccgcaacaaatttatagccttttcttttatttgaccagtttttaaaaaca

SEQ ID NO: 84822 - DNA, 1319 bp, Oryza sativa
  Clone ID: PAT_MRT4530_84020C.1
tgttcatgtaagcccaatagacaaacatgttaaagttggtattcttgggaatgctgttgattttcatgacaatgatcctagaaatagcacattagcaagtaatgatgaaaggagaaaaatgatgattgcatttgacatgagatgtgttggctttatcatggcaaagatggttctgagagagctaatggattcttctactttcctaaaattcaagtcattcttgacaaagggagatgacccagcatgtctgcgtgagttccttttacctattctgtgccgaaattctccatccgggaatattggtctgcagatgcttgatcgacaatggggtgctggttggaatcttttggcgttattgctggcaacaaaacctgacaaaaggataagtttcttggatgcatgtcatcaccccttcctttgtggaccttaatatcttttgtatttcctattttgtttgttgcaggatagatatggttcttattgtcagtccattttcagaacatatattttcttattcttttcaagttcatgttcttctcttccaaaacataatatatttgggggggggggggttttattcactcagaactggcttaacatcctacctgccacgcggcgtctcttatactgtactggaaggcacatcggtctaacacttcgtcagccttctccgagaatcctcatcactgatgtgtttctcacatttgcacaaacttcagactccattgatcctgtgttctctctgacctcagacattggtttcaaaattatggcagaatctgattggcctcatgacaaatctggtagcgaagcaacattatctgttacctcatctgcgaggatagcaactggaagaatttatattcacgaacaggatggtgatgatagtagggttgcatcttcaagatcttctaggagataccttcgtggtaagtggagaaaagtttcaaaaatgaaagagctgcctgctagcctccccacagtaaacattaccatggatgaactcgacgtatcaatgagctgcagctcgactttaaatgtcagttctgcgcagaaggtgctgcaagagatccgcactcagaccccgccagaaatgtttgatttatcaaaaattgtttgtgggacatacgttgatgcaaggttgatgattcttcgtggtgttaacgggtccgcgttatttttcaccagatcaaattctagagctgattcctgacgataatcagtgaagcttgtaaccaatattctttgggtgtacattctttgtatttctagctgtacattattcataactagcaaatgtaaataatagagtgtaagct

SEQ ID NO: 84823 - DNA, 350 bp, Oryza sativa
  Clone ID: PAT_MRT4530_84021C.1
ccggccgggacaaaaagcattcagttcattagatcctacaacaacatggtatccataaatcgccccatagttttcttcacagaccggatccctgccctcgaggagagggcagcgagaggcgaagggcaacatgggctctctgccctctttcgcggccgtctcgccgtatatgtccctcctcgccctgggccactgcgacgtcggcgacttcaacgcccccgacgccgacgtcgactctcacgcagcggcgtggacttgaactccagcgacgccagcgtctactgggagcccgtgcaccaatgccaccgccacctagtacggcgcagcccaacggtgacgcacccgactac

SEQ ID NO: 84824 - DNA, 201 bp, Oryza sativa
  Clone ID: PAT_MRT4530_84022C.1
ctatctaactgttgtcgatatggcggtctgtagttctgactcgtagtcgacaacagggtagtcttcctcctcgaatccgtgcccggtgagatcagagataacgttttcgtctctcgtgaacgttctcggtgagttcagagataacgttagacttcctttatcagcctcgtgcgggcacctaaagggtatgtctgagtccat

SEQ ID NO: 84825 - DNA, 1507 bp, Oryza sativa
  unsure (1)..(1507): unsure at all n locations
  Clone ID: PAT_MRT4530_84023C.1
atggcatctattccactggtggtagtacagctgctgctcctgctgcttccacttcccctccgagagcacctctggtcaggccaacaccggcgaaacgacgtcgatgccggcgagctccacccgatcgtcgtgttgcccggggtggcatgcagcgacctggaggcgcggctcacggaggcgtaccggccgtcggcggcgaggtgcggcgcgatgaaggggaaggggtggttcccgctgtggaagaacagctccgacctctcgacgcaccgctacaacgagtgcttcctggagcagatgagcctcatctacgaccccgtcgcgaacgactaccggaacttccccggcgtcgagacccgcgtgccctacttcggtctcgtcaaaggctaccatcagaaatggccttttgacaagccatggtgccttacaccgcttatacgagccctggaagagatgggataccgtgacggggacaacatgcacggagctccttacgatttccgtcatgttcctccagtccctggccaggaatcccaagtctactcgcgctactacgaggagttcatggagctcgtggaggccacaagcaagaggcatcgcaagaagaaggtgatcattctcgggcacagccacggaggatgcgtcgcccttgagttcgtcaggaacaccccgttggcgtggagaaaggagtacatcaagcacctcttcctggtcacgcctacgctctccgccgggctgctcgacccggtggagaaccttgccaccgggccgcacaacctgttctacgtgccagacgcgacggagctgtcgctgcggccaatgtggaggagcttcgagaccagcatcgccaacctcccgtccccggccgtgttcgggcgcgagccgatcgtggtcaccgagcggaggaactactccgcgtacgatatggaagatctccttgccgccgtcggtttcggtgacgggatcgagcctttcaggagacgaatggttgtgaggatgaactacctcgaggcgcccatggtgccgttgacgtatatcaatggagtggggaagaggacgccacggcaattggtgtactgggacggtaactttgacaaggctccggaaaaagtgtatggtgatggagatgggatagttaatctggttaccatgttagcgttcgacgaggagatgcgtcggcagccaggacagagggggcaattcaagtcaatcaaggtcgagaacgcttcccatatgggaattcttatggatgaatgggcgctaaagagggtcatgcaagagattcttgaagtgaatcaggattcttcgtaggctattgtgcttataaaacttctgtttgaattgatttacaacgtatgtacaccggtggttccctaaattgggattctctagtattcttttgtngaatcggggtatgtatagggaagaaagattgatatatgtatcatccataccatttgnacacatgaaaaatgttgcatatttcccattgtaaaaaaaaaaaaaaaaa

SEQ ID NO: 84826 - DNA, 175 bp, Oryza sativa
  Clone ID: PAT_MRT4530_84024C.1
ggactctccctggagcggggcattaaaccccgggggtgtggcggttacccccagtgggaccgatacccttgtcagcgccctagggcccggttctttgggttccttcccttcctttcttgccaagtttgccggctttccccgggaagctgtaaatccgggggttcctttagggtta

SEQ ID NO: 84827 - DNA, 294 bp, Oryza sativa
  Clone ID: PAT_MRT4530_84025C.1
atggggtatttggatatgttgaatggctttggtattggtttggggtactggggtagttcagatgaatttgatgttgggttgggttacttgggtagctcgagtgaatttgatcttgataaggggtacttgggtagcttgtcgattgggcttgatgttggtatggggtgcttggatggtttgattggatttgttgatgttggtatggggcccttggtgtctgcacaccacttccatatggactgtccatttgtcggtgataacctggtgacagagatggcattgtcccagcaatag

SEQ ID NO: 84828 - DNA, 271 bp, Oryza sativa
  Clone ID: PAT_MRT4530_84026C.1
atgaaagccagaaaccccaaaactatccaagaccaaatcgaccaggccgcctgtggcacgtcccgcaagctctaccgcatcaacggcgctgagttcctgttgcaagtcacgcccaagggggtgaagtcctggtgttatcgctacaccctgaacaacaagacccgcgtcatgggacttggccccgtgcatcgaatcagcttcgacgaagccaccaagcgggcacgcaaaattcgcgtgctgctggatgacggcattgacccgctagccgagc

SEQ ID NO: 84829 - DNA, 2283 bp, Oryza sativa
  Clone ID: PAT_MRT4530_84027C.1
atggcctcgccggagcgggaggaggaggaggccgcgcgatcgcctccgccgaagcgcccccgccgcgacggtgacgccccgccggaaccccagcctgcccgcgtgggcctcaacccggcggactgcgacctcggtacgcacggttcttcctttgcaggttgcaatcgatcacgcgctctgctcaccactccctcttccgttgctgtgtggcggccagatttcgacgtcggcggcggcgggctccggggggaggcgctgcatgatggcgggttcgcctactgctggtcgggcgcgcgcgccacggtgggcgtgaggggtggcgggaagtactgcttcgggtgcaaggtcgtcgccgagcaggccgtggagatggaggacacggccgcggaccagcagcacctctgccgcgtcggggtctcgaggggcggcgaccccgtgggggccctcggggagaccggccacagcttcgggtttgggggcacggggaaattctcccaccagggcaagtttgtggagtatggcgtcaagtttggggttggggatacggttgtctgcgccgtggaccttgattccaagccgttggcgtcgatcgggttctccaggaatggggagtggcttggcattgccaagcacttcgatgcaagtgacaaagggctgggtttggttgaatctcctgtgagctcaatgcaatgggagtcggcaatctttccacatgtgttgctgaagaatgttgttgtcgagatgcaattcagcaaggaggatggattgcagcttgttgatggttatgagctctggccctcagcttgtgtcgatgggaatgcggtatctggccctgtgtttgcagaacaaaaagagtgtgaaatcatgatgatggttggtctcccagcttcagggaagtcaacatgggcagagaagtgtatcaaggagcacaaggagaagcgctttatccttctcgggactaatcttgcattggtgcaaatgaaggtgccaggattgctgcgtaagaataactacggtgaacgctttgaacgtttgatggatcgtgccacaatgattttcaacacattgctgaccagggctgcgaagatccctcgcaactacatcatcgatcagactaatgtttacaaaaatgcccgtagtcgcaaactaaggccatttgcaaactaccgtaaggtaatctttgtagagctttccagggatgaagcccagagaaacctggatgagatgaaacgtttgctgccaaaagcctcaactcccagctatgccaatttcagtaaccaaaatgtgagctcaacatatagtgggactattgctgggacaatgccatctctgtcaccaggttatcaccgacaaatggacagtccatatggaagtggtgtgcagacaccaagggccttgacacaccaacaggcagcatggggtgttcagggtttccagagtccagcagggattaaccaccatcaagtccacttaagcagctacccaaataccccataccaacatcaacaaatccaatcaaaccatccaagcaccccataccaacatcaagcccaatcgacaagctacccaagtaccccttatcaagatcaaattcactcgagctacccaagtaacccaacccaacatcaaattcatctgaactaccccagtaccccaaaccaataccaaagccattcaacatatccaaataccccatttcccggtcatggaaatagcgtatatgattccaatggtggcccaggtccatacaatcctaatccttacagcatgaacaccgatatgcaacaaagaattcaagctcccattggtgacaggaaccagtcctatgcagttgtgtcaaatgaagcctatgggagatctggctatgaagcggcaaattctgttggaaggcctatcaatacacatcctgccgtgtacaattctggcagtggcaattacatgccctatatgcagcattctcacgatgtgcacaactctggatcacagtactcagctccagtccccaggcctccttacggagctcctccaccaaactatatgaatccacagacgagcatttggcatatctagcaaggcagctaatttgtggcgataagcgaacactggacatggtaccaagaaaagtagtttaagtagatatgcgcgagtgcgtgacctataggttccagggaacctttggcagttcggctcgcagatttttgtatagttatatgcacgcataaaccattctccgtatgtatccagtttacgacttttgcatgatcaattagtattggtttggcc

SEQ ID NO: 84830 - DNA, 742 bp, Oryza sativa
  Clone ID: PAT_MRT4530_84028C.1
cacgcgtccggaagcgctttatccttctcgggactaatcttgcattggtgcaaatgaaggtgccaggattgctgcgtaagaataactacggtgaacgctttgaacgtttgatggatcgtgccacaatgattttaacacattgctgaccagggctgcgaagatccctcgcaactacatcatcgatcagactaatgtttacaaaaatgcccgtagtcgcaaactaaggccatttgcaaactaccgtaagactgctgtggttgtgttcccatcgccaagtgaactcaaggtccgggcagcaaagcgtttcaaggaaatggggaaggatgtgccagctgatgcagtaaatgagatgacagctaatttcgtcttaccactgtccaaggacatgcctgattctaaagagccctttgacgaggtaatctttgtagagctttccagggatgaagcccagagaaacctggatgagatgaaacgtttgctgccaaaagcctcaactcccagctatgccaatttcagtaaccaaaatgtgagctcaacatatagtgggactattgctgggacaatgccatctctgtcaccaggttatcaccgacaaatggacagtccataatggaagtggtgtgcagacaccaagggccttgacacaccaacaggcagcatggggtgttcagggtttccagagtccagcagggattaaccaccattaagtccacttaagcagcttacccaataccccatacca

SEQ ID NO: 84831 - DNA, 180 bp, Oryza sativa
  Clone ID: PAT_MRT4530_84029C.1
actctctgccgggctctatgaggccatgccgcgaacggccatgcgccgtgccatggagtcatcgtctctgccagaggcgactgctcgcgcgaatcgccagctgggcgcgcgtgaatcggactgcgcgcgggacagaggcagagatgaaggtcgggcgctcttccggtaggtggctcactg

SEQ ID NO: 84832 - DNA, 1203 bp, Oryza sativa
  Clone ID: PAT_MRT4530_8402C.1
aggcggggcccgcatgtcagtggcgcacaggggccggtctaccgtggaccgggaccacgcgggtggttcaccgccggtccacgggatcaacggcccggatcggcccggggccgatcggacggtgcggcggcggcctggctcggctcggctcggcacaaagccggccggccggccatggcaaggtcggcggcgcgcgcgcgtgttgccggcaacggcaaccagcggcgggaggcggcggcgcaaaagcggcggcgcacgaccggggcggcggctcgacccggcgcggctaggagggagagggaggggaatagaggaggaggtatgcctcaccgagagtggccggcgcggaggagaacgacggcgaacggtgacggcgagccactggaggacaacggcggcgggcggacgagctccgggaggccctaagagaggaaaagagagagattagggggagggagatggaccccggcgatcggaaaccatggctgaaggcggcggacatggcggctctcaccgtcgcacggcgggaatgatgctccggcggcgaacctcgacggaggaggggtggacggggtggatctcggccactcgaacccaacggcggcgacggagcggtgcggcggcgagcctagcggtggctagaggcggccggagtggcgggaaaggcagcggcgggtggatgcacggtgcgggagcgatggagagctcgggagaggagagaggggaccggacgtggccgggagaggcgggaatcaccggccgacgtgggtgagtgggagaggagagagaggcgggattcgaaaatcgaatcccggccgtctcgggagcgcgggtgagcgggagagagggggaagtgggcgcgggagacgcggcgcacgaccggggcggccgacgtggcccggagggggcgggacgtgggcgcggcggcggtttcggtggtggtggcgacgtggggacgggcgaccggaggaaggggatgaccccgataggtggggcccaactgtcggcgtcccggggagagaggggaggcgggcggccggcccgcgcggcttagctgggcctcggccttcggccggcccagattccactaaaaatcttgttagcgtatttcggcatgtaaaactcaagaaaaattccacatgccaattccgattattatttgcattaatttattaaggtttactcttgcttgacacaggtatt

SEQ ID NO: 84833 - DNA, 252 bp, Oryza sativa
  Clone ID: PAT_MRT4530_84030C.1
atggagaaggccagctgcctggaggaagccttgctgctcccggagagttgcaaggaggaggagatcacagcgagcgatgaggtgaagcggcagctgcggctggccgggccgctcatcgccggcagcctgctgcagaacctgatccagatgatctccgtgatgttcgtcggccacctcggcgagctccccctcgccggcgcctccatggccagctccttcgccgccgtcaccggcttcagcctcctgtgttag

SEQ ID NO: 84834 - DNA, 189 bp, Oryza sativa
  Clone ID: PAT_MRT4530_84031C.1
ctgagctcacatccattgattgggcatcgtcagccgtgattcacatgtcactattgtacctgacatgtgaggcgctctatagtggctactgcctgacatttgtggcgctatatagaggctccgtgaccggttgtaatgctcattccagttctctgcggagaaaggaagaatgctcattcgtgggctgtg

SEQ ID NO: 84835 - DNA, 455 bp, Oryza sativa
  Clone ID: PAT_MRT4530_84032C.1
ttcttctaatccagggaaaaatgatacgatcggcgtcgccgtcgccggcgttggttcgatacgacgagccgagagagagtgaatgatcgaaagggggaaggagtgcttggccgagatgtcgtgcgcgcgcttggctgaccgccgaccatggaagcggcactgtatggggtgggacgttggccccgagatgcaccaagatcaaattgtgctatgtgggcaagaaggtgtatatgttatcagagatgggactctgggggttttgtgccacgaaatacttcgagtagtgtcccctaatgtgagagaagatgacaaggatggacattttgtatttgatggtggagacaggcttgcaccacgatacaggattaatgcaaaaagggggaaggtttattggccgagctgcctcttttagaattaaacatcttaacaccataggttttttgcttgctaaattt

SEQ ID NO: 84836 - DNA, 2541 bp, Oryza sativa
  Clone ID: PAT_MRT4530_84033C.1
atggctcaacaacgaggggggcatcaccagcggcatgccggactgcgtatcccaggtaactgtgccttcaaccttagggacgaacatctgtttcgttcgcaatactgtgattatgatactgtgcacgatgaggcacccctggtggcaatgataggttggttcttcagattaaggagagatttctggtgtgtgtgcaagaacatcttatcagtaggagttccttcattttcttggccggctgttctaattgacgatgcgctgccaattaattgctatgttttgaccagtcaacgcataggtcgtttgcccaatgggcagtctactggttggaagggacagagcacccttataggtagaaagcgcatccccttacgcccatatgccattagttttagcgagaaatctcattcaaatgaagaagggaaacaagtgcaagcctttgctgttgtcctcctccacgatggcatcgatagctttcctgacagacctcaattcttaatggcaaaaagtactgaagagtgtgaagctgtttgctcaagctactgttcctgtatggcctatgcatacgatgtaacatgcctattatggtacggggagctgtggaacaccacgatgttgggctctgattctgttggaagacatatttacatacgtgttagccaacaagaaacaagtcttaagaatagtatattgtccctcattattagtgttgcattgagtttcttatggatattccttgcaaagttattcgcaactagaccattagatgcccggagtggcctcatggtcttctcgtatgcccaagtgaaaaacgcaacaaaaaatttctctgagaaacttggagaaggtggtttcggcagtgttttcaagggtacgttgccaggttgctctgtcatggctgtgaagaagctaaaatgtgttttccgagtagagaagcaattccggtcagaggtgcagaccattgggatgatccaacacacaaatcttgtccgtctacttgggttttgtgttacagaaagaaacaggctgttggtgtatgagtatatgccaaatggttctctaagttctcatctgttctcagacaactcagaaacgttatgctggcaactaagatactgtgtagcgctcggaactgcaagaggtttggcttatctacatgaggaatgcatggattgcattgtgcactgcgacatgaaaccagataacgtacttcttgacactgatttctgtcccaagatcgcagactttggtatggcaaaacttttgaatcgagatttcagcagggcactgacaacaatgcgagggactataggatatcttgcgccagagtggatctcaggactacccattacacataaggcagatgtttacagctatggattgatgcttcttgaaatcatatccgggcgaagaaactcggagaagatcaaggaagggaggcacacttactttcccatctatgctgcatgtaaggtgaatgaaggtgatgttatgtgcctgttggatagcaggctggagggaaatgctgatgcagagcagctggaaagagcttgcagaattgcatgctggtgcattcaagattatgaggatcaaaggccaatgatggggcaagttgttctcatgctagagggtgttatggatgttttagtccctcctattccgatgtcacttcagaactttttgttaagaggacatcaggagaggagacatcaagattattatgaagtactgagaggtgactctgatgcgcagccaatcctccgcgatgtagcggtaagccacctccgtcatgtgaaccatgtcccagaagagacgagcagaaggatcctcgcaagtgatcgcgccctgattgccacagagagcagtcccaggccctccacaacaaatgataattattacctcgatggctatggagatggtttcgatgatatatgggacgaacgatctgatctcttccatgctcttcttcctgaagaagaactcgtaatcgttgaatccgaattcgccgacgaagaagagggatctcccgaagaaatccttgcattctgcagagcaaagcgaaggcttgagcgactcgaaccagcccagctgaacgccgaggctggtgttgaccgggaacgggctggcgcccggaggaggatcgccggcgtggaagatgctggagtcgagggcggtggcggcgccaacggcgaagtttgcgccgcggcggaagctcccgttgtaagccaagaatggcggcaagagcggcacccccaggcgttcggctgcaagcaagcaagcaaacagagaaaatcaaaatccaccatgatcacaacaaaattgacgattgccacatcgatgaatcgacggcgggggaagatgatcggaccgacgaagtcgacgacgaggcggccgtcgcagttgcggccggtggggtggccgaagaaggtggagccgtacggagggcgggtgacggggtcgaagacggagtaccagccgaagacgacggggttgttgcccgtgtcggcgaaggagtcgccgaagctgaagatggcgtcgtag

SEQ ID NO: 84837 - DNA, 270 bp, Oryza sativa
  Clone ID: PAT_MRT4530_84034C.1
gataagcacagtgtgtggacttcaaatcttcggttgtattttgaggaatcagccctcaacggtcatacgaacgcgggctgtacgaccacaacatgacctggagcatgcacggtgaccagcttatacgtgcacatgttccccgcggacgaatcgtgcggcagctgcagtgacagatcggcgacaacgtccgcctcaccagctacgagtaagtggcggatgccaaaggcgcacggctatgggatgccattggagggctcttaatggaccggt

SEQ ID NO: 84838 - DNA, 1098 bp, Oryza sativa
  Clone ID: PAT_MRT4530_84035C.1
atgaagaataatcttattgaagccttcggcgactccttcgccgacacgggcaacaaccccgtcgtcttcggctggtactccgtcttcgaccccgtcacccgccctccgtacggctccaccttcttcggccaccccaccggccgcaactgcgacggccgcctcgtcgtcgacttcgtcgccgaacgcctgggggtgccgctcttgccgccattcttggcttacaacgggagcttccgccgcggcgcaaacttcgccgttggcgccgccaccgccctcgactccagcatcttccacgccggcgatcctcctccgggcgccagcccgttcccggtcaacaccagcctcggcgttcagctgggctggttcgagtcgctcaagccttcgctctgcagcacaacacaaggcaaaaagagtagcagctatgatttcttcgggagatccctcttcttcgtcggcgaattcggattcaacgattacgagttcttcttcaggaagaagagcatggaagagatcagatcgttcgtcccatatatcatcgaaaccatctccatagccatcgagaggctgatcaagcacggggcgaagagtttggtcgttccaggcatgacaccgtcaggttgcacgccgctaattctcgccatgtttgctgatcaagctggcccagatgactacgacccggtcaccggctgcctgaaggtgcagaacgagctagctattcttcacaactcgctgctgcaacaatcccttcggaatctccaggccaggcacccggatgccagcatcatctacgccgatttcttcagccccatcatggagatggtgcagtcacctggcaagtttgggtttgaagatgatgttcttaccatttgttgtggagggcctgggactgctctctgtggcaatcagggcgcgatcacttgcgaggatccttctgctcgtctcttctgggacatggttcacatgacggaggtggcttaccgctacatcgcggaggattggctgcgcatcagagtcacctgggaacaaaataatttgagtgttttcagagtccataagaagatatatacagagagcaccaaattttcagtgttaatttga

SEQ ID NO: 84839 - DNA, 399 bp, Oryza sativa
  Clone ID: PAT_MRT4530_84036C.1
atgcagttttctgcattactggttgataaagaaaaactagagttgtgtacagtcagattaaagatacgggctgtggcattagccctcaggatctacctcaagtatttacaaagtttgctcaatctcagcctggaggaaacagaggatacagtggtagtggtcttggccttgccatttgcaagaggtagtttactatacatcaccaccttcttacctatcagctcctttttctgcaacccaatttgtgctgaggctgctatatactcactccctcactgtaaactcggcgacttaactgaaaatgtgaaaaatcctatctcagttggtgtacacggtgtgtacacgcgagggcctgtgtgcataggatacgctcccatattattcgctgttgaaggttag

SEQ ID NO: 84840 - DNA, 1088 bp, Oryza sativa
  Clone ID: PAT_MRT4530_84037C.1
tcatggcaacaatgttatctttgacacaagagacaaaaggctagaagagttcgatagctggctgcacggtttcattgacacgcagcaacctggcttcacgtggtcaagttcacttcactgcttgctctatggaataataaaaataaaaagtctagcttccatcagtttgcaggtcatgtgtgcgaatacctggctagcaagttatgggaaacgaatttgtaaacaggcgtatgagtacagaatctcatggcatttctccccgtttccatcgtaatcactcttctcggagacggaagtccatgccgaaatcaacaccgtcacggtcatgggggtgtgcatgaaagctcaatttactttcggatcgggcatggggaagaggcccccgccggcggcggccgcggcgcggggcggcgcgaagccgagcagcttctgcaggttggtgcggatgctgatggagcagaggaagtagaggaagaccatggagcagtcggtggggtcgttcccggggacgccgcggtggctcatgcgctggacgagcggcaccggggcgaagggcagcttggcgacggcgcggccctcgaagagggagttgagcaggccgaagacgacgaagagcacggcggccacgacggcgccggacttgagcttggagagcgacagctcccgcgcggcgtccttgaggctggtctcgacgcggtccatcttcttggcccgcgacgaggaggagcccgcgggctgggaggacccggaggcgccggcgccggcggaggaggaggacgaggagttggaggcgccggccttcatggcgtcgagcttgcgggagtggcgctcgatggtggcgcggagggagttgtaggtgccggtccggtagatgaggagccaggagatgccctcgcagagcacgcccgtggcgcccgagatcgccaccaccgagaggctgtcgccgtagcgcagggaggacaacgccgacgccatcgatcgatctcttcgccgccgacgccgacgccgccgccggacggggagggagtcgccggcttggaggacgggaaagagatctcgatcctcgtgccgaattcctgcagcccggg

SEQ ID NO: 84841 - DNA, 253 bp, Oryza sativa
  Clone ID: PAT_MRT4530_84038C.1
tttttggttggttatgaattgaatagtgttttataaaattaatatattgttaagacggaaagcaagtagccaaaatgagcccagtcaaaggagaacatgcaacgaagtaacaaagcaagcagaaatgccacacaaaggcgttttataaggctaagacgcaattcggagccagtagcaacctattacacccacccatcacagaccacaatcaagtaagcatcaacgtactattaacaacgacacggctgggtga

SEQ ID NO: 84842 - DNA, 888 bp, Oryza sativa
  Clone ID: PAT_MRT4530_84039C.1
atgcagggcaactgggcaagacaaaccccggcgcgcgcgggccgcgtcaaaccgggccccgtcggccgcggccgttcgtacgtacacgcgccctccccgtcacggactccacacggctctccccggtcacggcattcactccgcgacgcggtcccatgcatgcgtccgcccgtcgatcccgcgcgcgccgatcgatcgatccgtcatccgtgcatgcaccatgcatctgcatccattcctgcggacctgcggtccacgcctgtccccgagcgcgggggctacaagaagaatccggccggcggggccactcccacgtacgagttacaacgctttgcatgctgcgtcaatcgatccgggcattccaatccaacggcgacgagcgttcagtttggctcgctcgttcgtcgtcaccgcacgatggcgacggcacggggagagcttcgtgtacggtgtaccgtcccgtccgtccctgtcccgtcacataaatgccaatgttggagcactagtggccttgacgcgaggaccatgcccgcgacggcgaccccggccgatgcgtcggagtcccggagcatggccgtgccccgggcgttccgggccggctgccgacacggtcgccgtcgagtggcacacatgcaagctagctcaatgatcgatcattcgaccgtcatggatactgtatacggacgttgctttacgcccgtgtcgtgggtatttcgggacatctaccgacagatattgcatgaaaaacagtacaacatatgcgctcacaacgcgcgcgcaatcacctctataaatacacacatgtacgcccctacccatttgatcatctccaaaagactgaagccgacatatcttgatattgatgaagttatcatgaacgcctcgcta

SEQ ID NO: 84843 - DNA, 444 bp, Oryza sativa
  Clone ID: PAT_MRT4530_8403C.1
atgcatgcatgcaaacgaaagccgaaagctttgactgtggctggatccatcgagttctcagccatcacaagcggcacagaagggatccgttggcagtccaacgtcccagagccccccaacgtgggacgcgtgagaaaaaaaggccggagccgcgtgcgtctgcgtgtgaatctcacgtactccatcaacccatgccctgcgtctgcgtgcgtccgcctgccaatgccaaaaagcccggacgcgtcggcgtcgcggcgatccgatccccatgtacgcgattcttccaccttcactcgaggtagtatatggcgtaaacgccgccgccgtgcgtgcgtggcccgcgccggcgatcgatctattatggatgcgtgcattgaattgccgtgcccgtgcataccaggctaccgtgcaggaccggaggaggcaggtcggggcgccgttaaa

SEQ ID NO: 84844 - DNA, 473 bp, Oryza sativa
  Clone ID: PAT_MRT4530_84040C.1
aatacttcacttctttctttctttataacatatcacacacacgacacatggccatgccacacaacacaactccagataaatgacatgacacacaatcaaaccgaccaactgaaaggaaaactcatcatcagaagttcagaatagcaaacacacattcagacacacaaattaaggtagagaggagagaggaagagaacaaaaaagattatatacccccctttcaattaacttcaaccacagccaagaatcagacttgcctaccactaggcacacaagcaaaatccatcaagtgatcacctcgctcctcttcagcctacctccgcttccgcctccacctccacctccacctccactccactggagcaatccttcttccacctcagccttccggcacctcggtggtcgccgacgggcgatcgccggccgcgccgccatcaggggaagtctctgagctgcacagctagggatgattt

SEQ ID NO: 84845 - DNA, 210 bp, Oryza sativa
  Clone ID: PAT_MRT4530_84041C.1
gagtagttacaggatgtcttggcttatgatacatacgacaactagctgcccaccgaggtataagcaaatactgtgagccaacgaggttaaaaattacaagggacagtcagcatcataaagtctgctacacgtgtgtgtacacaagaaagcaagtgaaggactacaagaacacattgaaacccgatgggattttcaacataaaaactcacc

SEQ ID NO: 84846 - DNA, 180 bp, Oryza sativa
  Clone ID: PAT_MRT4530_84042C.1
atggggaacttgccaatggcagattcaacgtgtggagcctggccatgggcggatgtgcgtgcaaaggagctgggtgacaccaaattcagcattgggacctctacgatggtggatccgttgacggctggtccgccttcatgcagaaatggatccgggccatttgggaaaagcataggttaa

SEQ ID NO: 84847 - DNA, 486 bp, Oryza sativa
  Clone ID: PAT_MRT4530_84043C.1
ccgcacgccaccggccgaaggggaagaaggggagagaaagagagagaagggagagagggaggaggaaggtctgtcagtgggcccacatttctttttgtgtgaatgactaatgggtcccacgcatattttttatttctaccgccacgtaggtgccacgtcatcgccacgtggaacgaagactcggtcaatattgccacgtaggcgccacgtggcaccacgtcagcaaaaccacctcccaaaaccgcccagggagttaaattgcaccggttttgtaagtttggggagtcaagatttctgatattacggttgagggatacgatttatattcggtggtcagttgagggagtcaaagtgatcttattcctttctcaaaaagagagagggagtgaatttcatataaccccacctattatgcctagataggtattatggttgtaaagtttcacgaaagaacattatcgataatttcacatcggttagttctac

SEQ ID NO: 84848 - DNA, 210 bp, Oryza sativa
  Clone ID: PAT_MRT4530_84044C.1
aacttggggtctgtgggggtatttttacatccaatggattaattccaccgggaatagcccggcgtctttacattacacaaatttatactttgatacccccatagtgccccaagcgaccacctgtttaattaatcgataacacacgggtttaattaaagaataattaggaaacacaaaaaccaaatttttttgggggggttttattgggga

SEQ ID NO: 84849 - DNA, 448 bp, Oryza sativa
  unsure (1)..(448): unsure at all n locations
  Clone ID: PAT_MRT4530_84045C.1
ctttcctctacttttccttcccctccaaatcctcaacccaaactccacccaatctacaccacaatcaaatcatccatcaactactactatatccctattacaaaaaaaacaaacaaatcactaaaaaatcacccatctctaaataaaaaacaattcttatacaaaaaaaaccttcacaaaacccacacattacaactacatccttcattcactcattatantacaaatcattcactcacatcataaaactcatcttcatcaactccaatatttttcacaccaaataaccccatctcaacaaaacaatcacccttaacaacaaaacaacttcttactcaactcaaacaaaataactatcctncaaaactttcaaccttaattatccaacattccttcaataatttttttacacaacatcaatccctcccaacatttntccaccatcaac

SEQ ID NO: 84850 - DNA, 504 bp, Oryza sativa
  Clone ID: PAT_MRT4530_84046C.1
tgcgtgatctattaatggatctgccgtgtcgaatggtccgcaaaattggctcctcacctgtgcgcagatgcagcctccttttgcagttttgttttgctgcaggaaaattcggatttgttttgttgttggaaacattctgaaaaattcggtgcgtgaaaacgacatggagtccggataagttatgcgcgacttatccggttcggttacgcggagtggagatcgtgcgggcgcctctgtactgcgccgtcgctcatagactactccatcccgctcgcaggcgtgaacctgcgatcgggagagcaggtctccggaacctctaccttcgacgtcctgcactagtgtgcggcggcaataaggtttttgggaagcgctttgcgcgactgctctctgttcgtccgcgacggcccatcttcctctccgctcgcgtgctgcgcgccttcgtcgacgcccgcaaccacgagtagttcctgctgagcaaccggtctttccgtaacctcggtacgt

SEQ ID NO: 84851 - DNA, 591 bp, Oryza sativa
  Clone ID: PAT_MRT4530_84047C.1
atggcgattgtcaacggcggcggcggtggctcgatggcgactgccgacggcggcggtggcagcagctggcggcggcagttgctggagatggcgacagccgacagcggcggcgcagctgctgtcggcgatggcacggtagtgaccgtggctgcggagggaggaggcacggtgttggcgaccgtgcctgaggagaggtcggagtccggcttggtgtacagaggcacagccgatggcagcggaggccggctcaatgtgagaggcgcgggcggcggagatggaggccggcttggcgcgagaggcgcggccgatgaagggaggccgactggcgcgagaggcgcgtccggtggagaaggccggcttggcgcgagaggcgcgaccggcggtggaagaggcgacctcggtgcgtggtggacttgttggttggtgtggtgcggtcttcggcgcacaaaggctggccgacggggggcgtcggtgcaagggccccacatgtcggcagagtttgagtggtgggcgagcatcggtgcgtcaaccgtcgattcgcaggtggtattagatgttacagtgatgcttcatggaaagacaataaagtga

SEQ ID NO: 84852 - DNA, 1866 bp, Oryza sativa
  Clone ID: PAT_MRT4530_84048C.1
atgctcgcccaccactcaaactctgccgacatgtggggcccttgcaccgacgccccccgtcggccagcctttgtgcgccgaagaccgcaccacaccaaccaacaagtccaccacgcaccgaggtcgcctcttccaccgccggtcgcgcctctcgcgccaagccggccttctccaccggacgcgcctctcgcgccagtcggcctcccttcatcggccgcgcctctcgcgccaagccggcctccatctccgccgcccgcgcctctcacattgagccggcctccgctgccatcggctgtgcctctgtacaccaagccggactccgacctctcctccaaacgccgccacgccggtcaaatgcagccgtctaccacgcccttggctagccgcccaaggccgccttgcctcctcccacctcaggcacggtcgccaacaccgtgcctcctccctccgcagccacggtcactaccgtgcctccacccaccgccatcacaagtcaccattgccagccagcgcagccgccagctgctgctgtcgccgccgtcatcggcagtcgccatccagccgctgccgccgtcgccagccaccatcgccgacagcagctgcgccgccgctgtcggctgtcgccatctccagcaactgccgccgccagctgctgccaccgccgccgtcggcagtcgccatcgagccaccgccgccgccgttgacaatcgccatcgccagccaggtcggccatcgtccggccgcacaccgccgccgccaccaccaggcgccgccgccgacgcccccaccagtggacgccgtcgccggccaccaccccaccagatccaggcggatctggaggtcacctccgtcgccgccccacctccgaccaccgtcgccacaccttcaaccgccgccgccaggacgaccgctcggccccaccgccgccaattgtctccacgccagatccggccgggaggcacggatctggacgatttttgccgccccgggcaatccccctctacccgagcgtggcgcgaagacgaagccccgccgccgccgtccttgcgccgcgcggctttgccggcggctgctcggacggcggcgaggactccaaaaaaaaaaaaaagccttgtattactggagatgtcgccgccgatgccgctgtcgtgggtgcaggacagcaagatgtacttcgccaagcagcggctgccgttggaggacctgacgcagacttgccggagggaccggtactgcgtcagctgcgcccgcgccttctgctcccactgctgctcctcgcatcacctgtggccggggcaccaccacattgtcgtgccggtcaccgtcgacgccgccaccggccggccaaccttccaaaaccgcgacgcggaggggcacaggatgttcccgcgcgtcatcgccgacgccatcgtctcgcacgactacgccacgcggctccccagggacgcctactgcgcgagctgccaggtcgccttctgcgccgcctcctgccaccaccactacgaccaccaccggaacggcgacgacgacccggtccccgactccgtcctccgaatcgaggagggcggcgggcggcgctgcgtgcggtcgacgggctccgattggtggctcccttacctggagagcgtcctcggcgacccggtgcacgagggcgaggacgagcgcggggagtactacgagctactgccgatactgacgaggccgccgggcggctgcgcgcactgccgccgccatatcggaatccagcactcctcacactgctccatggcctgctacaacagccaccaaggggaggtcgcggagcggaggcggcggcgggaggccaggaacgcagcccgcgggatcgccaagctgcaagtcgaatga

SEQ ID NO: 84853 - DNA, 146 bp, Oryza sativa
  Clone ID: PAT_MRT4530_84049C.1
gttaagaacaaacatggcacaagcatagacatgcaataaccaataatccataccgaggcaacaacaaatggcccaaaatatgactatcacctatgatcaagttaacatacggcactacaaagaaaaggaatggacgcactctaaag

SEQ ID NO: 84854 - DNA, 554 bp, Oryza sativa
  Clone ID: PAT_MRT4530_8404C.1
atgcgtcagctagaggaaagctacactataagcccagccgttgcccacgctagtttgtgggctgacgtcatcaggggggcggcgccgacaggcggggcccgcatgtcagtggcgcacgggggccggtctaccgtggaccgggaccacgcgggtggtccaccgccggtccacgggatcgacggcccggatcggcccggggccgatcggacggtgcggcggcggcctggcttggctcggctcggcacaaagccggccggccggccatggcaagggcggcggcgcgcgcgcgtgttgctggcgacggcaaccggcggcgggaggcggcggcgcaaaggcggcggtgcacgaccggggcggctaggagggagagggaggggaatagaggaggagggatgcctcactgagagtggccggcgcggaggagaacgacggcgaacggcgacggcgagccacgggaggacaacggcggcgggcggacgagctccgggaggccctaagagaggaaaagagagagattagggggagggagatggaccacggcgatcagaaaccat

SEQ ID NO: 84855 - DNA, 1868 bp, Oryza sativa
  Clone ID: PAT_MRT4530_84050C.1
atgtactatgaactcaacaaaaactgtttcgtatcgaaagaatgttacatacaggtcagctatctggtgtctgggctacatgataatattctgggttttcaaaactgtggaaatgcgaaagaatgatgcctgacaatttcgtacaggtttatctagaaccaagtagcagataaccttttctctatcggctttatttctcattcatcaggcgctcagccaggagcaagtcatcaggagtcgtcacctttatgtttgtgtaagagccctctgtgatataaacagagtgcttcaggtattctacaatggacacgtcatcagtgacctcaagtccatcccgtttaactagctcaaaaccatctctgagtaaactgggcctcatcacctgtggagtttgcatttcccaaagagttttcctatcaagtgtttttacgacaaaagaattgctgtcagcctccttgatagtagctttcacaggcacaccaagaacagcagctccgtgcactatagcatcttctaatacctttttgacatcttcagatgacactaagggccttgcagaatcatgtacacaaacaagttcagagtctccatcaatctcctgtagtccattataaacagagtcttgtctctctttccctgggagtgcaaatttaattggtatttgcacgttttcaatagagccttcaaatatatctttgtagtctggatcacacaccactacaacttcttttacttccttcagctgacagaatgtctttaaactgtgcagtgcaatcggcagccccaataatggtagatattgttttggcatacttgcccccattctcttcccctgcccgccggacaagagcaccaccgagacgctcctctccttcacggcctcaccctgcgcgccgtcggctttggcggcgcagacagccgaaccccatttcctcgcgtgccgccgcggagcaaccgcacagctcccaccgatgctccaccaccactcaaactctaccgacatgtggggcccctgcaccgacgccccccgtcggccagccttcatgcgccgaagaacgcgccacacccaccagcagctccaccacgcaccaaggtcgcctcttccaccgccggccgcgcctctcgcgccaagccggcctcctccaccggacgcgcctctcgcgccagttcggcctccctccatcggccgcgcctctcgcgccaagccggcctccatctccgccgcccgcgcctctcgcgccgagccggcctccactgccatcggctgcgcctctctgcgccaagccggactcgacctctcctccaaacgccgccacgccggtccaatgcagccgtctaccacgcccttggctagccgcccgaggccgccttgcctccttccacctcaggcacggtcgccaccaccgggcctcctccctccacagccacggtcaccaccgtgcctcctcccaccgccgtcacaaagtcaccatcggcagccgccaactgctgctgccgccgtcgtcgtcggcggtcgccatccagccactgccgccgctagctgctgccgtcgtcgccagccaccatcgccgacagcagctgcgccgccgctgtcggccatcaccatctccagctactgccgccgccaactgctgccaccgccgccgtcggcagacgccatcgagccaccgccgccgccgttgcctattgccatcgccagccaggccgaccaccgtccggccgcacaccaccgccgccgtcgccaggcgccactgccgacgcccccaccagtggacgccgtcgccggccaccaccccactagatccaggcggatctggaggtctcctccgtcatcgccccacctccgaccaccgtcgctgcacctttaa

SEQ ID NO: 84856 - DNA, 300 bp, Oryza sativa
  Clone ID: PAT_MRT4530_84051C.1
attattctaaaagttttcatggtaaattaagtcccaaactgttattttaactacacccgttgaggccataacgacattccggttttagaaaatgtaaatgtcagtaatacgttatagtatataaatacatgcccaacgacaacaaatttatatcattacgcgaggcatccaccccagattttcagccaaaagttgcacaacgcccactttaaggcttaaaattatttggcaggcgttctgatatgatatccacggccgctggcccaagagacacatcaaggccgtaaggcatcgtataca

SEQ ID NO: 84857 - DNA, 349 bp, Oryza sativa
  unsure (1)..(349): unsure at all n locations
  Clone ID: PAT_MRT4530_84052C.1
accgtcggcgagacgcggggagtcgtcgcggcggcaagatgcagtcttcgtgangcgctgacgggaagcgtcacgctggaggtggagagcagcncacatcgcaacgtgaaggcaagatccaggcaaggaggtatccgcgaccagcagcgctcatcttcgcgggagagctggatgcggcgaccctggcgctcacatcagaaggagtcgcgtcacctggtctccgctcgcgcgcanagggcgctacacatcagggccacctcggctcttcgtaagtacaggagagagagtgtgcgaagtctatgagcttcatagttacatgcgagagaagttgcaagaagagtagttaaga

SEQ ID NO: 84858 - DNA, 513 bp, Oryza sativa
  Clone ID: PAT_MRT4530_84053C.1
atgaccgagtacggcctcgacgacgacgccactgacggagcagacaagcaggtgctctgcaaggtctaccgctcgccgcgcgcggtctgcgcggaggcgcgcacggcggcggcaaagtgctccggctccaagaggaaggcggacgacggcgtggatcacccggaggcgccgccgcccagcgcgcggccgcggcaagaggaggccgggagcgagcacgacgagcagtcatcggagctcctgccggagttggacctggacgcgctgctgtcggcgccgatggacgagaacctggagagcacgttcagcacggccgccacggaacaatacatgaggtatctgttgaacgacgagcctttgccgtgggctccgacgacggagcttgtcgacggcggcggcggcggcggagacgagttcatccagacggcgaacggaccttgcatggatggcgaggtcttcacgcgcctggctgccggagaaacgctcgacgacattcttggctcgacgagttcttga

SEQ ID NO: 84859 - DNA, 596 bp, Oryza sativa
  unsure (1)..(596): unsure at all n locations
  Clone ID: PAT_MRT4530_84054C.1
gagcccactactcaaaacctcccttagnnnnnnnanngnnnnanaaaggggnnngggggtttatttttaaaagggcagaaagcactcttcaatccaattcctaaacaaaatttcaagggcacccaccaccaaatggctaagggccgggattaatataaaacaatcccccaaaaataatgataacaagaaagcaatagatgaaaaaaaaaggaaaaacccaggcaacaaacaaacaactaaaaggccggacctaacaaatgggcatcaacccaccaaaagggaacaggcccctctaaaaaaaaaaaaatggccccgaaaggctgaaactggggtcagggccatcctcaccctttttaaatttgcctccactggtcggacccggatattgggaggggatgggaacccccatagggggcgcccgccactttggaccaaggccacttcttcccccgaattcaccattccttgcttctgcagcaaatccaaggcccttgggaaagcccctccagcatcctcaaaaaatcccatgtaaataggacagactccttgatacaaagccaaccccgggtgaatcccctttggaactggaaaagcaa

SEQ ID NO: 84860 - DNA, 2024 bp, Oryza sativa
  Clone ID: PAT_MRT4530_84055C.1
cccagtagcatcctctgcctctctctgctagcttcaacatctcttcagatcctaggcagcacctgcagttgcttgcacttcaatttccccaactttgacacaaccagcgtggatgatttcagcttcagcccaggctcagggatcgccaatggatccctgcagatcacactaagcaccgggaacatcactaaccaatccgggagagtatgctacactagggagacactcagactgtgggatagcaagaagagaacagtagcatccttcaggacagagtttgtgctgaacatcctcccaaaccagcagcagaacgagaccggtgaaggcctagccttcatcctcaccagcaacctctcgtcgcctcgcggcagcagcggccagtggctcggcatcgccaacgagcagactgacgggtcgccggcaaaccggattgtggccgtggaattcgacacgaggaagagctacgacgaggatcttgacagcaaccatgtcgggctcgacgtcaacggcatcagatccgtcgtgcagtatccactcagtaacgtttctatcttcctctcgagtggtttcgatttgttcgtcagtatcagctacaaaagcaggtttcgattgttgatagtagaagcgatgcagttgagtaccagagggctgcatgttgttcttggtccgtcgatctatcacaatttctattcgacgacgtatatgtgggatttgcaggttcaacaggtgatttcaccgagctgaaccaaataaagtcttggaactttgccacaatcgacgacgatatcacgaccggaagaaggcatgggagaaaggtgcttctgcctctcgttgccttcatactatttgctatgtcttcgtttcttgtgttcttggtgtggagaaggtcgacgcggaagagaaggctcgcctaccgcaacctcgagaagatgatcgacgcccatggccctgtcaaatttaagctcaaggagctcaggcgtgcgactgccaacttcagctcctcgcgcaagctcggcagaggtggcttcggcaccgtgtaccacggctacctgagcagcatgaacatggaggtggccgtcaagcgggtggcagcgaacaacaaatccagttccaaccgaggagagcaggagttcgtcgcggaggtgaacacgatcagcaagctctcgcaccgcaacctcgtgaagctgatcgggtggtgccacgagggaggcgagctgctcctcgtctacgagtacttccccatgggtagcctggacaagctcctgtatggcggtgctagaccggctgagctgacctgggagcgacggtacaagataatctgcggcgtggcgtccgcgctggagtacctgcaccacgggagcagcagccggatcctccacagggacgtcaaggcgagcaacgtcatgctcgacgaggagtacagcgcgcgcctcggcgacttcggcctcgcccgtgtcatccacctcgacgaggtgacgcaccactcgacgcaggccgtggcgggcacccgcggctacatggcgtacgagtgcttcttcaccggacgcgccagcctcgacacggacgtgtacgcgttcggggtgttcgtcatggaggtgctcaccgggaggagcccgagcagctccgtgacgtaccacaaccgccagcaggagcatgaccacgacggccgccgccagccgatgtacatcgtggactggatgtggaggcactacggcgacgggacggtcctggaggcggccgacgcggtgctcggtggcgcgtacgacgaggctcaggtggagcgcgcggcgaggctggcgctggcgtgctgccaccccagcccgagggagaggccgtccatgaggacggccgtgcaggtgctggtcggcggagcccctgcgccggagccaccgttcgagaagcctgcgtttgtttggcctcccgacggcaagcggcaggagatcgagctgccgcacgtcggcgtgctgttcaccggagggcagctcagtttctgctccatgacatccacttccatcaccgggagg

SEQ ID NO: 84861 - DNA, 279 bp, Oryza sativa
  Clone ID: PAT_MRT4530_84056C.1
tctatcttctccttcacttccccacatatcatgtgagtcttatatgaaactaggggggggcaaccacatctccataactaactctacaacgttctccatcaatcacttaaacactcattagttctcacagacctacttcacccacctcaaacgctactgaaacatggacctacctctatatgtcaacatattcacctctgcctgtatcaccaaactccctccttattatccatactaacactacacaacaactctctcgccatcatagaaaacatacct

SEQ ID NO: 84862 - DNA, 1565 bp, Oryza sativa
  Clone ID: PAT_MRT4530_84057C.1
atcgagttggttggcgactccatatcaccgcaaggcgtttaggtgttgcgatcgtgcttgtcgacttgtcacaaaaagttaccaacacgatttttggcgactccgctagggaagtcctatggccgtatgtcagaacgatagaaccagtgttgagtccaacaaacaagtccaatcttctacattgtcagaccatacgatgtctcccaataaaccacctagcagatgacgtcgaagacaatgttgatgtcgacattggcgactccaaccttggctctgacgtcaaccttgatgatgatgccgccgtcgacaccgacctcgcccttgaggatgatgctgttgtcgacctcgacctcaacgatgatgccgccgatgacgccgacctcgacctcgaggatgatgctgccgtcgatgtcgacctcgacgatgatgccgccgtcgacgccgacatcgacctcaacctcgatgatgatgccgccgtcgaccttgaccttgacgatgatgctgccatggaccttgacaactttcatcctatgaatatatacagcatggatgactttatagccgaagcaacctttttggatgaatatagtgaacagattattctcaggctgaaggagaacataacatctgagccacctcgtcgtctatgtcaaagtggtacaagacggtacgtaccaagaaaccgtgaagctggcaatgcggatcttgtggccaactacttctccaagtctccaatctacacagatgagatgttccgtaggaggtttcggatgaggaagcctctcttcctacgaattgtgagtgccctgagtgaatggtctccttattttactaatagattgaatgccactggtagagcaggacattcaccacttcaaaagtgtacggctgctatttatatgctagcatatggaactcctgcggatcaacttgatgaggaattaaagattggtcctagtacagctttggagtgtttgggaaaattcactgaaggagtcattgaaatatttcgcaaagagtacttgcgagctcctaggagtgatgaggttgaaagattgctacaggtcggcaagaaggaacaaggaaggatgttgagcgagccttcggtgtgttgcagtctcgctccagctcggatgtggaggcagggcgacgttatcaacataatggaagcttgtgttattcttcacaatatgatagttgaagatgaacaggaaatggctgaaattcctttggatttaaatgagaacccaggagcatcgttcgttctgccacctgaagtgaggaactcctctgaccccaaccctttctttgctgcgggaggcgatggtgctcggcgtgtgcaggtggaggcggcgtactccggcggaggcggcgacctagaaagaagcggctcggagcggctacgacgagctctgtcagaggcgatgacgctcggggagacaacggggagccggagctcggtcttgttggcacacgaaggaggaggcactcgggaaggtgggggagctgaagctcgagctcgccagcgcatggaggggaagaggagctcaccggcgcatggatga

SEQ ID NO: 84863 - DNA, 517 bp, Oryza sativa
  unsure (1)..(517): unsure at all n locations
  Clone ID: PAT_MRT4530_84058C.1
gtgngtcgcgtgatatagnttagcatgagcctttggccgtttgtctttgtcatgttactgtatggagctccacttgctgatgtttagaatttaagaagatcggttaatcgatgatgataagatgattccattcccaaaaattgttttttgctaaatttattggcatgattaattttgttactagttgctcttcacctaaaagaatgttccagttatcctgaggtgttgaacttagttatttacctgtttggcaaactagcatactagtgatagaattacctgaacctagtggtagttagcctattttcctatgcgcatttgcattgatagtctattttagtgtgatagttacaactgcatttgcatgtttattttcgttggtatagtcagctccttctgcataggttgcttttagcgaattactggtatttgatttatgaagatagttgtttccttaacgttttgctttccttgatgtgttagatgcttagatgggctttggatagctaactcgatc

SEQ ID NO: 84864 - DNA, 1881 bp, Oryza sativa
  Clone ID: PAT_MRT4530_84059C.1
atggcccataagttctatgaggctgataagaaaaaattaggacggttcgtcctaatagatgtatggtacgcatgctgtgatcagcctaagtggaatgcatataatgatgcactcaagagagatcgtaaaaggaagtcgtctgataacagagagatgcttgggcaagcatcaggaccttcagatgttgaagaaaccccatggccaatcggacaaaaggctgctaaaagggctgcacgtgaaagcatgggaaagttgaacgatatttctgatgctgaagagatagacaagttagaccaagtccaatctgatattcacacaagatgcatgaagatgatggaaatgcaagaagttatctactcgtcagaccatacgatgtctcccaataatatcgaccacctcgatgatgatgtcgtcgtcgacgctgaccttgccattgaggatgatgctgtcatcgacctcgacctcgacgatgatgccgccgtcgacgccgacatcgacctcgacctcgacctcgacgatgatgccgtcgtcgacctcgacctcgacctcgacgatgatgccgccatcgaccttgacaactttcatcctatgaatatatacagcatggatgactttatagctgaagcaacctttttggatgaatatagtgaacagattattctcaggttgaaggagaacataacatctgagccacctcgtcgtctacatcaaagtggtacaagacggtatataccaagaaaccgtgaagctagcaatgcggatcttgtggccaactacttctccgagtctccaatctacacagataagatgttccgtaggaggtttcggatgaggaagcctctcttcctacgaattgtgagtgcccttagtgaatggtctccttattttactaatagattggatgccactggtagagcaggacattcaccacttcaaaagtgtacggctgctattcgtatgctagcatatggaactcctgcggatcaacttgatgaggtattaaagattggtcctaatacagctttggagtgtttgggaaaattcgctgaaggagtcattgaaatatttcgcaaagagtacttacgagctcctaggagtgatgaggttgaaagattgctacaggttgctgactcacgtggttttcctggcatgttaggaaatatagattgtatgcattgggcatggaaaaattgcccggtctcatggtgtggccaatttactcgtggtgacaagggagttcctaccatgattcttgaagcggtagcatcgaaagaccttcgcatatggcatgatttttttgctactgcaggatccaataatgacatcaatgtgttaaacaagtcacccttgttcattgaagcattgagaggggaagctcctcgtgtacagtttagtgtaaatgggaaccaatataacacatggtactatcttgctgatggaatttatccagagtgggcgacattcgtgaagacaatacagcttcctcaaacagacgaacataaattatatgcagctcgtgaagaaggaacaaggaaggatgttgagcgagccttcggtgtgttgcagtctcgctttaacatcgtttgtcgtctagctcggatgtggaggcagggcgatgttatcaatataatggaagcttgtgttattcttcgcaatatgatagttgaagatgaacaggaaatggctgaaattcctttggatttaaatgagaacccaggagcatcgttcgttctaccacctgaagtgaggaactcatctgaccccaacccttgctttgctgcggtattacgaagaaattcatctattcgtgatcgtgcgaaacatatgcaactcaagaaagatttagttgcacatatatggcagcgttttgggaaaaagtag

SEQ ID NO: 84865 - DNA, 339 bp, Oryza sativa
  Clone ID: PAT_MRT4530_8405C.1
atggctgtaacaatagggctgacgtcatcaaagggggggtggcgccgacaggcggggcccgcatgtcagtggcgcacgggtggctggtctaccgtcgaccgggaccacgcgggtggtccaccgccggtccacgggatcgacggcccagatcggcccggagccgatcggacggtgcggcggcggcttggctcggctcggctcggcacaaagccggtcgaccggtcatggcaaaggcggcggcgcgcgcgcgtgttgccggcgacggcaaccggcgactggggtggcggcgcaaaggcggcggcacacgaccggggcagtggctcgacccggcgcggctag

SEQ ID NO: 84866 - DNA, 2142 bp, Oryza sativa
  Clone ID: PAT_MRT4530_84060C.1
atggatttcggcgacgaacccgagggctccgacagccagcgccgccgcaagcgctaccaccgccacacgcctcgccagattcagcagctcgaggcgtacgcgttttctctatttttttttctgctgttgttcttctatgtgttgttggctttcgtccgccatggcggcggcgccatggatggagggatgaaatggatgttcaaggagtgcccccacccggacgagaaccagcgggcgcagcttagccgggagctcgggttggagccgaggcagatcaagttctggttccagaatcgccggacccagatgaaggcgcagcacgagcgggcggacaactgcttcctccgcgccgagaacgacaagatccggtgcgagaacatcgccatccgcgaggccctcaagaacgtcatctgccccacctgcggcggccctcccgtcggcgaggactacttcgacgagcagaagcttcgcatggagaacgcccgcctcaaggaagagctggaccgcgtgtcgaacctgacgtcgaagtatctcggccggccgttcacgcagctgccgccggcgacgccgccgatgacggtgtcgtcgctggacctgtccgtgggcgggatgggcgggccgtcgctggacctggacctcctcagcggtggctcgtcggggatcccgttccagctgccggcgcccgtgtccgacatggagcggcccatgatggccgagatggccacgcgcgccatggacgagctgatccgcctcgcgcaggccggcgaccacatctggtccaagagccccggcggcggcgtgtccggcggcgacgcccgcgagaccctcaacgtcgacacctacgacagcatcttctccaagcccggcggctcgtaccgcgcccccagcatcaacgtcgaggggtcccgcgagtccggcctcgtgctcatgagcgccgtcgccctcgccgacgtgttcatggacacgaacaagtggatggagttcttcccaagcatcgtgtccaaagctcacaccattgatgtgctcgtgaatggcatgggagggagaagcgagtccttgattctgatgtacgaggagctgcacatcatgacgccggccgtcccgacccgggaggtgaacttcgtccgctactgccggcagatcgagcaggggctatgggccatcgccgacgtctccgtcgacctgcagcgcgacgcccacttcggcgcgccgccgccgcgctcccgccggctcccttcggggtgcctcatcgctgacatggccaatggctactccaaggtgacctgggtcgaacacatggaggtggaggagaagagcccgatcaacgtgctgtaccgtgacctcgtgctgagcggcgccgcgttcggggcgcaccgctggctcgccgcgctccagcgcgcgtgcgagcgctacgcctccctcgtcgcgctcggcgtcccgcaccacatcgccggtgtgacgccggaggggaagaggagcatgatgaagctgtcgcagcggatggtgaacagcttctgctcgagcctgggggcgtcgcagatgcaccagtggacgacgctgtcgggctccaacgaggtgagcgtccgcgtcaccatgcaccggagcacggaccccggccagcccaacggcgtcgtcctcagcgccgccacctccatctggctccccgtcccctgcgaccacgtcttcgccttcgtccgcgacgagaacacccgctcccagggcttgaatgcgagccagaacagcatgctgatactgcaggagagctgcacggacgcgtcggggtcgctggtggtgtactcgccgatcgacatcccggcggcgaacgtcgtgatgagcggtgaggacccgtcgagcatcccgctgctgccgtcggggttcaccatcctccccgatggccgcccgggctcggcggcgggggcgtcgaccagcagcgcggggccgctcgccgccgcgcgcggcgggggcggcgggggcgctggcggcgggtccgtcgtcaccgtcgcgttccagatcctcgtcagcagcctgccgtcgtcgaagctcaacgccgagtctgtcgccaccgtcaacgggctgatcaccaccaccgtcgagcagatcaaggccgcgctcaactgctccgcccatggccaccacccctga

SEQ ID NO: 84867 - DNA, 621 bp, Oryza sativa
  Clone ID: PAT_MRT4530_84061C.1
gctgcaggaattcggcacgaggcttaggagtggttctaaaggatttgccactcttgtgtgaaataagctagagcattgattgtccaccagcagttttatttgtgcatcaactttgtgtgcatggttttaatttgaaccaaccttaaatctcttcatacattatctggtggttttaagtaatccctttttggttgaatgtgtaggtgctttagtttttgtggcattaatttattctaggcaaatagttttattttatggtttaaaattgatgctctctgtttactaaatatgtcatatatccagctaacaccttaatatttcatttcttcttgctaattattaattcccatattgtttgttttccatctgcatattgttccaaatgctagaaatatcatatcaatgttctatggttgcttttcgatattcgtttgatgtcaatatataatgctgcgattactgtgtgaatacttgtgtctatgtctagtaatgcatgagatacaagttcaaataaataatagtactgtgtgtgtgttttatgggcattactgagctagtaattgccattttgtgttgctattgaaagctttgatgctttttgactttttgcatttttataaa

SEQ ID NO: 84868 - DNA, 920 bp, Oryza sativa
  Clone ID: PAT_MRT4530_84062C.1
tcgcccagcgtccgcacgcctgcggccccagaagacatacacacacaaacacaagccacccttccgatttgttcatcgatcagttcgcagcgtacgtcaggctagctaactagtgtttggcaatggcgtccgggcagcagcagcagggcaggtcggagctggaccgcatggccagggagggccagaccgtcgtccccggcggcaccggcggcaagagcctcgaggcccaggagaacctcgccgaggggcgcagccgcggggggcagacgaggaaggagcagatgggggaggaagggtaccgcgagatggggcgcaagggcggcctcagcaccggcgacgagtccggcggcgagcgcgccgcccgcgagggcatcgacatcgacgagtccaagtacaagaccaagtcctagactacacacacttttgcatccgtgaatgccagtgtgtcgtagtcgtctcagttgtagtcatcgagtcagtcttagctagctagctctcttatcaataataatgtaggtcttgacggatgcacgcatttaggcgcccgtatgatttgctatgttatgtttcatatggtgatgcgtgcttagctttagctagctttggtagtttggtttaggtgctgatcgatcatggtcagtagctagggtatgtgttttagtttattgcaggatcggtcaggcaggggctgaatgctagctaggtgatgctttggcttttcatggccagcagctgctagcttcttgtttccaactgatgcctctgctgggtgtgtcctttgtaaccgtgcttgctttcagttaatctagctagctgttgttcatccgaaaaaaaaaaaaaaaaaaaaaatcctaccgcggcaaattggtgctggtgaaagttgatctttgattcctccccaaaaaaaaaaaactggtaat

SEQ ID NO: 84869 - DNA, 218 bp, Oryza sativa
  Clone ID: PAT_MRT4530_84063C.1
agagactccagatgctcaagagcaagcaaggtaagatcaagctcgaggacgtggccgagaagcaggccagggttgccatgagcagcaagaacttggcagctgtgctatggctgcgttatttggctctgtttaggggagctttagattctgagaagcagctatttgaatctgtaactacagattctcagaagctgtggactgtttggggcagcttctag

SEQ ID NO: 84870 - DNA, 240 bp, Oryza sativa
  Clone ID: PAT_MRT4530_84064C.1
atgtcgatcgagaaggccgcctttggcccgttgtcgagtgaggtactctccctagccccaagccttgtcctcagggaagtggcgagagatcgctacgatctactggtggaggaccaggtgtatgtgtatctcaatcacctggagatgaattttcatgcggtgagagatcgctatgatctactggtcaaggaccaggcggtgagagatcgctatgatctactggtcgaggaccaggtgtag

SEQ ID NO: 84871 - DNA, 607 bp, Oryza sativa
  Clone ID: PAT_MRT4530_84065C.1
ccggccgggccttggatcgctacgccgcccgcgccgccgtctccgactactaggagcctctccgccggtagcctgacggcatgggagaaacgactaggaggagaggcaaacaaacatgaccaagtggctgcaagggccactggcggccgggcacgttgcgatgagacagcttggaaaaacacgccgatgagaacgaaggtgtcggctagtcaggaaagttagcctctggcgaaggacactatgctccaagaggatgagaaagctcacaaaggagctatctgatttggtgaaggctgccgaggacaagcacgtactggtcaagctaagtgacacgattcaaaccgagggggtcgctacactgccaagaatgctacatgcattgagggaactaacacaagtgcatcagagcagagctgcggtgaacgggctggatgatcgatactcatctatgtgcccccacagttgagaagacaccaggacccagcatgcaccatgcgaccctgcctaccgtgctcatggacgcatcagccgttacatgatgttgccgagccagatcgagcttatacctgactgagaagaagatccagtgaagaaagagcctgagtct

SEQ ID NO: 84872 - DNA, 753 bp, Oryza sativa
  Clone ID: PAT_MRT4530_84066C.1
atggtggcggagagtaaaatgcagccatcgccggcggcggcaccgccggcggagcaccggaggcgggcgctccgctacgttgtgttcctcgcggtctccctcctcgccttctcctgctgggctctcgtcagctcgcggatcgacggcgccgtcctcgcggcgaccgccggcggcgagcatgacgacgatggcattattgttagaagcagccaagcggagatgccggcgagcagcgggaacgcgacgtcacgtggcgccgtcgaggcgggctctccggcggcgatgaccacccggcagccgtcgtcgggagagacgacgacggcggcggcggcgacgtgcgacgcggagagcacgctgctgagggtgtacctctacgacctcccgccggagttccacttcggcatgctggggtgggacggcaaggcggccggcgcggcgtggccggacatgatcggcgagcggtgcgccgtgctacccgggcggcctgaacctgcagcacagcgtcgagtactggctcaccctggacatcctctcctccacctccggcgaccgccgccatcgcccatgcaccgccgtgagggtgacgaacgcgggcgaggcgagcgcggacgcctcgcgcggcgctcgcccggtcacctccccactcacggcgctctccggtcacggcggcggcggcgagtctcccagctggctcacggcgacgggaggcgaactggcgaagcgcgcgcgatggatggatctgggacgccgtga

SEQ ID NO: 84873 - DNA, 780 bp, Oryza sativa
  Clone ID: PAT_MRT4530_84067C.1
atggacggcgggcggcgggggtctcaccggagcacggatcgacggtcttcggtcatgggggagcacaccgggacaaagaggcggacgagaggggacgatcccatggctcggatgcgacggaggaggtccgacggcggcggattgcggcggcgaccgttggcggcggcaaaagaggggaatcgccggtggtcatcgggggttcgattcgaggcggcgggagcatatccggggctcggtgaactcatttccggcgccggatggggcaatggacctccgagggaggccggcgacggtgagctacctctaggagcgggcggcaacggcggcaagcctatggcgggcggcggcgagacctggggcagcgtccatgcgtgttcggggggggctagccgagctaccacgcgaactagggagggagaggacgagcgagaagggagaacgggggggtggcactaccgagccgagacgggcgcagtgacgagcggccgacggctcgggagcgagctctccggcctcgggccggggaagggaagaagagggatggccggagtcctcgtctcgcgtccacgcacgcaccggcctccgacgcgtgcgaaggcaagaggtgggagcggcggcaaggcgtcaacaatggtgcggtggagtcaaggaagggaacaatattcggaggcgagtcaaagggagatggataatttagagaaagagagtgtaacttgggagtttgagtttgactactcaacgagatatgtgggtaaggattttggagagaagtctgaatag

SEQ ID NO: 84874 - DNA, 587 bp, Oryza sativa
  Clone ID: PAT_MRT4530_84068C.1
gacacgcgtacgtccacacttacggacatggacatcatcaacgccatcaacatgcattgcaatgacgtgtaggaccgttgtaatgcatctatactcttcaacgtatactactgcgcacgtgaaacatatctcttggattcgaagttcaacacgcgcatcaccgcgctaagcgatttccgtgtcaaaattcatccaacataggtcatggtcacacacgagcgggttgcactgtccgtacaactacagaggtaaaacattactaacaccaccaatcaggcttatgctggatgaaggctctaaatctaaaaatgcatatagattgcaagaggggttgctcaaagataagagcgagagcattgctgtatatcacacagaacatatggatccatagatcaccatgggcagtgcaagataggatggatgtgttaccatactaggcgtagaggtacctattgctgaatggggcggcaacatatgacggggagccatacgggctgcatgtaggggactagaccgctcattaccaaattacataggcatgtccactactgtgataaatgccatatgtgctcaaccaacaatggata

SEQ ID NO: 84875 - DNA, 317 bp, Oryza sativa
  Clone ID: PAT_MRT4530_84069C.1
gacagtagaaggagattgtacgctccagccatgggttcccagctctccgccgccacatccgagccgcaactgcatggcctccggacctactcctctcctaggtccatggcgaccctgccatcggtgaggatgatcacgaagatgtcctagggcatccgctgcgactacataggctgagccaccaacgttatcatggtgacgacaacaacagctgatgctagccgcggcgaggttatggctggcaccgtcggagaacaggaagtcgacagccgagcttaagctggaggggcgcgactgctgccttgagaccggcgacc

SEQ ID NO: 84876 - DNA, 712 bp, Oryza sativa
  unsure (1)..(712): unsure at all n locations
  Clone ID: PAT_MRT4530_8406C.1
ggagttttttttttttttttgtgggaacaacatgttaactttggatcagcaccagatatgcagaattttacaagccatggtacaaccataccgaaaacagattgtaacaattaaccatacacacagataagtatatctgtgagatgacaagggaagcacccaaacctgccggtaaacaaggcataaacacgcatgcagaggtaaacacacaatgctccacggaaggaaaccaataactcctgctgatgaatgacagataacttataattctatgcatcaaactacctagctgaaggtactgtctcacttgaatcaactgcctcgtctattgtatctgcttttgagttcttctcttctgtgatgcagtctgaactatcaggatgagacgaatgagatgagtcctggaaggagctggtcagatcaggcttgaacatctcatcattctccaagttggaaagcttctcagcagattctcccttgagcagctcaacgacttcagacattatcggcctctgttcctgtttgttctgactgcatgcaagccccaacaagcaccattcgctttcagttcagcctcgnacngaagacatcccttggaggctttgggtcagcaatttccttggaactttttgtcacgggcaagtgggagtgcccactccngtgatagttagcttcgtagnngggntnagctcctaaatgggcnnatttcant

SEQ ID NO: 84877 - DNA, 300 bp, Oryza sativa
  Clone ID: PAT_MRT4530_84070C.1
atggcggacgacagggagaggggcggtggctgcggcggactagaaaggctcaagcttgaactggagccatgcctaccctcgcggagctcatcggcaagccgcatcatctttctctccttgtcgagctcctcctacgcaatcttagcctcccgtatcatcttcaccgcctcgccacccctgccatccatgccgccggtggcaacgaggccgctcctcacaagctcgtcggacagttgctgcgaccctactacatacacgtatccgcgctttgctcgcctgcgtgcactcgccaagcgatga

SEQ ID NO: 84878 - DNA, 1725 bp, Oryza sativa
  Clone ID: PAT_MRT4530_84071C.1
atgccgaacgcctctcccctccaccacctcgcctccctcctcctccttgccctcgccctcgcgccgcgccccgccgcgcccgcggccacggaccgcgcggcgctgctggccttccgcgcgttccttcccgccgccctcccgcgcggcgctcgcctcccggcggcgccgctcgcgctgctccgccgcgtccgcgcgctcgacctctcggccaacgcgctttcgggcgagctgccgtgctccctgccgcgctcgctcctagacctcgacctctcccgcaacgcgctctccggggccgtcccgacctgcttcccggcctcgctcccggctctccgcgccctcaacctctccgccaacgcgcttcgcttcccgctctccccgcgcctctccttcccggcgagcctcgccgcgctcgacctctcgcggaacgcgctcacgggcgccgtcccgccgcgggtcgtcgccgaccccgacgcttcgggcctcctcctcctcgacctctcccacaatcgcttctccggcgagatccccgtcgggatcaccgccatccggagccttcagggattgtttcttgcggataaccagctctccggggagattccgactgggattgggaatttaacctacttgcaggcgcttgatttgtcgcgtaataggctctctggtgtagtgcctgctggccttgccggctgcttccagcttctgtacctgcggcttggggggaatcatctttcaggagcactgcggccggagcttgatgcccttgacagtttgaaggtgttagatttgtcgaacaaccgaatatctggtgaaattccgctgccgttggccgggtgccgatctctggaggtggtgaacttgtcaggaaacaagatcacaggggagctcagtggagctgtggccaaatggcagagcttgaggttcttatcactggctggtaaccagctctctggtcagctaccggattggatgttctcgttcccaacacttcagtggattgatttgtccggcaataggtttgtgggtttcatcccggatggtgggttcaatgtcagtgccgtccttaatggtggaggcagtggtcaggggagtccatcagaggctgtgcttccacctcagctgtttgtgtcagtgtccacggatatggcaggccggcaattggagctgggctatgatcttcaagcagctaccgggatagatctgtctaggaatgagctccgtggggagataccagacgggttggttgcaatgaagggactggagtatttgaatctctcttgtaattatttggatgggcagattccttcaggtattggggggatggggaagctacggacccttgacttctcacataatgagttgtcaggggtggtacctcctgagatagctgccatgacagagcttgaggtgcttaatctctcctacaatagcctatctgggcctttgccgacaactgatgggttgcagaagtttccaggagcattggctggaaaccctgggatatgcagcggggaaggatgcagtgcgcattctaggatgccagaagggaaaatggcaggaagcaatcgccatggttggcttggtggctggcatggagagaacggatgggtatccctaggtgcattctgtatcagcacaatgactagcttctatgtatcattggcaactttgctgtgctcccgcaaggcaaggaactttgtgtttcggcctggaaggatggaatattaa

SEQ ID NO: 84879 - DNA, 455 bp, Oryza sativa
  Clone ID: PAT_MRT4530_84072C.1
gaggactgttggggcccccggggtttatttatggaccaccattaaaaaaaaaaaagcccccagcacaaacgggcccaaaaaactcttgacccgacccgggaaacacccaaaacaaacgaagtgctgaaaaaaaaaaaaggccacctaggggaagatggggagaaaaaaggggccattactttttctgaagaaaaaaaaccccccttggaaaccacgccaaaaacggctgggcatttttaacaaccgggaaccccctgccaaaaaaaaaaaactctttttcccccgggtttattctttttttacccaggacgccccaaaaaaaaagggccttgaaaacaacgggcaccttattaaaagctttgggggttgacttggcccccaaggccaccagggattgcagcaggaccatttggaagggttaatcgggcccattagccccgaggaatttttttttc

SEQ ID NO: 84880 - DNA, 2603 bp, Oryza sativa
  Clone ID: PAT_MRT4530_84073C.1
atggggtgcacggcgtcgaaggtggagcaggaggacacggtgcggcggtgcaaggagcggcggcggcacatgaaggaggcggtggcgtcgcggcagcagctggcgtcggcgcacgccgactacctccgctccctccgcctcaccgccgccgcgctctcccgcttcgcgcagggccacccgtcgctcgccgtgtcgcaccacaccgcgccggtgctcctcaccacggccgcgcccgcgctggcgccgacgccgacgccgccgccgccgtcatccacggcgtcgtcctcgctcccgccaccgacgccgctgctccccaagcaccagcaggcgccgccgccgccaccgcccacgcagtcgcatcagccgcctcctcccgtggcggtgagggctccccgcggcgggccgcgtcgcctcaaggtgccgcacatcctgtccgactccagcgtcgccagcccggcgcggtcgtcgttccggaagccggtggtggggacgccgtcgtcgtcgtcggcgtgggactgggagaacttctacccgccgtcgccgccggactccgagttcttcgaccgccgcaaggccgacctcgaggaggccaaccgcctccgcgagctcgaggaggaggagaaggcccggggctacctccacccccaccacctcaaggaagaggacgaggtcgacgacgacgacgacgagagggaggaggagatgcattgcggcggatgggaggacgacgacgaccactacgcgtcgacgaccacctcggagaccagatcggaggagggggaaatggggaacagatcggagtgcggcttcgcggccagatcggagtacggcggcacggcgccgtcggagtacgccgccgcgccgctgccactgccgctgaggaggagggacgagaggtcggaggccggggactcctcctccacggtcacggcggccgccgagatgcggatggtgatccgccaccgcacgctggcggagatcgtggccgccatcgaggagtactttgtcaaggcggccgaggccggcaatggcgtctcggagctcctggaggctagccgcgcgcagctggaccgcaacttccggcagctcaaaaagacggtgtaccactcgaacagcttgctatcgtcgctgtcgtcgacatggacttcaaagccaccattggctgttcgctacaagttggacaccaatgcgttagagatggagtcaatggaagggaagagccatgggtcgacactggagcgtcttttggcctgggagaaaaagctctatcaggaggtcaaggctagagagagcgttaagattgagcacgagaagaagctttctactctgcagagcctggagtacagagggagggatagtaccaagctggataagaccaaggcctccataaacaagctgcaatcgttgatcatcgtgacttcacaggccgcaactaccacatcctcagccattgtcagggtgcgtgacaatgagcttgcaccacagcttgtcgagctttgcttcgcgctgttgagcatgtggagatcaatgaaccatttccatgagatccagaatgaaattgttcagcaagtccgtggtctggtagacaattccatggctgagtcaacatctgatcttcaccggcttgccacccgtgatcttgaggctgctgtctcagcatggcactcaaacttcaaccgtctcatcaagtatcaacgtgattatatacgtgccctctatggctggctgaagctcacactcttccaagtggacagtaatatcccacaagaggcttacacctcgctgatctctcgtgaactcaccaccttctgtgatgagtggaagcaagcactggaccggcttccagatgcttcggcttcggaggctatcaagagcttcgtgaatgttgtccatgtcatctacactaagcaggcagaggagatgaaaataaaaaagcggacagagacatattcaaaggagctggaaaagaagaccaactcacttcgagccattgagaagaagtactaccaatcctattcaatggttggccttggccttcctggcagtgggcgcgatggcattgaaagccattcgttcgatgcccgcgatcctcttgcagagaagaaaaccgagattgcccaatgtcggcggaaggtggaggacgaaatgacaaggcatgctaaggcagtggaggtaactagatcaatgacactgaacaacatccaaacaggcctgccaggaatgttccaagccatagctggtttctcaggaacagttgttgaagcccttgacgttgtctgcaggcgagctggatcggtgcggtagaagcttgcgctgccagactttccaagaaaccgttcgttaagtctttttgggtggttcagtaatttatatagggaaaatgcaatatatatagctaaaattagtgatgagaatatgggggagaaggctcccttgatgttttgccttgttgggagttggtcattttggttgtagataaatgattttactcaggattgttgatgttcttttgcttgtcctgtgaagtgcaagggaagattacattgtacaaaaaaaaaaaaaaaaaaaaaaaaaaaatctaacggcgagttatgcttgcactt

SEQ ID NO: 84881 - DNA, 1637 bp, Oryza sativa
  Clone ID: PAT_MRT4530_84074C.1
ttttttttttttttttttaaggacaagctgacaacactgaaacaaataaccagcgcgtccatgtttcgctaacagtagcaagaaaattacaaatatgtacagctctgagcaagctcgcatgagaaacgcaagtttccatcactcctacaatcctacacgatcctgtgcactaaaattctctcaagtctacgaaaaactgtacagatgcatcattcgcagattcagcacaattcaagccttcaaggaccaccaaatcaccaccggcaaattcctggtttctcagtacggcagagggcgagcgtctcatcgtacttggaaggatagacgaaaccccacagctcgacatcttttaccgcgaagtctggggaatgagataaacacatgttgttaaaagtctctgaattggaacttgaaccactcaacaggtcggcatctagataaagtgcgaaatgacctccacctcctaatgccaaatagtcggtggagcacactgtgaaatagttattagcaccagtcggtcgatatatactaggattgctgtgtaaattagtgaaaacaaagcagctattgctcccctgatatttctttgcactggttggctgcaatggagcctcaactaaaccgccaaaaactgcaccttctttatccccaactaccatattaaataacagacatgttttaaacctgtatagcaagacccagttcattcctttggcaagaacaggaaaagatgcataaatattgaacctcatcacttctgacaaaagaacagatggttctgacatagctggcaaattaatgaaggaagcaacttcctttgattcttcaagctccaatacaggtgaaactgattcaacatgatctaccacctctctatcaatcttaggctccacattttgtttgaaaccaccaattctagccgctttgctaatgatttttccaatggaatgttttcctctacttaggagcccagactttcccttttttgacttccccattggtgttaaagttgggtatcccaattccccattctgatcaggaattatctccatggaaccattactagaaccagatgatgacaggaatgagatcaagaatgctctaaaggaagatgtgtcagggccctccatggaaccagtactagaaccagatgatgacaggaatgagatcaagaatgctctaaaggaagatgtgtcagggccatcgggggtgtcagaattttgctcagaatctttgtcatcctctagatcgtgttagacctcgtccaccacggggagtggggaggaaggctcgcgctcggagattgggttgaggatgacggtggtgaggtcggacacgaagtgcgccgccttgctgcccagcgacgacggcaggtaccccatcctcctcgccacccaccccgcctatttctggaggggagcgcccctccgcgtcccgcgcggccgctaagtttaggaggcgacgagcgcgcgcgcgcgcgagggagggggacgcgagtcaaggcgagctcgtccgactcccgaaagcttccgggttggggattcctctgccgggggagacgagccgccggccgcggtggttgcaggcaggaggaggcgaggatttgggccttttcctccccacgcttcgcttctccc

SEQ ID NO: 84882 - DNA, 2110 bp, Oryza sativa
  Clone ID: PAT_MRT4530_84075C.1
atgtacaccgtcagggataggaaatgctcgctgcaaaactagatctcctcatgaaacgtctggacgactaggagaagaaacctcaaggcgccgtcaaggccttggactcgcatatcatgtgcgagctggcgcaactagttgccttaatacctgctaaggagtagggaaggattctgggacaacctgaacattcctttgagaatgttaaggcgattaccacgaggggaggagttaagcaagctagcaaggaagcacgtccttctaaaattgaagaagaggaggcacagaccgagaagtctacgccactagaatattgtgacaccacgatccatatcaacattccactgatggatgtgatgcaagtacccacgcacgctcgctatttgaaggacatcctgaataacaagaggccattgcctatcacggagatggtaaaactcatggaggagtgtagtaatgctatactccatcgactcccggagaagaagaaagatctgggatgtcccacaatcacatgctcgattgggacacaacacttcgaccaggtcctctacgaccttggagccagtgtcaacatcatgcctaaggacgtccttgacaagctgaactacatagtgttagtaccaacaccaatgcggctgtagctggctgactcatcggtccgctacccagcgggaatggcgaagatgtgccagtaaaaatctgaaatttcttcatcccggtggattttgtggtgcttgacatgcaatcggacaaggaaacacctttcattcttggatgtccattcctgagcaccgtcgaggccagcatcattcttggactcgatggtcaagatcaagtatggaccaaatccgcagaacatcagagaggtcgaagtgaagcttccaaagacggacagcctcattgccttcatgaagaacttattagagaaggaagcgtcaatgagtagaccccgtccaaagaaggcaccacttaaaactggtgcgcaggccaagcagcctgtgaatccgactcgcaagaagctgccgcccacacccaagaccaagaagatgtggcagatcaaaaaaacgacatccgctccaccaccttcggagacagaatcaagagtcggctttcccatctgttcaagaagggatcaggctctcaatcgagccatcaccaagacgagtcgagtgctcactcgaccgtggacatcgcaatggaggatgcaaacgctgctccaagattgttgagtgactccgaccacgaccgcattggtgaccgggagatggaagcctataggatgctcaaggactggacatttgctcacacccgagcatatgatccgcaacttctgctaaagataggtatggatgctgattttagaactgtgtggaaagctgttggttggcagaaatttgctgaagtagatgagctaggctctcgtttgcttactttgcaatttctttgcactttgcgggaagtagaagatggaatttcttttcgtcttttccgtaatgaacttgagcttacatggagaggcttaagtacacttctcggttttcacgatatctatagatctaattttcagaaggcaacttccggttttgagaaagacagattttgagaagacatttctgatgcaccaatttgcaagaaacccaaaactaatgacatttataatcccacacttaggctcatgcataaatggattgccatgactttgttccctagaggagatgttagacctattagggaggatgagttgattattctttatgccatgacgatagaggaatttcgtgcaggtacaatgcatagggagccccgtaacatggtaagagatgagcatgaaggatcaacgtcctaaccaccagcgcatatgtacgaggctgactgggaaccaactggggatgcccctggatggacccaagtgccacactacagcgctggaggttcaacctggcagagtgccggtgaacaccagtggcaagtgcctcaagacacatcacatgagaattcccattcctccaacaccagtggcatgccgccaatctccaagatgtggagctccagttcctctcgaggggacttgggagagctcactaggagaatggacacactggagctg

SEQ ID NO: 84883 - DNA, 522 bp, Oryza sativa
  Clone ID: PAT_MRT4530_84076C.1
atggcgtgtggcaaagtctatccacctaagcacaatgcctgcgtggaggagaaaaggaggtgggacccacgtgaaaaccagtaccgcggccgtgagatccaccgcactgctcgacgccgtttccgtcttctgacgtgccactcgaaggccgctcaacgccgccgccgtcttccgccgcgccgagctccaccaaaggcggtgagatacggggagagagaggaccggacgagaagcgacgaggagaaggcgaacgggaaggcatctggccgccccgccgccatcgccgccgctgcttcggaagaggagaggggggttggatctcaccgtcccgccgccctcgccgctcaagccatcctggcgctcgtgcctcgcgccgccctcgatccgccgctagcgacgtcgctgctcgcgctgcccgaccgctccgtcgccgctcggaccgccacccgccacccctcacacccggcccaagggagggaggcaggcgccggcgccggcgccgacggatcgcccggagactag

SEQ ID NO: 84884 - DNA, 359 bp, Oryza sativa
  unsure (1)..(359): unsure at all n locations
  Clone ID: PAT_MRT4530_84077C.1
ggaatcaacagtagtacacaactgtataaactaagccattcatcaaacactgatcaaatgaatcatgttcagagagggtgataaacaaggcgaataacacgttattatgccggacacgaaatttagcagcatttattcataggagtgcggtggagatcagttccaagaaacanaacttttaagctttattgaacccgttgattatattctaataagcaggcggacaggagacaggagtatcagaaggccatcaagcgtccctgcatggaggaagggacgatgctgtgctgatggtgctagggcggcggatgatcgtactggggaaggtagccctgtttctgggggtacccaagcggggg

SEQ ID NO: 84885 - DNA, 815 bp, Oryza sativa
  Clone ID: PAT_MRT4530_84078C.1
cggatgcgtgggcggacgcgtggggggttggggatggcgatgagcgcgacgagcagcaacctcatcgtgtacctggtgcacaagtacaacgtgaaggccatccacgccgcccagatctccaacgtcgtccgcggctgcatgcagctcgcccccgtccgcgcccccgccctcccccccgccttcttcggcccctggcccctcgccggccccggccccgtcttgcgcatgcagtcatttgtactgttcacgttgacggccgcgctcccgtcgctactcccgccgccgtgccagcgtggcgccggcggcgggggcgccaccgcgacgtcgtgcgaaccgccgaacgccgcgcaatccgccgtcctctacgcggcgctgtgcctcctggccgcgggcaacggcggcacgcggtacaacatggcggcgctgggcgccgaccagttcgccggcgaggggcagccgcggcggcggcggcagggcggcgggttcttcagttgctacttcgcgttcctgtacgcctcctacgcgaccggcgacacggtcctcgtctacgtgcaggacggcgtcagctgggccctcggcttcggcgtctgcgtcgccaccaccgggctcgccctcgccgcgctgctcctcggctcccgccattaccgccggcccgtccccaagggcagtccgttcacggccatggccagggtcgccgtcgccgcggcgaggaaagcaacggtggatttgggttcacgagtccaatattaccatggatgcaatcgtgacgacgcagtgccacgagctgaccaagctccaagtgacagattcagaaa

SEQ ID NO: 84886 - DNA, 669 bp, Oryza sativa
  Clone ID: PAT_MRT4530_84079C.1
ccattatcgatcgaaaatacataaaattcaccgctgacccgtgaaacatgaggatatgttttgtgtacagatgacatgaatcttttcggggatatgagcagttctcacagtatttgtaaactataacctacctccatggttgtgcttaaagtggaaatacgttatgttgcgattgttaatccacggaccgaaacaacccgtctcaatgataatgatgtattgttagagccggttatcgatgatctagaaatactctggtaagaactttaatctccgcgtcctattgttttgcaccattaatgactattccatccttggtaatctttcgagacaaactgtgaaaggaaaaaaaggtttgctcaggctgaaaaaatcgcaaaatatattttacatgggtcataggagttagttggctccggttacgtcactcgtacagaaaaaagaagaaactttttcaacggtaagaaagagcttcaacatgctccagtggatttaaccatagatgaggtgcatgacatgattaatatataagtaatgagtttaggaagaaaatgaaatgtcctaaggaaaatgagaagggtttgtggaagaaaatccctatatattggcaactaccttattggaaagatatcgacgtccgtcattacattgatctcatgtatacttctt

SEQ ID NO: 84887 - DNA, 1098 bp, Oryza sativa
  Clone ID: PAT_MRT4530_8407C.1
atgcgtcagctagaggaaagctacactacaagcccagccgttgaccacgctggcttgtggtaagtacgaggaattcttctaggagggggtggcgccgacaagcgggccccacatggcagcggcgcacgggtggtcagtctaccatggactgggaccacgcgggtggtccacgggatcgacgacccggatcggcccggggccgatcggacggtgcggcggcgtcctggctcggctcggctcggcacaaagccggccggccggccatggcaagggcggcggcgcgcgcgcgttgccggtgacggcaaccggcggcgggagacggtggcgcaaaggcggcggcgcatgaccggggcggcggctcgacccggcgcggctaggaaggagagggaggggaatagaggaggagggatgcctcaccgagagtggccggcgcggaggaggacgacggcgaacagcgacgacgagccacgggaggacaacggtggcgacggacggacgagctccgagatgccataagagaggaaaagagagagattagagggagaggggtggaccacggcgatcggaaaccatggccgaaggcggcggtgtaggtggtgctcactggagtgcgaggggatgcgggttccggcgacggacctcgatggaggaggtgcggacggggaactcggacgtggccggtaggggcgggattcgccggccgacatgggggaggtggaggtggaaagagaggcgggattcgaaattcgaatcccggccatctcgggcgcgggcgcgagcgggagagagggggaagtgggtgcgggagacgcggcgcatgcgcgggcgtggccgacgtggcccggaggaggcggggacgtgggcgcggcggcggttgcgggcgcggcggcgagcggctggaggttgggggaggacccgacaggtgggccccacctgtcggtgaccccgagagagaggaaggggcgcaggctgagccaggccgtggcctccggccggcccagcaaggcgcggggagagatgagggggaatgggccggcggcccactaagggaaaaggaaaaagaaaaaagaaaaaggaagaaaggaatttccaggattt

SEQ ID NO: 84888 - DNA, 336 bp, Oryza sativa
  Clone ID: PAT_MRT4530_84080C.1
atggctggtgcgcggcagggacggcatggctgcggcggcagcagcggtacggcgcagcacagcaacggcggcgacacgaacagcagcgacgtggcagcgatgcacggctggcagcaagcggtgcacggccggcagaggcggcatgtggcgctaggcggctgcgatgctagggggcagcccacggtggactcggtccaccgtggcacaagcgcgtgcgcacttaacaaggaagaccacgtggcggccatggcggcacagcggggtgaggtggtgctgacgtggcgccacgagggcaccgacgcgtggccgagggggaacgccacaaggacggcgtag

SEQ ID NO: 84889 - DNA, 4787 bp, Oryza sativa
  Clone ID: PAT_MRT4530_84081C.1
ctgagtatcgctatcatcctcgtcaaccacagggaagtgaccgtggcagctaccttgagactgaaggaattgagaatgatgctaccacaaggcatttggttgagatgctgtgggctatggatgaaagtcgtgcggagactgtgttagcagctcaagatcgtgaagaccagaatcgtggtaagatttgcaagctcgaagacaaggtggatcgtttggagaaggaattagccgcgttaaagggagaagcaccgccgcagaaggccaggattcgtctcaccgcaaggaagagagctttatttgtcccacgctatcaattggtgccaaagctcccccccccctctcccctcccggcctgcccggcccaggccgcctccccctcctctcctcctgggccggccgcccggcccaacccgagcggcgccctcccgcccccggctctctcccccatcctataaaatgggatcctcatcccccgttctctcgttttagccccctcccgagcctccccgtggtccctagccatctccccgccgccctcctctctctcccacgccgccggccgcctccagccgcctgtgccgcctcgaccgtgcgccggccggtcgcgccgtcgcctcctccagcgtcgccgccacctcctccaccccggcctgccctccgtttcgcgcggtgaccaccggaggcgcgttcccgccatcgcccttctctttcctccgcgccggccgcctccagccgcctctccctcctcgccggagcaccgtccggccgcaccgtcttctccctcggcctcgcagccacctcctctccctcggtcagccctccgtttcgcgggggaagcaccggagacgcatcctcgccggcaaaacagtggcgttgccgccactgttccaccttcggccgccactgtcgcgtttcccgtgcaccggccgacgtcgccaccacctccctcggctccgcgacgccgccctcatccccggcatcacctcctcctcgcccgaagttcgccggaacgccgccgccgcgccaaccacccattcctcctcgtcggctcgtcgccccgctgcaccaccaccttctccaacatcgcagcagcgcgttccacgccgtcccctcctccgctcagccgctgctgcctgccatcatcgttttcctcgtcaccgttcgtcctcgccgatcgacgtcccgtcggtcgcccggctcgtcgtctcgcggcgccgcctccgtcatcgtcatcgctgcggcgtgttccacgccgtcctcgtctccgtgcagccgctgccggctgccctcgtcgcctcctcgccggttccggtcgtcgtcgtcgtcgtcctctcgtcgttcccggtttcgctcgtcgtggcgttcgtccctccgtcaagccgttctcgtccgtcgtccgcgttcgtccagtgtgccgctgcagcccccgtcgtcgtcttcgtcctcggctccgtgtcgtcaagcctagtgccggccgcgtctcgccttcgttcaaggatcgccgccgaagtcgttccctcgccgtccgtctccgccgcgcccgttcgtcgttgtcgttcccacgcctcgtcgcgtggtggtaaggtttcctcctctcgctgccccgtcctcgtcctttcggtgtcgccccgtacccgttgtgcggtcgtcgaccccggtacccgtgtaccggtgtcggtagtcgttcacgtgtgcgggtggtgaccgtgtagtgtccgtgttagtgtgcccgctcggtagccgcgtggtttccacgtgtgcaacccgtgtggtgtttatgcaaagcttaattataataatccgcaaatctccatataacagcattaaacttcggatgatcatatcctggtcatacgagctccgaatcgacccgttcaagtctcctaatgtttgttataacctaaagaaccctgtgctttctttttatgtattgttattgcttctttataggcttgtagctttgcttgtgtgctttgcgtagcttctgtcgttccggaggttcccgaagcgtggttcgcggtcgccgccgaaggttcggaaggccgttctctctgagcaaggcaagtcacatcatccttgagcatattgaatcccaggcacagggctggtgtcctgctgctagggggctcaatcctgcctgcctgtcccgggggttccggccgtaggtggggttgggtcggtactcttgtttatggctaggatgggttgggaactatgtcacgtcttccgtccgtataccgtggtggtatgtggcatgtggttgcacgtgaggaagatgtgtcttgtgggtaaagttgtacacctctgatcagagtataatctattcgaatagccgcgccctcggttatgggcttcttgctcaacagacacaactcatgaacttgatgaataaggtgtttatggaatacctagacaagtttgtggtggtctttattgatgacattcttatctactctcgaaccaaagaagagcatgaagaacatcttcgccttacattggagaagctacgagaacatcaactgtatgctaagtttagcaagtgtgaattttggttgtctgaagtgaaattccttggtcacgtcatctcagccggaggagttgccgttgatcctagtaatgtggaatccgtaaccaactggaaacaaccaaagacagtttcagagattcgcagtttcctaggcctcgcaggatattaccggaggtttatagagaatttttccaagattgctaagcccatgacacgactgcttcagaaagatgtgaagtacaagtggtcggaagaatgtgagcagagttttcaagagttgaaaagtcgcttagtatcagctcctattttgattttgcctgatccaaagaagggtttccaagtgtattgcgatgcatccaaacttgggttaggttgtgttctaatgcaagatgggaaggtggttgcctatgcatctcgtcagttatgtccgcatgagaagaactaccctactcatgatcttgagttagccgcagtagttcatgcgttgaaaatctggcgtcattatcttttcggtactcgtacggagatgtacaccgatcacaagagtttaaagtatatttttactcagccggatctgaacatgagacaacggagatggttggaattaattaaggattatgacatgggaattcattatcacccaggaaaggctaatgttgtagcagatgctcttagcaggaaaggttattgcaatgctacagaaggacgacagttgccattggcgttatgcaaggaatttgaaagattaaatttgggaattgtcaatagaggtttcgttgcagctttagaagcgaagcccactctaattgatcaagttagagaagcccaaattaatgatcctgatattcaagaaatcaagaagaatatgagaagaggaaaagctatcggtttcttggaggatgagcaaggaactgtatggttgggtgaaagaatctgtgtccccgataacaaagatttgaaagatgcaattctgaaagaagctcatgatactttatactccattcaccctggtagtaccaagatgtaccaggatctcaaggaaagattttggtgggcaagtatgaggcgtgaaatcgcagagtacgtagcagtatgtgatgtttgtcagcgagtcaaggcggaacatcagaaacccgccggtttgttgcagcctttgaagattcctgaatggaaatgggaagaaattggtatggattttattactggtttacctagaacgtcatcaggccatgactctatttgggtaatagtcgacagacttaccaaagtggctcatttcattccggtaaagacaacctattctggaagtcgattggcggaattgtatatggcaaggattgtgtgtttgcatggcgtccctaagaagatagtgtttgatcgaggcagtcaatttacttcaaatttttggaagaaacttcaggaagagatgggttctaagctgaattttagtactgcttatcatccgcagacagacggacaaaccgaaagggtaaatcagattttggaagacatgttgagagcttgtgctttagacttcggtggaagttgggataagaatctaccctatgcagaattttcatacaacaacagttatcaagctagtctacagatggctccttacgaagcgctgtatggtcggaagtgccgcactccgcttttgtgggatcaaacgggagaacggcaggttttcgggacggatatcctaagagaagcagaagaaaaggtaaagatcattcaggaaagattgcgagtggctcaatctcgtcataagagttatgccgacaatcgccgtagggatttgagttttgaagaaggagattatgtgtatcttcgtgtcacgccttttcgaggagttcatcgttttcgtaccaaaggaaaattggcaccgcgttttgtgggaccttataagattgtcagtagaagaggagaggtcgcttatcagttggagttacctcaatctttggcaggagtccataatgtgttccatgtgtcgcaattgaagaagtgtttaagggtacctaccgaagaagctaatcttgaacagatagaagtccaagaggatctgacctatgttgagaaaccaatccgtatcttggaaacaagtgagagaagaaccaggaatcgagttatccgtttttgtaaagtccaatggagtaatcactcggaagaagaatcaacttgggaacgagaagatgaattgaagtcagctcatccgcatttgttcgccagttcttccgaatctcgaggacgagattctgtt

SEQ ID NO: 84890 - DNA, 5321 bp, Oryza sativa
  Clone ID: PAT_MRT4530_84082C.1
ttattaaactttgataattgtttttgttgcttaataattatttccggtgctctgaaaattcaagtaaaatttgagggctccttttagaccaaggagaatttaacaaaaattctccgggccacatttgaatttttcttgtacgtattttattccgttgtttccggagagtccgttttcgccgaagaagagtttgaagagttccaaggccagcaaggcaactcctggtttggaatggtatattcctggtttggagatagaactgtgcagccgggatggttgttcagaatggttgggcctatacaacaggatgccgcgctacaagcctgagtacctatttggtgttgagggttttgtccaggagttgcgtacgatgtcctttgccattggatttgggactgcccctttttatgcccagattcctcatgatcgtcatgaagagaagtgccgagtcaaagtcaccttaaacagcaatagtgaagaggtcccctcagtaatgttcgaagctggaggaagaaactacatccatgcatgtcaggaagtggcaaggatcgccataggagaactccgtgatcgctatagtgatcagttggccgacactgagtatcgctatcatcctcgtcaaccacagggaagtgaccgtggcagctaccttgagactgaaggaattgagaatgatgctaccacaaggcatttggttgagatgctgtgggctatggatgaaagtcgtgcggagactgtgttagcagctcaagatcgtgaagaccagaatcgtggtaagatttgcaagctcgaagacaaggtggatcgtttggagaaggaattagccgcgttaaagggagaagcaccgccgcagaaggccaggattcgtctcaccgcaaggaagagagctttatttgtcccacgctatcaattggtgccaaaggttcttaatttccccgtgaatggcgcccccaatcgccgggaacggccgcgccattcccggccgccttccattgccgccggccgtggttcccgccgccgttcccgctcctcccgtggccggctctctcccccatcctataaaatgggatcctcatcccccgttctctcgttttagccccctcccgagcctccccgtggtccctagccatctccccgccgccctcctctctctcccacgccgccggccgcctccagccgcctgtgccgcctcgaccgtgcgccggccggtcgcgccgtcgcctcctccagcgtcgccgccacctcctccaccccggcctgccctccgtttcgcgcggtgaccaccggaggcgcgttcccgccatcgcccttctctttcctccgcgccggccgcctccagccgcctctccctcctcgccggagcaccgtccggccgcaccgtcttctccctcggcctcgcagccacctcctctccctcggtcagccctccgtttcgcgggggaagcaccggagacgcatcctcgccggcaaaacagtggcgttgccgccactgtttccaccttcggccgccactgtcgcgtttcccgtgcaccggccgacgtcgccaccacctccctcggctccgcgacgccgccctcatccccggcatcacctcctcctcgcccgaagttcgccggaacgccgccgccgcgccaaccacccattcctcctcgtcggctcgtcgccccgctgcaccaccaccttctccaacatcgcagcagcgcgttccacgccgtcccctcctccgctcagccgctgctgcctgccatcatcgtttcctcgtcaccgttcgtcctcgccgatcgacgtcccgtcggtcgcccggctcgtcgtctcgcggcgccgcctccgtcatcgtcatcgctgcggcgtgttccacgccgtcctcgtctccgtgcagccgctgccggctgccctcgtcgcctcctcgccggttccggtcgtcgtcgtcgtcgtcctctcgtcgttcccggtttcgctcgtcgtggcgttcgtccctccgtcaagccgttctcgtccgtcgtccgcgttcgtccagtgtgccgctgcagcccccgtcgtcgtcttcgtcctcggctccgtgtcgtcaagcctagtgccggccgcgtctcgccttcgttcaaggatcgccgccgaagtcgttccctcgccgtccgtctccgccgcgcccgttcgtcgttgtcgttcccacgcctcgtcgcgtggtggtaaggtttcctcctctcgctgccccgtcctcgtcctttcggtgtcgccccgtacccgttgtgcggtcgtcgaccccggtacccgtgtaccggtgtcggtagtcgttcacgtgtgcgggtggtgaccgtgtagtgtccgtgttagtgtgcccgctcggtagccgcgtggtttccacgtgtgcaacccgtgtggtgtttagtggagtccgtttgtcggccactcgcctcggttgacacacgggatccgcttccgtcgaaccgtggaccgactctgtgtactcggtctaccgcggtcctttaggttgacatgtggggtccgcatgtcaacggcgcagccttcctgtcttttccaggctagcgcttacacatgttttataattgcaaagcttaattataataatccgcaaatctccatataacagcattaaacttcggatgatcatatcctggtcatacgagctccgaatcgacccgttcaagtctcctaatgtttgttataacctaaagaaccctgtggggttgggtcggtactcttgtttatggctaggatgggttgggaactatgtcacgtcttccgtccgtataccgtggtggtatgtggcatgtggttgcacgtgaggaagatgtgtcttgtgggtaaagttgtacacctctgatcagagtataatctattcgaatagccgcgccctcggttatgggcttcttgctcaacagacacaactcatgaacttgatgaataaggtgtttatggaatacctagacaagtttgtggtggtctttattgatgacattcttatctactctcgaaccaaagaagagcatgaagaacatcttcgccttacattggagaagctacgagaacatcaactgtatgctaagtttagcaagtgtgaattttggttgtctgaagtgaaattccttggtcacgtcatctcagccggaggagttgccgttgatcctagtaatgtggaatccgtaaccaactggaaacaaccaaagacagtttcagagattcgcagtttcctaggcctcgcaggatattaccggaggtttatagagaatttttccaagattgctaagcccatgacacgactgcttcagaaagatgtgaagtacaagtggtcggaagaatgtgagcagagttttcaagagttgaaaagtcgcttagtatcagctcctattttgattttgcctgatccaaagaagggtttccaagtgtattgcgatgcatccaaacttgggttaggttgtgttctaatgcaagatgggaaggtggttgcctatgcatctcgtcagttatgtccgcatgagaagaactaccctactcatgatcttgagttagccgcagtagttcatgcgttgaaaatctggcgtcattatcttttcggtactcgtacggagatgtacaccgatcacaagagtttaaagtatatttttactcagccggatctgaacatgagacaacggagatggttggaattaattaaggattatgacatgggaattcattatcacccaggaaaggctaatgttgtagcagatgctcttagcaggaaaggttattgcaatgctacagaaggacgacagttgccattggcgttatgcaaggaatttgaaagattaaatttgggaattgtcaatagaggtttcgttgcagctttagaagcgaagcccactctaattgatcaagttagagaagcccaaattaatgatcctgatattcaagaaatcaagaagaatatgagaagaggaaaagctatcggtttcttggaggatgagcaaggaactgtatggttgggtgaaagaatctgtgtccccgataacaaagatttgaaagatgcaattctgaaagaagctcatgatactttatactccattcaccctggtagtaccaagatgtaccaggatctcaaggaaagattttggtgggcaagtatgaggcgtgaaatcgcagagtacgtagcagtatgtgatgtttgtcagcgagtcaaggcggaacatcagaaacccgccggtttgttgcagcctttgaagattcctgaatggaaatgggaagaaattggtatggattttattactggtttacctagaacgtcatcaggccatgactctatttgggtaatagtcgacagacttaccaaagtggctcatttcattccggtaaagacaacctattctggaagtcgattggcggaattgtatatggcaaggattgtgtgtttgcatggcgtccctaagaagatagtgtttgatcgaggcagtcaatttacttcaaatttttggaagaaacttcaggaagagatgggttctaagctgaattttagtactgcttatcatccgcagacagacggacaaaccgaaagggtaaatcagattttggaagacatgttgagagcttgtgctttagacttcggtggaagttgggataagaatctaccctatgcagaattttcatacaacaacagttatcaagctagtctacagatggctccttacgaagcgctgtatggtcggaagtgccgcactccgcttttgtgggatcaaacgggagaacggcaggttttcgggacggatatcctaagagaagcagaagaaaaggtaaagatcattcaggaaagattgcgagtggctcaatctcgtcataagagttatgccgacaatcgccgtagggatttgagttttgaagaaggagattatgtgtatcttcgtgtcacgccttttcgaggagttcatcgttttcgtaccaaaggaaaattggcaccgcgttttgtgggaccttataagattgtcagtagaagaggagaggtcgcttatcagttggagttacctcaatctttggcaggagtccataatgtgttccatgtgtcgcaattgaagaagtgtttaagggtacctaccgaagaagctaatcttgaacagatagaagtccaagaggatctgacctatgttgagaaaccaatccgtatcttggaaacaagtgagagaagaaccaggaatcgagttatccgtttttgtaaagtccaatggagtaatcactcggaagaagaatcaacttgggaacgagaagatgaattgaagtcagctcatccgcatttgttcgccagttcttccgaatctcgaggacgagattctgtt

SEQ ID NO: 84891 - DNA, 449 bp, Oryza sativa
  Clone ID: PAT_MRT4530_84083C.1
ttctagactagtgtcaagagctccaaaggtagtctttaattagaattgagtaaagtctatcaccggtccctaaacttatatcgttgtgtcatcccagtccctaaactcgcaaatcaaccgttcaggtcctcaaacttgttcgactgtgtcatcccgatccctaaacttgcagatcactcgtttagatcctccaacttgttcagctgtgtcaccccggtccctaaacttggatttgaatatcatatgggtcaaataggatgggaccgaggtgacacaactgaacaagttggaggacctaaacgagtgatccgcatgtttagggactgggatgatacagtcgaacaaagcggttatctaactacatgttttatcaactttgccgaccaaccaccaagaggtaagactgggacaaccattatctgttagccaattcaaattgcaatattccc

SEQ ID NO: 84892 - DNA, 104 bp, Oryza sativa
  Clone ID: PAT_MRT4530_84084C.1
tgtttattcactcaaatattgtggacgctcaagagtccgacttttcagttataatgggtagcgcaggcgtggcgttgatccctcggactaccttcctcggccag

SEQ ID NO: 84893 - DNA, 884 bp, Oryza sativa
  Clone ID: PAT_MRT4530_84085C.1
atggcaggcaagcctgcgcctcgacgccgagcgaccagcgagtttgagatcgacctcaacaccctctccaactcccccgcctcagccgccgccgccatttgcaaggccattgatgcgccaagagcaaggacagcggcggtgcgggacgcaacaacgacagcggcgcgtgagggcggggaggaggagaaggaggcagcggcggtggaggaggagaaggaggcagcggcgctggacgaggcgtcgccacgtcggtggcaacggagaaagagtcaggggcaagatggaaatttcggaagccatttatgcggaagcgctgcgggcctgcggctgctgcgctcgcgcgactgcagctacttgcggaacagccgcgcgccatctctatcttatcatgtcctctcgacgccgccgcctcctcttccgccacagaggcactggtccccctacttcccatccacctccggcctctcccccggatcttctctgggaatggtgatgggggaagggacaacatcacctgtctccccctcccttctctgtgagcggtggtggcggaggatctcggcgccagatctggctgcatcggatggcctctcccctcccacccccttctcgctacggtgagagaccaccggcggtggcgggtccggccatgagcttaccagatccggccataagctcgctagatctggcggcggcggggagcagccgtggcggatgatttggcaagcggcgacaccaccacaactcccaagcccaagcatggcgaggcgacctctgctggcacaataaaggtttatggagccacgatccccactatcatgggtgctcagctccaacatggaggtttgagaccacagtacagggtgagcgttgtgatggcctaa

SEQ ID NO: 84894 - DNA, 282 bp, Oryza sativa
  Clone ID: PAT_MRT4530_84086C.1
atgacggttgtgacggttggaatggttggtaataccctccaaccgccgttggggatcaatcccagccttccatccaaaccctgcatccatcggcgccacgggaggttcggccgaacctggggctggcccaatccagcccaatttcagctggtggcctcctctattgctccactccgcagacttgtgaattttggcccaattcatcgtgtcaattctgagttcttggcctattcacacataagtctggttaccgacatcgtccgattgatttatcgtctgagt

SEQ ID NO: 84895 - DNA, 249 bp, Oryza sativa
  Clone ID: PAT_MRT4530_84087C.1
atggcagttctcgacagagagccagtgagaggcgccaaatctagcagggagccagggagagtagtttccgaccaacagcgttggaaagccttggatgaatcgcttgatttcttgaagctagtcgatctgctgaaaaactccgatggacttgctcctgaactccaatcccttacgacctccatcgcgatgtctagttcatcgtcgctgctgttcttcctggtgcctcttgttctcaataaaatatactga

SEQ ID NO: 84896 - DNA, 1626 bp, Oryza sativa
  Clone ID: PAT_MRT4530_84088C.1
gtggatccccgggctgcaggaatttcggcacgaggcatattccgcgtgcatgtgaagagagagatatagagaggagagctagcgaaagtttgagtgacaaagacgcacgtacgcgcgaaaacgttgtcacgctttcgagtgatcgatacacgggggggatacacacgcaaaccgactcgactctggttcgtgacgcgggtggtggtggtgactggcgttcgcggtggcgaccgctcgcgacgacgcctcctgccgccgctggcgtgccaggcggcacctgtgcgccgtgctgagcgcccgacgcgcgggcaccaccagtacaggcagccggtgggcgtgctggcggatcgtggtggacgctgagcggcgtgcggcgaacttcctctccatccagacaggccgtcaactccgtgccggagaacaacaccgtgcgcgtcatcatgcaaatcaacgcagggtcctacatagagacaggtggtggtgccggcgacgaagccgtacatcacgttccagtgagcagggcgcgacgtgacggtggtggagttggcacgacagggcgagctgacctgcggccccgacgggcagcagctccgaacctacaacaccgcctccgtaagccgttctctctaactatttcactgctaagaacatcagcttcaagcagaacacggctccggcaccaatgcccggcatgcaagggtggcaggcggtggcgttccgcatctccggcgacaaggccttcttcttcggctgcgggttctacggcgcccaggacacgctctgcgacgacgccggccggcactacttccgcgactgctacatcgagggctccatcgacttcgtcttcggcaacggccgctccctctacaaggactgggagctgcactcgacggcgcagcggttcggctcggtggcggcgcaggggcggcacgacccgtgcgagcgcaccggcttcgccttcgtcaactgccgggtcaccggcactggccgactctacgtcggccgtgccatgggccagtactcgcggatcgtctacgcctacacctacttcgacagcgtcatcgcccccggcggctgggacgactgggaccacgccagcaacaagagcatgacggcgttcttcgggatgtacaggaactgggggcccggcgccgacgcggtgcacggcgtgccgtgggcgcgggagctcgactacttcgccgcgcgccccttcctcggcaagagcttcgtcaacggattccactggcttacacctgacgtctgaaagccgtttttcggcaccacaattaatttactggagacaagaacgtacatttgttagtacagcaaaagcgaagaatagaacattacgataaatataaagtattgaagtgactagtgcagtatatagcggtagattcattcgttcattcgttttgtctgatccggcttataatgatagctgctatagaattcaagcacagctctttacaagatctatagtagctatgtagtactgttttaaaagctttgtcatgtagacatgtacccatgcatgtgaggtgaatagtgaatatatcaattgattttgttgttacttttaaaaaaaaaaaaaaaaaaaactcgagactagtttctccctcgtgc

SEQ ID NO: 84897 - DNA, 278 bp, Oryza sativa
  unsure (1)..(278): unsure at all n locations
  Clone ID: PAT_MRT4530_84089C.1
ttgacccctctccaatattggaagcctgcttggggtgccatcgaaacnttttccaagtgaagggtttagccaccccaaatatggagtttggggngggcccaatggcccntcaggcaaaagttgttttnatgtgtaagctttaagccaagtagtgtttttagatgggcaagcaaactgatntgatccctgtananattgatcagattcattcaanccatattcaggnggttcaatcccnnnaaaaaaaaaaaaaaaaaaaaaaaaaaaaaaaaaaaaaa

SEQ ID NO: 84898 - DNA, 608 bp, Oryza sativa
  unsure (1)..(608): unsure at all n locations
  Clone ID: PAT_MRT4530_8408C.1
aacccccncannanggggncccccnggggaananannaaaaaaattggnancctaacntnggggnaaaaattcgggccnnacccccccnggnttttttanggaacntgnaccccccntnaaagaaaaaaaccattccccacgcgtccgcccacgggtccgaaccgaccgaaggaagatacctgacctaatgtaggaacgaaaactttcacttaaactggataccatcatttcagggcttaccatattacaagtctgcacgtcaggttacaaaacaacaagtgttgatacaaggcccatagatcagtacctcctgaccacagttgaattatagtgaaaatgaaaaatctcgcaatgggactacccttgagtggatctgtggtctcgatacacaacatttggatttaccacaaggcatcagctgtgttctttctgacaaatttagaacgagcattccttgattcattctgtttgtaactttgtactggtccgatagattcttctgatcaaatagcggctgtatagtattgtacactagagcaatcaacaaactgaatgtccaaatgactcatacatgggccagattccatccaaaaaaaaaaaaaaaaaa

SEQ ID NO: 84899 - DNA, 544 bp, Oryza sativa
  Clone ID: PAT_MRT4530_84090C.1
atcagttttcggaggaggttcctctgcgcatctgaggcagttgcctgaactacaccgccatgaccgcctcaagagtgtggagatcatggggttcagctcggccaagggcttggttgagctaacatgttgcattgtcaagaaggcggtctcgctagagcgccttgtgctcaacacccttcgacacaatagttgctgttccaaggaatatattccaccttacagtcccttcaacaaggttgtgcttgacgaagcctttagagcggtcgcagctataagaagttacattcaggacgaagttccgcctgaagttaacctgactgttgtggagccttgtgcacggtgtcattccttctgtgcatcatcatgatgatgatggtacatgatacaaatctgctgctaggtgctagctatagattatttgacatcttggcccgctttcggggttgttcagattgatgttattttcaaccaaaccatttttttgacaaagttgccaaaaaaatatctacgtttagtttgttgtcaaatttggtaaatagataag

SEQ ID NO: 84900 - DNA, 1811 bp, Oryza sativa
  Clone ID: PAT_MRT4530_84091C.1
tgcaggaattcggcacgagggcgcgaaaacgttgtcacgctttcgagtgatcgatacacgggggggatacacacgcaaaccgatcgatatggttcgtgagcgggtggtggtggtgatggcgttcgcggtggcgacgctcgcgacgagcctcctgccgccgctggcgtgccaggcggcgccggcgccgtgcgagcgcccgacgcgcgggcaccaccagtacaggcagccggtgggctgtgcggcggatcgtggtggacgcgagcggcggcggcgacttcctctccatccagcaggccgtcaactccgtgccggagaacaacaccgtgcgcgtcatcatgcagatcaacgcagggtcctacatagagaaggtggtggtgccggcgacgaagccgtacatcacgttccagggagcagggcgcgacgtgacggtggtggagtggcacgacagggcgagcgaccgcggccccgacgggcagcagctccgaacctacaacaccgcctccgtaaccgttctctctaactatttcactgctaagaacatcagcttcaaggcggtggcgttccgcatctccggcgacaaggccttcttcttcggctgcgggttctacggcgcccaggacacgctctgcgacgacgccggccggcactacttccgcgactgctacatcgagggctccatcgacttcgtcttcggcaacggccgctccctctacaaggactgcgagctgcactcgacggcgcagcggttcggctcggtggcggcgcaggggcggcacgacccgtgcgagcgcaccggcttcgccttcgtcaactgccgggtcaccggcactggccgcctctacgtcggccgtgccatgggccagtactcgcggatcgtctacgcctacacctacttcgacagcgtcatcgcccccggcggctgggacgactgggaccacgccagcaacaagagcatgacggcgttcttcgggatgtacaggaactgggggcccggcgccgacgcggtgcacggcgtgccgtgggcgcgggagctcgactacttcgccgcgcgccccttcctcggcaagagcttcgtcaacggattccactggcttacacctgacgttgatgacaccgtcattgctaccatcatcggcgatactgttgattgtgtcacaacaccgcgccctctcgccgatccacgccggagctccccggccgagccgcccgccggcgcggtaggccgcccttcaccgcaacgacggcgggcgctcgcgctcacgcacctcgccacccggcgcacatgtcgcctcctcgctgtctccgcccagtccgccagcccccacgccggcttgaggttggatcagtttttcgaggtggagatgaaggtacgagattatgaactcgaccaatatggggttgtcaacaatgccatctatgctagttactgccaacatggtcgtcatgagctacttgaaagtgtaggcataagtgcagatgcagtagcacgcagcggtgagtcgctggccctctctgaactgcacctcaagtactacgcgcctttgagaagtggtgacaagttcgtcgttaaggtcaggcttgcgagcacaaaaggtataaggatgatattcgagcacttcattgaaaagctgcctaatcgtgaggcgaccttgccggcttgccgctcgtctccccttccgcccgccgatggcgaccagtctgtccactcgttcgccttcgtgccgctgctgctcctccgcctgatggcccagacggtccagatcagccgatctcgccaggagagctggttggtccaacgtgacggcctctga

SEQ ID NO: 84901 - DNA, 562 bp, Oryza sativa
  Clone ID: PAT_MRT4530_84092C.1
gaccaactctccttgaaaattttgatttgtgatgccgcatgcataagaaggcacatgaaatgctgtggatcccgactaaggtgcctcgcaatgcaatgcacccacaatctgggtcaaaacccacatgtttgattcaaaatacatacgccattgagggatacttcccaccgtatactgactaggcgcagccaccctcaatcgtatccactgaacccagattgttcaaaaccaaatggttatgacggtatgacccctttaccgaagggatcttgggagtgggatatcctcacttaaaactgcctatctggtcgcgaccgacctagctgccacgaacctggttgactagggggggctaaccctcttggtccttgtggtggttgacacccctggcgggtgtcgaccctacaatgttagggcactgcacccaccgcaaacctgtgatccttcacgcaatttgccctgatgcacgggatcctcgcagactggtttcattcttctctcttggtgattgcgcttgcgatccttctcacccttctggtggaccagcgatagctcttagcct

SEQ ID NO: 84902 - DNA, 515 bp, Oryza sativa
  Clone ID: PAT_MRT4530_84093C.1
gggggaaaaaatgtcttcaaaacaaaatttcaaatcccaaggggtctttctttaaaagggagggggaaggaacccccaatggacttccagttttgagttcccaatcaaaaaaagtttatgggagggtcccataaatgccttaacaaacaaacttaggatggcaacattttttcccttttgccctttaaaaaaagcatattttttttgcccctaccccattatggcatctctcccctttaatatggcccccaaacaacccttttccccttggaaaagttgaaaccccaaaaatcaaaatttctcaacataagttctaaaatttcatcaaaatttttatgggggggaattttttaaacttttgggaaaaacattattttcttgatttttgcaaggcccctgtggggggtccccccgcatttaatctttcaacccggtgactttagtcctaaaggggaaccccacaaaaaaatctcgggaaaatgaccggaaattttaaaatgctttggccaaccatt

SEQ ID NO: 84903 - DNA, 242 bp, Oryza sativa
  unsure (1)..(242): unsure at all n locations
  Clone ID: PAT_MRT4530_84094C.1
gtagagtgaaaatagtgatgacattgtatttattgatccatacggactgtggagactaactgtggtgttgttcaaggccaccagcatcattgaggccctggactgcacgcagcgagaggtctcaccgccctaggttcgagtgaggattgatgtgcatagatgtaaatccaacgatatcgttcaaggacaatggngagaataaaaaataaaataaatagaatatatagatattgccaaaaaaa

SEQ ID NO: 84904 - DNA, 900 bp, Oryza sativa
  Clone ID: PAT_MRT4530_84095C.1
atgacggtggcggcggcggcggcgagcggcggcgtaggggggaggaggtacgcgctgctgctggcgctgaacgactcggagtacgcgaggaaggtgtacggcgggtacggcaacgtcttcgtctcggcgctcggcggcggcggcggcggaggggaggaggagaggtgggactgcttccgggtgatcgacggcgagttcccggcggcggaggaggtggggcggtacgaggggttcgtggtgagcggcagcccgcacgacgcgtacggcgacgagcggtggatcctccgcctctgctccctcctccgggcgctccacgccatgggcaagcgcatcctcggcatctgcttcggccaccaggtattgtgtcgagcattgggtggtagaattggcaaggcacgaagtggatggaacattggggtgaagaagatgacctttgtgcgtgattttgaggggtccaagttatttggggatctcaaggaaattccccaaagtgcctccatcatcgaggttcaccaagatgaggttttggaggtgcctccaatgggcagggtgttggcctactccgacaagacgccggtggagatgttcgccgtcggcgacaatgtgttgggcatccagggccacccggagtacaccagtgacatcctcctcaacctcatcgaccgtcttgtcaataacaacaccatcacgagtggcataggcgaggaggcgcggcggacggtagaggccagtgagccagaccgtcgattctggacggggttgtgcaagggcttccttaagagaccgaccgccgccaccaccgttgacatgcctccacgggaggtggcgccggagatgatgagctgcagccatatcatcgctggtggccattttgtcgcaactactccgatcggcttgtag

SEQ ID NO: 84905 - DNA, 901 bp, Oryza sativa
  Clone ID: PAT_MRT4530_84096C.1
atgggagaacatgctgaagtggccactgcccatgtcccaaacggcgtacttcttggtgcgcgctgtggtgtcggcacccgtattgtgattgccaccactagcatactgatgatccatggatcaagatcattcccatcgcatgatatgatcaaaataaaccgtgacaagaaattggagaacgttgtaggctccggtggtgtacatgaacatggcctaggcttccttcttgcgggtgggattcttgttcgagttgacaccacaaggggaggccatgccgctgcagtaggtccaatggaagatgaggaaggcataggagaacacgtgaggaaggggattgtggagagagtcgatgggcctgggagccgagccaaggaaccgcgcatcctcgtcccaccgcttggtaccgagcagataaagtcgttggatcgttataatgtccatgtgtcaaccatctgtggtagggttgcaaaggatgatcaaggggtggcattggcaagtggagggaggtacgccctatcgtccacgacggcccacaattctccacagcagccacaccatttgtcattaatgcagaatgacacagtaagggagcgtgtatggtcagggcatccttcctacctcagggctacctccaggctaacacacacgggcgtcatacctttggagttcgggccccctggcctcgtcaccgagccgaggtctgccatggggcttccttcggaagcaagggaacacagcatggtgtgggccacctgcggcccccagccaccgcatcatggagctgaccgccataagaacggcttgtcgggctgcctgctcatgatgaggtccccgagtgaagccattgtgcgcgtagctgttgtggaggcaaccgttaaagttgcctccttcgagcggggga

SEQ ID NO: 84906 - DNA, 378 bp, Oryza sativa
  unsure (1)..(378): unsure at all n locations
  Clone ID: PAT_MRT4530_84097C.1
gggagatttggtgcagaagctcgtgctcaacatctncgtcggggagagcggcgacaggctcacccgcgccttcaaaggtgtggagcagcttaatgggcaaagcccaatttttttcaaggggaggtacaccgtgaggtcattcggtattcctcgtaaccagaagatcgcgtgctacctcaccggcaagggccagaaagccattcaccttttggagagtggcctcaaggtcaaagagtaccagctgttgaggaggaacttcagcgagaccggatgctttgggttcggtattcaggagcacattgatcttggcatcaagtacgacccctcaactgggatttatggcatggacttctatgttgttcttgagcgcgctggata

SEQ ID NO: 84907 - DNA, 324 bp, Oryza sativa
  Clone ID: PAT_MRT4530_84098C.1
gtccagtctttcgactaatgatgataaagcagcaaacaattgcttgcaatttatttatttaggtattctttatggggatgccacattgcaggagagaggtccatcttccgtgctctcccaaatgatgttctagcaaatgcatatcgcatcttaagagacgaggctcaaaggcgggagcataatatacgagatgagttctgtgcattcactccaatccaatacaagagctaccaagacgtttataatgcggtagaatcctcttaggtcggcttgcggataaagaataactaaatactataaattcgcaagcaattgttttgctgc

SEQ ID NO: 84908 - DNA, 131 bp, Oryza sativa
  Clone ID: PAT_MRT4530_84099C.1
atctcgtccaacggcacactaccccaactacctggactcattgtaacccatggccggtttcccgacaacatctcgcagatcctggtctacaacgtaaacctcagccactagatcttataaggggctgcact

SEQ ID NO: 84909 - DNA, 565 bp, Oryza sativa
  Clone ID: PAT_MRT4530_8409C.1
ccgaaggttcggaaggccgttctctctgagcaaggcaagcggcgcccggagtagcgggaaaggcggcggcgggtggatgcacggtgcgggagcgatggagagctcgggagagttcggcgaaatggggaaaaagagagagaggtgggagaggagagagaggcgggattcgaaaatcgaatcccggtcgtctccggagcgcgggcgagcgggagagagagggggaagtgggcgcgggagacgcggcgcatgaccggggcggccgacgtggcccggagggggcgggatgtgggcgcggcggcggtttcggcggtagggcgacgtggggacgggcggccggaggaaggggacgaccccgacaggtggggcccacctgtcggcgtcccggggagagaggggaggcgggcggccggcccgcgcagcttagctgggcctcggccttcggccggatccagcgggaggagggggagaaaaaggaggaatgggccggcggcccattcaaaggaaaaaaaaagaaaagaaaagaaagaaaaaggaaaaagaaggaaaaaggatttttcatgggatt

SEQ ID NO: 84910 - DNA, 366 bp, Oryza sativa
  unsure (1)..(366): unsure at all n locations
  Clone ID: PAT_MRT4530_840C.1
aatgtggggttttttttttttttttttttttttttttttttttttttttngggaaaaaacaaaaaaaaagggggggttcccccccctttgatttggatatactaaaaaaacaagtttgctaaggggctaactttccaaaaaatttttttaaaaaaaaaaactggtttttttaaaacttttgggttttttttaactcctccacaatgcccgcccggtttaaaaacttaagcaacccactttggcaattaaaaaaaaaaaactttcccttggaattcaaaatgcaaatgggaaaaataccctttttaacctccccaaatagaattttttccgggggggttttcttaagaaaccttaaaatggcccttt

SEQ ID NO: 84911 - DNA, 539 bp, Oryza sativa
  Clone ID: PAT_MRT4530_84100C.1
ccctgatttccgctgataactttgtttccaaggagaaagttatgggggtatttaaaataggtcgaaatactcaagctgtgacctggacagtggcgacactattgatcacgatcaatggctatctcttgctggatttcttctcttcagaaataagaggcctattatctggctcaattctctgcgtggcagtacttgcttatgcttcttttgtattgtatctcatcctgcggggtaccgagctgccaaatcagatcatcacaactatacgcaagagtttttcatgacaaagataaccaaaatttggccgttttaaacaccatcataacatctcaaacgtatagagaaatatggacttggggattggaggagatactcactgtacagtgacttccaaaagggttagctgtttgagaagaagtgcaactgatgtaatcttcatttcatttgttgtaacaccctgactgtgtcgtcctgaagcaaaggaaatacaaagagagattaatgaaatgaaaatcaatgtcgttgcccaaaaaaaaaaa

SEQ ID NO: 84912 - DNA, 322 bp, Oryza sativa
  Clone ID: PAT_MRT4530_84101C.1
ccggcggggccgcacttggcggccagcggctggcggggccaccggcggtggcccatacaaatatattcgtgcaggtaaccgcgggcgtacatacagggagctgtgcttttgcgcaaaaaaaatatccagcccacaactgatctaaaaaagtacatcgaagctattaagcggttcctacaccattaattcaagcagcttctatgctgtgaccatcaacagcacattcatcaagcaagatagagtttactttacaaaggaattttcacagaactacataaaaccgctaatggaaggtaaaaaactgtcgacactgaagtacaag

SEQ ID NO: 84913 - DNA, 441 bp, Oryza sativa
  Clone ID: PAT_MRT4530_84102C.1
atgtcctccttacccgccttcgcgagcgacagggtggagctcgaggcagcacatctcaaggaggaacgcctcatcctcgagtgtgcggccggcaccgggaagcacccggatgaggcgcatgtaggccgcgctgctagcgcacaacccggtgacctacatgtcgagcaaatacgcttgcacaaagagtttgacaattatttgtcctctggtgaactggatcattctatggatgagtttatttcttcaaaggatgaatttgtagaagatctcattagagacgagagcacgatggcacagttttcagatttgaatcatgctctcttgaaattgtctttggagaggagagctgatgttctggaaaatcagcaacaaatttgcatatattcagaatgtttacgacacctcttggaggatgagtcggtgaagttaacagtttgctga

SEQ ID NO: 84914 - DNA, 584 bp, Oryza sativa
  Clone ID: PAT_MRT4530_84103C.1
ccggccgggaaggccatcaccatccacccgctctcctcctcctcctcctccgcttgatccctccatctcctcgatcgatctccacactccactgcgcactgcaccagcaacgcccccccctgatccctctccacggctgcaccggagatggcttccgcccccttcgccgtctcctcctcaccggcggcttccgccgtggccgcgcgctccaaggtgttgcgaggagggaggagcgaggcgaggactggatgccgcctggggatcacgaggaagaattttggacgtgtcatgatggcccttgcagtagatgtctctcgttttgaaggagtgccgatggcccctccagacccaattctcggggtttcagaagcatttaaggcagatcaaaatgatctgaagctcaaccttggtgttggtgcctatagaacagaagagttacagccttatgtcctcaatgtggtcaagaaggctgaaactcttatgttggagaaaggagaaaacaaggagtatctgccaattgaaggcttaactgcatttaacaaagcaactgcagaactattgtttggagctgataatccagtact

SEQ ID NO: 84915 - DNA, 686 bp, Oryza sativa
  Clone ID: PAT_MRT4530_84104C.1
atagggaacaataatcaccaatggatcaacaatgcatagcgttatggattgaacaacccatgtcacgaacagttgcatgagctatcttctatatatttccggcgctacatataactttcgatgttcatttgtgttattcacatgggatgactattttccaggcttacatcgctgccccctcgcatcggtgcgctgaaggaagcaggtcgctcccagtggctccctcctcaacttgttttcttcaaaagtagcaaagctttctatctacttcaagaagcactcccccagttaattacacttattcattgtcgtattcaaaggcaattggagaccactgaagtgaccagccactgccaggttgtggtctctgcttcttctaataagtaaccgggtttcttcagaaccgacggatcaaattctgcactcattccaaaatactggcatggttatattctgcataaaaattcagaacaaactgaaaggttgatttcaaatactacagagtgaggatggttagtataaaaatttcagaacatgaaccagttgctaatccacggctgaaatccaaccagcagagtgagggttcaccctggagcaaagcagctgtgcatcattagttaccatggttaggcccttgtatctgacctctgaaggaagcagtatgattaaagaggatcacaccatcc

SEQ ID NO: 84916 - DNA, 3714 bp, Oryza sativa
  Clone ID: PAT_MRT4530_84105C.1
atggcagaaaatcaaggaatagaacaagtgatgggtaaattggtggacatgctagcgaaaaaatttagtgaggcctcaactacaagcaatgcaattatccctcatactgaatcaatactgaagattgagttaatgcaaaacgaaatcaagttgggtgtcaaaaattatttgagttggtcaaggagggcattactaatactaaaaacaaaggggttagaaggatatgtcacaggagaagtgaaggagcctgagaacacatcaagtgtagaatggaagacttggagcactaccaactctttagtggtggcatggttgttgacttcattaatcccagctattgctacaactgttgagactatctctagtgcgagtgagatgtggaaaactcttactaaactatactcaggagaaggtaatgtgatgctaatggtggaggcacaagagaagataagtgctttgagacagggggagcgctctgtggcagaatatgtcgcagagttgaagagtttgtggtccgatttagatcattatgatcctcttggattagagcactctgattgcatagcaaaaatgaagaaatgggttgagcgtagaagggttattgagttcttgaagggtctaaatccagagttcgaaggaagaagagatgcaatgtttcaccaaaccactcttcctaccttagatgaggccattgcagctatggcacaggaggagcttaagaagaaagtattgcctagtgccgcaccatgttcaccaagtcccacctatgcaattgtacaaggtaaagagactagagagtgcttcaattgtggtgaaatgggacaccttatgcgtgattgtcatgctccacgcaagcctacttatgggagaggaagaggtgttgatagaggtggaacaagaggtggaagaggctatgctggtaggagcaatagaggaagaggttatggatatagaggtgattacaaggctaatgcagttactctagaagagggttcttccgggactacacctgacaatgttgccaactttgctcattctactccaggtagttttaatcaagcatttatgtctatgaacacttctcattcaagttggatattagactcaggtgcatccaggcatgtcactggcatgagtggagaatttacatcatataaaccatattcatttgcacacaaagagaccattcaaactgctgatggcacatcatgtcaggagagaagaacagggaagaaacttgggattggtatcatgcgtgatggactttggtacttggacagaagagggacaaatgaggatgtgtgtgcactaatggcttcaacaagtaaagaagtgactgagaatggagtggctgaaagaaaaaatcgccatcttttggagatagctcggtcactaatgtatactatgaatgtacctaaatttctatggagtgaggcagtaatgacggcagcttatctcatcaaccgcacaccatcaagaatacttggaatgaagacaccatatgagatgatatttgggaagaatgaatttgtggttccaccgagggtgtttggctgcacttgttttgttagagatcatagaccatctattgggaaacttgatcctcgagctgttaaatgcatctttataggctattcatccagccagaaggggtataagtgttggagtccatcagaacggcggacatttgtaagtatggatgttacgtttagggaatctgtccattctatggaaggtgaaatcttgggtctcaaggagaatgaacaatcaaagggaaagattgtggttggtgaaattccatgtgctataggtgatcctgtacaagaacaagaatggagaaagccacatgaagaggaaaatcttcaagtttacacaaggagaatgagacttccaacaactcaacaagttgaagttgatgatcaagtatcagatgatcttactcatgtgcaagtgtcttcggagtcagggggagaacaaatagaaattagagaagaagaatcaaacttgccaattgccataagaaaggggatgagaagcaatgcaggcaaacctccacaaagatatggttttgaaattggagatgaaagtggtgatgagaatgatatagccaattatgtatcttacacttccttgtcatcgacatacaaggcctttgtggcatctctaaattcagctataattcctaaggattggaaagaggcaaagcaagacccaaggtggcatcaagcaatgctagatgaactagaagctcttgagaagaacaaaacatgggatcttgtatcctatcccaatggaaagaaagtggtaaactgtaagtgggtatatgcagtgaaacaaaatccggatggaaaagtggagaggtacaaagcaagacttgtggctaagggatatagccagacatatggaattgattatgatgaaacgtttgcaccggttgcaaaaatgagtacggtaagaactataatatcttgtgcagttaactttgattggccattacatcaattggatgtcaagaatgcttttctacatggcgatcttcaagaggaggtatatatggaaattccacctggatttgctactttgcaaactaaaggtaaagtattgagactgaagaaatccttatatggtctcaaacagtcgccaagagcatggtttgatcgatttaggcgtgcaatgtgtgctatgggctataaacaatgtaatggagatcacacagttttctatcatcatagtggagatcatataaccattcttgctgtttatgttgatgatatgattatcactggaaatgattgctcggagataactaggctgaaacaaaatctaagcaaagaatttgaagttaaggacctaggccagttgaaatattttctgggtattgaaattgcaagatctcctagagggatagttctttcacagcggaaatatgcattggacttgctcagtgacacaggtatgcttggatgtcgcccagcctctacaccagttgatcaaaatcataagttatgtgcagagtctggaaatccagtgaataaggaaagataccaaaggctggttgggagactgatatatttatgtcatacacgacctgacataacttatgctgtcagtatggtgagtcgatatatgcatgatccaaggagtgggcatatggatgctgtctataggatcttgagatatttgaaaggaagcccaggtaaaggcctatggtttaagaaaaatggacacttggaggttgaaggctattgtgatgcagattgggcaagttgtcctgatgatagaagatcaacttcaggctattgtgtgtttgttggtggcaatctagtatcttggaggagcaagaagcaaccggtggtgtctcgctcaaccgctgaggcagaatatcgggcaatgtcagtgagtttgagtgagttgttatggctaaggaatcttctttctgagttgatgttgccggtggatactccaatgaaattgtggtgtgacaacaagtcagcaatcagcattgctaacaacccagttcaacatgatcgaacaaagcatgtggagttggatcgtttctttatcaaggaaaaactggatgagggagttttggaattagaatttgtaatgtctggtggacaagttgctgattgtttcacaaagggtttaggtgttaaagagtgtaatagttcatgtgacaagatgggtatgatagatatctatcacccatcttga

SEQ ID NO: 84917 - DNA, 528 bp, Oryza sativa
  Clone ID: PAT_MRT4530_84106C.1
atggaagcacggaacagctttttctttgttcgcttgactgcgtggccggccctagccgccggccgtgcgccgccgtcggccagctggtcgcgtccgctgagccgccgccggagagccgcgacctgctgcccgcctgaacatcttgatcttgcggcgctccttctcgagctgatgcacgcctccacccccgtcgcctccttggccgccgccgctgccatccttacagcgctcttccttggccgagccgccgccagagcaccgccgtcgccctgctacccggctgtcaagccgccgccggagcaccgcggcttgctgcccgcctacgcgtcgccgagcagccgccagagcgctgcggccttctgcccgcccgcgccaagccaccgccgaagcgccctcgtcgccttgttgctcggccgcgcgctacggttggcccgccactgccgcctattcgcccgccgctgccgcctcgctcgatgggtgggacttggagagttacgggagggaggtgaggaggtgggggtaggttag

SEQ ID NO: 84918 - DNA, 5976 bp, Oryza sativa
  Clone ID: PAT_MRT4530_84107C.1
atgaagagtggcaagtccaaattcgccgttgccaacatcacctcaactgcatggagagggagaaggcagggaggccaacgagctcctccaagtctaaatatgccgtcgacgacaccacctccaccacagtcgtcgctgccaccaagcacaggagagaagcaagatggcaactctgatgttgagggcaatctcgaagctgtctcaccgcttgctcagacgacgcatgccaccggcttcggtgccaagatcaacgacaacgacggccaccccgctgcatctagagaaggagaggggagaaggggaagaaggccaccggtcgcatctgcgagggaggctgccatcctcaaaaccaaatggtgttgcgaggagggaggagcgaggcgaggactggatgccgcctggggatcacgaggaagaaattatggtttgtttggtttcactatgaatgactacctgtcagttggcactgtgatctcttttacgacaataataaattttggacgtgtcatgatggcccttgcagtagatgtctctcgttttgaaggagtgccgatggcccctccagacccaattctcggggtttcagaagcatttaaggcagatcaaaatgatctgaagctcaaccttggtgttggtgcctatagaacagaagagttacagccttatgtcctcaatgtggtcaagaaggctgaaactcttatgttggagaaaggagaaaacaaggagtatctgccaattgaaggcttagctgcatttaacaaagcaactgcagaactattgtttggagctgataatccagtactcaagcaaggacgtgttgctactcttcagtctctctcaggaaccgggtcgctgcgccttgctgcagcatttatacaaagatatttccctgaagcaaaagtactgatatcatctcccacttggggcaatcacaagaacattttcaatgatgcaaaggtaccttggtcagagtaccgttattacgaccccaagactgttggcttggattttgagggaatgatagctgacatacaggctgccccagatggatcttttgttctgctgcatggttgcgctcacaacccaactggaatagacccaactccggaacaatgggagaaaattgcagatgtcattcaagagaagaaacacatgcctttctttgatgttgcatatcagggttttgccagtggaagccttgatgaagatgcatcttctgtcaggctttttgttcaacggggactggaagtgtttgttgcgcagtcttatagcaaaaaccttggtttatatgcagaaagaattggagcaataaatgttgtctgctcaacacctgaagtcgcaaacagggtgaagagccagctgaaacgattggcacggcccatgtattcgaatccccctattcatggtgctaggatagttgccaacgttgttggggatccaaccatgtttggtgaatggaaacaggagatggaagaaatggcagggcgtatcaagaatgtaagacagaagctttatgatagtttgtctgcaaaggacgacagtggcaaggactggtctttcattctgaggcagataggcatgttctcctacacgggcttgaacaaaactcagagtgataatatgaccgacaaatggcacatatacatgacaaaggatgggagaatttcgttggctggattgtccctggctaaatgcgagtacctagctgacgccatcatcgactccttccataacggcccatctagtcatgtatatgtaaataaggatagcaatacagagaaggtgaagcttccagagaaaattggctgccaaaaaacttcatggtatcagagccgaccggccggcggcaggcgacggttgaaccctagctggccggaggcgtggaggcttgagcagggtagagagtgcgcatcagcagcggcgcggaagagcggggccagcgcggcgcgtcgaggaggaagaagccgagcagctgcaggtgcggagctgctgctgctgcttggggctgagctcgcaggaagaagtggctcttgctctgtagtggcggggtcacagcacagtgaagactttgcatctcttgtggaaaatcaaggaatagaacaagtgatgggtaaattggtggacatgctagcgaaaaaatttagtgaggcctcaactacaagcaatgcaattatccctcatactgaatcaatactgaagattgagttaatgcaaaacgaaatcaagttggagggtgtcaaaaattatttgagttggtcaaggagggcattactaatactaaaaacaaaggggttagaaggatatgtcacaggagaagtgaaggagcctgagaacacatcaagtgtagaatggaagacttggagcactaccaactctttagtggtggcatggttgttgacttcattaatcccagctattgctacaactgttgagactatctctagtgcgagggagatgtggaaaactcttactaaactatactcaggagaaggtaatgtgatgctaatggtggaggcacaagagaagataagtgctttgagacagggggagcgctctgtggcagaatatgtcgtagagttgaagagtttgtggtccgatttagatcattatgatcctcttggattagagcactctgattgcatagcaaaaatgaagaaatgggttgagcgtagaagggttattgagttcttgaagggtctaaatccagagttcgaaggaagaagagatgcaatgtttcaccaaaccactcttcctaccttagatgaggccattgcagctatggcacaggaggagcttaagaagaaagtattgcctagtgccgcaccatgttcaccaagtcccacctatgcaattgtacaaggtaaagagactagagagtgcttcaattgtggtgaaatgggacaccttatgcgtgattgtcatgctccacgcaagcctacttatgggagaggaagaggtgttgatagaggtggaacaagaggtggaagaggctatgctggtaggagcaatagaggaagaggttatggatatagaggtgattacaaggctaatgcagttactctagaagagggttcttccgggactacacctgacaatgttgccaactttgctcattctacttcaggtagttttaatcaagcatttatgtctatgaacacttctcattcaagttggatattagactcaggtgcatccaggcatgtcactggcatgagtggagaatttacatcatataaaccatattcatttgcacacaaagagaccattcaaactgctgatggcacatcatgtcaggagagaagaacagggaagaaacttgggattagtatcaggcgtgatggactttggtacttggacagaagagggacaaatgaggatgtgtgtgcactaatggcttcaacaagtaaagaagtgactgagtttattagaactgataatggaggggagtatatgaatagtgaattcggtcactttctttctttagaaggaatattacatcagacttcttgtcctgatactcctccacagaatggagtggctgaaagaaaaaatcgccatcttttggagatagctcggtcactaatgtatactatgaatgtacctaaatttctatggagtgaggcagtaatgacggcagcttatctcatcaaccgcacaccatcaagaatacttggaatgaagacaccatatgagatgatatttgggaagaatgaatttgtggttccaccgagggtgtttggctgcacttgttttgttagagatcatagaccatctattggaaaacttgatcctcgagctgttaaatgcatctttataggctattcatccaaccagaaggggtataagtgttggagtccatcagaacggcggacatttgtaagtatggatgttacgtttagggaatctgttccattctatggtgagaaaacagatataagctctttatttgttgatcttgatgatttaactagaggtgaccatgatcaacaaaaggaaggtgaaatcttgggtctcaaggagaatgaacaatcaaagggaaagattatggttggtgaaattccatgtgctataggtgatcctgtacaagaacaagaatggagaaagccacatgaagaggaaaatcttcaagtttacacaaggagaatgagacttccaacaactcaacaagttgaagttgatgatcaagtatcagatgatcttactcatgtgcaagtgtcttcggagtcagggggagaacaaatagaaattagagaagaagaatcaaacttgccaattgccataagaaaggggatgagaagcaatgcaggcaaacctccacaaagatatggttttgaaattggagatgaaagtggtgatgagaatgatatagccaattatgtatcttacacttccttgtcatcgacatacaaggcctttgtggcatctctaaattcagctataattcctaaggattggaaagaggcaaagcaagacccaaggtggcatcaagcaatgctagatgaactagaagctcttgagaagaacaaaacatgggatcttgtatcctatcccaatggaaagaaagtggtaaactgtaagtgggtatatgcagtgaaacaaaatccggatggaaaagtggagaggtacaaagcaagacttgtggctaaggaatatagccagacatatggaattgattatgatgaaacgtttgcaccggttgcaaaaatgagtacggtaagaactataatatcttgtgcagttaactttgattggccattacatcaattggatgtcaagaatgcttttctacatggcgatcttcaagaggaggtatatatggaaattccacctggatttgctactttgcaaactaaaggtaaagtattgagattgaagaaatccttatatggtctcaaacagtcgccaagagcatggtttgatcgatttaggcgtgcaatgtgtgctatgggctataaacaatgtaatggagatcacacagttttctatcatcatagtggagatcatataaccattcttgctgtttatgttgatgatatgattatcactggaaatgattgctcggagataactaggctgaaacaaaatctaagcaaagaatttgaagttaaggacctaggccagttgaaatattttctgggtattgaaattgcaagatctcctagagggatagttctttcacagcggaaatatgcattggacttgctcagtgacacaggtatgcttggatgtcgcccagcctctacaccagttgatcaaaatcataagttatgtgcagagtctggaaatccagtgaataaggaaagataccaaaggctggttgggagactgatatatttatgtcatacacgacctgacataacttatgctgtcagtatggtgagtcgatatatgcatgatccaaggagtgggcatatggatgctgtctataggatcttgagatatttgaaaggaagcccaggtaaaggcctatggtttaagaaaaatggacacttggaggttgaaggctattgtgatgcagattgggcaagttgtcctgatgatagaagatcaacttcaggctattgtgtgtttgttggtggtaatctagtatcttggaggagcaagaagcaaccggtggtgtctcgctcaaccgctgaggcagaatatcgggcaatgtcagtgagtttaagtgagttgttatggctaaggaatcttctttctgagttgatgttgccggtggatactccaatgaaattgtggtgtgacaacaagtcagcaatcagcattgctaacaacccagttcaacatgatcgaacaaagcatgtggagttggatcgtttctttatcaaggaaaaactggatgagggagttttggaattagaatttgtaatgtctggtggacaagttgctgattgtttcacaaagggtttaggtgttaaaaagtgtaatagttcatgtgacaagatgggtatgatagatatctatcacccatcttga

SEQ ID NO: 84919 - DNA, 963 bp, Oryza sativa
  Clone ID: PAT_MRT4530_84108C.1
gtttatttttgaggcgcttcacccgtgtgtgttcacgccggcggcagccgtattggctcccaacctgggaccaagggaaattgatggagaatgccaaggatttaggaccgacacctaaattaaatagttgatagattaaatctatttggatgttatcccaggcttcatggacaacaacgtcgcctcgaggaaataagcctcctccgtccctccatatattcagttacaggacacatagtccctggagatgaaacaagggaaaatagactgcaccaagcataagttaatgtacattcagcataagagagttaaggccactacctagctagagaaaccgaaggtgatgacaaaagctacaattattcagcgccgtcattctctcctgcaggtgatgtattatgcagttaactgttcgctgtaattttacagtgtcactgctcccactctgcttttgaaaacaatatgtcaataatggattacataaggaaatgtttattgcatctgtcagttaacattacttatggtgttagggaccttttgattcataggagtggcaaagaattttataggattcaaattccaacggatttttcttcctatgtttccctttgacttacaggattatgttcctatgcttcacttttataggaaaaatactaagtggtataacctctttgtaaattttcctttgtttttcctatggcactatcaaagggctcctattatcttttcctatgttttttattcctgtaggattaaagaagcacatcacttttattcctgggtttttcctatttgtgtgctttgatcaaaggggctttaagatgctatgcagctatgccataagccacccttccttgtgttatgacctactacttcctactagtagtacatttttggtatcgctatgccataagccaccccttcttgtgttatgacctactactttctactagtagtaca

SEQ ID NO: 84920 - DNA, 402 bp, Oryza sativa
  Clone ID: PAT_MRT4530_84109C.1
atgagtagaaatagtggtagatcaagcaagcaaataaaggaggatatgacagaagtaaggggtagtagctgccgcaagagcacgaggcacaacggccgagccggcggcgaggggagagcggcggcggtggccggagccagagagccgggggaggggacggcggaggtggctggagccgagggagagagcgacggcattggccagagccggggcgccggtggctggagccagagagcagggggatggggcggtgacagtggctggagccagagagcgggggatggagccagagagccaggggagggaggggcaacagtggtggtagctggatccggggaggggaggaggtggcggtggtgtggcgctagagacggaggaggaagcagcggcggtggccagagc

SEQ ID NO: 84921 - DNA, 139 bp, Oryza sativa
  unsure (1)..(139): unsure at all n locations
  Clone ID: PAT_MRT4530_8410C.1
cccacccctacattctntactcaagcttggcctcacattggggatctgaccctacggctttgcttcgggccctggagagaactataatattgagaggggcgaggatgtgtttgatgactggatgtgacggaatgcgatt

SEQ ID NO: 84922 - DNA, 243 bp, Oryza sativa
  Clone ID: PAT_MRT4530_84110C.1
ggcacgaggtccatttcctttggaaccatgtcgatatactccttgcagcttttatttttgtgataactgtaaagacgtttatttttgtgttttcgttaaagggtttggctatagcaacaaaacatcttttctttttggcatgtttcttgcacaattaggagattttgctttttgtctcctaagccgtgctcaagcatccatctgattgagggcaaacttagcgctctccttggaaccacgcac

SEQ ID NO: 84923 - DNA, 3602 bp, Oryza sativa
  Clone ID: PAT_MRT4530_84111C.1
atggcgggtttggctccccctcccctcctcctcctccccctctcctcctcactctctcctgccgccgcctcccaccacccaacctcccccccttctcgcacacgccgacgacgccgcctgctatccgccgtggcgtctgccgacggtgatgctccctccccagtctctgtctccgcctccgccgccaccaaggggccttcctcctcctccgtgctcaccttccagcaggccatccagcgcctccaggactactgggcctcagtggggtgtgccgtcatgcagtgcagcaatacagaggttggagcagggaccatgaatcccttgacattcctcagggttttaggccccgagccatggaacgttgcttatgtggagccaagtataagacccgacgacagccgctatggggacaatcctaataggcttcagcgtcatactcaatttcaggtaattttgaagcctgaccctggaaattcacaagacctctttctgcacagcctttcagcactaggtatcaatgtccgtgaacatgacatccgttttgttgaagacaactgggagagtccagtgaagttcctcctcttttactctttccttcttaaaatatcaaccaatgcaatcattgaaccaaagtgtatctggttacaaaaagccggatcgttatttcaatataatgatctttcctttaaaaaagtctatctggttcttggtgcgtggggattaggctgggaggtttggatggatggcatggaaataacacagttcacatattttcagcagtcaggaagccttccattgctgcctgtttctgttgagataacatatggacttgaacgcatcctcatgtctcttcagggtgtagatcatttcaagaatatacaatacactaaaggaattacatatggagaactattccttgagaatgagaaagagatgagtgcatattatttggagcatgcaaatgttgataacattcaaaagcattttgatgattttgaagaagaggctcgctctttattatcactttggcttcctattcctgcgtacgatcatgttctgaaggcctctcatgcttttaatattttagattctagaggctttgttggtgtaaccgagcgtgcaagatattttggtcgcatgcggagtcttgctcgccagtgtgctcagctttgggtgaaaacaagagagaacctcggttatcctttgggcacttatcaagagtctaatcttatctatcctcatgtctctgaaaagcctagtagaaagggagttgtcggacagccacgagcatttgttcttgaaataggaacagaagagttgccacctcatgatgtgatagaagcaaccaaacagctggagaaatctttaattcaaatattggagaaacgaagactgagccatgggaaagtacgctcttatgggacaccaaggagattagcggttgttgttgaaaatcttaatatgaagcaaatggaggaagagattgaactacgtggtccacctgttgcaaaggcatttgaccaagaaggaagacccactaaggctgctgaaggattttgtcgaaagaataatgtcctgatagatagtctatatagaagaactgatggtaaaacagaatatatctacgctcgggtcaaagagtctgcacgttttgctgatgaggtactaactgaagatctaccgactattatatctggtatttcatttcccaagtctatgcgctggaactccaatattgtgtttagcaggccaatacgctggatctttgcccttcatggggatctcattgtgccattttgctttgctggcatatcaagtgggaatcagtcgtgtggccttcgtaactcctccttggctaactttaaggtggaagctgcagaattatatttacacaccctggagaaagctgggatcctgattgatatgcaggagcgcaaacaacgaatcttgcatgactctagtatattggctgagggtgttggcggtgatatcattgcacctgatagcttggtgcaggaggttatcaatcttgtggaggcgccgatgcccattattggtcgatacgatgtttccttcttagcacttccaaaggatgtattaataacggttatgcagaaacaccagaaatatttccctgtaacctccaagaccatgggcaatctgctaccatgtttcataactgttgccaatggtgccattaaggaagaagtagtccgcaaagggaatgaagctgtactcagggcacggtatgaggatgctaaattcttttataagatggatacgcagaagaaactttctgaattccgagatcagctcagcagcattctctttcatgaaagacttggtaccatgcttgacaaaatgaaacgtgttgagaacactgttgcagaagtggccctccttctcggaattaatgagaaaatgatcccagcaatcaaagatgcagctgcattggctatgtcagatcttgccactaatattgttactgaatttacttcacttgctggaattatggcacggcattatgctttgagagatggcctttcagaacagattgcagaagccctatttgagataacacttccaaggttctctggtgatgtgttcccaaaaacagatcctggcatagtccttgcagtcactgacagattggatagtctagtgggtctgtttggagctggatgccaaccaagttctacaaatgatccatttgggctaaggagaatttcctatggattggttcaaatattggttgagaacaagaagaactttgacctcacgaaggccttgaccttagtggcagaggagcagccaataacaatagatagtggtgttatagatgaggtagtacaatttgtcacgcggagattggagcaacttttggtggatgaaggaattaattgcgagatagtccgttcagtgcttatagagcgtgcaaactgcccttatctagcatcacaaacagcaattgaaatggaagcattttcaagaactgaagatttcccaaaaattgtcgaagcgtactcaaggcccgcgagaataatacgtggaaaagaaattgggtctgctttagaggttgatgcaagtgtatttgagaaagacgaagaaagagctttgtggagtgcctacttggaggttgcggataagattcatcctggtgttgacataaaagcctttgcggacgcttctctggaactgctgcaacccctagaagatttctttacaaatgtttttgtcatggcggaagacgagagagttcgtaacaatcggcttgcactgctaacgaaggttgcgagtctgccaaagggaattgccgacctgtcagttttaccagggttttagccattttttgttgctcttctagttttatctgtaccatgcttgtacattcataccgactacagttttgcagccaagaaaagagcgtgatccctatatatataatgtataggtagctagcataaattgtcctcaactttgttgtccattgctatgttaaacatatgtttttgttttcaaaccattttggaaatcaaatgccataacttgtatcagactatataccaactcaagcggtatcttgcataaaaaaaaaaaaaaaa

SEQ ID NO: 84924 - DNA, 1205 bp, Oryza sativa
  Clone ID: PAT_MRT4530_84112C.1
atgcggcggcgccaccgcgagcagctgcctcccggggccgaccgcgaacgcctcctcgccgaggaggtcctctacctccactccctctggcgccgcgccgcccccgctcccatccctcctcgtggctccggttccgtcgccaccctccgccgcgtcgaccgccggaggcgcaggaggctcgagcgccgcgcccaggagcagcagcgggaggaatccggcccggagtggcccctcgcgccgtctccgcccgcctccccgacaacctggcacgacaacaaggccgcctcctcccccgcgcagcgcccgccgcagcagaagcagccttcgcctggatcgctctcgcagcgagccgcgctccgcgccgccgaggagttcttctccaaccgcgggtcggacgacgacgacgaggtggtggaggaggaagggtctgaatcggagggcgaggaggcggcggggttcttcatggggctgttcgagcgggacgcggcgctgcgggggcactacgagcgggggtgggagggaggggagttcgtgtgcatggcgtgcgtggggaggaaggggaaggccaggaggttcgccggctgcgtcggcctcgtccagcacgcccgcgccgccacccgctgcgggaggccccgggcgcaccgcgccttcgccgccgccatctgccgcgtgctcggctgggacatcgacaggatgcccagcgtcgtcatcgacccccgcggcacgctcggccaggcactcgccgccgccgaggccgctgccgccgtcgctgcccaagagaacaatgttgatgctgttgagaagacgatctcttctgaagatcaggttgcagagaaggaagatgttgagactggaaaaaatgacggatctttgagtgatgtggatgcgatgaaggaaaattccaatgtggggaagaacagctcttcaattaatgacaataatggagatgttcatgagaaagggaatggtggagcttatgaaaagagaaagagaaagaagaagtggccagagacattgatggtggctggtgcctcttctcgtcatggtggctggtgcctggtggcgtacgatgtctcttagctttgcagtccatgtgatgagaaggaactgattagcgactatctgatcggacaagccgaagagcctttgatcttgtagtacattggaaggaggcaatatcatagtcactagtcagctatagacaa

SEQ ID NO: 84925 - DNA, 568 bp, Oryza sativa
  Clone ID: PAT_MRT4530_84113C.1
atggcggcggcgctagcgggtgaaggagacggtggacgatgccggcggtcgagggtagaggccgccggatccaacggttggcggtgcggtggaggcggctgccgccggatctggcaagcggcagtggggtggcggaggaggaggcgactggcggtcggtggagaggcgccggatccgcgtcccccaaacgtgtcaaggcttgcggtcgttaggcgtgtgaggcagcggcgtccggcggtcggcaggcggaggaggaagtggccggcggtggggcgggggagaggccgtggtggtcggatccgcgctctgtagcccagatccagtggccgatggtcggaaggtggggggaggcgacggtgtctggtgatcgggaggcggaggaggaagcggccggcggtggggagagaggccgtggtggctggatccacaccctgtaggctagatccggcggccggcggtcgaaaggtgggggaggcggtgctggccggcggtcgggagacggaggaggaagcgaccggtgcgcgtggagtcggaggccgccgccggacttggtgctcggcgcgtggat

SEQ ID NO: 84926 - DNA, 474 bp, Oryza sativa
  Clone ID: PAT_MRT4530_84114C.1
atgccggccctcgctgccaccgtcgcgctctgccgcgccgcgggcgccccggtcgtctacacccgccacgtcgaccccgtgccccgcagcggcccgctcgacgagtggtggcccggcgaccggatcgccgacggcacgccggccgccgagctcctcccgggctcgggccgccgcgagggcgacctcgtggtggagaagagcacgtacagcggcttcgccggcacggggctcgaggaggcgctgcggcggatgggcgtggaggaggtgatcgtgacgggcgtgatgaccaacctgtgctgcgagaccacggcgcgggacgcgttcgtgagggggttccgggtgttcttctcggccgacgccaccgccacggcgagccaggacctgcaggaggcgacgctagccaacatggcctacggattcgcctacgtcgtcgactgccagcggctcgaggcggcatttgggaaggtcaagtga

SEQ ID NO: 84927 - DNA, 436 bp, Oryza sativa
  Clone ID: PAT_MRT4530_84115C.1
cctgcaggttgactatagaggatcgccggtgaacgaccctggccctgccgctggacaaaaatcgggccttatttttacccaaaatatccccctctaaattgacccaatcccacggctgcaataactgcaaattcgctatgatgaaggtatggagaatcaccgacacgttagaccagacttagacgcagtccgacacggactaacagatgccatttaccgaaatactacccttgggcaccaaacagggagctaaatattcctgccattgcttctgtaaactgcccactgagccacagctgagcaaccaggcgttattgatttgttcattgctcaataattgccctaccccgtacacgtggccggaaacaaaatgcccccccacttttccccccacccggagggaagttttaatgttgaccgctgagcgcctttcctt

SEQ ID NO: 84928 - DNA, 421 bp, Oryza sativa
  Clone ID: PAT_MRT4530_84116C.1
ggcacacctacgccaagtgccgtcccgacgtccgcgccgtcgccgacgaccataatctggtggtggaggaggctgcggacgtggtggaggctgttcaggaccaggagccgatcgtctactctgttgatgaataataatccactttcgtcgtcaatcttattttagtttattactgtttttattaaatctatatttttttctgtctatttttgcttatcttttcatttttgtctatttttattacttacttattttaatttactattattatttttattcttatttatttttatacatattatcatttttgtctttttatttttattaattttttaatatattcttatttgttcactaattaattttttttttactaatatttcaaattatttatattaattctatatttactttatttact

SEQ ID NO: 84929 - DNA, 1512 bp, Oryza sativa
  Clone ID: PAT_MRT4530_84117C.1
atgcagaggggaactgaagaaatcaagctggatgcagatgtgaagaagaagagcacggttcaagagattagaaaagatgcagatgttgaagaatttaagcaggctgatcatatgttgctcattttgagggagatgatggtgatgatgaagctcatgctagttggtgaatggattatgcaaaagatgaacccagagatttgtgagtttaggttccgtggcaaggttatcgtgtttgataagttgttagtacagaagattactgggctaaatgatggcgatctacctgttaagcttagtggtgccaacagtgaagttattgcttacatggatcatttgcaaatgccaacaactggactgcatctccgcatcattgactacaacacaccaagattttgtcatgtcactgatgaggactttgagtatgttgctgttgtagaccgttgtaggatgaaccttggctatgtcacatatgggtctcgcccgttccatccacggaatgagatcccatatctagcccaagtccatgctgttgttggtgggtctgaggctgagaatgctggggttgcaagggctgaggatgttccaattggtgctgttcaagatggtgtaggcattggagctgctgtcgcccaagatagtgttgctcaagattctgcttcattgaatgaatggatcaggctatctgcctcaagcagccaagggactacggatgagtttgtttcagcacttgacaacttcaagagggacatgattgatttgcgtgcaaaaagaacatgtgatatgatttctgacataagcaaggtgctagctgacagcaacactgcagtgggcatttccgaggctgtttcaaacccaccaagcactgggttggcagctgaggttgtttcaaacacaccaagcactgagggggtagctgaggccgtttcaaaaccatcaagcattgagggggcagctgaggctacagattttgatggaccaagccaggaagcttctggcggttctgtgccaagcagcccagctattgatgattatatttttgcttcccactctgatatctcaaatctagatgatgcatgtgatgcaccgtcattcagactcttcaatgaatctgatcctgatttcattagtactcaggacttggctgttgagatgctctccttggatgtttcaaatgacatcttctgcaactccttcacccactgcaaggacaccttctccagcccccccttcacccattgcaacaaaaacatcaacttcagtagttctctctctagcagcagtaagggcaacatccccagctacatcttcaccgccacgtgctacaagctcgctacctctagtggtccaagcacccatgagaagaaaaataggaagaaaagggcacagaaaggtgatagtgatgtagaggcgaagaagttgaagaccgcttctgaaatagatgatgtgtacagaagatctgttgttgattctttgccaaataggtcaaggaaggcagatgccaaagagttgtaa

SEQ ID NO: 84930 - DNA, 458 bp, Oryza sativa
  Clone ID: PAT_MRT4530_84118C.1
ggcacaaacaaatctaaccagacttagttgggactaatcagctcaggtcacagggagctaaatgcttaggcttgaacaacaactacagtaatcctcctgtccacttgtgaaacacaggtagaggagatgtagatccagaaaaggcattcttctttaactaaggctgagtttagatccaaagtttgaatccaaatttcagtccttttccatcacatcaacctcaaattaaacaatcacaatggactgatccccagaaacatttcgatatccagagtcatggttggtggtgtcatgtagaagtagttagtttcagaacttgttggccggttgttgcctaccctgtttgtcactgacctggttagatatctcaagcactagcatccatgacactatgacagtatgacatcttgcagtttgcaacaggtgtccaccttccatctcaagcaagcacctttcaa

SEQ ID NO: 84931 - DNA, 1436 bp, Oryza sativa
  Clone ID: PAT_MRT4530_84119C.1
atgtcagtgacggtgcggtggcagttcgtgattgccccgggctgcgaagctttcggatccgaactacgggcgtgccacggcggcgtgccggcgtacgtgggagggcaggcgcgggaggacgaggcggaggctgaggacctgggcacaccactccggtcgggcaacccaagagcgtcagcacccgccgcgcgccgcccacgactgtgccccatcctccgccgtttgagcacggcgtggaggatgagatcgacgggagctggcggtggcggcggcggtgttacaggcgaagtcgccggcagcggcttcctccaccgcgcgccgccggggggggggaggaggtccggcggccggcgtcgccgccgaacgacgacgacgacgaggaacgagctgctgcctgcctccccgcctccttcctcttcgtgtgctctcgctgcgggagttgtggaggaaggcggcgctctggctgtaggtcgaccccattcctcgtcggctccgcaccaagtcgccgcggagtgcgtggttgcgaggcacatccggacgggggagccagtcgacaacgaggacgggaggctagagtaccgcggcgacaactggcgggcgctgtggccgggcagcggcaagcccgggctgtggatgagcgccatgtcgaggctagcggcggtgtaccgactcttcaccaccgacgaggagatccacgagctgacaggtgagaggagcgtcgtgaagacgaaggatgcagagctggagctggtgatcccgccggtgttcgtgcggtgcaacaaggtgctcgacgctggggagcagaaggagggagagagagaaagagaaagggggaggaggggaaataacagagaggtgatgagttggcatcctgacatgtggggccacgtgggtctcccgctgactcagcggctacgtcggataaaactggggtcaaaaccaccgaaggatctaaaggggcagtcgtccccaaatctaagcgtagaattttgtgaggctgccagacttccagaacggataatatccatatccgaaaagaccaagcctggccacgaatgcgcgctctcccggatctcccccggcccttttcttatccgcagcaagaaggcaagaaccccagttgagagtggagatggccattttgttcaggcactaggcagtgggtaggacggtgaggagtgtgtcctgcactcctgcttcccctgacgatcgatccccatgcgtgccgaagcatctgatacttttgctgtgctgttctttaatttaccctgatacttttggatatctgaagcagtagagctcgttcactcaaacaggctagcctgttttgctttctgacacagcacacacagctacaaatcgactgtaattaaggtacgtatatataggtgacaatggacaaccagcagctaccctacgccggtcagccggcggcc

SEQ ID NO: 84932 - DNA, 1898 bp, Oryza sativa
  Clone ID: PAT_MRT4530_8411C.1
cacgcgtccgcaatgattctcggcgacggcatcttccagctcgtcgcgatctcgctgaggacgatacacacggtgcgccaccaccaggtagcggtggagacgctcaggtgcttctccgacccagcaccaccaccacctccacctcctcccccctcgctgccggacgacgagctcctcccccctccccctccgccgccgccgcgccgcgtcagaagatggctgacgccgaggatatccagcccctcgtctgcgataatggaactggtatggtcaaggctgggttccgccggagatgatgcgcccagggctgtcttccccagcattgtcggccgcccctcgccacaccggtgtcatggtcggaatgggccagaaggacgcctacgttcggcgacgaggcgcagtccaagaggggtatcttgaccctcaagtaccccatcgagcatggtatcgtcagcaactgggatgagtatggagaagatctggcatcacaccttctacaacgagctccgtgtggccccggaggagcaccccgtcctcctcaccgaggctcctctcaaccccaaggccaatcgtgagaagatgacccagatcatgtttgagaccttcaacacccctgctatgtacgtcgccatccaggccgtcctctctctgtatgccagtggtcgtaccacaggtattgtgttggactctggtgatggtgtcagccacactgtccccatctatgaaggatatgctctcccccatgctatccttcgtctcgaccttgctgggcgtgatctcactgattacctcatgaagatcctgacggagcgtggttactcattcaccacaacggccgagcgggaaattgtgagggacatgaaggagaagctttcctacatcgccctggactatgaccaggaaatggagactgccaagaccagctcctccgtggagaagagctacgagcttcctgatggacaggttatcaccattggtgctgagcgtttccgctgccctgaggtcctcttccagccttccttcataggaatggaagctgcgggtatccatgagactacatacaactccatcatgaagtgcgacgtggatattaggaaggatctatatggcaacatcgttctcagtggtggtaccactatgttccctggcattgctgacaggatgagcaaggagatcactgccttggctcctagcagcatgaagatcaaggtggtcgcccctcctgaaaggaagtacagtgtctggattggaggatccatcttggcatctctcagcacattccagcagatgtggattgccaaggctgagtacgacgagtctggcccatccattgtgcacaggaaatgcttctaattcttcggacccaagaatgctaagccaagaggagctgttatcgccgtcctcctgcttgtttctctctttttgttgctgtttcttcattagcgtggacaaagttttcaaccggcctatctgttatcattttcttctattcaaagactgtaatacctattgctacctgtggttctcacttgtgattttggacacatatgttcggtttattcaaatttaatcagatgcctgatgagggtaccagaaaaaatactgtgttctggttgtttttgatttgcgattatactaggcaatgaatgacatcgaagttatcatcccgttagtggataatggtatgaacctaaaagaaaaatgggagatgtacccactacctaggatcgtctattgtaatcgtacttgtgcgagtcatgttatcatttatcttgtacattcatctccaagataagtgatctggttctttgatcgtttaaaaaaaaaaaaaaaaaaattaaaaaaaactacctcctccctcccctatatagttaagtaaacgtccatctccttctaca

SEQ ID NO: 84933 - DNA, 2267 bp, Oryza sativa
  unsure (1)..(2267): unsure at all n locations
  Clone ID: PAT_MRT4530_84120C.1
atgtgctattatgcggggacgtggcgcggcggggcaccggtgggggggcgggctgtgggcccccacctgacggggtggggccaggatgagctgaaacctgtggcggcggcagtacgggcgtgccacggcggcgtgccggcgtacgtgggagggcaggcgcgggaggacgaggcggaggctgaggacctgggcacaccactccggtcgggcaacccaagagcgtcagcacccgccgcgcgccgcccacgactgtgccccatcctccgccgtttgagcacggcgtggaggatgagatcgacgggagctggcggtggcggcggcggtgttacaggcgaagtcgccggcagcggcttcctccaccgcgcgccgccggggggggggaggaggtccggcggccggcgtcgccgccgaacgacgacgacgacgaggaacgagctgctgcctgcctccccgcctccttcctcttcgtgtgctctcgctgcgggagttgtggaggaaggcggcgctctggctgtaggtcgaccccattcctcgtcggctccgcaccaagtcgccgcggagtgcgtggttgcgaggcacatccggacgggggagccagtcgacaacgaggacgggaggctagagtaccgcggcgacaactggcgggcgctgtggccgggcagcggcaagcccgggctgtggatgagcgccatgtcgaggctagcggcggtgtaccgactcttcaccaccgacgaggagatccacgagctgacaggtgagaggagcgtcgtgaagacgaaggatgcagagctggagctggtgatcccgccggtgttcgtgcggtgcaacaaggtgctcgacgctggggagcagaaggagggagagagagaaagagaaagggggaggaggggaaataacagagaggtgatgagttggcatcctgacatgtggggccacgtgggtctcccgctgactcagcggctacgtcggataaaactgggcaagaaggcaagaaccccagttgagagtggagatggccattttgttcaggcactaggcagtgggtaggacggtgaggagtgtgtcctgcactcctgcttgccctgacgatcgatccccatgcgtgccgaagcatctgatacttttgctgtgctgttctttaatttaccctgatacttttggatatctgaagcagtagagctcgttcactcaaacaggctagcctgttttgctttctggtaagaacttaattaactagttgagatcgacatgcatggatgcgtgaatctattgttgcattttttctaatggatagttagatttgttccagctttttttttgtcaattctgttacatttgcagtgtcttcaacttctgcatcattcttctctattcttccttcactttctttcttgaactagcggacgcgtgggcggacgcgtgggcccctcttctacataaacgaaaacagcttgttgactggctccctagagctttttgtaagttgatcatcgaagtagctagttctcttcacttatcagtcatcactgttctatgttctatctgcattttccttgattttgtacttttcctgaacgaaaggacaatccttagccatcataatgctatgatcgacttattctgaagtcatccggcctcgatcctcttttgtttcggtgagatctgtaatggtttaagaaaattatggatctctgaaaaataagaaacatctagtagtatatgaaattaagaaatgtcggaccacgtcaaatcctactggtatcatataccagataactaactttttgaatggaaccaaacacgagattgtgaatatatagcagtaagaaatacaaccccgaagggtaaaggagaaaaaggaaaagcagtttagtgtacgagctgtaggagtagctttgctcctgccaaggcccagatccttgcctcttccttcatttctgcgaggagaccaggcactgaggtctcattgtgatcgaagattctcctgtttctctccttccagatctcctttgggaacaccctgtgtgtttgcaagcgcttagcttcattttcatgcatgatatgatctctggatagaagataagtagcccccacacatgcacttcgccacctatagccagcctcgagttctcatctgtttgatccgtcgcacatgtggagcaacgaagctctagaacacagcacacacagntacccctcgactgcaattaaggtacgtatatataggtgacaatggacaaccagcagctaccctacgccggtcagcc

SEQ ID NO: 84934 - DNA, 202 bp, Oryza sativa
  unsure (1)..(202): unsure at all n locations
  Clone ID: PAT_MRT4530_84121C.1
cccntnggatcnggnncatcnttncancatcacagcgagnatccgttnngcanggctnagnntcagntgngcatggcattcacgtgttgcnaccgcaagttacaaacttgncccacacnctttgtngttntangnaanncntnttnntattgcantncagatntttgctanaggcngngttatnantnttttnttttttnnt

SEQ ID NO: 84935 - DNA, 337 bp, Oryza sativa
  Clone ID: PAT_MRT4530_84122C.1
atagaagaaaagggccttcacattccatcagaaaaggagttgacatggaacttttcaagcagttcaaaaggaggggtatgctcaaagggacggggcaaaactttgcccatcaagcatgaactggaggggggatgccacgctcatctgaggcgggggctcagctggttgcttggcattcttaaccacatcattggaatcgacaagggcatctaatacattgggggtagcggcgaatgcctccaacttatgcagccccaaggcatttacatcactaggtagcctcacatcctgaccaccctgggttttcttcttctccacttcattctctgggggcaac

SEQ ID NO: 84936 - DNA, 625 bp, Oryza sativa
  Clone ID: PAT_MRT4530_84123C.1
ctttatccttctctctctctctctctctctctctctctctcccaatcgaggaggcggatgcaggcggcaaggcgatgccactactctcggaggcgagccacggggtggctggatccggcgtcggcggcaggcggggtggccggatccggcatcagcagcagacgggggtggctggatccggcgtcggcagcaggcggggtggccggatccgacgtcagcatctgttcccgcggcggatccgcgttgacagcgggaatggtacagcggcagcgtaggtgggcgccctcctcagcaagctaccgtggcagcggcgggcgccatccccggtgagctacgatagcagcggggctcgcacgtgcatgggtggatccggtgacgacaggcgccatcctcggtgagctacagtggcgggcatgcaatggcgaagttctcaaatcagtgatttgtattatatgtttgtgattctgttcttgccttgtgatggttgatgttgattcttgtggttctgttgttgatcttcaatctagatgtgttgattgtttggggattaaaaaaaaaaaaaaaaaaaaaaatgagttcgggggtttggagcttgggatctaaaaaaaaaaaaaaaaaaaaaaaa

SEQ ID NO: 84937 - DNA, 1869 bp, Oryza sativa
  Clone ID: PAT_MRT4530_84124C.1
atggcttctgcagataactggctaggcttctcgctctccggccaaggcaacccacagcatcaccagaacggctcgccgtctgccgccggcgacgccgccatcgacatctccggctcaggcgacttctatggtctgccaacgccggacgcacaccacatcggcatggcgggcgaagacgcgccctatggcgtcatggatgctttcaacagaggcacccatgaaacccaagattgggcgatgaggggtttggactacggcggcggctcctccgacctctcgatgctcgtcggctcgagcggcggcgggaggaggacggtggccggcgacggcgtcggcgaggcgccgaagctggagaacttcctcgacggcaactcattctccgacgtgcacggccaagccgccggcgggtacctctactccggaagcgctgtcggcggcgccggtggttacagtaacggcggatgcggcggcggaaccatagagctgtccatgatcaagacgtggctccggagcaaccagtcgcagcagcagccatcgccgccgcagcacgctgatcagggcatgagcaccgacgccagcgcgagcagctacgcgtgctccgacgtgctggtggggagctgcggcggcggcggcgccgggggcacggcgagctcgcatgggcagggcctggcgctgtcgatgagcacggggtcggtggccgccgccggagggggcggcgccgtcgtcgcggccgagagctcgtcgtcggagaacaagcgggtggattcgccgggcggcgccgtggacggcgccgtcccgaggaaatccatcgacaccttcgggcaaaggacgtctatataccgaggcatagatggacaggaagatatgaagctcatctgtgggataatagctgtaggagagaaggccaaagtcgcaaggggagacaggatgagtaattatgaaaaggagctagaggaaatgaaacacatgaccaggcaggagtacattgcacatcttagaaggaatagcagtggattttctcgtggtgcatccaaatatcgtggtgttactaggcatcatcagcatgggagatggcaggcaaggatagggcgagttgcaggcaacaaggatatctacctaggcaccttcagcaccgaggaggaggccgccgaggcgtacgacatcgccgccatcaagttccgcgggctcaacgccgtcaccaacttcgacatgagccggtacgacgtcaagagcatcctggacagcagcacgctgccggtcggcggcgcggcgcggcggctcaaggaggcggaggtcgccgccgccgccgcgggcggcggcgtgatcgtctcccacctggccgacggcggtgtgggtgggtactactacgggtgcggcccgaccatcgcgttcggcggcggcggccagcagccggcgccgctcgccgtgcactacccgtcgtacggccaggccagcgggtggtgcaagccggagcaggacgcggtgatcgcggccgggcactgcgcgacggacctccagcacctgcacctcgggagcggcggcgccgccgccacccacaacttcttccagcagccggcgtcaagctcggccgtctacggcaacggcggcggcggcggcggcaacgcgttcatgatgccgatgggcgccgtggtggccgccgccgatcacggcgggcagagcagcgcctacggcggtggcgacgagagcgggaggctcgtcgtggggtacgacggcgtcgtcgacccgtacgcggccatgagaagcgcgtacgagctctcgcagggctcgtcgtcgtcgtcggtgagcgtcgcgaaggcggcgaacgggtacccggacaactggagctcgccgttcaacggcatgggatga

SEQ ID NO: 84938 - DNA, 2766 bp, Oryza sativa
  Clone ID: PAT_MRT4530_84125C.1
ggggctagaactgtaaccatcatgtatttcagcatgcgcgtgcggatccgcgtccggtctcagttttgttcaaaaaaagacatgagtgtttcacagctttgaacgccacactagtgagtagtgccaggacaggacactgtgattaactaagcagactctggtgtttacaaggttacagtgaactatggcagcagatcaaaatcaatcctcagtggcgtaatattgcggggcaagttcagccagccacacgggatcgatccgggtcaggtccttgacgtaattctgactcgttcgaaccaactcgttgaagatggcacaatctggcttcttttggaagagcaccgatgacggatggatctgcacgctctggctggttgcaagagccctgtatgatccatctggctgtcgcattgcggcattcaagaagaaagcagctgtgaggcatctccggaacagaaccatgtcatccccacacgatgatacgttaagccccatttgttggacatggccctgaatttggctgtgaacatcacaagcatgtcttagagaccggtaattgatgaaattttccctgcaccatctgttcaatgccttttccattgttttctctttggcatttgcatttttgcttttctccaagcattctttagcggctcgatatacattcaccaaggttatgtggtccccttcagagctttcaaaactcttcctagcagctcttgcctcttctaacttctcacgtgggctgaagaaaatagattccactgaaagcatagagacaacaatcaacatctcttccaagcacttgaattcgcttgctactattagtgccttggagtacattggatccaaaggtagcctagccatctgacgaccaactggatctgacaacttataatcatcagtcagagcacctaataaaattaactgctccaatgatttcaaaatagctgtccttgatggtttctccataaaatcaaaacctatgatgtcatcaattccaagagctttgagctgtagtacaacatttgcaaggttacatcgcttgatctcaggcacagtagaatccaccagcttatcaaactcactttcttggaacaatcggtagcacttccctggtccctctcgtccggcacggccactcctctgaagagcctgtgctttcgaaacagggataatgatcagagattccattccagttacaggattataagcacgagctttgaccatcccaggatcaataacatatttgataccaggtattgttacagaagtctctgcaatatttgttgctaaaaccaccttgcgagttccagctggtgcaggcttaaaagcattcatttgctgctctgatggaagagatgagtaaataggtgtagtccatatcttacttctctgtggtggaagttgacgagcacgctcctgaataagtctgtccagtgactcaatctcctcttggccagtaagaaatgcaagaatgtcccccggtccttcctccaaatggatctgaaagatagtaactagtgtagcgtccagataatctgactcaggctgataagtgtatagtatgtcaacagggtattgccgtccttgaatatgtacagctttagcgctgccaaaataatctgaaaaacactttgcatccaaactagcagacataattatcagttttagaggatcaatttttgttccttggcatgccttcagagtaaaatattgagactgatgttgtatgtcaggcaaaatctttccattcttattggcataaatggatcgggaatgttgcacttttttcagcaaacccaacaagacatcagtatgtacagttctttcgtgtgcctcatcaacaactatgacactatacttagacaaaagtggatccagaagtgcctcccttaaaagcaaaccatcagtcatgtacttaatcctcgttgcatttgatgtcgaatcatcaaatctaatagaatagccaacctttttgcccaactgatcattgcattcctcagcaacacgctttgctacagtaacagctgcaactcttcgaggctgagttatgccaatgacttttccatcctgacaaaacccagcatcatacaaaaattgtggcaactgagttgtcttgccacttccggtctcgccgacaacgatcaacgtgtcattcttcctcacctcttcaataagcctcttctccactgaggcgatggggagcgacttcctctgctgccgaatcagctgcctcctcctggcgttgtgctgctgcttctgcggagaagcgccggaggaagggaacgacggcatgtcggacgccgcggcggcggagtcccgagctctcctgaatcccgccacggtggccgccggtcggtcgctggctagccggagccccgaggccccctctttgcgccggagtgctttcgcttcggcctggaggtcgggactagggctcgagtacgaactacttcgccgcagccgccgcttcacctcgtaccgtgctcccccacggccgtggtggtcgctccctcgtcggctcgccgccgctcgatgggtctcgccgccgccacgcgccgccgtcttgccgtcgcgctcgtggagtgacggtggcgaagggaatatggggaaagagctatatgggccattggtggaatggccgcctgatgggcagcgccggtgagaaggtcggaggacacaaccatcactggtgatgtgggccgatggtggcgcgtggaggaagtctaagaggccaccaccctccctcgctttgaaccccat

SEQ ID NO: 84939 - DNA, 264 bp, Oryza sativa
  Clone ID: PAT_MRT4530_84126C.1
atgtgcctctacctcccctcatcgtcgggggagcgagaggctgctcttgctacctcgccgctggccggtgaaaacaaggaggaggattgcctgcttctcttgcgattagagctcaagtcggacgcaaccgagctcagcccaacgtcaatgatgacggtggacacacggatgcggccgagctctgcggcgtcaacaacggtggccgaggtccacggagtggacgacggcggccacgtggatgcggtcgagctcggcgcggcgtag

SEQ ID NO: 84940 - DNA, 259 bp, Oryza sativa
  Clone ID: PAT_MRT4530_84127C.1
ccctgaccactgacgtcaagctctttgagatgcgcccactaggctctacaggaggctatttctggtgacaacatctgattcaacgtgacgaacgtctcagctaaagatctgaacctggggaacagggtctccaattcaacggaggaccgatcaaaagaggccaccctgttcacctccgaagcgatcattatgaaccactctagtcagacacgctacacatagacgtcaatgctggtgtgctgctcaccacaaattgccg

SEQ ID NO: 84941 - DNA, 4550 bp, Oryza sativa
  Clone ID: PAT_MRT4530_84128C.1
atggccgagcccaccatcgccgacctcttgaaggagatcaagaacatgtccgccgaactcacctccctgaaggccgatatggcgaccatgaaggacaaggcctcgacggccgcaagcaccgagactcgccaccctgatgggttgcgcgacctcgacctgcctccccggcccaagaagtgggattttccccgctacgacggcaccacggatccgctgctcttcctcaacaaattcgaggcgtacttccgtcaccaccgtaccatggccgaagagcgcgtcggcatggcgtcctaccacctggacgacgtcacgcagacttggtacacccagctgctcgaggatgagggaaccccgacgtgggggcgcttcaaggaactcgtgaacctgcgtttcgggccacccctgcgttcggccccgctcttcgaactttccgagtgccgacgcacgggaacagtggaggaatactccaaccgcttccaggccctcctgccgcgcgcgggtcggctcgacgagtcccagcgcgtccagctcttcaccggcggtcttctgccgcctctcagccacgccgtccgcatccaccatccggagacgctcgccgccgccatgagcctggcacgccaggtggagttgatggagcgtgatcggccggcgccacctccactacgtgctccgccgcgtgggctgctacctgcgcctgcgccacggctcgcgttacccgcgcccgcgcagcagttggcgctgcctgccccaccagcggccgccccacagggtcgcgacgcggccaacccacggcgcctgacgccggaagagatggccgaacgctgccgccaaggtctgtgcttcaattgcaacgagaaattcacccgtggccacaacaggttctgccgtcgcctcttcttcgtcgacggggtggagatcgacgacgtcgcaatcgagggtgacgcggcggccgccgccggggatacggaggcgcccgtgttctccctgcatgccgtcgccggcgtgcccatcgcggacacgatccagctccaggtgaccgtcggcgatgcctccctcctcgccttgctggatggaggctcgacgcacagcttcatcggtgaggaggcggcaaggcgcgccggcctcccgatccagtccagcccgcgcatgacggccatcgtcgccaacggcgaacgcgtggcctgccctggtgtcatccgggacgcggcgttcaccatcaacggctccacattccacaccgatctctttgtgatgcccctcgcaggtttcgacgtggtgcttggcactcggtggctcggcacgttgggtcccatcgtgtgggacttcacctcccggtcgatggcgttccagcgagacgggcaacgcttcgcctggaagggcgtggcctcgacctcaacaacgcacctgcgtaccctagccgcggccagtgggacgctcctggatgagctcctggtcgcctatgaggacgtcttcggcgaaccgacgggcctcccacctccacgtggccgcgaccacgccatcgtcctcaagcctagctccgctcccgtggcggtccgtccgtaccgctacccagcggcgcacaaggacgagctggaacgccagtgcgccgcgatgatcgagcagggcgtcgtccgccgcagcgactcgcccttctcctcgccggtcctgctcgtcaagaaggccgacggctcgtggcgtttctgcgtcgattaccgcgccctcaacgccctcaccgtcaaggacgcgttcccgattcccgtcgtcgacgagctccacggcgcccgcttcttcaccaagctcgatctgcgatcggggtatcaccaagtgcggatgaggcccgaggacgtccacaagaccgccttccgtacacacgacggcctctacgagttcctcgtcatgccgttcgggctgtgcaacgccccggcaacgttccaggcgctgatgaacgacgtgctccgaccgtttctgcgacgcttcgtgcttgtcttctttgatgacattttgatttacagtgagacttggaccgaccacctgcggcacctgcgtaccgtcctatccgtgctccgtcagcaccggctcttcgtcaagcgcagcaagtgcaccttcggctccccctcggtgtcctacctcggccacgtcatatccgaggcgggcgtcgccatggatccggccaaggttcaggctatccacgagtggctggttccccgttcggcacgggcggtgcgcagcttcctcggcctcgccggttactaccggaagttcgtccacaactacggcaccatcgctgccccgctgacggccctcaccaagaaagacgggttctcctggacggaggacaccgccgctgccttcgacgcccttaaggcagcggtgacttcggcgcccgtcctcgccatgccggacttcgccaagccgttcaccgtcgagggcgacgcgtccacccacgggttcggcgctgtgctggtccaggacggccaccccgtggcgttcttcagccgccccgtcgtgctgcgtcatcgtgccctcgctgcctacgaaagggagctgatcggcctggtgcacgccgtacgtcactggcggccgtacctctggggccggcgcttcgtcgtcaagaccgaccactactccctcaagtacctgctggaccagcgcctcgccaccattcctcagcatcattgggtgggcaagttgctgggattcgacttcgccgtggaatacaagccgggcgctgcaaacactgttgcggacgccctgtcaaggcgcgacacggaggagggcgccatcttggcactgtctgcgcctcgctttgacttcatcagcaagctgcatgacgcgcagcgccaggacccggcgctcactgccctccgcgacgaggtcagcgccggcacgcgcacgggcccctgggcgctcgtcgacgacctgctgcagtacaacagctggttatacattcccccggcatcgcccttagctcgggagatcatcgaggctacacatgaggacgggcacgagggtgtcaagcgcaccatgcaccgcctccggcgcgagttccacatccccaacatgaagcagctcgtccaggactgggtacgctcctgcgcagtgtgccaacgctacaagtccgagcacttgagcccggccggcctcctgctgcccctgccggtgccccagggcgtttggaccgacatcgctctagatttcatcgaggcgctaccacgagtgcgcggcaagtccgtcatcctgacggtggtggacaggttcagcaaatactgccacttcatcccactggcgcacccgtactccgccgagtccgtcgctcaagccttcttcgccgagatcgttcatctacatggcgttccgcagtccatggtgtcggaccgcgaccccatcttcacctcgacgttttggcgcgaactcatgcggctgatgggcaccaagctgcacatgacgacggcattccacccacagtcggatgggcagtccgaggctgctaaccgggtgattattatgtacttgcgttgcttgacaggggaccgtccacggcaatggctgcgctggctcccatgggcggagttcatcttcaacacggcgtaccagtcctcgcttcgggacaccccgttccgggtcgtctatggcagggatccaccctccatccgctcctacgaagcgggggacacgcgggtcgccgccgtcgccaaaagcatggaggagcgggctgagttcctctttgacatccgctaccggctcgagcaagctcaggcggtccagaagctgcactatgacaagcaccaccgccacgttgcataccaggtgggcgactgggcgctcctccgcctgcgccagcggcccaccacgtcgctccctcagtccggcacgggcaagctgaagccccgcttctatgggccataccgcatcaccgagctcatcaacgacgtggccgtccgcctggagctaccggccggcgctcgtctccatgacgtgttccacattggcctgctcaagaagttccacgggccgccaccgggtgcaccaccggcgctgcctcctctccatcacggcgccatcgcccctgagccggaacgtgctgttcggtttcgtttggcgcgaggcgtgcgccaggcccttgttcagtggaagggcgagtctccggcttcggcaacttgggaggacatcgaagttctccgtgccaagtaccctgcccttcagctcgaggacgagctgagtctcgaggaggggggagatgtcatgtgggggaagacctacaccaggagacaccgagccagagatgtgcgccgggcagcagaacgtgcgggcgcacgcatggacgcagaacgcgcggtgatcgcgggcacggcgcatgcaaccgaggatgaagcgatcagcgcaagtggctgaagttggaaagctatttttagttgttaagatattatttgctatctttgattagttccttgaatcgaggagtttgtttcctccgttggttagggccgatggccatatattccctgtaaaccgaaaagattagggaggcaagatcaattacctgctctcct

SEQ ID NO: 84942 - DNA, 1147 bp, Oryza sativa
  Clone ID: PAT_MRT4530_84129C.1
ggggcaaacgatattggaacgattcttatttccagaacgaaaatttgtggaacatctcgcgtcagctccattcgttattctatttttacaaggggaacaagctttgccttatctctcttttggatatataaagaataaatcaatataatgttaaacagcacatgctacaaatacaggattcaccaaaagaagaaaaaaagagggcaaaattctacaaggcctttgtccttcgattctgggaatcaactattaagtccccaactgggccacttgatgtggaatgctcggtgacgaaattctcaatcttgagtaaggcctcaatagcaatatcggtcggtgttagtttggagacatcgtcatggccttgtttagctgcaatttcttcaagagaaactcgagcatcagcatttgcataagcatcgcctctttgctctgcaagcatgctgagttttgagaaggccgctgtgtatggatcactcgatggctgatccagaagaggacgagaggcagtacccacttgagcaatacgccttgcaagtgcatccaaaggcacatccagccagacagatagacctttcttcatatatttcattgcctcattatctctgaaaaacgcttcactgtgctccttgaatatttgggcaacagaaggcattccaactgcttgttcaaccaacttatcactgtcaaagaatgaataacccaaaacttcggctaatatctttgcaactgtactcttccctgagcccatcattccaactaaataaatacaccgtccgttcaagtagaatagaacttcttctgatttcctctttaacaggagggcttcatcaactgagttatgcaagctgtcgtggccctgaacaactccatttccaacacataagttgtcacatttactccagatcaccacgaaagtgaccacttcccccaatccaattaaaaaactctggacgccttgaggcagtacagcggggcgaggggcttggccgccgccggtccggcggggcctccgacccgcaggctcgccgcggttggccgcttccccacgcggatcacgggcgcggccccgccgccccacgccggggccagctccgaccccgacagccgcccgcgactgcatcgccagccccgctctagcctccat

SEQ ID NO: 84943 - DNA, 357 bp, Oryza sativa
  Clone ID: PAT_MRT4530_8412C.1
atggactacggagccattggctcgaacaggagaggaggagggagggggtgggggcagcacggctgcgcgagcgagagtctctcgccggcgcgccatggaggatactggctcgggaagccagagacggagaagaggaggggattgcgacggcgagcggcggcggcggcggcggcgggtctgccaacccatgaggctgacgtgtgggccccaccgcgccatggcccacctgtcagtaataccgacaatgggctccacgagacgttcgatcacagatgtgcggcacagatgacaaatttgactccacaccaatatgggctgtgggccgcgtgcgactggaagcccaagttatgggcctaa

SEQ ID NO: 84944 - DNA, 397 bp, Oryza sativa
  Clone ID: PAT_MRT4530_84130C.1
gaagccctcctgttaaagaggaaatcagaagaagttctattctacttgaacggacggtgtatttatttagttggaatgatgggctcagggaagagtacagttacaaagatattagccgaagttttgggttattcattctttgacagtgataagttggttgaacaagcagttggaatgccttctgttgcccaaatattcaaggagcacagtgaagcgtttttcagagataatgagagtagtgtcttgagggacttgtcctcaatgcgacgattagttgttgcaactggaggtggtgccgttattcggccagttaactggaaatatatgaagaaaggtctatctgtctggctggatgtgcctttggatgcacttgcaaggcgtattggtcaaaggggta

SEQ ID NO: 84945 - DNA, 408 bp, Oryza sativa
  Clone ID: PAT_MRT4530_84131C.1
atggagatcggcaacgaggcacgacgaggggaggtggaggctatgagaggcctcatagtgcaccgagctagcgtggatcctagttgcgccagctcggattttcgccgacgtggagcgagcgaccgcgccttagctaggtcggactcctcctgcaacaccacccccgcctgctctgattccgacgacgaggacaacgacgacaaggtggggactcgtcgctcccgccgccggtggaggactcgaggaggactcgctgccgccctccaagaacctgtacgggaggcgaggaggaggaccagctcaccggtgctccagatccagccgccgccgccaagaaccgcctgctgcccgccgccaagaaccgccacgccgcccccgccgctcccaccttcgggaaaggcacggtga

SEQ ID NO: 84946 - DNA, 1998 bp, Oryza sativa
  Clone ID: PAT_MRT4530_84132C.1
tcacagcaacttggcaaacttgtggcaatctgcacaaaagcgaagattctttacgattctgattgctacatttggagggcctccaatgagcccaaatgcaattgcaagcttctcgctgtgatgaccgagtgcctgttctttctcttcctcctcaacatcataaaacacctctgcagtctctgtgacataaccttgttgttgcatccttgcgctaatctcagccagctttgcatgaatgtcattatatgatgggtgtgacttgtcacctgagacgaactcatggatggagtcatttatctcaattgagctgcagccaggaatcttctcaatccccttgcttctcatggtcctccggacatcttcaacaccactccatctcccaactgcagcatagagatttgacaggaggacatgatcaccactacaagttgcttccatctcagatattgcagtttcagccatcttgacatccttgtggagacggcatccaccgagcaatgccctccaaacgacagcatcgggtttcatcggcattcctgcaatgattttgtgggcttcctgcagatgaccggagcgagcaaggagatcaaccatgcatgcataatgctcaaggattaaccttatgccatacttcttctcaatcatgtggaaatgctccctccctacatccacaaatccaccatggctgcaagctagtaggactcctacaaaggtcacttcatccggcaccactgttctgtcaagctccatcttgcgaaacatgtccaatgcttttgctgagtagccattcatggccaagccattgatcatggcgttccatgtgcaagtgttcctcgatctcaacttggtgaacacatccagagcaagctccacggcgccgcacttggcatacatgtcgagcagcgcagtgccgaggaactcatcccaccaccggaagagcctcttcctctcgacgaaggcgtggatccacttccccgtctccagcgcgccggcgcccgcgcacgccgccagcgcgctgaggaccgtcccgcggttcggcgcgaagccctccgccatcatccggcggaagaggcacagcgcctccacgggccgcctgttcccggcgagcccggacatcatggcgttccaggaaaccaggtccctcaccggcatctcctcgaacaggcgcctcgccgcggcgacgtccccggcgcggcagagccccgcgaccagcgccgtccacgtgacgggtgtcggcgacgggacacgctcgaacagccggcgcgccgagacgacgtcgccggacatggcgtgggcgtggatcatggagttgaacgagacggtgtcccggtgggacattccgtcgaacaccctgcgggcgtcgtcgacgaggcccgaggcggcgtacgcctggatgagggcattgtgcacgcgcgcgtagggctggaggccgagcttgacgaggagagcgtggaggggagggaggcggcggcgcgcggcggcggaggcggaggcctctcggaggaggaagaggaaggagtgctttttcctacgctcctgaatatgtttcagcgtacgggacttctcgacattggacaagtagtggtcacgttgtttctttgcagctgctatctccaagtttagtttctgctccctgatatgagtcttctcagctatttcaccaacaagatcatcccatttgaatttcttgagatattttatgttccaaatgtcataataaaatggagacctcttcttcccaccttcaggcacaaggtaaatcctctgcacctcgccatacttggagagcatctggcggacgtgggacgggttcatgttgggagggacgcggctgaggtagcacaccccgcgcttcccgaggccgtccagccgcttcagcgcccgctccctcgccgcctccgcgtcctcctcctcgccttcgctgccgagaccgtcctcctcccatcccagctcctcctcctcctccgagtagtagtcgctctcgctgctccccgccat

SEQ ID NO: 84947 - DNA, 342 bp, Oryza sativa
  Clone ID: PAT_MRT4530_84133C.1
atggacacctcaacgtcatctccaatggagggacctcctcaaccctcaaagggaaactggcaaaaccccacacagaatataaagcgaaaagcctacaacaaaacaactatgaaccacagaagtaaccgaggaagaagcaagacctttaaggcgagggatgcaacgacagaagccgctaccaacgcccgtccaaaaaggactgggtttttacccaaagggaaagagagtcaaaataagacgacatctccaaggaggatatggcacctgcaggcgtcgatgtcgctgaacctggaaaaactaggcggggcttttgtcacgccccgaactagccccgagcgggat

SEQ ID NO: 84948 - DNA, 459 bp, Oryza sativa
  Clone ID: PAT_MRT4530_84134C.1
atgtcgtccgcgccgccgccgcagcaatccaaaccctcctacaaccaccgccgccacaacaacgccgccccgaggcaccaccacggccagcagcagcagcagccgcagccgcagccgcagccgcagcagcgctacgtccccaagcccgccgcacctaaaccctcgcccccgccgacgctcaccaccgccctccgatcatcggcttccccgtctgcatctggcgccggcagggtgggcggagaggccgatgggttcgtggcgtacctgccgcacgacgaggtggtcgcggccgggctcggcgggcccgacgcccaggagtcgcaggccgtcgtcgacctcctcaacgatgccctcgccgcgctcctccgcgctaagccccgcgagttctggcgccagggtaaccgaaacgctcgcttgtgcattactgtgctcatgaaaccgtgtagctggaaggcgtga

SEQ ID NO: 84949 - DNA, 2526 bp, Oryza sativa
  Clone ID: PAT_MRT4530_84135C.1
atgtacggcgccgtcgaagccatcgcgtcagccgccgtcacaacttgctcgatgagaaacattagacaaatacacgacacaagtggaccagcaatggtttatgatttggccgctgtggcccagcgggagcgcggtgagaggggctggtactcgtggtcgcggccggcacgagattgtactgaaattctcaggatggctaatgagctctctggcaaattctgcacgcctgtcagccagccagataatgacagcactgtgatccaaattatttcaacaataatgccaaggtactatcctcaattgaagtttgaacgtctagtcacttcgctggaagcaaaggttggatatgatgttttaatggccgattttttcatccataagaatgtgcctcgagaggaaaagattaatctaattgttgtgcaaaaggaagacttaaatgcctcatcatgtattgcaaacccgccacatgtgagctttttagtcaatggaaaaggcgtggacaagaggacaaatgtttcaatggaaacaggaccccagttccccactgatattactaggatgctcaaatacggggcaaacatcatccaagctataggatattttaatgctaactatatcatagctgttgcatttctgaataaattggagtcctttgacgctccaaacctaaatgattatgcacaaccagtcgctgctgatcctcctgattctgatttactcgaagggccatctagagtttccctgaagtgccccataagttttaggcgcataaaaactcccatcaaagggcgcctatgcaaacactatcagttgaacttgaggaagccgacttggcgctgtccattttgtaatacaccttcaaacttcactgacctacggattgatcaaaagatggtcaagtctttatttttccataagatattacaagagactggagaagatactattgatgtccttgtgtttgctgatggatcttggaaagccatttcaactaatgatgagagatctgatagacattccagtgacgtcattcagcagagtagagatactatggacactgatgcgactgctgatgatgtcatagatctgataaatgaagacaatgatggtgatgtgccaatgagttttacctctgcatcagaagatgtgaagcctttcttgaattgtcaggatctatctgtggcagactatctttcggatttgcctatgaacacagtttcgcaggcagaagatctatatgcaggcggtgcaagccgtggaaacaatgaacgtggaaatgccacttcaacttctggccaaaattcatcactgccttctactggcggtctgggctctagttcattcgggactttggagtctattctgcctcataacattctgcaccctgttatcacagatgcagtctctccttctcttgatacctctaattctgtagttctgagacagcatgtagcacaaggaacacgttctgatattgtgccgtcgcaaccacgaatagatccacagcttagattagaaattgcaagacctcctataccaaggaatgtcgcgagagaacctacaggaattcaggctctgccagtgcaaccacagagagtgcgaccaaatatctacaattgtccacctcctttcccacaatccagtccagcttcagcatatcaagtacatcaggtgacaaacgcagatagtgtcattactgctatgagcactggtattggatcactatcaagggctccagatgctgctccgttattgcaacaccagtcaacacagcaggggcaaatatttaacaggcacttgaactacttcactatcttcattactcatttcgtactgcttgcttgcgtactgcaaatacaagtagagattcgagccacgcaaaactatcatcaaggccagttcattgggcttactgctcctcaaaatttcatgggtacaagaccgccgccaggagtcccaggacaggctataggtgctaatgcccatggagctccccccgcacaacagtcccatcacgttcatcggctagtgagcaatctaatgaatcaacttggacaagctacagtggctcaaccttccacagctccacaggtcttgccatctcaaccaggcggcacaagtgcagtcaacccgcagatccgcggtcatcttttccctgcgcaacaacgcagccaagcaatgagaccacaagcagtgccccgacctacaatttctcaggcaccacctcgtgcacagtctcccttcttgccagctactgctcggcctccgagcacacctccccctatcggaacttccgatgatcttcaggagcttcctgtggatgaaagctggcgtcccacagggcagatgagagggagcctgactggtgaagcttacagcgtagcgattggacgctacaaccccagtgtgaacattgctggtcagcagacaagtcatgtgacaagtcaggctcggccagctggtccggatgcgcgcagctttaggaggttgcgagagcctagtgagggtgctaacgcgctaaactga

SEQ ID NO: 84950 - DNA, 1061 bp, Oryza sativa
  unsure (1)..(1061): unsure at all n locations
  Clone ID: PAT_MRT4530_84136C.1
ccacgcgtccgtaagaatgtgcctcgagaggaaaagattaatctaattgttgtgcaaaaggaagacttaaatgcctcatcatgtattgcaaacccgccacatgtgagctttttagtcaatggaaaaggcgtggacaagaggacaaatgtttcaatggaaacaggaccccagttccccactgatattactaggatgctcaaatacggggcaaacatcatccaagctataggatattttaatgctaactatatcatagctgttgcatttctgaataaattggagtcctttgacgctccaaacctaaatgattatgcacaaccagtcgctgctgatcctcctgattctgatttactcgaagggccatctagagtttccctgaagtgccccataagttttaggcgcataaaaactcccatcaaagggcgcctatgcaaacactatcagtgttttgattatgataattacatggagttgaacttgaggaagccgacttggcgctgtccattttgtaatacaccttcaaacttcactgacctacggattgatcaaaagatggtcaagagactggagaagatctattgatgtncttgtgtttgctgatggatcttggaagcttacataactaatgatgagagatctgatagacgtgtgagcattgctggtcagcagagtagagatactatggaccctgatgcgactgctgatgctgatgcgcccaggttatatgaagtcaatgatctatgcattgctcatcaaaaagattttgttggtggctttgaactttgaatttgctaaaatagatgttctctctccctagctatgttaaattgtcgttaatctgtttagctttaggaggttgcgaaaccctagtgagggtgctaacgcgctaaactgacttgcaatgctggaaccccgttttgtagcagttcctgtgctgctcaacttccaagttagttatacaacccgcgctgcatatgtacaaacccttattatgttgggtattgcggctatcttattatactctttgttttatttgatcatttttgggctgggttctgccc

SEQ ID NO: 84951 - DNA, 649 bp, Oryza sativa
  unsure (1)..(649): unsure at all n locations
  Clone ID: PAT_MRT4530_84137C.1
caacaacgcaagccaagcaatgagnccncaagcagtgccccgacctacaatttctcaggcaccacctcgtgcacagtctcccttcttgccagctactgctcggcctccgagcacaccctccccccatcggaacttccgatgatcttcaggagcttcctgtggatgaaagctggcgtcccacagggcagatgagagggagcctgactggtgaagcttacagcgtagcgattggacgctacaaccccagtgtgaacattgctggtcagcagacaagtcatgtgacaagtcaggctcggccagctggtccggatgcgcgcaggtaatggtaagtcagataactatgcattgctcatcaagaagattttgttggtggctctgaactctgaatctgctaagatagatgatctctctccctagctatgttagattgtcgttaatctgtttagctttaggaggttgcgagagcctagtgagggtgctaacgcgctaaactgacttgcaatgctggaacaccgttttgtagcagttcctgtgctgctcaacttacaagttagttatacaacccgcgctgcatatgtacaaagccttattatgttgtgtattgcggctatcttattatactctttgtcttatttgatcatttctgtgc

SEQ ID NO: 84952 - DNA, 432 bp, Oryza sativa
  Clone ID: PAT_MRT4530_84138C.1
atggtccaggcgaggctgcagtccatgatcgacgccgcggccggccggtcgtcggccgcgtcgcgcccgcgcccgctcccgcgccatgggacgacggagacggccgccgagcggcaggttcagcgcggcgggccttgccgttgcgcgtgcaactactgcggcggccactacgacgacggcggcggcggcgcgtcgtgcggccagaggaggccgtgcgtcgtgctggtggcggtggacaggaggacgagcgacccgcgggaggagttccggcggtccatcgcggaggtgatcacggcgaagcggatggcggagccggcggagctgcgcgccctgctcaactgctacgtgtccgtgaacgcccgcgagcaccgcgccgccatcctcgaggccttccacgaggtttgctccggcctcttctcccgcaagcgctga

SEQ ID NO: 84953 - DNA, 366 bp, Oryza sativa
  Clone ID: PAT_MRT4530_84139C.1
aaaaacgggaaaacacggccctatttgggggggctggggggatgcaacacaggggcgggccgaaaccccctaaactccacatggccccattttagagggggggttgccaaacccccggggaaacctttttatcattattcccatttaaaaacaaaccgggcggggtgggagcccgggggggtctgggcatgggtccacaagggggccctttgcggggggaaagcccccggaatttaggggaccggggtggggcccctgggggggggggggttggcgagccccggggtccccccctcccccggggggacggcctcccaaaacacgtacctttttccgttggggcgggggccaacccacctggggggg

SEQ ID NO: 84954 - DNA, 1964 bp, Oryza sativa
  Clone ID: PAT_MRT4530_8413C.1
agcgtgaaacttcgctgaaatggttcgattctgggccaccaaacagaacggtcaaaaggattaatttgcacagattatcaccaagctaagcgtagttggaacaaaaaccaggggattactctatgccggtccaggacccttcctcccccgtgccggcggcggcgcggccgaagcgcacgtcgtcggcgccgatccggccgtcggactacacgcacagcccggcgcaccaccgcgtcgcgctgcgggacgccgccgggctggcgggcgtcctccatgggctcccgccgctcgcccacccgagccgcatcctcaccgccgccgacgccgcccgcgaggcccgcctcgcggcgtccgtgtccggggcgctcgaccgccgcgacgtcccgggcggggacaccgcgctccacctcgccgtgaggctcaggctcccctccctcgcctccgcgctcgccgccgccggcgccgaccccacgctccagaaccacgccgggtggacgcccctccaggaggcgctctgcctgggttgcaaggacatcgccgcgtgcctcctccgcgcccaccgcctcgccgcctgggccaagctccgccgccgcgcccccgcgctgtccgcggcgctccgccgggtccaggacttctacctcgaggtggacttccacttcgagagctccgtcgtgccgctcctctcccgcgccgcgccctcggacacctaccgcatttggaagcgcggcgcggagctccgcgcggacaccacgctcgccggcttcgacggcctccgcatccgccgggccgaccactcgttcctcttcttcggcgaggaggccgacgccggcggccgccacctccccccgggctcgctcctcgtgctccaccgcggcaagcgcgaggtgcacgacgcgttcgcggcggcggcggccgccggcgacgaggattcggccacatctgacgcggccgcgtatcgaccggggctcaacatctcctccgcgaggctcgtgccgaggacgacatggctacggaaggagaagacggagagcgtcggggagtggaaggctcgggtgttcgacgtccacaacgtcgtcttctccttccgcacgctcaaggcagccaacgccggccgcaaggacttcaccttcgagctcgccggagacgacgacgacgacgacaacaacgacgacgaggaagacttcctccccctggagatccgcgacgatgacgaggacggcgacttcctggtcgccgacatccccccgcccccgtcgcgccgcagctgctacgtgcccggccggcgcagcgtggcggcgccgccgtcgcacatggcgacgccgcagaggcggcggaacagcgtggacgtgccgcggcggctcccggcgtgcgcgtccgtcggccgcggcgagggcggcgtgttcggccgccacgccaccacgacggggggagccaggtggaaggaggaggagacggtgaagacgctgcggccaaccgtctggctcaccgaggacttcccgctcaccgtcgacgagttcttgccgctgctcgacatcctggccagccgcgtccgcgccgtgcgccgcctccgcgagctgctcaccaccaagttcccgccggggacattcccggtgaaggttgccattcctgttgttccaacggtgagggtagtgatcaccttcaccaagttcgtccctctcctcgagccggaggaattcttcacgccgatgtcaagccccagcctgttggtgagcccgggtccgggatccatcatgcacaaaccagacactcagaagagctcctatttgaagtggggcttgaagaactccagatcgaagccggtgaacctgtcgcaggttgcggacaacaccgacccgttcacgatcccgagtgactacacttgggtaagcctcgggtctaagggccaagacaagaagtcatccaagactaagaaggggaagaccaaagagaccaagcttagctag

SEQ ID NO: 84955 - DNA, 231 bp, Oryza sativa
  Clone ID: PAT_MRT4530_84140C.1
atggacggcgtctccggccggccgcctcccgcattgctcgtcgtcatcctcgccggccaccgcgtgtacaaacgtacgacgttccgctcctcccacgccgccgatcgctgtgttggaaatagtccccacattgattatttaggagaagttgaaatgggattgatcatggctgttgctgaggctaatcgctgctgcgaccgcggcgaaactggccggccggcacagcattaa

SEQ ID NO: 84956 - DNA, 425 bp, Oryza sativa
  Clone ID: PAT_MRT4530_84141C.1
acgagcacgctactcccatccccactctcgtcgctcgtcggtataccaaacctgaaaagcttgtcgagtcctgaccccacccgatccgatggccgccacatcgccggactccgtgcgacctcatcctggtcgagccggccaagccggggtcccgggtcgcctgtcgtcaccatcaaccggcccaaagcgctgaacgcgctgacgcggcccatgatggtgtcactggccgcggcgttccggcggctggacgccgacgacggggtggcggcggtggtgctcgcggggcgcggccgcgcgttctgctccggcgtggacctgaccgctgcggaggaggtgttcaagggcgacgtgaaggatcccgacgccgaccccgtcgtccagatggagcgctgtcgcaagcccatcgtcggcgccatcgccggatt

SEQ ID NO: 84957 - DNA, 215 bp, Oryza sativa
  unsure (1)..(215): unsure at all n locations
  Clone ID: PAT_MRT4530_84142C.1
acaatatcagctgaaagtgctggattacttccaagccgctcagataaaccacaaggctcagacctattactggaggcaacacttgaagcagaggtcgcagagcacncaaaatncttcgtctccagcagcatcatgatgaactgcacaaggagtgatgcgatctttgataggaactgtgcctagaactcttgtacattannncttacaaattctga

SEQ ID NO: 84958 - DNA, 223 bp, Oryza sativa
  Clone ID: PAT_MRT4530_84143C.1
gaaaagaggatttattgcgtcagcgggctagggttttggtggaccgggcgcacgggcggcggttcacgcgaacggacggccgagatctaaccgatccaagatggacggccgagatcgatcgggtccacgaccggctcacggcggacgaccccgatgacgtcagcgatgacgtcaccgcggcggcggcggctcggcggaacggacggcttcggcggggcacgct

SEQ ID NO: 84959 - DNA, 1025 bp, Oryza sativa
  Clone ID: PAT_MRT4530_84144C.1
gcccttcctctcccgacccgacacccgagtcttcttcccttccccaatctcgcccttcctcctcctccgatcgatccagcccccgcccctccccgcccctcgccgcgcgcgcgaaggagagagagagagagagggagagagggagggagatcgcctcgccgccgcggcgtgggatccggaggtggtgtagcgaggatgtcgtctgattcgtcgtcgtgggcgcgcgcgctcgtgcagatctcgccctacaccttctccgccatcggcatagccgtctccatcggcgtctccgtcctcggcgccgcctgggggatcttcatcacggggagcagcctcatcggggccgccatcaaggcccccaggatcacctccaagaacctcatcagtgtcatcttctgtgaggctgttgcaatttatggtgttatcgtggcaatcatcctccaaactaagcttgaaagtgtaccaactgctctagtgcatcatccagagtctctccgggctggctatgcaatctttgcgtctggtcttattgttggctttgctaatcttgtttgcggggtttgtgtgggaataattggaagcagctgtgcattgtctgatgctcagaattcatcactctttgtaaagatcttggtgattgagatcttcggcagcgccttgggtctgtttggagtgattgtgggcataatcatgtcatctcaagcaacatggcctgcaaaagcctagttctattcatatggcaatctgtaaattatttcggggagacctatcagaagaatatctggtccagttgtttttatttctttttttttgtttgtgcatttttggcaaatcacgtatattgatgcttgatgcatctgacggtagagatactgttcctactgtaaagactacataactgctgcgtatcttgtaggtgctattgcttttgcagagtgtggtctgcgtattgaataaaaccattgaactcaggaataaaatacttcaaacaacattttgctcaaaaaaaaaaaaaaaaaagaccc

SEQ ID NO: 84960 - DNA, 547 bp, Oryza sativa
  Clone ID: PAT_MRT4530_84145C.1
atgcgtgcatgggggctggggggaggcgcgcgcgtggagcttataaacgagcggcgcgtggggagagggcggccgcgtttggcggacgagaggtggcgcgaggcgtggacggtcgtgagggattcgtgcgcggtgggtcgcggagatcgggccatcggggtggagaacgtcgggaggaagctggtgaactcggccgagccgccgaaggtgacgctgagtaggctgatggagtaccgagtacggcgtaacgctggtggagcagcaggagaacgtgatactcgtaggacgcgcggcgggtgggtgggcgtcgttctcgcaatgcacggaaatgtcgtcgatatccgctttcttcggcaagtgaacgaccacgaagcctgcatcggaaccgtagccaaaatcgaagcaaacaatggctggcaggatttactggcgacatgggaagggagaggagagaaggagaatgtcacagagctcggcgtcttcctcggcccgctagccccaccgcctagtgcccgtctccgccgctgtgggcacgttgcaatggccg

SEQ ID NO: 84961 - DNA, 400 bp, Oryza sativa
  unsure (1)..(400): unsure at all n locations
  Clone ID: PAT_MRT4530_84146C.1
cccagactcctaaactagtccacttagcatcgggcatgcccanaaaantaagtatattacaactaccgctaccaccctctgttcggacgaacccgcgactactccaccttctgggatgctagctcggaggatgacgctaccatgatgcacctggcgcgcgtggtggaggcgtacgactcggctcgtatcgagttccatcanatgctgcccgntggcatggtcgagaacaacatgagaatcctggacgttcgtcggaggatttgcacctgacaagcgacctagacccacgggaggcccaccttcataatttttgaagcgccacggagaggtttgtcgcccaattcccgcctggttgccgatcccgaagatcccgcccacatactcctttaggcctcacttg

SEQ ID NO: 84962 - DNA, 231 bp, Oryza sativa
  Clone ID: PAT_MRT4530_84147C.1
atgtggggactagctcaggtgggcttcactcgcttaattggtttcccgcacgaaaatgtggtgaaatttcgcccaattcctgaaggaacaggagatgaaatatgccacgcgcggcaaggcgccatgatcgcccaaagcatgcgttcatcatctcgtctcaacgtgactgatgccatggctattcccccgagctccatgttgtctcaagagctagaaatcaactctgtttaa

SEQ ID NO: 84963 - DNA, 1448 bp, Oryza sativa
  Clone ID: PAT_MRT4530_84148C.1
gactcctatagggcgattgggttgctaagagccggccgggaagacccagccatccatcccacccacacgtcaccacccgcgcatcctccccccgtgctgcggcggcggcggcggccggcggccatggacatggacagcgtggagtgcctctccctcccggactcgtccatggacgtggacgacgtcgacggcggcggctcggtgcaccaccaccaccaccaccaccacgccctcccgcctcacctccccgcgggggtcgccgtcggggtcggccccggggggcgcgcgttccccaaggcgaatgtcgctggggttggtggtggcggcgccgccggggcccccgcggcggggggagcggtggccggaggtgggggccccggcggcgggcctcccgccaccagcgtgcacgagctgctcgagtgccccgtctgcaccaactccatgttcccgcccatccaccagtgccaaaatggacacactttatgttcaacatgcaaggctagagtccacaaccggtgccctacctgcagacaagagctcggtgatattaggtgcttggcactggagaaagtagcagagtcactcgagcttccttgcaagtattgttctttaggttgcccagaaatttttccatactacagcaagataaagcatgaagcacagtgcagctttaggccatataactgcccttatgctggttctgaatgtgctgtggctggtgatattcctttccttgttgcacatttgagggacgaccacaaagttgatatgcacagtggctgcacattcaaccacagatatgtcaaatctaatccacgcgaggttgagaatgcgacctggatgctaacagtgttccattgtttcgggcagtatttctgcctgcatttcgaggcgttccagcttggaatggcaccagtttatatggccttcctccgtttcatgggggatgagaatgaagcgaggaactacacctacagcctagaggttggtggtaatggcaggaagatggtgtgggaaggcacccctaggagcatccgcgacagccaccggaaggtgcgggacagccatgacggcctcatcatccagaggaacatggcactcttcttctccggcggtgacaggaaggagctgaagctgagggtgaccggccgtatctggaaagaacagacgaacccggatggggcctgcataccgaacctttgtagctgatgagcaaagcgtacgccagatgaaacgatttgttgctatttggctggcttgttatttttatccattgccatgtcctgttttcgatagtccagtgatcgtgccagtgctgttgtatgttaaaaagcaaattttagaggtgtaaaacattactgtaaagtaatattgtgtatatcgaattcaaaaaaatcccccaagttggccaataaacgtctgtcatccatctgttcttatgctgtttt

SEQ ID NO: 84964 - DNA, 1140 bp, Oryza sativa
  Clone ID: PAT_MRT4530_84149C.1
atggcttcgtccacggtgacattggagaagacgaccacaatccgtagcgaagccgttgtcgcggccgatgcggccgtggacagagcagcgacgttgaagtctcctctcctggaaggaaagaagtgcggcgacggtggcgttgcgaagcggtgctgcgagcgcaagtacgagctcgtcagctacgacgcgctcccggccttcctcaagcacaacgagttcatcatcgactactaccgcagcgagtggcccatcaagcaggcgctcctcagcgccttcgccgtccacaacgagaccgtcaacgtctggacgcatctgatcgggttcttcatgttcctcgcgctcaccgtgtgcgccgccacgatggttcccatggaatcttccgcgacgtccatgaccatggccaacaacaccggcaacccaatggtactgatgatgatgagctacggcagcaacggagcggccatggcagtgcaggctctgcgcaacgtgtccgtcgaatcggagctcgcggcggcggcgttgtcggcggcgggcgaccaggtcgcgcgttggccgttctacgcgtacctctgcggcgccatgttctgcctgctgatgagcagcgcgtgccacctgctggcctgccactcggagcacgccagctacgtgctgctccgcctcgactacgccggcatcacgggcctcatcgtcacctccttctacccgctcgtctactacaccttcctctgcgacccgttcttccgcacgctctacctcggcttcatcacgctcttcggcgccgccgcggtggccgtctcgctgatgccggtgttcgagaagcccgagctgcggtgggcgcgcgccggcctgttcgcgtgcatgggcatgtcaggactcgttccaatcgtgcacaagatgctcgtgttcggggcgcgcccggaggcggtgctcaccacgggctacgagatggtcatgggggcgttctacctcgccggcgtggtggtgtacgccaccagggtgccggagcggtggatgccggggaagttcgacctcgccggccacagccaccagctgttccacgtgctcgtcatcgccggcgcctacgcgcactacctggccggagtggtctacctcagctggagggacggggaagcttgctga

SEQ ID NO: 84965 - DNA, 156 bp, Oryza sativa
  Clone ID: PAT_MRT4530_8414C.1
atggccccaacgaatctaaaccgaaagagaacgtatgcacagtttgggcgccgtgcaagacctgttgcgcatgcaagacctgttgtgcatataaggttcaagtacttcgacgatgttgagtttgatgattgcaggggcttctgatatgcaatatga

SEQ ID NO: 84966 - DNA, 183 bp, Oryza sativa
  Clone ID: PAT_MRT4530_84150C.1
atggtggcggaggcggaagatggcggcagctgggccgccggcgaccgggtcgcgcggctgaggcggaagacggcggcgaccatgcggcggacatcggaagacggagttggcgacgagaagaggcagcgcaaggcgggccccacagtctcctcgagcggcgcgtgcaacccgatgacaaattag

SEQ ID NO: 84967 - DNA, 509 bp, Oryza sativa
  Clone ID: PAT_MRT4530_84151C.1
ttttattttttttttttttttaattttataattctttttttttttttgtttttgtatttttttctatttttctcttctttatcttttcctatttacaaaaatttttttttgcaccgccccaaaaaaacccttataaaaaacaaaaaacaaagggggggtgaaaaaaacagagggggcccaaacacaagggccgaaaaaaaaggcacaaatacccctcgccaaaaaaaaaaaagaaggaaaaccccccaaaatttaacgggcccctatattacattaggaaaaaaaaacaaaggtggcttatccggtcccccccccccccccacaagggcccgggagtaaaaggcgctttttattaacagggacaaaaaaaaaaggggggggggaaaaaacacctttccttataaaaaggcgcggagttgatttagcagcggagccaccaattggaaccgggggcacctacaacaaagttggggtacttggaaaccccataaaattggtctttcaggggg

SEQ ID NO: 84968 - DNA, 1155 bp, Oryza sativa
  Clone ID: PAT_MRT4530_84152C.1
atgcccgcgtcttccagactcaacccctcctccgccacgtgctccctcgccgccgcctccgcctccacctccgcctcgcctcgccgccgcggccgcggccgggggcccgcctccgcgatgggccaggccccgagctcgccgccggggccggggcgcagccgcagccgcggaatctcgagatggccgccgccgccgccgccgttgcaggggctccgcctcgacctagggttgctgcttggccgcaaggcgaggacaaggtccgggggcgggaagctggacctggcgaactggctgagttcggcggattggaaatttgctgcagagcagtttgtgaagaggctgccggggaaagtcttcgtgcatcgcagtcagtgcaaccattcaaagttaacatatgatggagtcgacttgatgggagaaaggttagctgaagaggttcgacaagttgttcagaggagaagtaacctgcagaagatctcttttgttgcccattcacttggtggtttagttacaagatatgcaattggaaaactgtatgatccatcaataaatgaagaggcttctcttgataaagaaaacttctcaaatgaactgagaacatctgatggtggtaaaatagctggtttggagccaataaattttattgcagttgctactccacacttgggatcaaggtggaataaacaacttcccttcctttttggtgttccacttttggagcgaactgctgcagtaactgcacattttatagttgggagaacagggaaacatttattccttacagactcagatgatgggaagcccccacttctcctacgaatggctgaagactgtgatgatggaaaattcatgtctgcgttgcgctcttttaagcgccgtgttgcctatgcgaatttgcagttaacaccaagtgataaaaagtatccacatattatccatgttgacaaaggaaattcagagcatcatcagcaagaggaatctgtagaagcttcacttacagatagcatggaagaagtgatgatccatggccttacacaagttccctgggaacgtgttgatgtatgctttcataagagctggctaagatacaatgcccaccacaatatccagattctttttgtgaaacataatctaagactgataactgaccagtaa

SEQ ID NO: 84969 - DNA, 1515 bp, Oryza sativa
  Clone ID: PAT_MRT4530_84153C.1
atggggttgctggtcctcaagcggctcatgtccgtgcaacaggagcggcggcatatccaagcccgtatggctaaaagaaagggctcagtctgtctacaacttgcaaattctgaaggcggcaaaataatgggatattcagggttgaaccttccagaggacatctggagtcatatacactccctaatgccattacgggatgctgctcgtgctgcgtgcgtgtctcgtgcttttcgtagtttctggcgatatcatcctaatcttatatttcgtatagaaacaccggacttgaatttcatcaagaaagttgattgcattctgaaaaaccactcaggcattggcatcaaatcattaaggtttgaatctggtatattttacaatgccagcaccagttattatctcgacagttggcttcagattgctgttacaccattgattgaagaactcactcttgggatattatcgtacaacacaaattactttgattcaaaatatgatgatgagtacaacttcccgtgctcacttttatctgatgggagaggaagctcaatgcggcatctttatcttagcaggtgttctttccatcccacaatcaaccttgaattaagaaacttgacgaggctgcatctggcctttgtacatattacaggcaatgagttagggtgcgttctctctaattcttatgctttggagcggttggaacttaactattgctatggaataatttgtgtgaagataccttgcctgttgcaacgccttagccacctggaagtgtttgaatgtagaatgctgcaagtcatagagaatagtgctccaaatcttggtagttttcactttggaattaatcatgtgcaactcttgcttggcgaatcgttgcaaatgaagagcctatccatgtgctatcctggtgctgtctattatgcttgtgcagagcttccatccaatgtgccaaatcttgaaactctaaccattggctctcctcatgagatggtcgacacaccaatgttgcctagcaaattcctccacctcaagtgcttgactatttctcttgttggaatggtcactttttccccagcctatgattatttttctctggtttcttttcttgatgcttctccttccttggagactttctttctggatgtatcacaagaacgcatggggcatgtctcaatttttggagattccttgcaattgaggcagatgcctgaacaccatcgtcatggcaacctccagagcgtgaagatcactggtttctgctctgcaaagagcttgatcgagctaacatgttatattcttgacaatacaacctcactcaagtgcctaacactagatacaacccgtggtgtttctagctgttctacaggcgaacacaagaaatgttttcctataggcaagatgctcactgaagccaacagagcggtattggcaattgaaacattcatcgagcgaaaagttccctcgacagttaaattagctgttacgaagccttgcagccgttgtcatgttaaatcttag

SEQ ID NO: 84970 - DNA, 534 bp, Oryza sativa
  unsure (1)..(534): unsure at all n locations
  Clone ID: PAT_MRT4530_84154C.1
cacaatataggggcttggcatgctcacgctatcaccggttcttgtacctcatcaacaagcagaatctggagataatgcagataataatgcatcctccagtatggacattcatgtagctttcttctacttgtccctgtatatcgtggcctttgctcaaggtggccacaaaccttgtgtccaagcatttggggccgaccaatttgatgagaatgaccctgaagaatgtgcctcaaggagctcatttttcaattggtggtactttgggatatatggcggcaatgtcattacagtttcaatcttgaattacattcaagataacataggctggcagcttgggtttggaatcccttgcattgccatgtctctttctcntgcagtantcttgcttgggaccaagagttaccgcntctatcctctaagaagtaacacaagcctattcgaccagttgggnaatcgcttctagcaaagatacgatggtggngcgcatcatggtgtcaaatcaacaggggatcttcactgcacncaagcattcat

SEQ ID NO: 84971 - DNA, 1717 bp, Oryza sativa
  Clone ID: PAT_MRT4530_84155C.1
ttggggggggggggggggggagcatctttattcagagaactgcatatacaaccagaggcagtcaagtttataaaatttatatgtacaaaaaatattacaccgacatttacactattaacaatctaacaattatccttacacagttacactacaagacaacgggggggggggacccaggctccgataaatgataaccttacatcacgtgtgatctaatgaaccaggcatgttggtccacgggtgtcatcacctaactagagtggtacaatggagttaacccaccgtataaaaggctgttatttatcaataattcatcgaaatttagctacactagaaaattgtctatcaaatggtagattacgtcttcgccgtctgaattaacaggatggatcctaacctggatattgtggtgggcattgtatcttagccagctcttatgaaagcatacatcaacacgttcccagggaacttgtgtaaggccatggatcatcacttcttccatgctatctgtaagtgaagcttctacagattcctcttgctgatgatgctctgaatttcctttgtcaacatggataatatgtggatactttttatcacttggtgttaactgcaatttaggtaattcgtgctgacgccgaattgatgatgttctccagccaactatatgatcatatgttacattcgcataggcaacacggcgcttaaaagagcgcaacgcagacatgaattttccatcatcacagtcttcagccattcgtaggagaagtgggggcttcccatcatctgagtctgtaaggaataaatgtttccctgttctcccaactataaaatgtgcagttactgcagcagttcgctccaaaagtggaacaccaaaaaggaagggaagttgtttattccaccttgatcccaagtgtggagtagcaactgcaataaaatttattggctccaaaccagctattttaccaccatcagatgttctcagttcatttgagaagttttctttatcaagagaagcctcttcatttattgatggatcatacagttttccaattgcatatcttgtaactaaaccaccaagtgaatgggcaacaaaagagatcttctgcaggttacttctcctctgaacaacttgtcgaacctcttcagctaacctttctcccatcaagtcgactccatcatatgttaactttgaatggttgcactgactgcgatgcacgaagactttccccggcagcctcttcacaaactgctctgcagcaaatttccaatccgccgaactcccgtacagcccgttgaccatgacgacgaggtgatcggcctcctcattcccggcctcctcctcctcgcggttccccgcgtccctcccctcggcgctcgcctccgcctccgaaggctgcggcaggggaggcgccacgaagcacctcagccagttcgccaggtccagcttcccgcccccggacctcgtcctcgccttgcggccaagcagcaaccctaggtcgaggcggagcccctgcagcggcggcggcggcggcggccatctcgagattccgcggctgcggctgcgccccggccccggcggcgagctcggggcctggcccatcgcggaggcgggccgccggccgcggccgcggcggcgaggcgaggcggaggtggaggcggaggcggcggcgagggagcacgtggcggaggaggggttgagtctggaagacgcgggcat

SEQ ID NO: 84972 - DNA, 514 bp, Oryza sativa
  Clone ID: PAT_MRT4530_84156C.1
catttgctgcaatggctacacatatttatatattctctttccaagcaacccattcacacatccattcacaaatcaaacacagtgattacatccacattcacatatccattcaaatatatgccattcacggcaattcacaaatcaatcataggctattggattacgtatatgtatatacatatatacatatacatatatataaatgtatatatgtatatatatgatatatatatatatatatgtatatatatatatatgtatatatatacatacatatatatacatatatatatatatacatgtatatatatatgtatatatttatacatgtatatatatgtacatatatatatatatacatgtacatacatatacatatatatatatatatatacatatacatatatatatatgtatatacatatacatatatatatatgtatatacatatacatatatatatgtatatacatatacatatatatatacatatacatatacatatatatatata

SEQ ID NO: 84973 - DNA, 312 bp, Oryza sativa
  Clone ID: PAT_MRT4530_84157C.1
atggtggtagatccggccaccctcgagagtggtggagacgatgcgggtgaggagggctgtcggtggctgcagcagcgagaggaagagctgtcatgggcaaagaggaccgtcggcgactgcagctgcattagtggagaggaggaggcgtcgtgggccaatagaaccgattgcggctgtggtagaggagaggaggaggctcaacggtggagggagtggcatctgccacccgcactggagaggcagctctggcaagcctccggcgagcagccgtcgcactgcggggcgcacgccctggggatagtgtctgcgtag

SEQ ID NO: 84974 - DNA, 552 bp, Oryza sativa
  Clone ID: PAT_MRT4530_84158C.1
ctgcaggaattcggcacgaggggagagtatcacatcaatcaaaggtaacacacaaatccaaacattaaaatgttatcgatgccatgactgatctgcatcaatccgctcggcatggagcagaactgcagaagcttcagaatggcatgatcaattgccagctatttatcctagatttgttgactacttagagcaagcaggggtggcttatcttgcccacgcccaactcgacagtttaatcttctccttatcttaatgaaattaggtcagccaacttttgaccgacctgacaaaaaataaaaaagaatatatgacatactagacttgcagatatcaaattcaattcaattcctattttgtgcagtaaaccaaatcgaattcaaattagctttgttttgaactgaaaatgcagcgattcgacctgctgaaaaaaaaaaaaaaaaaaaactcgagtctccagacctcttcgtgatcttgttgaatgcaaggttaatatgaaaaatatccatcgatcaagcaaggctgggatttcgcagagagtttccgttgtggaga

SEQ ID NO: 84975 - DNA, 2548 bp, Oryza sativa
  Clone ID: PAT_MRT4530_84159C.1
atggggtacactacaccaccatcaccattgacagatgaggtcataaggagagtaagaaagttaaacgttgttggtcgaatacctgcagagctacagaatctcacctttctacaagacctgggcttgggtttcaatccactgtctggacaacttccgaaggaacttgggaacctcaccaatctcctctcactgggcattagcctggacaactttactggtgaacttcctgaagaactgggcaacttgaccaaacttgagcagttgtacattgatagttctggattcagcggcccgtttccttcgacgatctccaagcttaagaacctgaagaaagcgtcagataatgaattcacagggaaattaccggattacttggggagcttgactgaattggaagatctagtattaaggaactgcaggatatcggaaaaccttgaaacagtagatttttcgaagtttgcagcgttaaccatgctgtttcttgggaacaatagcctcataggaactttgcctgatgttataagctcttctttaaaagtgatgaatttggtggcaaacaacattgttcttggtagcaccaaaaacagtgatatatctactaggggctcagataataccatatatgaagcagatgctacaaaccttggggatgcatcatattatgttactgatcaaataagatggggtgtcagcaatgttggatacttttaccaagccacggatagaatggacataatatatagctctgagcattttcagactgcagtcgactcaaaattgttcgagactgcaaggatgtcaccatcttcactgagatattatgggcttggacttgagaatggaaattacactgttatgcttcaattcgcagagtttgcttttccagacacgcaaacttggctaagcttaggaaggagaatttttgacatatatgtccagggtgctctgaaagaaaagaatttcgatataaggaagacagctggtggaaaatcttttaccgcaattaacaggacttacacggcaaccgtgttaaaaaacttcctcgagatccatctcttctgggctggcaagggcacttctggcatacctacccaaggttactacggaccgatgatctcagcattaagcgtcactccaagtaagcaaacctgttatattaacttcaatgtaggctacattggctctattttaggattagcaggcttatttggaatatttatgtggataaagaagcgaagaacaatggcaaagcagaaagaagaactgtacaacctggtcggacgacctgatgtcttcagtaactctgaactcaagctagccacagacaattttaattctcaaaacattatcggggaaggcggatacgggccagtgtataaggttgtctatttccctcaattgtctgatttgggtaagctacccgatggaagagttatagctgtgaaacaactttctgaatcatctcatcaaggcaaaagccaatttgttacggaggttgcaacaatttctgctgtgcaacaccggaatcttgtgaaactgcatggatgttgcattgacagcaacacaccattgttggtttatgagtaccttgaaaatggaagcctggatcaagcaatctttggacatagtagcttaaatctagactgggcaatgcgcttcgagatcattttaggcattgcaagaggcctaagttatcttcatgaggagtcgagtgtatgcatcgtgcatagggacatcaaagccagcaacatactacttgacactgatctgatcccaaagatctctgactttggactcgccaagctctatgatgagaagcaaactcatgtgagcacgggaattgcaggcacatttggctatctggctcctgagtatgcaatgagaggtcatttgacacaaaaggctgatgtttttgcatttggggtggttatgttggagacagttgctggtcgatcaaacactaataactctctcgaagaaagcaagatcaatctccttgaatgggcctgggaccagtatgaaaaggagcaagctctcagaatccttgacccaaatctcaagggattcaacaaggatgaagcttttagagtcatccgtgttgcgctgcactgcacgcagggctcaccacatcagcgaccaccaatgtcgaaggtcgtggcaatgctcaccggagaagttgaggtacctaaggtggtcacaaagccaagctacatcactgagtggcaaatgatggacggtaatagaagctatgtcaccagcagctactcagggtctaccacccatgagttcggcaggcagaacgagatcgaacctctgcagcaatcaccacctataatcaaatcgggaaggaaattatcgatgatggaagatgaatgcgaagttgcaaagtgatggtagtgatcttcgtttcaagagctaattttggacattattcgtgttcaaataaattgcatttttatgtgagttagagctaataaaattgaatgtgacatgtgctactattgtgccgttgactgtttgattataactaattcatgagctcaggatg

SEQ ID NO: 84976 - DNA, 186 bp, Oryza sativa
  Clone ID: PAT_MRT4530_8415C.1
atggaggccgcggcttgcgcctccgcgtctccgccaagggaaaggaactggtcggcgaggtcgcgcgtggacccggttcacggtgagatccgtggtgcagcgccctgggccccaggtggtggggattatcacttagttctcgccaacacttacgttgtctcagatgaggcggaccaggagggctag

SEQ ID NO: 84977 - DNA, 1613 bp, Oryza sativa
  Clone ID: PAT_MRT4530_84160C.1
ttttttttttttttttttttacaccaatatagggggcacacattcaataaccaagaggtcgtgaatccattacagctttttaaaaagttcaacctggcactcaaataaaaagcttaactttacatagtcagccaaagacattttgacatttagaaactaacgctacgaattctgtagaggttacaccaaagtactgcggcagtagccactacgtagaattaaaattacaggctaccacaaataatctggttttctctgacaaacttcataatccagagcatagaaaagatacataagctagctgtccatttttttgtcaagaacaccatattgtaaagttaggcctatctggcaccactgcaatcctagatcagttaatgaggatatgctatgtttccttaatgaagtggtgagcaagcaactctgataatccagaactaggaatgctctcgcagccgaacagctcctgaagttttgagtcacataatattgatccagtaatagcatcctcaagttggtttgcttttatgtaatcccaaaggtacctcaaagcatcatcttgaggcactgtgccttccattccaataaacttggctagtgcatcagaaatcaccacagagggttgattaatcagaggcataggctgagtagctacattggagggcttaaatttctttgcttcccgaatttgatcctttgggtcaagtggagttatatgtttcgccaacaatttattcatcttaaacatgtcagttgtgtcagttccaaaaaccacacgaagttcatcattgcagattatcttccttttgtcatcaggatcttgaagattattctgccgaatatattgccaaagctgcttgacaatctgagttcttgacatgacagtctcaccaacaatagtctgaagttcaggtgagattgcacaaactttatttaaaccaccaggcccacctcgtttccgctttgaagcactttccttgttgtcgcccgcggcctgtactgcggcggtgggggaagcagtgccgccggttccaggggctggctgctggaaggagacggtcccaccagtggcgaccccagccaagccgctggtgacgcggaaggccagaggaggcggcgggtagaacgccatggccggcacgggaggctgcggggagaccgccccagcggcgccgcctggtacaccagcggggagctgcggcatggcctggaatatgagctggggctggagcaccgcgagctgctgctgcatctgctgcaactgcgcctgcacctgcacctgcggcatggcaggcgcgggagcggcgaccagaggaggaggattaggagccgccgccgccgccgcctgggccttggcgacgagcggcggctggaggcgcgggccgaagaagaggtccatctggtcgcggatgaaggtcgccttgtgtgcgaggtcgacgccgagcttggcctccgcctgcgacagcacggcggcgagcgaggcctccccggcggcgccccccgacgagcggaggacggactcgacgcagctggcgatctcctggtcggacaccatggcgcgcgggagggtgccaaaactcaaatctcgcccaaaaaaccctcccccctcgtgc

SEQ ID NO: 84978 - DNA, 424 bp, Oryza sativa
  Clone ID: PAT_MRT4530_84161C.1
ccggccgggacctgagctcctctcttgcttactgccacatgcgcttcctgagcccacgagccgagatgcccactcgccagtgatctcctgccatatttgaggaagatgttgccgacggtggagcagcttgaggcggcggctgacgaggtcacgagaaactatgtggagggaaatatgtttgctaccgcgcaagaacgagtcacgagcagcaggaaagcagcggattgggagcgctctatttgtttagatgaatgaatgaattcagaaattgcatctattacacatagtcgagaaactatgtgtaacactaggtcagcatgcatctatttgtttagatgaatgaatgaattcagaaattacaactcatcttccgtgcagaaagctcatttcggtcattacgaaaaaaaaaaaaaaaaaagcggcc

SEQ ID NO: 84979 - DNA, 1479 bp, Oryza sativa
  Clone ID: PAT_MRT4530_84162C.1
atgtacgcctacgtggggctcgtgggcggcgcagctgcgctcgtgctgctgctgctgctgcggcaccaggcgcgcaggtggaggaaccctcgctgcggcggccaactcccgccgggctccatgggcctcccgctcgttggcgagacgttccagttcttctcctccgacgcctccttggacatccctcccttcatccggcacaggctggctagtttgggctgcaagttcagatatgggccgatattcaagaccagcctggtggggcacccggtggtggtgtcggccgacgaggagctgaaccacatggtgttccagcaggaggggcagctgttccagagctggtacccggactcgttcgtggagatcctggggaaggacaacgtcggggagcagcagggcgccatgttcaggtacctcaagaacatggtgctcaggtacttcggccccgagagcctcaaggaaggcatcatccgcgacgtcgagcgcgccgtctccagctccctctgcacctggtccaccttgccggccgtcgagctcaaagaagccgtctccactatggtgttcgatcttgctgcaagcaagctgctcggcctggagccgtcgaggtcaaagattttgcggaagagcttcttcgacttcgttcgagggctcatctccttcccgctgtatctgccagggacagcttactactcatgcatgcaggggcggaggcgcgcgatggtggtgctagagcaagttctggaggagaggaagcaatcgacaggattgcagcgaggaggagaagcgcagcagcacggcgacttcctggattatgtgatccaggagatcacgaaggaaaagccggtcatgacagagaagatggcgctcgacctgatgttcgtgctcctcttcgccagcttccacacgacgtcgctggcgctcaccctggccgtcaagctgctcgccgaccaccctctcgtcctggaggagctcacggtggagcatgaaacgattctgaaggaccgtgaggcaggcagcgagctagatagaatcacatggaaggagtacaaatccatggcattcacatctcaggtcataaacgagacggtccgtttggccaacatcgctcctgtcatcttcagaaaggcacttaaagacatacggttcaatggatacacaattccagcaggatggggagtgatggtctgtccaccagcagtgcacttaaatccatatatttatccggatcctctcaccttcatcccttcaaggtttaaggataaaccagagataaaccgtggatcaaaacacttcatggcattcggcggaggactacggttctgcgttggagcagacttcagcaagctacaattggctattttcctccatttccttgtgacaaaatacaggtggataccgctgggagcaagcagggtagtccgaactccaggactagaatttcctgatggctatcggatcaaagttatccagagacattaa

SEQ ID NO: 84980 - DNA, 416 bp, Oryza sativa
  Clone ID: PAT_MRT4530_84163C.1
aattcggcacgagtagcagvgctatrgvcagctgcaaacatattttaagcagataaataaggagtccgtgctgcagctggctacagatctgtagcccactgctcttctctcttatcttttatctcattaaaatatgtttgcagctggttaatagtctttctattgtacctsctattacttcttattaaggttccaactaattaaattgtagtactcctactgtagkggggtaccatattactatatcttaacataccgtgcctaggagataagtgaacaataatgatcgatccccatgtgctcaaaatcaaaatcatgacctaacttcgcgkgaggttttgataaactaattaatattaaccagacctaagcagtgtccactgtatatgtatatgtagatgctggtagattttctc

SEQ ID NO: 84981 - DNA, 132 bp, Oryza sativa
  Clone ID: PAT_MRT4530_84164C.1
atgcgggcgatatcgacgtgcagacacgatcggctcaaatacaattccacccgcggacaagaccacccggcacagcgcgccacgacggaacaggcgctacaacccctcgtcggcaagtggttcaccctttaa

SEQ ID NO: 84982 - DNA, 1056 bp, Oryza sativa
  Clone ID: PAT_MRT4530_84165C.1
atggcgacgatgaacagcaccaacctgacattgcacctttgcagtcctgcagcaggtgcgaatgtttcaggtggtggtggctctagttctgttttcactagagcccttcatgctgctcaagcaagaaagatgcatcagcggaagcagctacctggttctgcagtatcaaattccaaaaaaacaagtggcatcaagggtaaaaaggctatccatgtggatcgtacctacgatgccaggtctgacatcgagcccccaagctttaatctaggaataacacaagatatcgaagaagcaaacatggtggcatgtaccccaggtcatgacatctccaatgtggctgaagactctgacaaagaacaagaactcaactttttagcacgtaccccagatcagccaatctcaaagcatgaccagaaggcacttgatgatttatacacatatgcggtttcactcactgatgcagaggctcttaagaaaatctgggttcacatctcccaacctgtccctatgtcattaagcctacatgacatacaacaggctattcggctagacactcaaatgcaagaagaaacattcaatgttgcagttcaagtattagcagcggatgagatacagagatttggaggaactgattttgtatgctggagacatttcttaaatcaagattttgcaatgtttgcaacagctggtgatgaccagtggaacccagaggatcatctcccctcattcaaagatgactctctgataccatatgacgtacctagttgccacctgatatttattccactacttcaaccattgcactattctctatacgcatttgatatggagaaaaaaaaattatgcattcttgacccactgagagacgcctcgaaaagatcagaggatacagcagaaagacacttaaaaacaaaatttcacatttcatctgctctgaaggagtgcatgaagcttgcattttcagattgggatgaggatataccaaactgggtttctgagttcccttcggccatcccagctataacaacagggtttcagttcatgctcccaatttga

SEQ ID NO: 84983 - DNA, 1215 bp, Oryza sativa
  Clone ID: PAT_MRT4530_84166C.1
aatccactccaacctaatgtttgcatttctttggttggcttgctcaacaacataggaaaaattcctgtgtttttcaatccataggtttgcacatgtattcctatagtattcctacgttttttctattcctacgttttgaaaatcctgtgaaccgaatgagccgaaatttaaaaattagattcgaccaaagtatatggtgatttcgtggtccattccacggaactaaattaagcaccacaatagcattccacaaagctagcatctatgcatttccacaacaaaaactgtgcgtatttgacgccttgacgggaaacatttcaatggtcttcagtgctggaaatatttttgtcaatgatctttgctgaacatgtcttccaaagttttcagccagttcatgtattgccaccgctccttctcaaccaaatggtggctgaacatgtcttccaaagttttcagccagttcatatattgccaccgctccttctcaaccaaatggtggtgaagtgagcttgccagtttggagttaacgcctcttgccaccagatatccttttagtgcaacttgtaactgcggatccaaatctttggccgcgtgttccatggtatactcgccgatctcagctgcctcgccaccgcagcgcagccacagggcctccatgtagctcgtgtgtgcgaaataggcctccgcctccactacctctcctgatcctccctcaactaccacggtcactttgcgccgctcatacacacccaggtgggtgccctcgagggcatcgaggtcaactagggcgcggggggacacggcgtagagctcgccggagacgagatggctaccggaggatgaacttggcctggggaggaggaacggaacagagtagggccccacaacaagcgaggccggggtggcggtggaggcagcaccaaccaagggggaaccggagcggcgaggagccgcgggcatttcataaggggaaaaccacaggccagaccacataaccactaacttaagttcaaagtcctcgaaggttgcagctcatgtgccgaagggcttgatttttgccgatttaatatcacattaaatttttgccttcaactgcaccaacttaggctgcgttcattagcctgtcacctgtgttaccagcccgcacagtgcgcatagaaaacggtgtaggctattagcacgtgattaattaagtattggctttttttttaaaaa

SEQ ID NO: 84984 - DNA, 1560 bp, Oryza sativa
  Clone ID: PAT_MRT4530_84167C.1
atggcgacgatgaacagcaccaacccgacattgcacctttgcagtcctgcagcaggtgcgaatgtttcaggtggtggtggctctagttctgttttcactagagcccttcatgctgctcaagcaagaaagatgcatcagcggaagcagctacctggttctgcagtatcaaattccaaaaaaacaagtggcatcaagggtaaaaaggtagtacaagaaaaaatttacaccaggtgcactcctgctattctctcagatctgttctcaagttttggtgatcagcaaaaagagctagtgaaacagatggggtttgatgggttgctttccatgaggctgactaaactgaacaagcaattcggagcatggattctgtgcaagctagacccatcatcaggtaatctgtttacgggatctagacatgaaatttgtttgacatgtgaggatgtcagcctacttttgggaatcccttgtggacggaaggagattttgcctgcaataaaaaacgaggtaaaagatgttaaggcttatatgtatgaaatcttcgagaaagattcctttgatggacttaccattgtaacaattcagaggatattggagaaaaaatttaacaggacgatgactgttcacgaacaaattgtattcaagactgcttttataatcttcgttgtaaccaaattcttggctcctcaatctgttaacaatcacatatctataaggtatatgaaggctttggttgatgtagaaaatattcacaagtacaactgggcggaatttgttttgcatgacatcaaagatgcagcagcagcattgcaacacaaaatacgccatcggaaaagcattggttacatcaatggctgcattatactacctcagcttttttatttggacaatctggatttcgggacggacactcccgagcaggaaaacattccacggattggcatgtacaatgactccatgatagcggaattcattgagaaggatgtaattctcaagaaccggaatcctttccccgcgtatggaaagatgaagaaacttcagactattgacatttttattgggtttcagctgcgaaacaaacatgatgaaaaatacaatattggccatcatacgggtgcaatagaggctatccatgtggatcatacctacgatgccaggtctgacatcgagcccccaagctttaatctaggaataacacaagatatcgaagaagtaaacatggtggcatgtaccccaggtcatgacatatccaatgtggctgaagactctgacaaagaacaagaactcaactttttagcacgtaccccagatcagccaatctcaaagtcagtagatgcctctgacaaatccggagaagctggtgatgaccagtggaacccagaggaccatctcccctcattcaaagatgactccctgataccatatgtcgtacctagttgccacctggagtgcatgaagcttgcatttccagattggggcgaggatataccaaactgggtttctaagttcccttcggtcatcccagctttaaacaacaagttccagttcatgctcccaatttga

SEQ ID NO: 84985 - DNA, 2277 bp, Oryza sativa
  Clone ID: PAT_MRT4530_84168C.1
atggcgacgatgaacagcaccaacccgacattgcacctttgcagtcctgcagcaggtgcgaatgtttcaggtggtggtggctctagttctgttttcactagagcccttcatgctgctcaagcaagaaagatgcatcagcggaagcagctacctggttctgcagtatcaaattccaaaaaaataagtggcatcaagggtaaaaaggtagtacaagaaaaaatttacaccaggtgcactcctactattctctcagatctattctcaggttttggtgatcagcaaaaagagctagtgaaacagatggagtttgatgggttgctttccatgaggctgactaaactgaacaagcaattcggagcatggattctgtgcaagctagacccatcatcaggtaatctgtttgcgggatctagacatgaaatttgtttgacatgtgaggatgtcagcctacttttgggaatcccttgtggacggaaggagattttgcctgcaataaaaaatgaggtaaaagatgttaaggcttatatgtgtgaaatctttgagaaagattcctttgatggacttaccattgtaacaattcagaggatattggagaaaaaatttaacaggacgatgactgttcacgaacagattgtattcaagactgcttttataatcttcgttgtaaccaaattcttggctcctcaatctgttaacaatcacatatctataaggtatatgaaggctttggttgatgtagaaaatattcacaagtacaactgggcggaatttgttttgcatgacatcaaagatgcagcagcagcattgcaacacaaaatacgccatcgaaaaagcattggttacatcaatggctgcattatactacctcagcttttttatctggacaatctggatttcgggacggacactcccgagcaggaaaacattccaaggattggcgtgtacaatgactccatgatagcagaattcattgagagggatgtaattctcaagaaccggaatcctttccccgcgtatggaaagatgaagctgcgaaacaaacatgatgaaaaatacaatcttggccatcatacgggtgcaatagaggctatccatgtggatcgtacctacgatgccaggtctgacatcgagcccccaagctttaatctaggaataacacaagatatcgaagaagcaaacatggtggcatgtaccccaggtcatgacatctccaatgtggctgaagactctgacaaagaacaagaactcaactttttagcacgtaccccagatcagccaatctcaaagtcagtagatgcctctgacaaatccggagaaggttaccaacaaactaaacttagtagtttctctccgtactctatgttgaaagagacgagtggggcgaggattttcatgcgtgaggagtacgcatgtacaaagctcccacctaaatccaagaggagaattatcggcggtccttctgatatcctattcgatcggccaaagaggtcgattaaaccaagccattcggtgaaatcaccatttctgagcaagcaacactctttcgtcaggcatgaccagaaggcacttgatgatttatacacatatgcaatttcaatcactgatgcagaagctcttaaaagctctaatgtaagccacctacctgaaatgttcctttctttcaccactaattgtaaagatatcacatttaacaggaaaatctgggttcacatctcccaacctgtccctatgtcattaagcctacatgacatacaacaggctattcggctagacactcaaatgcaagaagaaacattcaatgttgcagttcaagtattagcagcggatgagatacagagatttggaggaactgattttgtaggctggagacatttcttaaatcaagattttgcaatgtttgcaacagctggtgatgaccagtggaacccagaggatcatctcccctcattcaaagatgactccctgataccatatgacgtacctagttgccacctgatatttattccactacttcaaccactgcactattctctatacgcatttgatatggagaaaaaaaaattatgcattcttgacccactgagagacgcctcgaaaagatcagaggatacagcagaaagacacttaaaaacaaaatttcacatttcatctgctctgaaggagtgcatgaagcttgcatttccagattgggacgaggatataccaaactgggtttctgagttcccttcggccatcccagctataaacaataggttccagttcatgctcccaatttga

SEQ ID NO: 84986 - DNA, 517 bp, Oryza sativa
  Clone ID: PAT_MRT4530_84169C.1
cccacgcgtccgcccacgcgttcggagaagcagcagcgatggcgatgcggcagggagcgctgcgaggcccctccgattactcccaggagcccacccgccacccctccctgcgcatcaacgccaaggagccgttcaatgcggaggcgacgaggcgggacctcgtggcgtcctacatcacccccgtggatctcttcctcaagaggaaccatggccccatccccatcctccacgacatcgacagctactatgtgacggttgccggtctgatagagaggccagcgaagctttatctgaatgacatcaagaagctgcccaagtacaatgtcactgccactctgcagtgtgcagggaacaggaggaccgaaatgagcaagagcaggaaggtgagaggcgtcggatgggatgtctgcgctctcgggaatgcgacatggggaggagctaagttatctgatgtccttcagctcattggtgtgccatatcatactgaaattactccatcaggaggaaagcatgttga

SEQ ID NO: 84987 - DNA, 340 bp, Oryza sativa
  Clone ID: PAT_MRT4530_8416C.1
ccgaacctccccgacccctacgggaggggcttttaaaccaacttccctttcccccccctctccccgacggtttccgccgagacctccggcgtcatgaactcctacgacgccgacgccaccgccaccgtcgtagccgccgccgcggcgcaccgcgccgtacgtaccagagcatccagcccgatcccgccgtgcccttccccgtggtcacctccaagctcatgaggtaccccttccctcaaggggatggaggaggccaacatagttctgtccaccgagaacatgctcatcattgagctcgaggcctaggcggagaaacactccctcaatgggtatccaggag

SEQ ID NO: 84988 - DNA, 219 bp, Oryza sativa
  Clone ID: PAT_MRT4530_84170C.1
atggcgggatgtatactacgcccgcggcccgccctgccctgcacgcgcgcccgcgtcgcgtcgatcgatcgacacgggcatcatgcgtgcgaggtggtgagagagcggcgccgcatggcacaatcatcgccggccccgctcgcgcgcgcgggcggcgagacagatgtcccgtcgggaaagcgccccgccggcgccggcctcgcgcggtctatgcctcaa

SEQ ID NO: 84989 - DNA, 387 bp, Oryza sativa
  Clone ID: PAT_MRT4530_84171C.1
aaggacgcccgcaggacctggccggaatttccggcctgcccacgcacccttgcttttcgtcgccatattcccgtggctggggggtgtcacttactgagtggcccgagctcgacggtcgactgatcatcgcgtggcctacgtgcgatctccgtttccaccccgcgcaacaaaactcggctccgacgtccgtgcccgacctaagagattgctgagcagtcgctcccgcgcgtcgacggtcttccccacagttgccgtggccaccaccgacgatccctatcacatgccaatccgctctctggaaggccttcgatgggcctcaccgtgcccttttactgtttctctagacgccgtcgacgacgaggggaacaaggtcgactggtatatact

SEQ ID NO: 84990 - DNA, 1630 bp, Oryza sativa
  Clone ID: PAT_MRT4530_84172C.1
cagtaccaaacgagcatatgaaaaatcttcagatcactatttctctacatggttacacaaatctgaaaccattccatgtatgttgaccaattgttgcatccaaataaaacaaagaggcaaactgttttgcactcttaaatgaggttgatctagcctgtgcccattatttcatacacacatatttcttactcaaaaagaataggataacaaggtggcacgggattttattccagcatccaagcaagtcagccagcattatattattggtccctcttgactctttttctccaatgcagatccgaaagcggaacgacagtgcaacatagagcggtaaatttaaagagataatactagttaggtgtatgtgtaggatcatcacaaaaggcttctaaggttgtgtattgtcagaaggcgaacacggtgccagcaggtgttcaggatccctctaaggttccatatggtctccacgctctcaggttgcacatttgcactggaatcaaccgcttttacgataacctccgtgtcacctttcacatcgataacagtcttgaagagaacccaagcccacttgtcactacttatgtcacctgcgacgtatggtacaccttccttttggtaccggacagcaccgaaccaagtcttgccaccgtcagtggatatatccaccctctcaatacctcggccgcctcctgacaacgcatatccagtgacagtcacttctcctggaatgatggcatttgtgtcttccaaagagcatatggcagactgaactgggtagtccatttggggcttcctggttgaccacacaatattgtcccaatcaacagatggagggaacattttgtaatccttttgcataaagaaaccctgacactcttcctcaattatgtcaattctgtccaaccatttgactgaacgagcaccaatcacacctggaactacgacacggagagggtatccatgatcacgcttgagcacctcaccattcatttcatatgcaaccagtacatctgctgcaggatttgttgcatggcctaaagaaatcgatgctttgtaagggccacctttttcctcagggcactgatctacactagtgaactcaacatgctttcctcctgatggagtaatttcagtatgatatggcacaccaatgagctgaaggacatcagataacttagctcctccccatgtcgcattcccgagagcgcagacatcccatccgacgcctctcaccttcctgctcttgctcatttcggtcctcctgttccctgcacaacaccaccagtccaccaggacaccaaaatccacctgcagagtggcagtgacattgtacttgggcagcttcttgatgtcattcagataaagcttcgctggcctctctatcagaccggcaaccgtcacatagtagctgtcgatgtcgtggaggatggggatggggccatggttcctcttgaggaagagatccacgggggtgatgtaggacgccacgaggtcccgcctcgtcgcctccgcattgaacggctccttggcgttgatgcgcagggaggggtggcgggtgggctcctgggagtaatcggaggggcctcgcagcgctccctgccgcatcgccatcgctgctgcttctctcttg

SEQ ID NO: 84991 - DNA, 1344 bp, Oryza sativa
  Clone ID: PAT_MRT4530_84173C.1
agccgggccggcctaagataggcagaccaaatttacttaagaaaggggtatgtacatattaacaaggttccaacttcaacaagaggctgtcgaagtaaaaggatgttgtcacaagggcaacttcccgaaagaaaaaacaattacatcatgctgttgttactctcctaaaactttgaaaaccccggcttctttccagaccacaacctcctctttaatcaaagcaaagaggctacccgctgtccggctctgactctggaaaacacgtgcgtttctctccttccaaaccatccaacagacaagcaaaactagcgtgtcaaaagcgcccctgcagctagtctgaactccttgccacgccaagagccaccattcccctagttccaaccctgcttcagccggcagttggatgccaattccagcccaacccttgatcatcctccatactctggtggtgtatgggcaggaaacaaagagatgctcacagtcctcgtcgctgctggtgcatagtgagaatgtttgatggtgtggccatccgcgcttgctcaggttgtcggccgttaggcaacggcctttttctgccaaccacataaagaacttaacctttgtcggtgttctcgtgtgccaaactagattgccacaacgcgcctctgtgtttgccataaaaaacatgtcataggcagaggaaggggtaaatcttccattcgaggcccacttccatattgtctcatcctcttcccctcctcgcagctgcaccttctggatcgcatcccaaatttgaaagtactccccaatggctcggttggatggagctcctttgatgtcgcgcacccacctatggttctgtagtcctctcgccactgtcaaacccttgcgctccacatgactgaagattaacggaaatctcgcctttatgctcccaattggcagccaatccgcaagccaaaactttgtgttttcccccatctcccaacacttgccgtgtggctgagaagaacaggtcctgtaactccttcggctgcttagtctcaatggttgtccaaggtctgtcgcgatgctctcctctctttgccaaccatttaagccgtaacgccatgccgaagaagttttgcatacaaagaaatcgctggtggccgcagcctgcctcccatcccgcacatggcgccagctgagattgccttgtttaccagggcgactcatcaccacaaaaccaaggactgaccgataattattgtcaaccgtgctaccaagacataaggaaatctcaaagaggatcttacctagtgcgggcaccggtgtagtgcaagcgtacgggccgatatgtgcgccaagcagcagcggctgcttcat

SEQ ID NO: 84992 - DNA, 1323 bp, Oryza sativa
  Clone ID: PAT_MRT4530_84174C.1
atgccgaccgaccaccaccacccggatgcggcggcggcggcggcggggaagggggcccaccaccaccacggcggcgggaaggtgcacaagctgctcaagtcggcgttcaagcgcggcggtgaccaccaccaccccggcagcggcggtggcggcggcgaccaggagggggacctgctgagccggtcggcgtccgggtcgtcgtcgacgtcggcggcgagcagcagcagggcggcgtcgtcgtcttccgggaggcgcggcggcggcgggaggaggggcgacgacacctgctcctccgtcgacggcgagagcggcgagctcgacggatccaagaatgccaaggtgttggcggcgctgcgcgacgcgaagatcagctacgcttacgaatcgttcccgtgggagaagaagatgaaggagttgttgccggtgccggcggcgagctgcttcctgtcgatgctgctgctgcccaagtccgccgacgggtcgcacacccggtacaagtcgctggaggacaccctcgcccgcgccgacgcgtggctggtgtcgtcgcaggccgccggcgtccccgtcgccttcatgaacgtccagacggaggcgctgctcaccaagatctccggcgagatggcgctgtcgacggtgaacatgggctcgctgtccgacctcgccaacatggcgaacgccagcctgtacgggttcgaggactaccacggcgtggacatcggcgtcgtgcgcgccgtgcggctgtggtacacgccggtggccggcgaggcggcgctggagatcaagctgctcccgggggacacgcggctggggttcgccatcagccgcaccgaggaagggttcatttacgtgtcgtcggtggcggaggagagcacgcccggcgtggcgtcgacgcggtcggggctcctggagctccaccgcgccgcgcgcagggcgtcgcggctgctggtggtgtcgcgcgtcggcggcgagaaggtgctcccctggatggtgtccaccgccggcgacgtcaagtgcttcgacacggtgtcgctcagccagaagctgtcgctgcaccgccacgcgctccgccccatcacgctccacttcctcatgtgggacaccgccctcgccatcaaggacgtcgtggccaagccgccgctgccgccgccgccgacaatgctcatgctgccgtcgccgccgtcgccgccgccgtccgacgcggaaggggacgcgccgccgcccagtggcgacggcgacgaggcccccggcagcggcgccaagggcggcaaggactcgtccttcaggttccagaacatcgacctcctcccggacagctggttgtga

SEQ ID NO: 84993 - DNA, 1605 bp, Oryza sativa
  Clone ID: PAT_MRT4530_84175C.1
ctagattgccacaacgcgcctctgtgtttgccataaaaacatgtcataggcagaggaaggggtaaatcttccattcgaggcccacttccatattgtctcatcctcttcccctcctcgcagctgcacctcctggatcgcatcccaaatttgaaagtactccccaatgccccggttggatggagctcctttgatgtcgcgcacccacctatggttctgtagtcctctcgccactgtcaaacccttgcgctccacatgactgaagattaacggaaatctcgcctttatgctcccaattggcagccaatccgcaagccaaaactttgtgttttccccatctcccaacacttgccgtgtggctgagaagaacaggtcatgtaactccttcggctgcttagtctcaacggttgtccaaggtctgtcgcgatgctctcctctctttgccaaccatttaagccgtaacgccatgccgaagaagtttaggtttttgatcgccaaaccgcccttttcatatggcatacagaccgatttccatgccactaaacaatgcctgccactcacctcctcctgtcccttccacagaaatccccgacacttcctatcaatctccttgattgcagactgcggtaattcgagcaccgacaagtaatgaacaggcagagcgaaaagaactgacttgatcaaggtcagacggtctccagtggataggaacttaggcttccaaccggcgaacttcttagagaaccgatccaacaaaggctgaacatcttgcttcgtgagcttccggagtgaaagcggcaggcccagataagtgattgggaacggctccaatctacaacacagaattgactgcaccaaaattgcctgatcctctaagcatcggattgttgtgattgcactcttcgcaaaattcgccttcaaaccagttgcctccccaaagagttgaaggatcgctttcactgcccacgtatcttgctgcatcggccggaaaaagaggaccgcatcatcagcatacaaagaaatcgctggtggccacagcctgcctcccatcccgcacatggcgccagctgagattgccttgtttaccagggccatcggctggtgttccgtgtgaaaacgacgagccatgcctctgacaaacatgaaattctcatggatcgagcgtccccttatgaaggccgactgcgtgtacggaatcaggtcccccattctgcccgccagccttgttgccatcaacttggtcgccaagtttgagaaactgtggatcagacttattggtcggtaatccttcaagagcgccggcgcttctttcttcggaagaaggatgatcacagccgaattcaatctctcaaggttttgcgaattgccggagaagaatttctggagggctgctaagacatcacacttgattgtatcccagcaagcttgatagaaaagccctgtgaaaccgtccgggccaggagctttttcagccggcatgtctctaattgtcttccaaatttcctcctccccgaagtcctccactagctctgctaggttcagctgctccaagcctaaattctgaaaattgagccccctcctactagcatcagactcagtcgtgcccat

SEQ ID NO: 84994 - DNA, 363 bp, Oryza sativa
  Clone ID: PAT_MRT4530_84176C.1
atggccagcgtcgatctccctccccgacgaggtggagggcctactcaaggggctggatgctgcagggtggagctgactacggcttgcgcgcgctggcctcgcatggtcgtcgccgcgcaaggccccgtcatcgccgatggcgttaggaggctagacatcgaggtcaatgttgtcggcgccaggttcagcagcttccatggtgttcttgacgctctcgcctcaatgaggagctccgccgcgagcaggtcgccgcccacgtcgaggagctcattggagaatggggtgatgccgtggtgcgcggtcaggttgagcgcctggtgtgccgcggcgccggcgtggttggcggcgaagtgcagtccctaa

SEQ ID NO: 84995 - DNA, 172 bp, Oryza sativa
  Clone ID: PAT_MRT4530_84177C.1
ggtggcggctgcagagctcgtcaccagcaccggcgaggaaccagtggctatgacgccgacgaggaagccatggccacggccgacctcgcgccgtgcccgacaagccgccgcatccgtcggatttagtgagcttgccgcaccatcatccccccacctcgtcgcccgaagctag

SEQ ID NO: 84996 - DNA, 1525 bp, Oryza sativa
  Clone ID: PAT_MRT4530_84178C.1
atggccggcggtgacctgcgccagcgccgggcggtggcggcggctgacggggagggggacggcaagatggggtcagggggagaggaggcggaggtgaaggggaaggggcaggggaggaaggaggcgctggggtggctggagtgggggcgggggtggatgggaatcgtgggggagttcctcttccagcgcatcgccgccagcaacctctccaacccgctcgagcttcccccgctcgacggcgtctccttcgtcgtcaccggcgccaccagcggcatcggcctcgagatcgccagacaacttgcactggcaggaggtcatgttgtgatggctgttaggagaaccaaattggcgcaggagctcattcagaaatggcagaatgataattcagagataggaaagccccttaatgctgaggtgatggagcttgacctactctctctagattcagttgtaaaatttgccgatgcctggaatgctcgtatggcacccctacacgtattgatcaacaacgctggcattttctctataggagaaccccagcgtttctcaaaggatgggtatgaagaacacatgcaagtgaaccatcttgcaccggctttattggcagtgttgcttctaccttcccttcttcgtggttctcctagcagaattgtaaacgttaattcagttatgcacacagtaggttttgtagatgctgaagatatgaacttgacatctggaaaacggaaatttacaagtttgatgggatactcaaatagcaagttagcacagataaaatttagcagcatgcttcacaggaggattccggcagaggctgaaattaatgttatttgtgcctctcctgggattgttcatacaaatgttgcaagggatctccccaagcttgttgtagctgcatatcatttgattccgtacttcatattcgatgctcaagaaggttcaagaagtacactgttcgcagcttctgatccccaagttccagattactgcgagatgctcaagtctgaagactggcctgtttgtgcttgcatctcatatgactgtaatccaatgaatgcatctgaagaatcacataacctcgagacgtcgcagctagtatgggagaagacattagagatgattggcctcccaccagatgccgtggacaagttcatcgaaggggaatcggttcagtgtcgttatggacaacagaaggcagaataggctatttcgtagacagcaaatatgtgataatttcgaatgttcgatccatttcatcatgcgattagtttgccagtggttttgttccagtactttgtaatagtacatctgtcatacccttttttttgtttcatatggttggtaaatctaactgcgtcaaatagaagtatgacaaaacaaagttcgttacaatttatctttgccccttgttaaatggcaaaacgtttgtagagttttgagttgtaaaagcatagtcccttcattctttggggataatcaagatatttattattgtttgggggaattaaccgaaacattttcagtt

SEQ ID NO: 84997 - DNA, 2322 bp, Oryza sativa
  Clone ID: PAT_MRT4530_84179C.1
atggcagaggagagagaaagctttgaaagtcagtgggtgccctctgatgtgacagaggaaaacttgaaggagatggtggcgcacggcgttcttccggcaaaggagatcattgggtggcgtccggcgtgcggcgaagcatttccaacccctgacacacatgaggtcgtggtattttctcatttcttctatggaagattttctcttccaacctcaagattcttccgggggattttggaattttatgggattagtttgcatcacctaaaccccaattccatagtccacattgccaattttatccatgcttgcgaggctttcctgggtataagaccgcatttttccctgttccgtcgcatcttcttcctcaagcctcagccaaacaagagcaaaccatgtgttgtcgggggagccggtttccaactaaggggaaccttgagccaaaaatacttttccatgcccttcaaaacttcgaataagggttggcatgcaaattggttctatgtgcaaaatcccgagccagcgcttcccgagtattcttgtctacctccagtatatcaagacacctggaactcgcttcccatgggagatgaggtggcccaagcacttgccctgatcgatcgcatgctgaagctcaaagagcaaggtctgcaaggagagcagatcacccggcattttattaaaagccgactagcgccaattaaagagagatcccgcacaacctttgagtttgacggcaagcatgaccctaaccgtgaagatctagattctcttgagtttaaagtcatgaaggagagaatgtacaaaatcttctcgaatgctatcgtggtcagttattcgcacttgttgccagtggtgccatacaacgccttcaaccctcctccgcgggaatttgccttgatgaagtcggatcctccaattgctcaacatcgctcgccccgtcggcagactagtcaggcgagtggagtacaaaaaattcggtccgatactcaaccaaacacctcgaaatcgactaaccagtcagactcccgtaagaggaaattggtcctgagcgatgatgaaggtgatgatgccggcaacaaaggggtgaccgaaaaacagccaaggcaagccaatccaaagaagaagacatccagtcgtcccataccaaaaatcaggaaatcatctaggaagccatctgatatagatccttccggaaaagaccctgagccgaatggcgcggagactagtccttcaacagaaaccaggccgaccgccgaaggtcgcccgagtgataatcaaccagcaaccgataatgtagaggccagcaacgagcccccgactggaaaccagttggccgaagctgaagccaatgttgaacaggagcccccgactagagaccagtcgggtacagaacaaaataaggacatcccagaagtagaaactcaagctaacagccctcccaggaaggacgctggtgttgacccgggatccaactctcctgttaggataaaaggacctgctcatccccgaccggaaatcataacagcttcaatcatcctgtcggccactttactgaataaagacgcacttgtaatgcagagaatccatcttagaaatgaggcaaaaactgcaatcctcgagaaattggttccccaccttggaaccctggaagcaaccagagatcaactgcgtgaagccaaggagcttgctaggaagactgagcatgaccttagagaccggatcgccgagctccaagactccaactttgagctaagtggttcatcaaaagtggaaagcaatatagtgaaagctgccaagatatccaagctagaaaggcgaatccaggctctggagaaagacaaggtcgaactggcaaaacagagggactcggctctgaaagatgtcgaagatcgcaaaatcaaatcccaggctcaattcgacatcttggttaacaaaatcaagaagcttgaaggagctagagatgaagtcgccaatgccgctacgccactcgtccaggccatgtttttcaataacaatggtccgagttcaattgatgctgtcgaaatcttcgacaagcttagaactgctccggatacatattttaagaacatcaaagaagctggaagtatgggggcaagtctagagttggcgatgaccaagtccttgtacccgaagattgatattgatgttgttgacggcttcgcagacgggacaagtgaggaagccgcccttgacctcatcagtgatgcgcaaaaagctgccgacaagatagccgctgatgtagttgagaggttacaggacaacgatcttaagccgactgggtctgataactctaatgattaa

SEQ ID NO: 84998 - DNA, 2037 bp, Oryza sativa
  Clone ID: PAT_MRT4530_8417C.1
atggtcgaggtcttggaggaagaagtggtggcgcacacccccactccctccgggagtgaggatgccagcgggagccgcggcccccgccaccgccgccacaactctccgactcctccccaccgcgaccccccacggagggaggatcccacctggtcgggtggctcggccctctccccgccgccgggcgaggggaaaccgcgcagcgtcggggcacgatgccgcctgacgtacggtgacggcggctcgccccgaggcgcacttcaagcggcgggagcccttctacagcaaccccccgtaaactcggcgccggagactcctgtccagcgatggttggacgacgtggccaacctggtcaccactgcccagcaacagctggctgcgggtggccggcccgccgccactggtacctcgcgtacccccaccgccctttcctcatcagcaaggaggagggaccgtcggtcagcccagactttgtggcgatcgacggccccgacgtcgtcaagggtctcgagaagctggaggcgtcatgacggcctctacgaggagcaggatgctcgaatcaacatcgagcgacgcagggacgagcgcagtgctgcccgcatgggggagggcgcctcctcatccggagtgtcgcgctcctccacacgtcatgacggcccgcccgccgagcaatgctcgaatcaacatcgagcgacgcagggacgagcgcagtgctgcccgcatgggggagggcgcctcctcatccggagtgtcgcgctcctccacacgaggcggcccgccccccgcgttcacccctggagggaccggttgcagggccttcgtggcaagtctctggaacgtccggcacgtaccccggcacgacaacgcaattgccgacgatttgtcgcgcatcgcgttggcacgagccccactcccccaggggccttcgaggaaaggctcctgcagtcgtcggcgcagttggaccccctgagggagcctggcgccacggtcctcgccccgatgcctggcgagccacaggcctcggggcccgagggggtcgaccccgacccccctcgtcaggtcgtttggatgactgacatccgggcgtacctcgacgataacactcttcctgaggatcgcgcagaagctgagaagcttgtgcgcatctctaagcagtacgtgctcgtagaagggaccctctaccggcgtgctaccaacgggatcctcttgaaatgcatctctcgggagcaaggcatcgagctcattgccgatgcccaccattttgagtgcagggctcattcagcttcactcacgtcggttggtaaagccttccgacaaggcttttactggccgaccgcgttgcaagacgcccaagaatgggtccggcgatgcaagcccttcgcggtctggggtctggatatcctagggcccttcaaagcggcccacggcggataccagcacctatacgtcaccatcgacaagttcaccaagtggcccgaggcttacccggtcgtcaagatcgacaagcattccgccctcaagttcaacaggggcatcacatcccggttcggagtacccaaccgtatcattacaaacaacgacacccagttcaccaatgagctgtttggcgactactgcgacgacatgggcatcaagctgtgcttcgccttgcccacccaccccaagagcaacggccaagtcgagcgggccaatgttgaaatcctcaaaggcctcaagaccaagacgtacaacatcctgaagaagcacggggattcttggctcgaggagctacccgcggtgatgtgggcaaatcggaccaccccgagccgcgctacgggggaaatgccttttttcctggtgtacggcgccgaggcggtcctaccctcggagctttccctgcgttcgcctcgcgtcgcgctgtacaatgaggccaaccaggatgacctccgccgcgatgacctcaactatttggaaggacagagaaggtgcgcggccctgcgagtggcgcgctaccagcaaagcttgcggccctaccatcggcaccacgtctggacctga

SEQ ID NO: 84999 - DNA, 411 bp, Oryza sativa
  Clone ID: PAT_MRT4530_84180C.1
gtcacaaattaagagatacaaaattggagcgggtacatacggataatgctcatgtcatattcgttttcatatttttttaccggatacgaaaatgaatacggatagctcaagtatgaaaacaaataaggattgtctcaaaaacgaataaaaatcgaatatgatcggatacgaatacggaaacaatttttttggatatctgaattattatccgtatccgacgaaaaccccagtaccatatccgtattcatattctgtatccgaacgatccaaaaattatccgccgaaagatatccgtatccgtttttgtccggagcggacggaaactatccgctccgttttcatccctactagttgctcaattcgttttgtattatcatatatgtaagttttagattggaggataattattat

SEQ ID NO: 85000 - DNA, 204 bp, Oryza sativa
  Clone ID: PAT_MRT4530_84181C.1
atggccgagctcgggttgcaaggggatagggcgctagggctaagttccaaccaaattgacgagggcgtgagcatctacggagtggtgtgggaagggtggcttaatggtcgacgcgacggacggcgcactgggctcgaggacgacatgatggcgcgcggggctcgagggcgacatgatggcgcgcagggctcaagggcgacgtga

SEQ ID NO: 85001 - DNA, 294 bp, Oryza sativa
  Clone ID: PAT_MRT4530_84182C.1
atggaggtggagtccgcggtggtgggtgctcgtggattgaggcggcaatcaatagaagttgggggcagaggtggaggcgacagtgacgggcgctcgtggatggaagcaatgaggacccgtgctcggggagggggaggtggaggtcgcggtggcgacaggagctcggggttggaggctaaggccgaggtgttctttatcgggttcacaaatgggcccgtcacaattaagttcttagctgtgacgagctgtgcccgtggggccttatctagagtgggctttagtttagcccgttag

SEQ ID NO: 85002 - DNA, 450 bp, Oryza sativa
  Clone ID: PAT_MRT4530_84183C.1
cccacgcgtccgccaatgtgatggtgagaccgtgtgaggtgacgtgacatatactctctgttcatgcggcggcgaatgacatgtagacctcgcgcagaggaagcaccatgtggcgcacggacgtaccctcctgctacattgggatcgctctcgagtacttcttcttaagcctcatgaacgaattgcgctgctaagaaggcgaatgccttgcttaatattcgaatgcattaaggtggatgtaagagcgaaaaacaactaggacactttcgtcgccagggtagacagcgctcataacaaatgggcttatgacaccactcaatataacaatatactaaagaatctatatgaggaaagcgctactcatgctataaaagatctagaagatgatgtaagcaattcaccatatagttcacctaaggagactgaaccaacgaacgattaagttaccaa

SEQ ID NO: 85003 - DNA, 1278 bp, Oryza sativa
  Clone ID: PAT_MRT4530_84184C.1
atgtccacaccgaagaagcacgttctcttccccttcacgagcaaaggccacatcgctggcttcctctccctcgctagccgcctccaccgcatcctcccgcacgccaccatcacgctcgtctccaccccgcgcaacgtcgccgctctccgcgccgccgccgccgcgccgttcctcgacttccacgcgctccgcttcgacccggcggaacacggccttccgcccggcggcgagtcccaggacgagatcttcccgccgctgctcatccccctctacgaggcgttcgagacgctccagccagccttcgacgacttcgtcgcgtcgaccgccgccgccgcagcgcgcgtcgtggtcatctccgacgtgttcgtcgcgtggacggtggaggttgcgcggcggcacgggtcgcaggtgcccaagtacatgctctaccagtacggcctgcccgctgccggtgcagcaaatgacggcagcggcggccgagcagacagacggttcttggaccggcagctagctcacggcaacaacaccgacgcggtgctggtcaatgccgtggcggagccggagccggccgggctcgccatgctgcggcgcacgctcagagtcctccccgtctggccaatcgggccgctctcgcgcgaccgccgcgacgcagccaccgagcccaccgacgacaccgtgctgcgctggatggacacgcagccgccgggatccgtgctgtacatctcgttcggcaccaacagcatgatacgacccgagcacatgctggagctcgccgcggcgctggagtcaagcgggcggtgcttcctctggaagatcaagccaccagagggcgatgtggccggcctcaacggcggcgcgacgacgccgtcgtcctacaatagatggttggcggaagggtttgaagagagggtgacggcgagcaagagaggcctgctggtcaggcgccactgcgggtggagctcggtgctggagagcatggcgcacggcgtgcctgtcatcgggtggctgctgacggcggagcagttccacaatgtgatggtgctcgagggtctcggggtgtgcgtggaggtggcgagggggaacacggacgagacggtcgtggagaggaggcgggtggcggaggtggtgaagatggtgatgggcgagacggcaaaggcggacgacatgaggcgccgggtgcaggaggtgcggacgatgatggtggatgcctggaaggaggagggagggtcttcctttgaggcgtctcaagcgttcttggaagcaatgaagctgaaatga

SEQ ID NO: 85004 - DNA, 258 bp, Oryza sativa
  Clone ID: PAT_MRT4530_84185C.1
tgcttaggccatctgcggacctgattttgaagcctccaccaggtctgaacatggcaatgcgggtggccaagtagttccagggctacacccaaggtgccagttcttggtgctgagaattggttggcccaccctcatccgtggtaacacccgtcgttctccaccacctgaatgcccacaagaggaatcccagggaacttcacaatggttccgtaagccttgcccccccactgcccaaattggttttccgggtgtttcttg

SEQ ID NO: 85005 - DNA, 166 bp, Oryza sativa
  Clone ID: PAT_MRT4530_84186C.1
atgcgcgtactggcagtgccgcaccaacatgggcgagctcctacacgacggcagttcatcccgtgcgacggccgtaagaaggtgatcgcatgtgacttatgtggcacatggatgaaggccaagccatagtgtacgatgttcttcctacagatcggctcagctagga

SEQ ID NO: 85006 - DNA, 339 bp, Oryza sativa
  Clone ID: PAT_MRT4530_84187C.1
atatacatcgaaacattacatgttactttattaggctcaagacttactattcagcttgctagcgcaaatcgtataacacatatgagacttgcagagctaacgaaggtgaccaaccaacacacgatttgttgtacacgatgcacaatcacccattgatcgaatccatggatatgtggacagcctcacaagcaattatgccaccaaagaccatggcttgaaccttaggttctttcttggaagcgagacatgctaaaggtaggcccacagttacatttgttgagtacttgaagtgagggagcaaccgggcacagacgtcattcaggtggttcatcaactggc

SEQ ID NO: 85007 - DNA, 232 bp, Oryza sativa
  Clone ID: PAT_MRT4530_84188C.1
atgcggaatcgaagcggtgggatgcgtggaggatttttgtggacttttggaagtggattggggcagaatgtcttcgtcttcactactcggcaggcctgcgtaggaaaaattgaagcactcggattattattcttgagagagctattcgactgcaaagccgccggtctgaccgccgtgtgcccgccggtcggaccgccgcgatgccgccggtctgactgccggtgcgccgccg

SEQ ID NO: 85008 - DNA, 1407 bp, Oryza sativa
  Clone ID: PAT_MRT4530_84189C.1
atggcgcccggttcagcaaaagaccgggacgggcacaccaccgaacgggttcttgggcgcggggactacgaggcggcccaccataagcccagcgccgccgccgccgccaacgcgccctcgcgaccgccgccgccaccgcgcgtcgccaagagtctgcccggaaagaagacctccacggcaactcagggcggcggccatgcctcctcgtcgccgcggcgcctcggcgagaagctggcccgcgaccaccccggaggcggaggccgcggcgccgagggattggcctctgctgccttcccggtggtcgaccggaagggaaagaggaaggtgtgcgcggcaagcgagggtgccgccagctcgtcctcgccgcccttcgagaggctgagcggtgaggagctaggaccaggagcaggagggcgcggcaccgaggcatcgacctccgcctctgctgcggcggtggtggatcaggacgagagagaagtccgcgagtggccaagatttgctcttctcagcaattcacaccttctagagattggtgcaagatgtgagggacacaaggatcttagtgctgatgctcaagaaagcacctatactgtagtgagctctgtggttcgtaacttctccgcggacttcagttggtggtccataatgggtaatcccatgaaacaaacaataccaaatacctgcaccattttagcatgtgctgtatgcattgaagcgctacatcgtttggagtgggagcggctgcacggtcctggtaccttcctgtgccgggctgcagctcctcgcaagctccgcagggcctgcatacgggatgatattttgcacccagaggagggagtcgaatcaaagaaaatggttcttttactgaaaaagataaagggcatgggtggtattcgcacaaccaatgctccaccaccagccccctttctcctcccgctcaaatcgtggcggatgtaccgccaaaaaggtagtctcacacgagagcgcgctgtgcacctcctgcgcacgggtggcccttacattggaatcattcgggtgtccctcctataccactttattgatgcctcagttaatgatgaactagtctataggtgggtaccccctgagttgagaactgctgcagacgtctggctgattgacgctcttgttgcgggaagggccacggacaatgatatctgtgatttgatcagtgagacaaatggtaaccacgttattgtctgttatggttacagacatcgtggaggggagctacagattcttatatgggataaccatgcgcagactgggccaagtaggtggatcggatttgaggagctggagaaagtgtgtgtactgagggtagatcctctccctctggatctggatcaacttaatcctttgccagtgtatcctattagtggttgttag

SEQ ID NO: 85009 - DNA, 1577 bp, Oryza sativa
  Clone ID: PAT_MRT4530_8418C.1
aattctcattggccaattccaggactctgaagccaatatggttgctaagccgatgatgacctcggggcttacgtccggtggcccctgaattttcgccccaactttgatggactcgagctcaggcacgtaccccggcacgacaacgcaattgccgacgatttgtcgcgcatcgcgttggcacgagccccactcccccaggggccttcgaggaaaggctcctgcagtcgtcggcgcagttggaccccctgagggagcctggcgccacggtcctcgccccgatgcctggcgagccacaggcctcggggcccgagggggtcgaccccgacccccctcgtcaggtcgtttggatgactgacatccgggcgtacctcgacgataacactcttcctgaggatcgcgcagaagctgagaagcttgtgcgcatctctaagcagtacgtgctcgtagaagggaccctctaccggcgtgctaccaacgggatcctcttgaaatgcatctctcgggagcaaggcatcgagctcattgccgatgcccaccattttgagtgcagggctcattcagcttcactcacgtcggttggtaaagccttccgacaaggcttttactggccgaccgcgttgcaagacgcccaagaatgggtccggcgatgcaaggtgtgcaaattcgacgccaaacaaacccaccagccatcccaggccttgcaggtcatcccgctctcttagcccttcgcggtctggggtctggatatcctagggcccttcaaagcggcccacggcggataccagcacctatacgtcaccatcgacaagttcaccaagtggcccgaggcttacccggtcgtcaagatcgacaagcattccgccctcaagttcaacaggggcatcacatcccggttcggagtacccaaccgtatcattacaaacaacgacacccagttcaccaatgagctgtttggcgactactgcgacgacatgggcatcaagctgtgcttcgccttgcccacccaccccaagagcaacggccaagtcgagcgggccaatgttgaaatcctcaaaggcctcaagaccaagacgtacaacatcctgaagaagcacggggattcttggctcgaggagctacccgcggtgatgtgggcaaatcggaccaccccgagccgcgctacgggggaaatgccttttttcctggtgtacggcgccgaggcggtcctaccctcggagctttccctgcgttcgcctcgcgtcgcgctgtacaatgaggccaaccaggatgacctccgccgcgatgacctcaactatttggaaggacagagaaggtgcgcggccctgcgagtggcgcgctaccagcaaagcttgcggccctaccatcggcaccacgtctggacctgatcactacaagtcggcgacctcgtcctacgccgcatacagtcgcgcttagggctgagcaagctctcaccactgtgggaagggccatacaaagtgattggtgtcccccagccgggctcagttcaactagccacggaggacggcacaaagttgcctaacccctggaatatcgagcatctccgccgtttctactca

SEQ ID NO: 85010 - DNA, 262 bp, Oryza sativa
  unsure (1)..(262): unsure at all n locations
  Clone ID: PAT_MRT4530_84190C.1
gggnttcaaaacaattcattattcattatttgtggggatttttttattgttgtttgttacacattttttttttcaccccaccccccccaagcaagccccctcaacccctttttcgtctcnggaattccttctacactttggactttacccggcacatcgacaggatctgcgccgcgtactgtcttgccctggtcagcctcacgcgggtcatccccggctgctgctgctgctcgccgtaatagcccttctcccacaacccctt

SEQ ID NO: 85011 - DNA, 1491 bp, Oryza sativa
  Clone ID: PAT_MRT4530_84191C.1
atggcgcccggttcagcaaaagaccgggacggccacaccaccgaaccggttcttgggcgcggggactacgaggcggcccaccagaagcccagcgccgccgccgccgccaacgcgccctcgcgaccgccgccgccaccgcgcgtcgccaagagtctgccccgtgagcagcccggaggtcggggcagcggccgcggtgccgagggttcggcctctgcctccccggtggcggtgggtgaccgggagggaaagaagacctccacggcaactcagggcggcggccatgcctcctcgtcgccgcggcgcctcggcgagaagctggcccgcgaccaccccggaggcggaggccgcggcgccgagggattggcctctgctgccttcccggtggtcgaccggaagggaaagaggaaggtgtgcgcggcaagcgagggtgccgccagctcgtcctcgccgcccttcgagaggctgagcggtgaggagctaggagcaggagcaggagggcgcggcaccgaggcatcgacctccgcctctgctgcggcggtggtggatcaggacgagagagaagtccgcgagtggccaagatttgctcttctcagcaattcacaccttctagagattggtgcaagatgtgagggacacaaggatcttagtgctgatgctcaagaaagcacctatactgtagtgagctctgtggttcgtaacttctccgcggacttcagttggtggtccataatgggtaatcccatgaaacaaacaataccaaatacctgcaccattttagcatgtgctgtatgcattgaagcgctacatcgtttggagtgggagcggctgcacggtcctggtaccttcctgtgccgggctgcagctcctcgcaagctccgcagggcctgcatacgggatgatattttgcacccagaggagggagtcgaatcaaagaaaatggttcttttactgaaaaagataaagggcatgggtggtattcgcacaaccaatgctccaccaccagccccctttctcctcccgctcaaatcgtggcggatgtaccgccaaaaaggtagtctcacacgagagcgcgctgtgcacctcctgcgcacgggtggcccttacattggaatcattcgggtgtccctcctataccactttattgatgcctcagttaatgatgaactagtctataggtgggtaccccctgagttgagaactgctgcagacgtctggctgattgacgctcttgttgcgggaagggccacggacaatgatatctgtgatttgatcagtgagacaaatggtaaccacgttattgtctgttatggttacagacatcgtggaggggagctacagattcttatattggataaccatgcgcagactgggccaagtaggtggatcggatttgaggagctggagaaagtgtgtgtactgagggtagatcctctccctctggatctggatcaacttaatcctttgccagtgtatcctattagtggttgttag

SEQ ID NO: 85012 - DNA, 378 bp, Oryza sativa
  Clone ID: PAT_MRT4530_84192C.1
atggcggcggcgacggggtacggtgacgccccgaccgccgacgatctggccgcgtacgaccaactgctcggcctccgccacactcgccacatggcggaggtcttcgccgtgcgcctgccgcacgccgccggactccgcaggccgccgccctgcggcaccatcagcttctgcggcggcaaccactgcaacgacgtcatctacagccgcagccgtacggacgactccacctacccaccgccctgcgacacccatgtaaaacttccaccttgtaggcagctagctaccgctcgctgtcgccgccgccggtctgaccgcctcgccaccgccggtctgaccgccgcttgccgctggtctgactgccggtatatcgccggttag

SEQ ID NO: 85013 - DNA, 1346 bp, Oryza sativa
  Clone ID: PAT_MRT4530_84193C.1
agagggccccctggcctctctctcgcgcacgcgcctttttgcgcctaatttaccgttttacccctcgccggcggccgccgcactccggcgagagaatcggcagcaggtgggcgggggactccacgatggcggccatatcttcgcttcccttcgcggcactgcgccgggccgccgactgcaggccgtcgacggcggcggcggcggcgggggcgggggcgggggccgtcgtgctcagcgtgaggccccggcgggggtcgcgctcggtggtgcgctgcgtcgccacggcgggcgatgttccacccactgtcgcagaaacaaagatgaattttctcaagtcatacaagcgtcctatcctaagcatttacagtacagttctacaagaacttttggtacagcaacatctgatgagatacaaaacaacatatcaatatgatgcggtgtttgctcttggttttgtgaccgtctatgaccaactcatggaagggtaccctagcaatgaggatagggatgcaatcttcaaagcatatataacagcgttaaacgaagaccctgagcaatacagagctgacgcacaaaagatggaagagtgggctcgttcccagaatggtaattctttagttgagttttcatccaaagatggagaaatagaggccattctgaaagatatttcagaaagggcccagggtaagggaagcttcagctacagccggttctttgcagttggcttgttccgtttgcttgagcttgcaaatgcaacagagccaaccatactagacaagctttgcgctgctctaaacatcaacaaaagaagtgtcgacagggatctcgatgtttaccggaacatactctccaaattggtccaggctaaggaacttctcaaggaatacgtggaaagggaaaagaagaagagagaggaaagatcagagaccccaaaatcgaatgaagctgttacgaaatttgacgggagtctcaattccatgaggcattaactcaagccttcataaggggagtgagtgctaccgtggataacagattttaacagagttctggatcacgttgagaaactatcaaggtcacctttcactgcacggacactttggctgctctcgtgtggttttgtattctgccgtataaaaggatccagattgttcttactactgagcattatattttttttgtaattctccttttcagtgttcaaatgtatcgttttccttttctttgacaatatatgaagaggtatgtggggatcaatgttactcacaagatgaaaaatatattgttcagttatctcttcatgatgaaaaaaaaaaaaaaaaaaaactcgagactagttctctctctcc

SEQ ID NO: 85014 - DNA, 252 bp, Oryza sativa
  Clone ID: PAT_MRT4530_84194C.1
atggggaaagctgacacgcccgcaggcaccgatcctgtattactggcgcgatccacgcgttcgcccacgcgtacagccacgcgtccgattagtcaggcatccctagccgctttcctgatgttctcatgacagaactagcatttattcacctcgaattcgttccatggaaggactacctttcgattccgagacgaatccgttgtctacgatgtcggtgcggcgaggttctccctgcctatatatatgacagca

SEQ ID NO: 85015 - DNA, 485 bp, Oryza sativa
  Clone ID: PAT_MRT4530_84195C.1
acgcccacgcgtgcgctcacgcggcggtctagatcgcgagcggacgtgcttctttttttgtgttttttgaagaaatacgacgcctttatttaatggtgatatagagtagaatcaccaccaagagtcatacttgaggtgttttattttgctatatggcagagctagatatcagttacattactgtgaagactcacttatcggactcatgtcgagaatagctgggtaagtattgatcgatgacatctagtgagtgaaggaagcggcgctgtctctgccctattgtttattgatgctgcaggactatgatcccgcgagatgcgctaagcattagctgaccacattaactggtgaggctgcgcaatactgagttctttgctgcaaggcggctgacgaaggccgtagcgtttgtcttgattgcaatatattggcatacttcacgctatggtttcttgaggacagtataatgtggtgcaacgatcaatagt

SEQ ID NO: 85016 - DNA, 342 bp, Oryza sativa
  Clone ID: PAT_MRT4530_84196C.1
atgacaatatccttgcacgaagaggtttttccaaaacggtgccccaaggaggatgcgacgtggatcgccgccaccgctcgttcggaaccgaagcaagccaccgccactgccacagccaccactgtcaccagccgccaccgtcagccgaccgccacctccacggacacccccgtccagccaccaccgtcagccgccaccgtcgctagccagcgccgccagacgccagccgtccagatctggtcggggtggcgtggatcagaggtgcagcgcgaagcgcgggtcaccggcatcatggaggaaggcgtcacgggcacggcgttcatagccagagcattgacgtag

SEQ ID NO: 85017 - DNA, 1845 bp, Oryza sativa
  Clone ID: PAT_MRT4530_84197C.1
atggatcaagcgaggatctcgttcttcccggatggtctccgtgtgatgatcatcgacgacgacgcaaaggccgtcagaagggcaacggcgacgttgtcccaactgcagtacgcagtggtggcgacgcactccaccgcaagcgctggtctgcgtgccctctccggcgacaacgtggtagaaatccaagccatcctctgcgatgtccacaaggtggtctcctccggcttcgacttccgccgcgtcgtcgagtccgagcttcgcatccccgtcatctaccttctgtcgaagatggaggaggaggacatggtcgccggcgaggacgcggagttcctgaaccacctcctgctgacggcgacctacatcgtcaggaagccgctcaaccccaccgtgatggcccggctgtggagggtggtggcatggcgcatgtactgcctggaagaaaggattcaggccaatgtcgctgccaatgctggcgctggtggcgaagacgacgacgacgacgacgacgtagttatcgtcgaggagccccaagtgcacttcaaggtggtgagaagaacgtccggtggcagcaggaagaggcagctgacaatcaacgtcgtcgacgacggcaaccgcggcagcggcagcggcggcggcggcggcggcggcgcagatgccaacccaaccaggatactgcagcacatcactagcaacttacaggaattccgcacgaagcaccagaagaaggacatggccatcgagcgtcccctcatctcgtcggactccatgttcctcaaagccatcctcccgacgctcaaaatctcaccatgcaaccccctgaccctcactggcggcatcggttcaagcagtgtcgccgcggaggccttcgctggcggcagctcttcagctgcaccacttcaaattccagttttccagcagcaatccaccggcaatggcaacacggtgattagcttcagcaacaatgcttcaccgatggccatgcgtgcgccaaccgacaatactatgatatcgttcaacaatgtctctgctgcgccggtcgccaatgcggtgatctccttcagcaacatttctaggtctgctgccatgcaggcaccagcggcaagggggcaacatctgtccggtgatgtccagcagctggattttccccagcagaagctgtactttgggcccttctcctaccaagggcctccgccaccttccatgcacaaccacatcaacctactcccgccgacgtcctcccctgtgacctgctccatggacaaaggcaaggttcctattatcgagctcccatatgggatgcctgtggatgacttcctcgtcagtcaaaccacatatggcggtgccggaccatccatcggagccactgacgctgctgccgctgcgtacccttacacagatgcaccgagcaataacgttgcaactggctgtctcatggtgccaccaatggggccagcattcagtatcactgagccaactgtggtggcccaaggtgagggcaccggcaccggtgtcgacgccggcacatcagagaagaacgcgatagtagaagcaccaaacaaccccgcgccattaatggtactggatcaggttgctgctgatgctgcaatggatgttcaagaagacatcatgttctctttggaatctcttctggggccggactatgacctgctacctatggaagacgttagtgctccggacaccgctgcagccggtgatgcagctggtggctcactggacggagaggaaggcggcatggacattggttgggatctcgacctggatgacatcctggtggagaacgttaatgacttcgcgttcctggacaaccttgccgggagcgagtag

SEQ ID NO: 85018 - DNA, 255 bp, Oryza sativa
  Clone ID: PAT_MRT4530_84198C.1
atggtggtgctggaggtagtcaaaggatactatgtcggggatgagatggaactggagatggatgttgggcgccgctcctcctctccattgataggagacaagaaagaagcttatgccaccgacggcatcgattgcctaccttcggcaccccctctttgttgtcgtggaggtgggagggtgccgtggggagatccgagaggacgccgtgggcggggaatgctgcccaagggtgagactgacgacgccttgcgctag

SEQ ID NO: 85019 - DNA, 207 bp, Oryza sativa
  Clone ID: PAT_MRT4530_84199C.1
tcatacacaaacctctgttactagcactaccatggatcattgcgcgagctggccgctgagctcgtaagacgccaatacgactactacgaacgcgagagctgcagagtagaacgacatctagttgctgacaggggggccgacatggccgatactgctggaggactaccatctgatcaagaaggcggcgtactttgccccgaagcgcat

SEQ ID NO: 85020 - DNA, 291 bp, Oryza sativa
  Clone ID: PAT_MRT4530_8419C.1
atgatcctgttgtccgcgtcacctcgggccactagaccgtttcgctggcgccttgccaccctccgtcacagtgctcccgccatccaaaacgtcgcggcactagaacatccaccgaagcacgatgctcttacccctgatccggtggaggggatagggtcttgtccggggagaggccgaacacccaacacgcgccaaaattaccatgtccagcgccagcatatatttgataatcctggcatttatcattatctcaccccagtaagccagagtgctgtgcggaaccagcgttaa

SEQ ID NO: 85021 - DNA, 1167 bp, Oryza sativa
  Clone ID: PAT_MRT4530_841C.1
ccgggctgcaggaattccgcgcgcggcccggaccagagagaaaagtttgcacacagctagcatggcgaacaagctgcagctcgccatcgcgttcgtcgtcgtcgtcgtcgtcctcggcgccatggcggcatcggcggcggcggcggtggcccccatgctgacgatgcacaacctgtgcccgtacacggtgtggccgatcgtgtcgccggacagtggctcgccgcccatcgccgacgggatacggctggagggccgcggcgtcgggctgaggtcgctcaacctcccggcggggttctggtcggggcgcgtcgtgccgcgcacatggtgcagggacggcgggcggtgcgacaccgggaacgcgccgccggcgacggtggtgaggctgtcgttcaacggcgccggcgggctggcggagtacagcgtcaacctcggggaagggttcaacgtgccgacggtggtgagcccgcacgccatcggcggcgggatgtgcccggcgctgggctgcacggccgacctcaacgccgggtgcgcggcggggcagcgcgtgtacggcggcgacaccggcggcgacgtcgtggcgtgcagggggccggcgagctacttcaagcagcggtgcccgctgacgaggacgggcgggggcgacgtggagcccgtgccgcagcactgcatctcccccggcgagatcaagctcgtcttctgccaggccgccatggtcgccggcgagccggagctcatccgcaccgtcgacgtcgccgacaactagctagcctagccggccggtccgttaattaattacgtgtgttttaattagtgcgtgtttaactagttaatcagatcatcaagcagttaattaattaattaattactccggttggcccgcgctaactgctaataagtgcacatggaataacaaaggcggggtacgtacatatgtacgtacccttatgtttgtacgtgcgcatatacgtgttttaattactctagtattgtatacatacttgtgtacgtacgtctacatcgtatattcgtattgtgtttttgtgtaactcgatctagtaatccaacagtatgtatccgtccatagtgatattacctactactacctctgcttattaattaatctcatcatgacaatatatcaacttcttttcatcaaaaaaaaaaaaa

SEQ ID NO: 85022 - DNA, 405 bp, Oryza sativa
  Clone ID: PAT_MRT4530_84200C.1
atgcctcatttccctagcggctcaagggtgaagtgcacggtgcttgcagtgctgtgtgggaaggtaggcaagcagcgggcgccaccttgtccggtgcctgggtcccagcagcagcggccatcgtacccattcccggagttgatctcgtccgggaggttggaggtgcacacgctgattaaccctacagttgatgaatttctggaggcacaacgtgctttgcaaccccgcttcatgtacctccggggtcagcagcttgacaacgaagaagaaattggtacacttgtctggcgcgatgctgatgtatctgatccacagatacttagttcactcattcgtccgccttttcctaccattctgggattagagccaggcaacaattgcatcaatactcttatggagccataa

SEQ ID NO: 85023 - DNA, 107 bp, Oryza sativa
  Clone ID: PAT_MRT4530_84201C.1
atggagaagaaacatcataggaaattcaaacacgatgaccctatcgaggcacgatatttggtaccggagttcagctgtggcctacatctccagggcattgattacga

SEQ ID NO: 85024 - DNA, 3012 bp, Oryza sativa
  Clone ID: PAT_MRT4530_84202C.1
atgcgcaagctagattgcctggacttgggcatcctgcgccgcagcaatgagttgaggcaggagctcgccatagttgaacttgaaatgattaggtctgaacagcctaagctctgtgtctggcgcagcgagtggtgggagttaaagtggccaccaatcttccccgtgggcggaggcaatctggatgtggacaagctcacctggaactgggatactgacacggtcatagcctttgggaactacctgtgctttgttgattactgcaatggtgtcctattctgtgacgcattcgacgacaacccaaaactactataccttgaattcctttgcaagatccctggccttgatcgcttttaccatggcagagcatggtcagatgtcaatgaagagcttgcaccctcctttggtttcacaaaaggggagaaagataggggctaccattatgatgatacatggattgttgccattgatatgagttgcaagattgtgggcgtgacctttagatacatcgaggcggtagagaaatccactcttgaggtcactcgatgtatcgagcacaagtactggtacttcgagccttttcttcatgttgagtttccagcatatttccaccttgatgataggttgaagggtcttggatctgggcatctggcgctagcttaccatccggggatgctttcttgggagattcgagagcccttcaacgtcttcgcgagatccatttatgctctaaacgatttattcaacaatagcatgcagatatcgctgtccacttccaacctttcgttctatcagatgggctgtacgaaatggacaggagagatagggacaatttcactgattgcgaggttcatcactttgtctgtcatcttcttgcttagcatccctttgcttgttgcatccgttcctcaggacattctttctcctggatcttccatccccgtggaggacaactctaacatgttggtctcccccaacggattgttttcgtgcggcttttacgaggtcggtgccaatgctttcatctttgctgtctgggtaaaccaatcgattggtaaaacagttgtctggacagccgatcgagatgtgccagtgaatggcagaggatcaaggattgagctgagggatggcaacatggtgctgctggacttcaacagcaggttagtttggagtacgggcacaacctctggccaagtgcgtagcgcaaaacttcttgacacgggcaacctcgtcctgttgggtcatgacggcagccgcatatggcagagctttgattcacctactgacactcttctgccgacccagccaatcgctgctaatttgaagctggtatcaggaaagtacatgctttctgttgataataatggtagtcttgctctcacatatgatacaccggaaggccatagcaagtactggccaagaaatataaatgcgacaccatttagtggagaccaacctcaaggtcttgatatgcttggttgcatctctgcaggcaaccatatcaggtattgtgcatctgatctaggttatggagttttacggaggctgactcttgaccacgatggcaatcttcggctctatagcttgcttgaggctgatggccattggaagatttcatggattgctcttgcagattcttgtcaagtgcatggagtgtgtggaaacaatgggtttgtgtttgcagatgtatctgatttgagtaaaggttgcaagcccactttcaatatcagttgcgacaaggtggcacaggcgtattttgtggaaattgagaagatgagtgtttggggttataactccaattacacagcatcaacagcattcgatgtttgcaggaaaagttgtttggatgatctgcattgcgaagctttttcttaccagtacggtttgggaggatgtacactgaagagttcactctacactgggggatttactccctccgagatctcaataacatgcatgaaacttactgctgatgcggctgtgcagaacagtatcgattataaaccacacgttgaagccattctattcccgctcgcctggtgttttctgcgcaagaggaaacaggactctatctcgagaaatgacgggtttgctctgattcgcgaccatttcaggaagttcaccttgaaggagctggtagctgccaccgcaaagttcaagcatgagattggaagaggcggttccggggtcgtttacgagggtatcttggatgatgggaagaagatagcagtgaagaagctacaagacatggtgcagggggagctggatttccagtccgagctgagcgtcatcggtaggatctaccacatgaatctcgtcaggatgtggggattctgctcggagtgcgggcacaagctcctcgtcttcgagtacgtcgagaacgggtcactggccaagctgctgttcgacacggcgagcaccaccggagcaaggctccggtgggagcagaggctccgtgttgcgctcggcgtggcgagagggctggcctaccttcaccatgagtgcctggagtgggtgatccactgcgacgtgaagccggagaacatcctcctcgacgaggagctggagcccaggctggcggactttgggctcgccaagctcctcaacagagggaaggatgtgcagatgctgtcgcgcgtacaggggaccaggggctacattgcgccggagtgggcgtccaatctccccatcacgggcaaggtcgatgtgtacagcttcggcgtggtgctcctggagattgtgagggggctccgggtgtcggattggaccgtcgtcgacggagaagaagaggaggtggagatggttttcaggacaactgtcgcggtgctgaaagagaggttgagaggcgaagatcgttcatggctcccggggtttgtcgacccgaggctggacggcaacttctgccggttgcaagcggcggcaatggtggagctcgccgtcgcctgcgtcgaggaggagaggagcagaagacccaacatgaagcttgtagtggaaaagctccttaatttcttgtga

SEQ ID NO: 85025 - DNA, 363 bp, Oryza sativa
  Clone ID: PAT_MRT4530_84203C.1
atggcggcggcggcggcacgcgtggagcttgaccgacaagtcgacgacaacctggaggagttgaaggggtgcgtggatctcgggttcgagttccgctacgacgtaatccccgagctctacgagctgtcgaagtggagcaccagccgcgggacgtccacggcctctggcgcggccgccgcgaagcagaggctaacaccgctcgctaggggcagccgaacgcgctcgcacagaggccgcctcggcatgcgcgagcaagaggattcgcgaccgtcgttggtggagtcgcagcggatgacgccggcggcgcgtggatgcttcatcccgaaccggatggctacaggtgcatcggcgcgcagtcgatga

SEQ ID NO: 85026 - DNA, 272 bp, Oryza sativa
  Clone ID: PAT_MRT4530_84204C.1
ggcaaagcacttgaatttttttttcaacaaatgatatttcatcatccaaggaatttaataataatcgaaatttaaaatccatgaaaaaataaatgacttgtcacacagtttttatcaagggctttttaaacaataatcaaactgctcaattaatccaccccaaaattaaactaattaatcaagcatacaacattgcaaacgcagcctacacgatcaccattgcaacggaccccgtcttgccaacccttttgccggaggagttcgggccggtg

SEQ ID NO: 85027 - DNA, 2254 bp, Oryza sativa
  Clone ID: PAT_MRT4530_84205C.1
ccacgcgtccggggcaggaaacctctcccctcccacgcgccgccgaccgaagccgccgccgccgccgccaccgccgccgcctctccagccgcagccaccgcctctccagccgcagacgccatggaggccgaagcgggcggcgtggccatcgtgtacgacgcgctcccggggctgacactggcgttctcgccggaggaggaggagcacctagagggtgcgactgccgacctaggcggcgcgtcgacctccgcctcggctgcggtggtggaggaggtggaggacgccaccgcggcctactccgtgttccgcaacgagatcacggcggctggggacgcgctcgtcgatatccccgcggcggatttcttctccctcgacgtgtcggcggcagttgaagacgagccggccaccccgcgtgcgttgtcgccgcagcctgctccggaggcgacgctatcgggttctctagctcccgctgagcagccagcgcaggggtcggagcgcgcgtggtttcggggagggaggcggttcaggagccctatgctgcagcttcacaaagagattcttgacttctgtgactttatatcaccttctgctgaagaacaatcttcacgaacagctgctgtgaaagctgtctccaatgtggaggtcttcggatcttttagaacagggctgtttttaccaacaagtgatatcgatttgtatgatcccctggagcataacatttactttgatagcaatgctggaatcgtcatacttaacattttgatggatgaaatagcaatacaggagaaaaagagtaaacacagaaggaaggttgtaatatttgactccagggttaagactccacaagttggcctgtatgctcttgcaaaagcattgtctcagaaaggggttgctaaaaagatacagttgtcagttgttattgtcaatcaagtagattccagcttacttatttttctggtggaccattttttttttctttcatggcaggtaatagcaaaggcccgtgtgccaattgtgaagttcgtggagagaaaaagtgaaatagcttttgacataagttttgacatggatggtggaccacaagcagcagacttcatcaaggattatgtgaagaagtttcctgctttaagacatctgtgtatgattctgaaagtttttttacaccaaagagagcttaatgaggtctatacgggtggaattggttcatatgctcttctcactatgctcatcacacatttacagttgatctggggaggcaaagatatactggggtatcgtaaaaaggagcacaatttggggattcttttgatcgcattatttgatttttatggacgcaagttgaacaattgggatgttggaatatcctgcaattctgctaggacctttttcttgaagactgataaaaactttgcaaatcctgatcgagcataccttctagctattcaagatcctatggtaccagataatgatattgggaagaactcatttaactatttcaaggtgaaatcagcattttcaaaggcttattctgtgttaaccgatgcgaacttgataacaagcttggggcccaataggagcattctgggtaccattgtcagaccagactccgtgctcctagaccggaaaggctggaacaaggacgctacaatacctgacatgttaacagaaccctgggaaccattaccccgtcagtttgatagcgataatgatgcagtctataattggcatgtgatagatgatgaaccactgcccaggaatactcgatcctcatcggaggacacaaggccatcacctacacaaaaaaggaagtcttccaaaccaaaacagagatcgcggaaaaaggccaaggctgattcttcgagtggtaacaatgctgaaaatggtttcaagcgggggaaaggattagcacaatgtgatagatcgcatcaaagtgcaggaagcagcagacggagcaaagggccgagagagtatgacagatttacaaataccctcccacaatatactcagcacattagtaggtggtgactttaggctgttactgatagcatttacagtacagttcgggattgggagatcccacgaggttttgacaggcagaatggcgccttggcagacgtcgaagttcaagcagctttctgtagccatatgtatgatttattatttatttgtttgtctaaggttattcggtcctttgtaacgccgatgaaaccgatatattcagttatattatcatcgtatgaactgcaatttcgcc

SEQ ID NO: 85028 - DNA, 653 bp, Oryza sativa
  unsure (1)..(653): unsure at all n locations
  Clone ID: PAT_MRT4530_84206C.1
gcggagtgggcggcggcggcacgtacacggcgaacagcacctacgacaccaacctccagagcctcatcgccgccctccagcagaacgcctccacgtcgcccactctcttcgccgccggcgcgctcggcgccgccccggacgccgtctacggcctcatcctgggggggggcgacgtgagctcctccgactgctacgactgcggcaccagggccggccaggacgtcgccccggcgtgcaaccgcaccagggacgccatcctcgtctacaaccagtgctacacccgcttctcggcggccggcgacttcctcgcctccgccaacaactccggccaggcgccgctcatgaacagcgacaacgtcaccacccgccgacgtcgccggctacgaccgcgccgtcacggaactcctcagcgccaccctgatgtacgcggtagtgaacaccacgaggctgttcgccacggggcagcgggtgggcgccgacccggggttcccgaacatctactcggcggcgcagtgcacgccggacctgtcgccggcgctgtgccggagctgcctcnaggacctcgtcgccaggtgggggaagacgttcccgcggaccacggcgggggcgaggatcgtcggcacgaggtgcagcttgagggcggaggtatccca

SEQ ID NO: 85029 - DNA, 1923 bp, Oryza sativa
  Clone ID: PAT_MRT4530_84207C.1
atggcgccgcctccgccgccgacgcgatgcctccccgtcctcctcctcctcctcctcgtcgtagcgccactcctcgcgcatggccgccgccccttcatttccgacggcggcaacgctaacgctaacgcgaacgcgagcgtgctgcggctgccgtcggcggcggcggcggcgggggaggacatgggctgcgagatgtcgtacgggttcctgccgtgcacgacgacggcgtgggggaacctgttcctggtgctcgcctacggcttcctcatgttcaagtccgccacctacctctcctccgggagcgagatgctgctccagatcctcggccccggcatcgtcggcggcctcttcctccccatcctcggcgccctccccgacgccctcctcatcctcgtttctgggctctctggcactaaagaggttgctcagagtcaggtcttgattggaatgggcctgctcgcggggtcaacgatttgcagaacatccttttacctgaacaagaaatctgtttttaatttgcaacaaggccatgctgggctcatggcaggctctggtgtttcaactgataagcaaaccagctatgcagcaagaatcatggcgatatctattctcccctttattattgttcaaataccgaagatttttaagctccattctggtcatcagataacagtccttattggacttatagtggcagctctactcttgctttcttattgtctatatcaggtctttcagccatggatccagaggagaagattagagtatacaagactgaagcatgtaatgtctggacttctgagacatgctcaaaagcattcaattggtcgccttcttgacgatgagggaagacctaatgtttcggtgatagagaagttatttcacaggattgatcaggacaatgatggaaagctagaacgcggcgaattacaagctttcatcgttggtattaactttgaagatattgactggaacagtaaccttgctgcagatcaagtcatggctgactttgatacatcacggaaccattttattgaaaagggtgaatttgttaatggaatgttgagatggctggatgaagctaagcgtactgttacatctggtgcctactcaaaaaagttcttgaatgattttcatgcgagaacaagggatgaacaaaccggtctgctcgacaaggatgaagaggaaggtgaagctgatggaaatccaacctggacttgcattaaggccatcttacttttgcttctgggaactgcaatggcagcagcatctgcagatcctcttgttgatgctgtgcacaatttctcaaatgctacacatattccctcctttttcatctccttcattgtaatgcccttggctactaattccagcgaggctgtctcagcaattatatttgctagccggaagaagaaacggactttgtcactaaccttctctgaggtctatggtggagtgaccatgaacaacacactctgcctcgccgtgttcttggcccttgtttacgtgaggggcttaacctgggatttctcatcggaggtactcatcatcctcctcgtgtgcatcataatgggcctcttcaccagcttccggactgatttcccactctggacatgcttcgtcgccttccttctctacccgttgtcgctgatcatggtctacatccttgactacaagtttggatggtcgtaggcctgcaacgttgatacatctgatatacacatatagatgacaagcagtataattgatcagtaaccactcatctaccttttgtaagtcttatcgtttaccatgttacctggaaaggatgcggattgcaagatatagatagatatgcagaatgaactttgttattagagttgaaagcattatctaattcgaaacatgcgcatcatacatgtttccttcttttctttttcatct

SEQ ID NO: 85030 - DNA, 463 bp, Oryza sativa
  Clone ID: PAT_MRT4530_84208C.1
aaacaaaaaaaggggggggagtaaaaaaaacccaccccccaaaagttcaacaaaaaaaattcaggggtccttccccccaaaaatttaaaaagaccccccccccccaaaaaaagggggggggaaaatatgcccctgaagcagggcggggcccaaaaaaccggcccaattcaaaaagaggggggccaaaaaatcccctaaatttggccctaaaacaaggggaccccttttttttcagcccctaggggtccccaggagcaattcccaaatcccaacccggtaaagagcccccatttgctttccctgaaaaacgaaggatccccattgggttggattattagggaggcaaacccccggcaggaaacaaacccccccagggaaaccccaccggggcagggggctgcttcaaccccaccccccggaaagggaggccccccgcaaaaggattgccctcgcgggggggaac

SEQ ID NO: 85031 - DNA, 222 bp, Oryza sativa
  Clone ID: PAT_MRT4530_84209C.1
atgaacctcaccatgggccacaaggtcgtctacacgacgaacaagctctatgagttcatccgcggtcgggcgggggcgggggcgggggcgggggtgcggactgcgggcggcggcgtggccgcgtggaggccggccagcgaggagggctgcacggcaggcggcagcctatggctctaccgaagggaaggcgggaggcgggaggcggcagcaatggatatgtga

SEQ ID NO: 85032 - DNA, 196 bp, Oryza sativa
  unsure (1)..(196): unsure at all n locations
  Clone ID: PAT_MRT4530_8420C.1
cggaggntgtacgacgnangtnnttnnntcgttcttggngnccatgggncntaatgcncgcggcggctcgtaatgaagtccatcgtncccntgntcatggctggtttgctcggtatctacgacctnatnatcgncgtcatcatcantacagngatcaaccccaaggntaagncgtactanctctttaacggctacg

SEQ ID NO: 85033 - DNA, 341 bp, Oryza sativa
  Clone ID: PAT_MRT4530_84210C.1
gctgccctgatggaggacaccatcatcgctgcgatggtgaggtatccagacgcaggactatgctccctctgctcccttcactccccacacacctgacggctggagctgagcgtctacctagctagctatgattatatgtcttacctatctcacatgtgggctcatatcttactgctgcagcctcatgtgcatgtgcccttaccttaatgacgattatgttgaacctctcgcttggcactatgactatagagacatcggcttatgcatgagatgttgatgacagtcaccacttgtggcaactatcgctgtgtacagaatgtgatttatattgcccttgtgcc

SEQ ID NO: 85034 - DNA, 3064 bp, Oryza sativa
  Clone ID: PAT_MRT4530_84211C.1
gtttccatcgagggagcagtaaaaaaaccattccccggagcgctcgaggcgaatcgcgaattcgacatttcgagtttccacgcgcgccacctgttcgacgaaacgcctgcctgcgcggtttcgaggttccacgcgcgccacctgttggacaaaacccctcttcgcgcgtgctcgggccgcaatggagggttcacctagcaagagcaggggggtcacgggcccagcgcacactgacgacggggactggttcagcgacgtcccggacgacatcattctcaatatcatgtccttcctgaccacgcgccaggctgtgcagacgtgtgtgctgtcgcggcggtggcgcaacctctggcgctccgtgccctgcatcaactccgacatagacgagttcacgcgggactccgactcggaaggatactatgatgaaaagacggaattggcgttcattatgttcatggagagggtgatggagctccgtgaccctgctgccttgataagcacgtttcagttcaggtgcaaatttgaattggatgaaggattcgatgatatctcggaccctgaagatatcaacgcatggattagccacgctgtgcagaagcaggcacgggttctggatattgttgtgctgtgtgacaaattgtatctcgaccactccgagtttgcttcccgctatctcacaagaattgagttcaccagtgttgttttgatggaaggattcttcaagcaactcgagatgggctgtccagcatgggaaagtctcttcttagatgaatgcgccgttaatgatgttgagatctcctcccaaacactgaaggttttgaccatcaagaacactctgttctccagtgacaagactactatttcgaccccgagtgttacttatctgaagttgtggaggcctgtggatagctgtgtgtttaatgacatgccattactagtgacttcattactggtactttatcatgtgcaagactctggtgatttcttccaaaatctcaggagcctttctgctgctaaaagtttggagttcaattatattgggaaagagctgacaatggaaaacaatttgcaattgtacccaaaattcaacaatcttgtcagactgactcttggtcaatggtgtctggatgcaaacttctatggattgatggtcttccttcagacttcaccaaaactggagaagctaactctaaagattgaaaaggaaaaaacacaaagaatcattggcaagattgaagatagatcatttacatgtgagcaccttacgcgtgttgaaatcgtatgctcggaggatgatcccctggtcaaagatgtggtcaccttctttgttaatagtggactgacctctgctcaggtcgttggtgtggtgcgcgcgcgggtggcgaaggcaggcggtgcgtggtgggggcacacccatctcctcgaggatgacgccgccgtagtccgggcaggcgacgatggagtcttcgtgaggggcagcgtgcacgaaggggtcacagctgtagcaccagtagtaggaggacgccggcgcggcactggtggcggaaggggaggaggaggaggaaaaggaaggggaagaagccatcggaaaaggatctgcctaatcactttttgttctctctcagatctgcccagaaaccaccgcaagaagggttttttatttggtttgttgtttaccagcggtgatcaaagacttagtttctcgagggcagcacggttgcagcaacagcaggaggaggaggagcggtgtggtggtgggagttcccacgcgctccacctgttcgacgaaacgcctgcccgagcggtttcgagtttctacgcgcgcgacctgttcgacgaaacgcctctgcgcgcgtgctcggccgccatggaggggtcgcctagcaagaggaggggggtcacggccccagcgcacactgacgacggggactggttcagcgacgtcccggacgacgtcatcctcaacatcatgtctttcctgaccacgcgccaggctgtgcagacgtgcgtgctgtcgcggcggtggctcaacctctggcgctccgtgccctgcatcaacgccgacgtcggcgagttccagcggagcgacactgagtgggaagagtatgatcaagagagggagtcggcattcaagatgttcatggatagggtgctggagctccgcaacccggccgccccgatacgcacgttccggttcaggtgctgcagattggacggattcgaaggcacctcggacgaggcagatatgaacagatggattacccacgctatgcagaagcagccctgggttctggatattctcgtgctgtatgacgcattgaagctcgatcactctgcgtttacctgccgctacctcacaagaatcaagttcatcaatgttcttatgatgccaggtttcttccagcaactcgagatgggttgtccagtattggaaaatctctttttagatgaatccatcgttgcggatgttgagatctcctccaggacactgaaggttttgaccatcaagagcactcagttctcctataagttcaggactactatttcgaccccgagtgttacttatctgaagttgtggaggcctgtgaacggcatatatgtgttcaacgacatgccattactagtgacttcaattctagtactttatgatgtacaagactctagtgatttctgccaaaatctcaggagcctttctgctgctaaaagattggagttcgattattttgggaggaagctgacaatggaaaacaatttgcaattgtacccaaaattcaacaatcttgtcagcctgactcttggtcaatggtgtttggatgcgaacttctatggattggttgtcttccttcagaacgcaccaaaactggagaagctaactctggaacttgaaaagaatacgccggaaagaatcattggcaagcttgaagatagatcatttacatgtgagcaccttacccgcgtcgaagttgtatgctcggagggtgatcccctggtcaaagatgtggtcaacttctttgttaatagtggactgacctctgctcaggttcagatcatacgctggtgctag

SEQ ID NO: 85035 - DNA, 269 bp, Oryza sativa
  Clone ID: PAT_MRT4530_84212C.1
gcatcaagaactattcttcttcaagctgtagcctgtaggaggaggttgcgtcagatggagttcccccattcacttctggttcttgtttgcttcttcaggtagagttgatttggttttgataattttcgtgttcatgattcatcgggagatggatttgtttctcagtatcctcatgtatgctgtagctggattgtatcaaagcaaataaatcgacgatgagtaaagagattatatgtgtttctcgatcttatttaaaaaaaaaaaaaaaa

SEQ ID NO: 85036 - DNA, 288 bp, Oryza sativa
  Clone ID: PAT_MRT4530_84213C.1
atgtcggtggaaaccgccgccctccagctctcgggagagaaagctcgagccctcacctcaatccgtcggtacagcaacgcgcccatactggctgcacagaggcttgacaccgacaaaatccatttacctcacctcaccatccaagtccatccactggatcgagacgccgacgcggttggagaggagaagagaggaaagcggcggcgagtggtcacggatctgaaaatgatagacgggtcactggatccgtcgccgtggagacaaaatagaacagctaaggatttttga

SEQ ID NO: 85037 - DNA, 395 bp, Oryza sativa
  Clone ID: PAT_MRT4530_84214C.1
aaactctcttgattccggtgaaattcccatgctcagtatggatacaaccattgctcacatcatgaatcaacaataatacatcaagatcaagtccttcaagtgctggaatccgattcagccaccttctacattgttgacttcaaacggccgccaaatctacatacgagctctgtttttggcccatgagtatttggtggaatgctcttggagccctctttccaaccgatctagcctcatctccatattccttctctgacagttgtaatcacagaaacaagatgtagtgtcacctatattgggccaatgggcttgaaattttgtttgggaccccagcccaagtggggcccatgtgaggtacgccccaactaggtggagcacaaacctagggaccccta

SEQ ID NO: 85038 - DNA, 403 bp, Oryza sativa
  Clone ID: PAT_MRT4530_84215C.1
agggaaaaccgaatattggagctggcctttagtcaaatgtaaattttaccaaaaccaggccccaattgaatcaggctcaacttggtgaaacatttaaggggggatccaacaaaacaaacctaaatggaaaagcagggcttattacaggcctaaaaaacccctcaccctccaatgcaggcatccctttccctttattattccaagctttgggcacaaaaccttcaagggttcatgtataccggtccttggcatcaacggtgacaaaaactcaaaacccgcgggttgaattttacaggctttttggtgttgcaaagaccttctccgcggggatgccaaacccctgggagaactttccagaaggagcacttgcaccgaatttggcaatgccaattaccttgccttt

SEQ ID NO: 85039 - DNA, 496 bp, Oryza sativa
  Clone ID: PAT_MRT4530_84216C.1
ccggccgggatcctcagcaatattgtctacccatctggaatcttggtgaacactagtgcagtctaatcagcaatggtaggctacacgcagcacgtatctcttggcctgggtgccataattgctatttttgcaagaggcactactgcaagcaccactattcagcatgggccaccaacattagccatgggcaccatggcatccaggaatgcagcacatgatgcaaacgatgggcatgggtagctccacagacatgttcatggagaagacaaaggagctcctgcggacaccaacgatgaatgcagctacaaagcatgaagcctcagggccactgtggaaccagatgctacatgatgcatagcctgcaacatgttattcgagctagactcggacagcaacagacgatgaatatggggacgcagatgcaatacatgcgcaacatggactctgtcaactaacaactatgttactggggttgatgaagatcaaacgatggata

SEQ ID NO: 85040 - DNA, 382 bp, Oryza sativa
  Clone ID: PAT_MRT4530_84217C.1
ttattcacttttaatgcaaatacacttttaatgcaagacctggtttccttctcttttcttatttatttacttgccaaatcatctttcatcgtaagtggcagcttattaaggcaattgatactgcacgaaagaactgcctgtggaggggaaacaacccatcttctaccagaaagtccttagcttcttgggacagaatgtgcacacctaaagagaaaggggtctgggagtgataaactttagagttcaaaacattgctttactcttaaagcatatggtaaaattttataacggtgctgatcttcctcgggtaaatttgatctctcagacctattatgcttctaggattcctcacttggtgttgaataagggttttcccccaaaa

SEQ ID NO: 85041 - DNA, 261 bp, Oryza sativa
  unsure (1)..(261): unsure at all n locations
  Clone ID: PAT_MRT4530_84218C.1
ggaaaatccaaaacacctccaagatttgccgttttgaggacatagtaatagaatcaggacacagtgaaaacggnttttgcggaggatgaggctagtaggtattcccgagttttccgcttanggccaaacaaagcgggcaaaccannccaaaatttttctactttgtccaataagncacaaggcttataataataaatcntantccttacaaacaggcaggaagggggacaaaagctttccttcttctatggcctttcctgg

SEQ ID NO: 85042 - DNA, 1543 bp, Oryza sativa
  Clone ID: PAT_MRT4530_84219C.1
tcgcgatctataactagcgcggcagaggaaagaggagaagaaaagatggcggctttcgcctccgctctccgcgttctcccctcgccgccggctgcggtgcctcgtcggcttcgctcgagagaacaaaggcagggctgtagatctcgaaggtattcaaaagtcgtggcttactacgctctcactactccgccgtataaacttgatgccctggaaccttatattagcaagaggacagttgaacttcactggggtaagcatcagcaagactatgtggatagcttgaataagcagcttgctaccagcatgttctatgggtacactctggaggaactaataaaagaagcatacaacaacggcaacccattaccagaatataataatgcagcacaggtatggaaccatcacttcttctgggaatcaatgcagccagaaggtggtgggtcaccagggcgaggtgtcctgcagcagatagagaaggattttggctcttttactaattttagggaagagtttatacgctcagcattatcacttttggggtctggctgggtttggcttgtctgtaagttttttattttcattttctttgaagttcagcctgtacaggcactgttggttcaatctgacttcctgaaatgttgtttctacaatctaaatttagtttttaaagtctgatttatacacgtctggtctatcttttgcttgtttcagtgaagagaaaagaacgaaaattttcggtagtccatacacaaaatgccatcagtccacttgcacttggtgatattccactcatcaatctagacttgtgggagcatgcttactacttggattacaaggatgacaggcgaatgtatgttacaaactttatcgaccatcttgtctcttgggatactgtcactctacgcatgatgcgcgctgaggcttttgtgaaccttggtgaaccaaatatcccagttgcatgatatgagatgatatggatatgacctagagatatctatgcatgtattctcatcatgagcgacgccgaggaatttctagatcacatgatacctgatgctgagattcgcatgcatgagagacacttacaccacctcatgtcctgcacggtgaaatagtggaaatctgcttgaggataaacagctttggttttatcgtcaccttggaattttgatatagcatcaaagcaaccttgacactagagcatgattacagagtatgggccatcgatctaacttcttcttgaagctgcaccacttcttgcaaacgtttatgcttcagaactaggacccatggtcccattatgctttttagattagatcttcatcctaagtttcgacaactcatagctgtagtttttgtctttcttttggcacagaattctgtcattgttaagcctagctttgttccctctattatgtaacctgacctttatgtccccattgctcattccttttgtcgacattgaattatttgatgcgatattttcgcatccattactaagcttttgctcaaagtcaaaaaaaaaccttcagcccgaaaaaaa

SEQ ID NO: 85043 - DNA, 561 bp, Oryza sativa
  Clone ID: PAT_MRT4530_8421C.1
gatcccggtccggacgcgtggggccggaaaaaccaaacttcctcctccagctacgtacttagtatactacaccacagctgaaatggctgcatcagtgatgatcaccaggtggcacccggtgctcgcgctggccgtcctcctcgccgccgccgccgcctcgccacccaagacgacggtctccggctaccgtcccgatcaccatgacgacgaccaccaccaccaccgccaccaccacggcggccacgacgccgccttgtcggtcaccaccgatcaccgccaccaccatcatggcggtgaagccgcctcgtcggtgatcaccaatcacgaccacggccatcaccatggcggtggcggccacggcggtgacggcgccgccgcctcgtcggtaaccgatcaccacgaccacggccacggtcaccatggcggcggccacggcgggcgccgcgcgttgttggcatccaccaacgacgacacgtcgtccggctgttgccccggcggcggccaccaccacggccacggtggcggcggcggccatgggcccggtggagactacatatgcct

SEQ ID NO: 85044 - DNA, 5064 bp, Oryza sativa
  Clone ID: PAT_MRT4530_84220C.1
atgccgcgctacaagcctgagtacttgtttggtgtcgatggttttgtccaggagttgcgtacgatgtcctttgtcattggatttgagactgcccctttttatgctcagattcgtcatgatcgtcatgaagagaagtgccgagtcaaagtcaccttgaacagtaatagtgaagatattccctcagtgatgttcgaagctggaggaagaaactacatccatgcatgtcaggaggtggcaaggatcgccataggagagctccgtgatcgctacagtgatcagttggccgacactgagtatcgctaccatcctcgccaaccccagggaagtgaccgtggcagctaccttgagactgaaggaattgagaatgatgctaccacaaggcatttggttgagatgctgtgggctatggatgaaagtcgtgcggagactgtgttagcggctcaagatcgtgaagaccggaatcgtggtaagatttgcaagttagaagacaaggtggatcgtttggagaaggaattagctgagttgaagggagaagcaccgccgcagaaggccaggattcgtcttaccgcaaggaagagagctttatttgtccctcgctatcaattggcgccaaagattcgtgtggtggagaaagaagttgccccaactttagcagatcctccggttatcatcataagtgatgatgaagaagaagaatccaagcgcaacaattccaagattgagtggttttccccggtttctcttcttgtgccctgcccatgcctgatggtgaacactcgcagcaacgggaatggccccagtaacaataacaatggagagaatcccactcttgctcaagttcttgctcaacagactcagcttatgaatatgatgatgcagcaacttcagaatcaaggaaataaccatgcatctcctcagaataagttagcagaatttcttcgtgtgaggccgcctattttctctagcaccactaatcctgttgaagctggtgattggttgcatgccatagataagaagttggatttgcttcaatgcactgatcaggagaaggtctcatttgcatcacatcagttgcatggccctgcctctgaatggtgggatcacttccgccttaacaggactactgctgaacctatcacttggcttgaattcaccgctgctttccggaagacgcatataccatcgggagtggtgtctctcaagaagaaggaattcaggtcgctcacccagggatctcgctctgttacggagtatttgcacgagttcaatcgtctggctcgttatgctccagaagatgtgcgcaatgatgaagagcgccaggagaagttcttggaaggacttaatgatgagctttcttacccactcatgactggagattatgctgatttccagaagttggtggataaggctattcgtcaggaggacaaatacaatcgcatggagcagaagaaacgccggattgctcaattcaagacacaacaggggaataatcagaggccgcgtcttactttaggaccccagtctatgccacagggaggttcttcgtctgttgttcgtccgcagcgtcagttcttcaacaacaatgctggcaacaatatccgtaatcaagctccacgccctgttgcagctccaacacagcaacaacctgccaagagggagcaaggcagcaagtccgtggtgtgtttcaactgtggagacccaggacattatgctgataagtgtccgaagccccgacgcgtgaaggcccgtgtcaatcatgttgctgctgcagaagctcaagatgctccagatgtgattttgggtacgttccttgttaactcagttcatgcaacagtgcttttcgattctggtgctacacattcattcttatctatgagttttgcgggaaatcatgggatggaagtagaagatcttagacgtcctttgatggttagtaccccaagtaatcaagcactctctttgcaacgtagcccctctgtcagaatagaaattcaaggaataccatttctggccaatcttatcttgttagaatccaaagaccttgatgtcatcttagggatggactggttagccagatataaaggtgtgatagactgtgctaacagaaaagtaactctcaccagcaatgatggtcgagttgtgactgttcatgcattgtcttctgagactttaaggtcaagactgaaccaaataactttggaagagattcctgtagtccgggagtattccgatgtgttcccagatgatttacctggtatgccgcctaaaagggatatagagttcagaatagatttggtaccaggaacaactccgatccataagagaccttatagaatggcagccaatgagttggcagaagtcaagaggcaagtagacgatttgcttcagaaaggatacatcagaccaagttcatctccatggggagctccggttatttttgtggaaaagaaagatcatacccagaggatgtgtgtggactatcgagccctaaacgatgtgactatcaagaataagtatccgctacctagaattgatgatttgtttgatcagcttaaaggtgctactgttttctccaagatagatcttcgatcagggtatcaccagttgagaatcaaagaggaagatatacctaagacagcatttaccactaggtatgggttgttcgatgtgtttatggaatacttagacaagttcgtggtggtctttattgatgatattcttatctattctcgaaccaaagaagagcatgaagaacatctttgccttgcactagagaagctacgagaacatcaactgtatgctaagtttagcaagtgtgaattttggttgtctgaagtgaagttccttggtcacgtcatctcagcaggaggagttgccatcgatcctagtaatgtggaatccgtaaccaactggaagcaaccaaagacagtttcagagattcgcagtttcttaggccttgcaggatattatcgaaggtttatagagaatttttccaagattgctaagcccatgacacgattacttcgaaaggatgtgaagtacaagtggtcagaagaatgtgagcggagttttcaagagttgaagaatcgcttaatatcagctcctattttgattttacctgatccaaagaagggtttccaagtgtattgcgatgcatccaaacttgggttaggttgtgttctgatgcaaaatgggaaggtggttgcctatgcatctcgtcagttacgtccgcatgagaagaactaccctactcatgatattgagttagccgtagtagttcatgcgttgaaaatttggcgtcattatcttttcggtactcgtacagaggtatataccgatcacaagagtttgaagtatatctttactcagccggatctgaacatgagacaaaggagatggttggaattaattaaggattatgacatgggaattcattatcacccggggaaggctaatgttgtagcagacgctcttagcagaaaaggctattgcaatgctacggaaggacgacagttgccgttggaattatgcaaggaatttgaaagattaaatttgggaattgtcagtagaggttgcgttgcagccctagaagcgaagcccactctaattgatcaagttagagaagcccaaattaatgatcctgatattcaagaaatcaagaagaatatgagaagaggaaaagctattggtttcttggaagatgagcaaggaactgtatggttgggtgagagaatctgtgtccccgacaacaaagatttaaaagatgcaattctgcaagaagctcatgatactttatactccattcaccctggtagtaccaagatgtaccaggatctcaaggaaagattttggtgggcaagtatgaagcgtgaaatcgcagaatacgtagtagtatgtgatgtttgtcagcgagtcaaggcagaacatcagaaacccgccggtttgttgcagcctttgaagattcctgaatggaaatgggaagaaatcggtatggattttatcactggtttgcccagaacgtcatcaggccatgactctatttgggtaatagtcgacagacttaccaaagtggcacatttcattccggtaaagacaacttattctagaagtcgattggcggaattgtatatggcaaggattgtgtgtttgcatggtgtccctaagaagatagtgtctgatcgaggcagtcagtttacttcaaatttttggaagaaacttcaggaagagatgggttctaagctgaactttagtactgcttatcatccgcagacagacggacaaaccgaaagggtgaatcagattttggaagacatgttgagagcttgtgctttagatttcggtggaagttgggataagaatctaccttatgcagaattttcgtacaacaacagttatcaagctagtctacagatggctccttacgaagcactgtatggtcggaagtgccgcactccgcttttgtgggatcaaacgggagaacgtcaggttttcgggacggatatcctaagggaagcagaagaaaaggtgaaaatcattcaagaaagattgcgagtggctcagtctcgacataagagttatgccgacaatcgctgcagagatttgagttttgaagaaggagattatgtgtatcttcgtgtcacgcctcttcgaggtgttcatcgttttcacaccaaaggaaaattggcaccgcgttttgtgggaccttataagattgtcagtagaagaggagaggttgcttatcaattggaattacctcaatccttggcaggagtccataatgtgttccatgtgtcgcaattgaagaagtgtttaagggtacctaccgaagaagctaatcttgaacagatagaagtccaagaggatctgacctatgttgagaaaccaatccgtatcttggaaacgaatgagagaagaaccaggaatcgagttatccgtttttgcaaagtccaatggagtaatcactcggaagaggagtcaacttgggaacgagaagatgaattgaagtcagctcatccacatctgttcgccagttcttccgaatctcgaggacgagattctgtttaa

SEQ ID NO: 85045 - DNA, 894 bp, Oryza sativa
  Clone ID: PAT_MRT4530_84221C.1
cggacgcgtgggccagcccaaaaatccgctcccgccgtgccgacctcttccgccgctcaccggcgctattcagccgcctgccaccgctgctcccgcagactgcccgagctgagccaagctaagcgagctcgagccaagcccgagctgagctcacgagcccaagctttttttccacccctacccgcagtccccgtgccgcgccgctcgcaccactagcatcgccacacctcaccgcgcacccggccttcgcttggtttccccaaatagccaccgcaactaccacccaaccgtgaacccgaggtcaccgccgcgtgactgacacctccggccgctgtttccgacctcctcacggtgcgccgtcacctccttcggctccgcaagggcaaggagatcctcggccaccacctcactgctgccgggagccgttgtaaccatctcccctcgctccccggtgagtcccgctgcaaacgccatgctcggccggcgttcctcgccatgccgcgacgcctctccctcctctaacccctcctctttgctccccaggtcccgctggccctcggccgcacctccaccactctcaggagtcgccggagcgccgtccccgaccccaacccgagaagcgccgccgctaatccttgtcgtcggccgccttcccatcttcgcctcgccatcacgtcctctcggtgagccccctctccttcccccgccacctcccatgtgcgacgccgccgctcgccgctgacgaccatcgggcccggcggcgccgcctcctgatcggtcagccggctgctgccgccctgctagcccatgaccgcccgatccccctctgggtgatctaggctgtgcacgtggccctccccgtgccacccggcatcggtgcccccgtggcgccat

SEQ ID NO: 85046 - DNA, 329 bp, Oryza sativa
  Clone ID: PAT_MRT4530_84222C.1
ataaaggcggggatggaaatttgtttttttcaaactttcgagggaagttaacggagctttttttttattaaaagggagcaaaaaaccggcaattttgcaataaaagaaaacaaaaaatctggaagtccctttaaaaaacagcctaaaaatccctccacaaaattggtgtttggtttaaaaaaaccccggacaagagcgcaaattccaaaataaacctatggcccagagacaacaacggaaagaacaatgaatggctggataaactttttagccgggccccaatgacggttgaactttttattccaggcagtataatatttcaaaatttg

SEQ ID NO: 85047 - DNA, 4775 bp, Oryza sativa
  Clone ID: PAT_MRT4530_84223C.1
atggttgttcagaatggttgggcctatgcaacaggggtttacacacatatgccgcgctacaagcctgagtacttgtttggtgttgagggttttgtccaggagttgcgtacaatgtcctttgtcgttggatttgggactgcccctttttatgcccagattcctcatgatcgtcatgaagagaagtgccgagtcaaagtcaccttgaacagtaatagtgaagatatcccatcggtgatgttcgaagctggaggaagaaactacatccattcatgtcaggaagtggcaaggatcgccataggagagctccgtgatcgttacagtgatcagttggctgacactgagtatcgttaccatcctcgtcaaccacagggaagtgaccgtggcagttaccttgagactgaaggaattgagaatgatgctaccacaacacatttggttgagatgctatgggctatggatgaaagtcgtgcggaaactgtgttagcggcccaagatcgtgaagattggaatcgtggtaagatttgcaagctagaagacaaggtggatcgtttggagaaggaactagccgcgttgaagggagaagcaccacctcagaaggtcaggattcgtcttaccgcaaggaagagagctctatttgtccctcgctatcaattggcgccaaaggtccgtgtggtggagaaagaagttgccccagcagatcctccggtcgtcaacatggtgaacactcgtagcaacgggaatggtcccaaccccaacaaccccaataacaataacaatggggagaatccaacccttgctcaagttcttgctcaacagactcagctaatgcacatgatgatgcaacaacttcagaaccagcagaaccaaggaaataaccatgcacctcctcagaataagttagcagaatttcttcgtgtgaggccgcctattttctctagtaccactaatcctgttgaagctgctgattggctgcatgccatagagaagaagttggatttgcttcagtgcactgatcaggaaaaggtctcatttgcatcgcatcagttgcatggccctgcctctgaatggtgggatcacttccgtctgaataggactactgctgaacctatcacttggcttgaattcaccgctgcttttcggaagacgcatataccatcgggagtggtgtctctcaagaagaaggagttcaggtcgcttacccagggatctcgcactgttacggagtatctacacgagttcaatcgtctagcccgttatgctccggaaaatgtacgcaatgatgaagagcgtcaggagaagttcttggaaggacttaatgatgagctttcttacccactcatgactggagattattctgatttccagaaattagtggataaggctattcgtcaggaggacaagtataatcgcatggagcagaagaaacgccagattgctcaattcaagacgcaacaggggaataatcagaggccgcgtcttactttaggaccccagtctatgccacatggaggttcttcgtctgtcgttcgtccgcagcgtcagttcttcaacaacaatgttggcaacaacatccgcaatcaagttccacgtcctgttgcagctccaacacaacaacagcctgccaagagggagcaaggtagcaagcccgtggtgtgtttcaactgtggagacccgggacattacgctgacaagtgtccgaagccccgacgcgtgaaggttgtccctgtccagagcaactctaccgcaccagcatcagaggctcgtgtcaatcatgttgcagctgcagaggctcaagatgctccagatgtgattttgggtacgttccttgttaactcagttcctgcaacagtgcttttcgattctggtgctacacattcatttctatctatgagttttgcgggaaatcatgggatggaagtagaagatcttagacgtcctttgatggttagtaccccaagtaatcaagcactctctttgcaacgtagcccctctgtcagaatagaaattaagggagtaccatttctagccaatcttatcttgttagaatccaaagaccttgatgtcatcctagggatggattggttagctagacataaaggtatgatagactgtgccaacagaaaagtaactctctccagcaatgatggtcgagttgtaactgttcatgcattgtcttctgagtctttaaggtcaagactgactcaagtaactttggaagagattcctatagttcgggagtatcccgatgtgttcccagatgatttacctggtatgccgcccaaaagggatatagagttcagaatagatttggtacctggaacaactccgatccataatagaccttatagaatggcagccaatgagttggcagaagtcaagaggcaagtggatgatttgcttcagaagggatacatcagaccgagttcatctctatggggagctccggttatttttgtggaaaagaaagatcatacccagaggatgtgtgtggactatcgtgcactaaatgatgtgactatcaagaataagtatccgctacccagaattgatgatttgtttgatcagcttaaagataagtttgtggtggtctttattgatgacattcttatctactctcgaaccaaagaagagcatgaagaacatcttcgccttgcattggagaagctacgagaacatcaactgcatgctaagtttagcaagtatgaattttggttgtctgaagtgaaattccttggtcacaaagatgtgaagtacaagtggtcagtagaatgtgagcagagttttcaagagttgaaaagtcgcttaatatcagctcctattttgattttacctgatccaaagaagggtttccaggtgtattgcgatgcatccaaacttgggttaggttgtgttctgatgcaagatgggaaggtggttgcctatgcatctcgtcagttacgcttgcatgagaagaactaccctactcatgatcttgaattagctgcagtagttcatgcgttgaagatttggcatcattatcttttcggtactcgtacagaggtatacactgatcacaagagtttaaagtatatctttactcagccggatctgaacatgagacaacggagatggttggaattaattaaggattttgacatgggaattcattatcacccgggaaaggctaatgttgtagcagatgctcttagcaggaaaagctattgcaatgctacggaaggacgacagttgccattggaattatgcaaggaatttgaaagattaaatttgggaattgtccgaagaggtttcgttgcagccttagaagcgaagtccactctaattgatcaagttagagaagcccaaattaatgatcctgatattcaagagatcaagaagaatatgagaagaggaaaagctatcggtttcttagaggatgagcaaggaactgtatggttgggtgagagaatttgtgtccccgacaacaaagatttaaaagatgcaattctgaaagaagcccatgatactttatactctattcaccctggtagtacaaaaatgtaccaggatcgcaaggaaagattttggtgggcaagtatgaagcgtgaaatcgcagaatacgtagcactatgtgatgtttgtcaacgagtcaaggcagaacatcagaaacctgccggtttgctgcagcctttgaagattcctgaatggaaatgggaagaaatcggtatggattttatcactggtttgcccagaacgtcatctggccatgactctatttgggtaatagtcgacagacttaccaaggtggcacatttcattccggtaaagacaacttattccggaagtcgcttagcggaattgtatatggcaaggattgtgtgtttgcatggcgtccctaagaagatagtgtctgatcgaggaagtcagtttacttcaaatttttggaagaaacttcaggaagagatgggttctaagctgaactttagtactgcttatcatccgcagacagacggacaaaccgaaagggtgaatcaaattttggaagacatgttgagagcttgtgctttagatttcggtggaagttgggataagaatctaccctatgcagaattttcgtataataacagttatcaagctagtcttcagatggctccgtacgaagcactgtatggtcaaaagtgccgcactccgcttttgtgggatcaaacgggagaacgtcaggttttcgggacagatatcctaagggaagcagaagaaaaggtgaaaatcattcaagaaagattgcgtgtggctcagtctcgtcataagagttatgccgacaatcaccgcagagatttgagttgtatcctaagggagattatgtgtatcttcgtgtcacgcctcttcgaggagttcatcgttttcacaccaaaggaaaattggcaccgcgttttgtgggaccttataagattgtcagtagaagaggagaagttgcttatcagttggagttacctcaatctttggcaggagtccataatgtgttccatgtgtcgcaattgaagaaatgtttaagggtacctaccgaagaagctaatcttgaacaaatagaagtccaagaggatctgacttatgtggagaaaccaatccgtatcttggaaacaaatgagagaaggaccaggaatcgagttatccgtttttgcaaagtccagtggagtaatcactcggaagaagagtcaacttgggaacgagaagatgaattgaagtcagctcatccgtatctgttcgccagttcttccgaatctcgaggacgagattctgtt

SEQ ID NO: 85048 - DNA, 4655 bp, Oryza sativa
  Clone ID: PAT_MRT4530_84224C.1
ctcctggtttggaatggtatattcctggtttggagatagaactgtgcagccgggatggttgttcagattggttgggcctatacaacaggatgccgcgctacaagcctgagtacttgtttggtgttgagggatttgtccaggagttgcgtacgatgtcctttgccataggatttgggactgcccctttttatgcccagattcctcatgatcatcacgaaaagaagtgccgagtcaaagtcaccttgaacagtaatagtgaggatatcccctcagtgatgttcgaagctggaggaagaaactgcatccatgcatgtcaggaggcggcaaggatcgccataggagagcttcgcgatcgctacagtgatcagttggccgacactgagtatcgctaccatcctcgtcaaccccagggaagtgaccgtggcagctaccttgagactgaaggaattgagaatgatgctaccacaaggcatttggttgagatgctgtgggctatggatgaaagtcgtgcggagactgtgttagcggctcaagatcgtgaagatcggaatcgtggtaagatttgcaagctagaagacaaggtggatcgtttggagaaggagctagctatattgaagggagaagcaccgccgcagaaggccaggattcgtcttaccgcaaggaagagagctctatttgtccctcgctaccaattggcgccaaaggttcgtgtggtggagaaagaagttgccccagccttagcggatcctccggtcatcatcataagtgatgatgaggaagaagaatccaagcacaaccattccaagattgagtgggtagcaactcaagatgatgaagacgagccgaacgagccttcaatcgacctccgatgctcggaagaactagatgggattaccactaatcctgttgaagctggtgattggctgcatgccatagagaagaagttggatttgcttcaatgcactgatcaggaaaaggtctcatttgcatcccatcagttgcatggccctgcctctgaatggtgggatcacttccgccttaacaggactactgctgaacctatcacttggcttgaattcaccgctgctttccggaagacgcatataccatcgggagtggtgtctctcaagaagaaggaattcaggtcgctcacccagggatctcgctctgttacggagtatctgcacgagttcaatcgtctggctcgttatgctccggaagatgtgcgcaatgatgaagagcgccaggagaagttcttggaaggacttaatgatgagctttcttacccactcatgactggagattatcatgatttccagaagttagtggataaggctattcgtcaggaggacaaatacaatcgcatggagcagaagaagcgccggattgctcaattcaagacacaacaggggaataatcagaagtcgcgtcttactttaggaccccagtccatgccacagggaggttcttcgtctgttgttcgtccgcagcgtcagttcttcaacaacaatgctggcaacaacatccgtaatcaagctccacgtcctgttacagctccaacacagcaacaacctgccaagagggagcaaggcagcaagcccgtggtgtgtttcaactgtggagacccaggacattatgctgacaagtgtccgaagccccgacgcatgaaggttgtccctgcccagaacaactctaccgtaccagcatcaaaggcccgtgtcaatcatgttgctgctgcagaagctcaagatgctccagatgtgattttggatgatttacctggtatgccgcctaaaagggatatagagttcagaatagattgggtaccaggaacaactccgatccataagagaccttatagaatggcagccaatgagttggcagaagtcaagaggcaagtagatgatttgcttcagaaaggatacatcagaccaagttcatctccatggggagctccggttatttttgtggaaaagaaagatcatacccagaggatgtgtgtggactatcgtgccctaaatgatgtgactatcaagaataagtatccgctacccagaattgatgatttgtttgatcagcttaaaggtgctactgttttctccaagatagatcttcgatcagggtatcaccagttgagaatcaaagaggaagatatacctaagacagcttttaccactaggtatgggttgttcgaatgtactgttatgtcttttggacttaccaatgcccctactttcttcatgaacttgatgaataaggtatttatggaatacctagacaagttcgtagtggtctttatagatgatattcttatctattctcgaaccagagaagagcatgaagaacatcttcgccttgcattggagaagctacgagaacatcaactatatactaagtttagcaagtgtgaattttggttgtctgaagtgaagttccttggtcacgtcatctcagcaggaggagttgccgtcgatcctagtaatgtggaatccgtaaccaactggaagcaaccgaagacagtttcagagattcacagtttcttaggcctcgcaggatattaccggaggtttatagagaatttttccaagattgctaagcccatgacacgattgcttcagaaagatgtgaagtacaagtggtcggaagaatgtgagcagagttttcaagaattgaagaatcgcttaatatcagctcctattttgattttgcctgatccaaagaagggtttccaggtgtattgcgatgcatccaaacttgggttaggttgtgtactgatgcaagatgggaaggtggttgcctatgcatctcgtcagttacgtccgcatgagaagaactaccctactcatgatcttgaattagctgcagtagttcatgcgttgaagatttggcgtcattatcttttcggtactcgtacagaggtatataccgatcacaagagtttaaagtatatctttactcagccggatctgaacatgagacaacggagatggtcggaattaattaaggactatgacatgggaattcattatcacccgggaaaggctaatgttgtagcagatgctcttagcaggaaaggctattgcaatgctacggaaggacgacagttgccattggaattatgcaaggaatttgaaagattaaatttgggaattgtcagtagaggtttcgttgcagccttagaagcgaagcccactctaattgatcaagttagagaagcccaaattaatgatcctgatattcaagaaatcaagaagaatatgagaagaggaaaagctattggtttcttggaagatgagcacggaactgtatggttgggtgagagaatctgcgtccccgacaacaaagatttaaaagatgcaattctgaaagaagctcatgatactttatactctattcaccctggtagtactaagatgtaccaggatctcaaggaaagattttggtgggcaagtatgaagcgtgaaatcgcagaatacgtagcagtatgtgatatttgtcagcgagtcaaggcagaacatcagaaacccgccggtttgctgcagcctttgaagattcctgaatggaaatgggaagaaatcggtatggattttatcactggtttacccagaacgtcatcgggccatgactctatttgggtgattgtcgacagacttacaaaagtagctcatttcattccggtaaagacaacctattccggaagtcggttagcggaattgtatatggcaagaattgtgtgtttgcatggcgttcctaagaagatagtgtctgatcgaggcagtcaatttacttcaaatttttggaagaagcttcaggaagagatgggttctaagctgaactttagtactgcttatcatccgcagacagacggacagaccgaaagggtgaatcagattttggaagacatgttgagagcttgtgctttagacttcggtggaagttgggataagaatctaccttatgcagaattttcgtacaacaacagttatcaagctagtcttcagatggctccttacgaagcactgtatggtcggaagtgccgcactccgcttttgtgggatcaaacgggagaacgtcaggttttcgggacggatatccttagggaagcagaagaaaaggtaaagatcattcaagaaagattgcgagtggctcagtctcgacataagagttatgccgacaatcgccgcagagatctaagttttgaagaaggagattatgcgtatcttcgtgtcacgcctcttcgaggagttcatcgtttccacaccaaaggaaaattggcaccgcgttttgtgggaccttataagattgtcagtagaagaggagaggttgcttatcagttggagttacctcaatctttggcaggagtccataatgtgttccatgtgtcgcaactgaaaaagtgtttaagggtacctaccgaagaagctaatcttgaacagatcgaagtccaagaggatctgacctatgttgagaaaccaatccgtatcttggaaatagatgagagaagaaccaggaatcgagttatccgtttttgcaaagtccaatggagtaatcactcggaagaagagtcaacttgggaacgagaagatgaattgaagtcagctcatccgtatctgttcgccagttcttccgaatctcgaggacgagattctgtttaa

SEQ ID NO: 85049 - DNA, 1161 bp, Oryza sativa
  Clone ID: PAT_MRT4530_84225C.1
ttattctctaggtgacagcaatggctcaacctcttgttgtgattgctcgccgagttgagcgacttttttggacttcttgtgatgagaatgcttcttcagtgctcggtcatagtccgatactggtactttctctttcaccggttgtcccatcttcagaaagaagtccttcacagccggatctataggaatcttcttttctggactcctcttcctgaagtgcgacttcacgtactcttgaaccgatttatcagcctcctcttgagtgcagaggtatggctgagtcacgggatcggggcaccgtgagtcctccacttttgccttcttcgttgtccttgacttgctaggtgctggaggaggagaccttgacctggcaagcggagcttggcgagaccgggacttggcagtatgaggaggtggaggaggttgaggagccataggagccggtgcaagcgtaggagatggcttccacgagctcaacttccacccttgagtaccgaggtggaatcgccctacatgggatggccatgcccgacgccaccttgatggataagttcctgaagggaataggcagctcgcatgatgttcgttgcgtgattccattaatgggccagcagggggtttcttcctgagctggcactgcttgcatgctatccaagctaacctatcctgttgaggcgtagctgctgcgattgcctgaggggctgaccgtggtaggcggaatgtagggctagggctcctggctccgctgtgacgcaagtcgttcgtccacccttcttgccacctcctcatgcataccctatattcaaggtcagcaatcttcgactcggtatctctcttgctcctcatccgactcttgtaagtgtggatgtcctctttgactcctatcttccatggaaccacacctcttcctctcgttcttcctagatgctcgggattctgtagtgcgagtgtaagctcgttcttctctctgtccggcctgaacattccctgagaagaggcctccactgcgtctgtcagccgatgggcagcttcgtgtatctcatcgccgaatattagggagccatcctcgggattgagtgatccgccgtgtgcatagaaccagagctttgatccacttgtgatttcacttataatgaactgttcgtcatcgcgatcagccat

SEQ ID NO: 85050 - DNA, 5127 bp, Oryza sativa
  Clone ID: PAT_MRT4530_84226C.1
atgccgcgctacaagcctgagtacttgtttggtgtcgatggttttgtccaggagttgcgtacgatgtcctttgtcattggatttgagactgcccctttttatgctcagattcgtcatgatcgtcatgaagagaagtgccgagtcaaagtcaccttgaacagtaatagtgaagatattccctcagtgatgttcgaagctggaggaagaaactacatccatgcatgtcaggaggtggcaaggatcgccataggagagctccgtgatcgctacagtgatcagttggccgacactgagtatcgctaccatcctcgccaaccccagggaagtgaccgtggcagctaccttgagactgaaggaattgagaatgatgctaccacaaggcatttggttgagatgctgtgggctatggatgaaagtcgtgcggagactgtgttagcggctcaagatcgtgaagaccggaatcgtggtaagatttgcaagttagaagacaaggtggatcgtttggagaaggaattagctgagttgaagggagaagcaccgccgcagaaggccaggattcgtcttaccgcaaggaagagagctttatttgtccctcgctatcaattggcgccaaagattcgtgtggtggagaaagaagttgccccaactttagcagatcctccggttatcatcataagtgatgatgaagaagaagaatccaagcgcaacaattccaagattgagtggttttccccggtttctcttcttgtgccctgcccatgcctgatggtgaacactcgcagcaacgggaatggccccagtaacaataacaatggagagaatcccactcttgctcaagttcttgctcaacagactcagcttatgaatatgatgatgcagcaacttcagaatcaaggaaataaccatgcatctcctcagaataagttagcagaatttcttcgtgtgaggccgcctattttctctagcaccactaatcctgttgaagctggtgattggttgcatgccatagataagaagttggatttgcttcaatgcactgatcaggagaaggtctcatttgcatcacatcagttgcatggccctgcctctgaatggtgggatcacttccgccttaacaggactactgctgaacctatcacttggcttgaattcaccgctgctttccggaagacgcatataccatcgggagtggtgtctctcaagaagaaggaattcaggtcgctcacccagggatctcgctctgttacggagtatttgcacgagttcaatcgtctggctcgttatgctccagaagatgtgcgcaatgatgaagagcgccaggagaagttcttggaaggacttaatgatgagctttcttacccactcatgactggagattatgctgatttccagaagttggtggataaggctattcgtcaggaggacaaatacaatcgcatggagcagaagaaacgccggattgctcaattcaagacacaacaggggaataatcagaggccgcgtcttactttaggaccccagtctatgccacagggaggttcttcgtctgttgttcgtccgcagcgtcagttcttcaacaacaatgctggcaacaatatccgtaatcaagctccacgccctgttgcagctccaacacagcaacaacctgccaagagggagcaaggcagcaagtccgtggtgtgtttcaactgtggagacccaggacattatgctgataagtgtccgaagccccgacgcgtgaaggcccgtgtcaatcatgttgctgctgcagaagctcaagatgctccagatgtgattttgggtacgttccttgttaactcagttcatgcaacagtgcttttcgattctggtgctacacattcattcttatctatgagttttgcgggaaatcatgggatggaagtagaagatcttagacgtcctttgatggttagtaccccaagtaatcaagcactctctttgcaacgtagcccctctgtcagaatagaaattcaaggaataccatttctggccaatcttatcttgttagaatccaaagaccttgatgtcatcttagggatggactggttagccagatataaaggtgtgatagactgtgctaacagaaaagtaactctcaccagcaatgatggtcgagttgtgactgttcatgcattgtcttctgagactttaaggtcaagactgaaccaaataactttggaagagattcctgtagtccgggagtattccgatgtgttcccagatgatttacctggtatgccgcctaaaagggatatagagttcagaatagatttggtaccaggaacaactccgatccataagagaccttatagaatggcagccaatgagttggcagaagtcaagaggcaagtagacgatttgcttcagaaaggatacatcagaccaagttcatctccatggggagctccggttatttttgtggaaaagaaagatcatacccagaggatgtgtgtggactatcgagccctaaacgatgtgactatcaagaataagtatccgctacctagaattgatgatttgtttgatcagcttaaaggtgctactgttttctccaagatagatcttcgatcagggtatcaccagttgagaatcaaagaggaagatatacctaagacagcatttaccactaggtatgggttgttcgaatgtactgttatgtcttttggacttaccaatgcccctgctttcttcgtgaacttgatgaataaggtgtttatggaatacttagacaagttcgtggtggtctttattgatgatattcttatctattctcgaaccaaagaagagcatgaagaacatctttgccttgcactagagaagctacgagaacatcaactgtatgctaagtttagcaagtgtgaattttggttgtctgaagtgaagttccttggtcacgtcatctcagcaggaggagttgccatcgatcctagtaatgtggaatccgtaaccaactggaagcaaccaaagacagtttcagagattcgcagtttcttaggcctcgcaggatattatcgaaggtttatagagaatttttccaagattgctaagcccatgacacgattacttcgaaaggatgtgaagtacaagtggtcagaagaatgtgagcggagttttcaagagttgaagaatcgcttaatatcagctcctattttgattttacctgatccaaagaagggtttccaagtgtattgcgatgcatccaaacttgggttaggttgtgttctgatgcaaaatgggaaggtggttgcctatgcatctcgtcagttacgtccgcatgagaagaactaccctactcatgatattgagttagccgtagtagttcatgcgttgaaaatttggcgtcattatcttttcggtactcgtacagaggtatataccgatcacaagagtttgaagtatatctttactcagccggatctgaacatgagacaaaggagatggttggaattaattaaggattatgacatgggaattcattatcacccggggaaggctaatgttgtagcagacgctcttagcagaaaaggctattgcaatgctacggaaggacgacagttgccgttggaattatgcaaggaatttgaaagattaaatttgggaattgtcagtagaggtttcgttgcagccctagaagcgaagcccactctaattgatcaagttagagaagcccaaattaatgatcctgatattcaagaaatcaagaagaatatgagaagaggaaaagctattggtttcttggaagatgagcaaggaactgtatggttgggtgagagaatctgtgtccccgacaacaaagatttaaaagatgcaattctgcaagaagctcatgatactttatactccattcaccctggtagtaccaagatgtaccaggatctcaaggaaagattttggtgggcaagtatgaagcgtgaaatcgcagaatacgtagtagtatgtgatgtttgtcagcgagtcaaggcagaacatcagaaacccgccggtttgttgcagcctttgaagattcctgaatggaaatgggaagaaatcggtatggattttatcactggtttgcccagaacgtcatcaggccatgactctatttgggtaatagtcgacagacttaccaaagtggcacatttcattccggtaaagacaacttattctagaagtcgattggcggaattgtatatggcaaggattgtgtgtttgcatggtgtccctaagaagatagtgtctgatcgaggcagtcagtttacttcaaatttttggaagaaacttcaggaagagatgggttctaagctgaactttagtactgcttatcatccgcagacagacggacaaaccgaaagggtgaatcagattttggaagacatgttgagagcttgtgctttagatttcggtggaagttgggataagaatctaccttatgcagaattttcgtacaacaacagttatcaagctagtctacagatggctccttacgaagcactgtatggtcggaagtgccgcactccgcttttgtgggatcaaacgggagaacgtcaggttttcgggacggatatcctaagggaagcagaagaaaaggtgaaaatcattcaagaaagattgcgagtggctcagtctcgacataagagttatgccgacaatcgctgcagagatttgagttttgaagaaggagattatgtgtatcttcgtgtcacgcctcttcgaggtgttcatcgttttcacaccaaaggaaaattggcaccgcgttttgtgggaccttataagattgtcagtagaagaggagaggttgcttatcaattggaattacctcaatccttggcaggagtccataatgtgttccatgtgtcgcaattgaagaagtgtttaagggtacctaccgaagaagctaatcttgaacagatagaagtccaagaggatctgacctatgttgagaaaccaatccgtatcttggaaacgaatgagagaagaaccaggaatcgagttatccgtttttgcaaagtccaatggagtaatcactcggaagaggagtcaacttgggaacgagaagatgaattgaagtcagctcatccacatctgttcgccagttcttccgaatctcgaggacgagattctgtttaa

SEQ ID NO: 85051 - DNA, 190 bp, Oryza sativa
  Clone ID: PAT_MRT4530_84227C.1
gcgggcggcctttgtttttttttttagatataatacctatgccacttttatttcagaggtacaaatgttacaaatcacaaccaagagttgtgctaataaaacacgcctatgtggctccaaaaaaacattctgaggatctgaaaccatgatatagctgtaattttaaactgcgcaccctgcagcgggggtg

SEQ ID NO: 85052 - DNA, 257 bp, Oryza sativa
  Clone ID: PAT_MRT4530_84228C.1
aggctcacataaagagaaagcttacgaaagaggagagattagaaatggtgaaggctggaagagaggatagaggaaaataccaagcaagaacagctgtgaaacagaaaaagaccggtggcttgagcaataggcagaaacaacacaagaagaaaatgcccctcgctgcaagcagagcgaaggcagcgcgttctcgacaggagaagaaaaaactgcaaaagcgctcgggaaagcaattcagaggacggaaggcgtggaaa

SEQ ID NO: 85053 - DNA, 312 bp, Oryza sativa
  Clone ID: PAT_MRT4530_84229C.1
atggctctggtcttggtgagcatggcgagcgcgtcgagcacaagggaagtggtggtggtggccggggacgacgcgcatcgcctggaacgccggcgcggcggaggagccggaggagaagagccgaacagcacgccctcgccggagaggagatgggacgacggatggcgccgcacgggaagggcggcggggcggggcaagaaaaggcagcgtgtgatcgccggagaagagaagaaaaccctaaccctagctttggaagaggaggggagagggggaaaggctgctcaccggagagaagatggcggccggaggtga

SEQ ID NO: 85054 - DNA, 296 bp, Oryza sativa
  Clone ID: PAT_MRT4530_8422C.1
tcggccgagaggaagccgaggacaacagcggtggcgcggggacagcggaggcagctcgaagcggcgaagggagagccgaggacaatggcaacgggcagggacgagggaggcgcctcggagcggtggtggcggtggcggccatgtggggtgtgctcaccgccgaagctcatgccagcctgctgttgcgcgccgccgctctccagtgtggagctcccgatgaacatcgccgacccatacatcgttcccggattccccagccggccatcgcctctagctatagtgatgctgcgtcgtga

SEQ ID NO: 85055 - DNA, 492 bp, Oryza sativa
  Clone ID: PAT_MRT4530_84230C.1
atggggaagccgtggggcgtcgccgtgggggcgtcgctgtgggggcgccgacgtcgccaaccgccgccgtggagcgccaccaattgcaccgccacctccaccttctccgccgccgccattcgcctccaccgccatctcccatccatggtgggcaccgtactgtaccccttgcacaaggatccgacgaggtgcttcctcaaccaaaggcggaggaggaggtgcgacagggacgggcgggggggccacaaccggagttgcaggcacacgacgagggtaatggcggcggccaccaaccctagccctgcctccgcgggatccccggcgcgccctcctcatcgatcgacgaagaagatggtgaagcctgcgtgcgcgctgatggcgagggaggccgagaacgacatccatgatccaatgaaagatcaaaagcgatgtttcttcctttcacttcgcgatctccttcgcgagagcgaaagtgctgataacgtgttgtga

SEQ ID NO: 85056 - DNA, 139 bp, Oryza sativa
  Clone ID: PAT_MRT4530_84231C.1
tgggcagggcagctggccggtgggggaggccggagtccggtggcggtgccgcacgtccttccacgtagccgacaccggtggagaagctcctcctgatctttcgtggattatgatacctgcgaggatgtactctaaaaag

SEQ ID NO: 85057 - DNA, 425 bp, Oryza sativa
  Clone ID: PAT_MRT4530_84232C.1
ataataaccgggggggttttaaaacgtggggcttttttcctctccgactttttttttgttctgcgcatgggccttcaaaaaaaggccccggaggaaaggggtgggctgcccggggccccgaggtaacaaccgctttaggggcaaaactttttaaaagggaaagaaccgatgggcccgtgcccccccttgaaaaaaaagaccggggggccccacccgggataacggggcccaggggggggaagggggcccccacgggtaagggggtaaaaagggggcccccccccccggggggccccaaggcgggggccccggggcctttggggaaccaaagggcccaggggggaaagggggggggcccccccctggggggggggcccccgggcgggaaacccccccggggggggggagcaaaaaggggttccccc

SEQ ID NO: 85058 - DNA, 431 bp, Oryza sativa
  Clone ID: PAT_MRT4530_84233C.1
gccgccctttttttttttgtgtgttcaagactacatagatatcacaattcacacgctcagaacactgaagctatactgtaaaccagtaagtgatatcatgtttcatgctcgtattacttacacgatagtacatccagtctgtcatctcttcttatttcactttaatacttatacaagcgtatttaagtgtggcacatccattggctattgccgtagaggcgtcgggtaccgacaggctacaaacttatatgctggcctagttataatgtcagcaggaccagcatatcgaagatgctggaagagcagcagtgcgccttgcagaatgcgaatagccggttcttacatgacaggcctagtggcagctccagcggggccagcttgtcttagcagctggaaataggattctagtttctgcctcaggacagcatgct

SEQ ID NO: 85059 - DNA, 1128 bp, Oryza sativa
  Clone ID: PAT_MRT4530_84234C.1
atggcggcggcgcgcaacccacgaaaccctaggcgccgcggggccatcctcgccgcggtcgcccccttcctcgccttcgccgactacctcaggctccgcctcgtcgaccgcgcgtggcgcctctactgccgccgcgtcggccacgccccgccgcccttcccctggctgatgctccccgagcgggagtcgccgccgggggcgggggcggtggcgcgccgcgtgttctacgacgtgcccggcgggcggtcgtacgggtaccgggtgccctcgagggacatgcaccggtgcgtcgccacggggcacgggtgggtcgtcatggtcgccgtggacgcgccgcgccgcgtgatgctgctcaaccccatcaccggcgaccagaggatcgtggcgtggccgttcgccaggtggaacgcgcggttccacgccgtcctcacgtcgtctcccgccgccggcgaggcggggtgcttcctcgtggtggtcgcggacaggctcctcgccttctgccgccccggcgccgacttccaggggtgggagacgctgcgcgcgccggggttccgccaccacgcggccctcagcgacgtcgtcgccgtcggcgccacggtgtacctcgtcgacgagcggaggcggctgtggcgcgccgatctcgcggacgagaaccccaaggtgcagcgcagggacacggggttcgcgctcccgtcgctcgagctgaggcggcactacctcgtggagtcgctcggccacgtcctcctcgtgctctcggacgagcgccacaaccgcgtcgcgctctacaagctcaactgggacgcgagggcgtggctgccgatcgccgcctgccccggcgagcgcgtgctgctgctcggccgcgggtgctcggcggccgtcccgccttcctccgcggccggccgcgccccggggaccgtcctgttcgcgcaccagccgtcgacgctgcccgacgtggacgtcgccgcccgtggccaggcgtggttctggtcggagtcgagggtgggcgcggcgccgggtgatctgctggtgctgaagaagacggtgccgcaccgccatggcgagttccccgccgacggcgactcgttctggttcttcccagcagttgatccggatgaggacgcaaggtga

SEQ ID NO: 85060 - DNA, 307 bp, Oryza sativa
  unsure (1)..(307): unsure at all n locations
  Clone ID: PAT_MRT4530_84235C.1
atggctagggagagggagtggggaaaatggcgagagttccggcggggaagacgaagtgacgcttggatctcgggatttcttgttaagggtatcggaggtgcaaatgggcttaggcctgaacagtacctcagcccaccgctagactcgctgccgcaccgcgccggcgccgccgttgggttcgcaaggacgaactccaccctgtccgcccttcctccgtcgggattcgtcgccggaattcgcatcccctntgcgctccgtgagttctacctctaccgccgcctttcgccatggatgccggncgccgtgg

SEQ ID NO: 85061 - DNA, 3003 bp, Oryza sativa
  Clone ID: PAT_MRT4530_84236C.1
atgaaggcgcaggacaagaatggtggcgcagcgaagccggctgggacgacggcgttggcgaagaagcccgtgctcagcattccggagaagccgtcggcggcgccatctatggcggcttgtgatcaagattgttcagctagaaggaagactagcaagtactttgcatccaaaacagaaaaggaggaagacaccagtgcaggaaaaggtaccgggagaggtttgcctaaaagaaaacttcagaaagtcagtgatgagcttgaggatgacatgaagcctttgccagcaaaggaagtccataaagaagaagaagatgatgatgacgacgactttgtggcaccttcaaaaaggaaaactccggtgaagccaccaccatcaaagaagttgaagggtgcatctactgctgaagctcatggaaagactggtcttgatgatgataacgaggacaagatggatgaagacgctaagaccccttccaaggcatctggaagtggaaggggaaggggaagggggagagggaggggaggaagaggagcaggagcagcccatggaaagacaattggtcttgatgacgacggtgaggaggataagatggatgaagatgccaagaccccttccaaagcagctggaaggggaaggggaggagcctctgggggaagagggagaggagggggtgggagaggcttcatgaactttggtgaaaggaaggatcctcctcacaaaggggagaaggaagtcccggagggtgcccctgactgtttaactggtttgacatttgtcataagtggcactcttgacagtcttgaacgtgaggaggcaactgatctaatcaagcgttatggaggccgtgtgaccggctctattagcaaaaagacgaattacctattggctgatgaagacgttggtggagtgaaatcaaataaagcgaaagaactgggcgtcccattcctaactgaagatggtttatttgatatgattcggaaatcaaagcctgcaaaggctactgtggcaaaacatcaaagcgacaaaaattcagaaaagcagcaaaaatcaccaatgaagagttctccagttaaagttgaaagaagagatggtaatcaaattaccacaggcaaaaatatttcaccaaagagtaataaaggaagtgcctccattgacaaccaaaaggtcaacattgttgaccgtggttctttgcaatggactgaaaagtatcggcccaaagttccaaatgacatagttgggaaccaatcaatggttaaacagcttcatgattggttgagaagttgggaggaccaattccttcattctggccagaagggtaagggaaagaagcaggctgatagtggagctaaaaaggctgtgttgttgagtggacctccaggtattggtaagaccacaactgctaaagttgtcagtcagatgcttggattgcaggctattgaggttaatgcaagtgatagccgtggtaaggcagactctaagattgagaaaggtgttgggggcagtacatcaaattctatcaaagagcttattagtaatgcaactctgaattatagtaacaaccgattaaaacgacccaaggctgtactagtcatggatgaagttgatggtatgtctgctggagatcgtggtggtgttgctgatcttattgctagcattaagatgtccaagattcctataatttgcatttgcaatgaccgttatagccagaaattgaagagccttgtaaattactgcttgctactcaacttcagaaaaccaaccaagcaacagatgggtaagaggttgatggaaattgccaagaaggaaggtcttcaagctcaagagaatgcaatggaagaacttgcagaaagagtacacggggatattcgcatggctcttaaccatttgcaatatatgagcctctcccagtccgtggtcaaatatgatgatataagacagcgacttaatagtagcacaaaagatgaagatatttcccccttcacggctgttgacaagctgtttggttttaatggtgggagactacggatggatgagagaattgatttgagcatgagcgatcctgatttagtccctctgattatccaggaaaactatatcaattatcggcctatcactgttgggaaggatgacagtggagttaaaagaatgaattttcttgctcgtgctgctgaatctatagcggacgctgatattgttaatgtacaaataagaagatatcgacagtggcaattgtcccaagctgcttgtttgtcttcatctatagttccgggtgagcgaaacttcaataggtttggtggatggttgggaaagtactcgaccacaaataaaaacataaggctactggaagatgcccatagtcatattcttgcctcccagcaagcaaatttggacagggagtcattgaggctggattacctcactcttctcttgagacaattgactgatccactgaagacaatgcccaaggatgaagctgtgcaaaaagtggtggagtttatggatacctactctttaagccaggaagactttgacacaattgttgaattatcaaaatttaagggtcatccaaatcctatggatggtattcaaccagctgttaaaagtgccttaacaaaagcatacaaacaaggaagtagttctcgtgttgttcgagcagcagatctagtaaatatcccaggcatgaaaaagccattaaagaaacgagtggcagcaatccttgagccagtgggagagagtttgcctgaagaaaatggagtagcgtcatctgaaggcgatgaagaggattcctctgatgctgaaaataatgatgaactggtgcctggtgacacaaaaccaaaactggacctgcagagtgataagaagaaagggatccaagtgcagctcgacctgaagagcaatggcaatggcttgaactcgaagaagatgccggctggtagatcaaaagcttctggctctgctgggaaggctgctggaggctcaggtgggaagaggaagagaaaataa

SEQ ID NO: 85062 - DNA, 619 bp, Oryza sativa
  Clone ID: PAT_MRT4530_84237C.1
atggccgtggcgcggattgctgccgagtgcacgccagcgcggggcacagcccgggcggtgggcggcagcaggcggcggcacgtgcgggacacggaggcaacggcacaggacatggaggcggcggcgtccctccacgcccgcccaacctacgctcaccgctcggggagctccgcctccgcctccacctcagccgcccactccgactccgcctcagccgcccgctctgtctccacatatgccgcccggggatctccgcctttgccttcgcatcagccgtccgctggccgcccgctctgcctccacctcagccgcccggggatctctgccttcgcctctgcctcagccgcccgcactgcctccgccagcaccgcccactgccccgggaggtccatctccaccgccgtggaagagttctgctacgccgtctgtggcttccactacttcacctttgcctccgtcatcggcatcaccgtgccgtgcgcgtggggttacgcccgccgctgctcgccgccagctgctcatgacccagctgcgcccaccacccacctcccgcccctacgccgccccgtgtgtgaaagttcagggtgagcaatgtctgattttcgggttcagggggtaa

SEQ ID NO: 85063 - DNA, 1233 bp, Oryza sativa
  Clone ID: PAT_MRT4530_84238C.1
tttttttttccaatttaaggcacatacattcagttctttttttccaatggatcacatctttgttgacgatcagttcacaaactagtcacaatcacatcgttattacttctgcttcttcaagcattcatgtaacatcaaaacataacacacatcgtctcaatcgccttgtgaaaagtacaagaaatttactatcttttcaacacactgaagctcagttaattaacaaccctgcagttcttgcgaatctggccgtcgtcaccggtgagtgggctgatgttgcccatcttcaccatggatctgccaaaatcccagaagaacttgtgggcatctgcgctgtaagtctccaccagctccttggtgttggcgatgccgtcgtcgctggagaagaggccctggtcggaggacaggaggcctttctgattgaggaggttctggtagtagcggttgtcgaaaacgtaggcggaggtgatgtccagcacggtggtctcgttgccgtctccaccggcacagaggctctggaggttggcggccatggtggcgtccagcgtcgggtcggctgagcttgaggtggtcgacaaccggttgctgaacagcgtgcaccgggctcgtccgatcgtgtgccctcctgataggacgacaacatcggttgtgtcgaggccgacatcattgaacttctgtatgatcgatttgatgggttcgaacggtgaagggaggccgttgtcagctcctgattgatttgcgacaagaccatcccttctaccgagaagaacgtcatagtaagggcctccactaaatagtactccatagccagctgcaagggctacaatgtcggcgcaggaaacaacttcagggcagatgttctcgagatcttcctttatcgcgtcaatgacttcgaaccctctgacagagttcttgttgggaagtgcaaatttctcgccgtcgtcaccgtccagaaggatggaaccgtcacacccattgacaaagcagtcatggaaatggagccttaggagggaggcacccatcctcatctcagtcctcatggcagcataaacatgctgctggacaacggtgtacacatcaggacatatgtagtcgtagaaatcgtcggataactggcatctcgcaccccgagtattaaggcacagtacaagaacagagcatacaagcatgaacctgtagctgtaagagtactccatctctcacagaagttactgccctgctcggacgcgtggg

SEQ ID NO: 85064 - DNA, 258 bp, Oryza sativa
  Clone ID: PAT_MRT4530_84239C.1
gatattagttaattctgtgtctcaaaaaatatcatcaactccactttgaggaccaaaaatcctctgcaacactgataatatgacagcctggatgctacagatcaaataacaggactgaatgtgccctagctccaaatatcacaatataggtggcatgtgttcctatcgggctaacctcacctacttcagggaagaaattggtcagcagccatagttggacaatggcagcatgaccgtcgccgtggcctcgcaccgcca

SEQ ID NO: 85065 - DNA, 369 bp, Oryza sativa
  Clone ID: PAT_MRT4530_8423C.1
ctaggggacgggataccgttgccccaacgggatagcttcccatccacctctatcagctgcaagagcacaaggcacaagggccgagccggcggcggggggagagcggcggcggtggccggagctagagagccgggggagggggcggcggtggtggcaaaagcgcaagggatcccaggaaacaatggaggtatgatggtgacccgaaacatcggaggaggggcggcggcggtggccggagctagatccaggggatgggagggggtggcggtggtgcgtcgccggagccggaggagggagcggtggcggtggccagagctagggaggaaggggcgctggggcggcagtgatcggcggcgtcaatgtcgggtg

SEQ ID NO: 85066 - DNA, 337 bp, Oryza sativa
  unsure (1)..(337): unsure at all n locations
  Clone ID: PAT_MRT4530_84240C.1
agttgcttgtgattgttgtggaacacagaacgcacagcaattttgttttggttccctcganaaaanctggagttntttgttgccgccaaatagaacagagcagaattggataaccacacctcctcatcaaggtccaattttgtgggggttatctgtaattcttgcaatgacaaacgatcataaatgataaccgttgccatgagaaaaacagcaaccaagatcatagttttgtanagaattaatacatttgtaactttttgccncgatgacaagggcagcttttgctaattaagccttttgtttnttgagaaaaaaaaaaaaaaaaaaaaaaaaaaaa

SEQ ID NO: 85067 - DNA, 381 bp, Oryza sativa
  Clone ID: PAT_MRT4530_84241C.1
atggggaggaggggctttctaggcatctctctcacccggccgcggcggccatggaaagcggagagggtcgcggcctcgcgggtggttggaggcggccgcggaaatagaaacggggaaggctttcgggtcgcggtcgcgggaggcggcgccgacaagctgggagcgagcggacggcggccgcggccgcggcgcgcgggggccaacggccgcggcgagcgggggacggtgggccacgccgcgcgggggacggcggccgcgccgagcagagggcgggtggccacagcgagcggaggccggtggccgcaccgtgggcggggaacggcggcggtggcgcgtgggggccagcggccgcgccgagcgggggacggcggccgcggctag

SEQ ID NO: 85068 - DNA, 472 bp, Oryza sativa
  unsure (1)..(472): unsure at all n locations
  Clone ID: PAT_MRT4530_84242C.1
attaacattatctttgtcttgcccatctattgcttgttcgctntccaaaaccggcaagaaaaattaactttgtttgggaaagcccccttgccccactttcattggggggagaccaacattgggctccggtttgggccgccccatttggtcaatatttttttgaagataacgttaacttggttggggcataattggaacaaaaacaacttatttttttgatgggctttaagacgggggccactgcagccctgttgtttaaggcttgcccttccttttaaaaaaaaactccctttgtttccatttggagagaaaccccctttggggccattttaccaacaagaaattgggccaaaataatggggaaaaaacagggttttttaccgatgggtcgggtgccccccgttgaattacccccaaaaacttttgtttttgccggagaggattttgaacatccccattgtcccgggggggg

SEQ ID NO: 85069 - DNA, 1419 bp, Oryza sativa
  Clone ID: PAT_MRT4530_84243C.1
aaaacccgaaaaatcatatatgcaaacctgcaatctgtcactgaattgaacatttacacactgcaaattgcatgccaaatctcgcaattcgcgtgcaaaaacaccaaaagcatcagatacaattacacatgcgaatcaaaatgcaagctcgacatcaatcgcggtaattaacaatggagtgctagtaaggctagagggagaacagcttgcggaggttcatcggcgagatgtacttgctgtcgccgtcgacgatgtacttggccatcaccaggttcgccgcctcgctggggtggtacgggtcccagaacacgtggctcttccggtcgccgcacatgctcgacgccggcccgcacggcaccatcccgtcgtacgtcccgccgttcccgcagcacgccatgctcgccgtctcgaacccgtaggagtcgtagttggtgatgacgtccatgacgaggtcgtagacgttggcgaggcagaacttggcgccggcgaggtcgccgttgagctggatgaggagctcccggaggcggccgttgtactgcgaggcgagctggttgggcagcttcacgcactcgttctcgccgacgcggttgatcgtcttctggtacgggatgcaccccagcggccccacgttcgccaccacgaacttcctcgcgtccagcgtgtacagcctcgtgagctgctcccggaggtggatgatgaggtcgttgatgaagccgtcgggcgactcggcgacacgggtcccggcggagaggacgggcatgaggtagttgttgaggaagtcgttggacccgacggtgatggagaagatggccttcttcttcaagaactccttcgccttcgccttccccaggagatcgtccagctgcttcctcgtgatgttgaagtaatccacctgaagatccattccgatcctgttcacaaagattcttcctgtgccgttgagaatcccggcgcctcctgacgcgtagttgacgccgttgagcagcgcgccgccggtcgtgttcggggcgaggaacggcggcgagtagtccgtctggcccaacatttctccgatgatgtcggcgatggtccggccgttggtgaagcggccggtgggcatgccgccggaggcggcgaagtcgatgccgttgggcgtcatgttggccttggacagcgaggggatgtagttgttgttgccggcgtcgacgagcgagtccccgaagatgaacgacgcgccggagccgaactcgtacacctcctccgctccgctcaccgccgccatcgccgccgcgcagaccaccgcgaggaacgccatcgccgccgccatgcttccccgcggccaagcagccggcagcaacaacagcatatgaacaaaaacgtagctatagctagcttagctactgtttgttcatgatagtgagcagcaagtacgtacgaaaa

SEQ ID NO: 85070 - DNA, 393 bp, Oryza sativa
  Clone ID: PAT_MRT4530_84244C.1
acggccacacatgctggactgttctgtcatcagcaccatctacgtccacgatacatgcatctcgcatttgcatgcaccaaacaaattcgatctgcagcatagtcgatgttccagttccgggacacgctcagcgtcgtcttgatcgtagcatgggcctgcatcgatgccgtcccgtacggccaaactgacttgcccgaagatcaatggcgtcgttgtctggtcacagctcttcggccagccagtcgcctgcggatagtcatactgaaggcattggtaatggaagacgccggcgtagacatcagcagacgccgtgaccttcgaatagccgatgggtcgcgccgtcgtcgccttcgaatcgccgatcgcgataacctgcggatcgatctgtcgatt

SEQ ID NO: 85071 - DNA, 259 bp, Oryza sativa
  Clone ID: PAT_MRT4530_84245C.1
ctcacaactctatgccactctccttcagctccatcggcagcagtgtcctgcgcggcggctcttccagcgctgcagcctgcggcatgagctgctgaactcatacgagttcgtcggctggaagagaggagagaggggaaggaagaaggaagaagagggggcaaggccctgcactcctgctcccaaagacaagaagtgcttcgcgatcaaggcgactaaaagcaacatttcaaaatttatcggagtcagcaagaaccgatag

SEQ ID NO: 85072 - DNA, 129 bp, Oryza sativa
  Clone ID: PAT_MRT4530_84246C.1
atcataaaggatgggagaggcaatggcgagcactaacatggcggagatggcgaacctggcagcgatgaagttgaaggaagctgtagaaccgactatgaccacgtagaccaactaggaggcgggaagaaa

SEQ ID NO: 85073 - DNA, 450 bp, Oryza sativa
  unsure (1)..(450): unsure at all n locations
  Clone ID: PAT_MRT4530_84247C.1
cgccgcactcccctctcccctctccctcgcgtcgcccacctcccctcgccggactcccctctccctcgcatcgcccacctcccctctccccgctgcctcaggatctcctccgcgccgccgccgttcagtcgtcgtcgccgattctccttcgccgcgcacagncgtcgtggcctcaggttgcttgcaccttctnccatgctgactaacggcgtcgnggccgncgccgccatcatcaccggcaccgacctctcctctnagataaccgaaaacatcatgttgagttttgagtggtctctccgagaaatggagcctgaagaagcagtagacanttgattttgttancaagtgattcacttttgttcttttgctacataaggtgggacattttttatggttttaaattctaattatatatattccagtgtatgcagatttggngcctccagaaag

SEQ ID NO: 85074 - DNA, 163 bp, Oryza sativa
  Clone ID: PAT_MRT4530_84248C.1
gtctcataagatggactaatctcatgaagtgctttctatatgaccttatcgagatcagcctagctatacggaggggcgactattacgtgcatgctcacttttggagtggcgggcccttgctgtggacccatctgccagagatattgaacgtacgcaccttaag

SEQ ID NO: 85075 - DNA, 1938 bp, Oryza sativa
  Clone ID: PAT_MRT4530_84249C.1
cgaacacgcggagagagagagagagagagagaggaggaggaggagacgacgcggcgatcggcgagaccggaatccggcggcgacgccacccatctcccccgccgccgttggccgcggctagaagtagtgggggggggggggggctcgccggcgcgcgggcatcggcatcggcgtgagtagatcgtatcgtgcgagtggtggatcggaggagggtgatcgcgatttgtgaggaggggggggggggttgggatttggatttggatcgtggggatcagggggaggaggagatgggggtgctgtcgaggccggaggaggtgttgccgctggtgaagctgcgggtggcggcggggcggatcaagcggcagatcccgccggaggagcactgggccttcgcctacaccatgctgcagagggtctcccggagcttcgcgctcgtcatccagcagctcggccccgacctccgcaatgccgtgtgcatcttctatctcgtgctccgagccctcgacactgttgaggacgacactagcattcctgccgcggtgaaggtgccgatccttaaggaattccatcggcatatctacaaccgcgactggcattattcatgtggaacaaaagactacaaattactgatggataagtttcgccttgtctccacggctttcttggagcttggtcaaggttatcaagaggcaattgaagaaatcactaggctaatgggagcaggaatggcaaaatttatctgcaaggaggttgaaactgttgatgactacaatgagtactgtcactatgtagcagggctagtggggtatgggctttccaggctctttcatgctggtgggacggaagatctggcttcagattcactttcaaattcaatgggcttgtttctgcagaaaatcaatataattagggattatttggaggacataaacgagataccaaagtcacgtatgttctggcctcgagaaatatggagtaaatatgtcaataaactcgaggatttgaaatacgaggaaaattcagaaaaggcagttcagtgtttgaatgatatggtgactaacgctctgtctcatgctgaagactgcctccaatacatgtcagcattgaaggatcatgccattttccgtttttgtgcaatacctcagataatggcaattgggacatgtgctatttgctacaataatgtgaatgtctttagaggagttgttaagatgaggcgtgggctcactgcacgagtaattgatgagacaaacacaatgtcagatgtctatactgctttctatgagttctcttcgctgatagaatcgaagattgataataatgatccaaatgcttccctaacgcggaaacgtgttgatgcgataaagagaacctgcaagtcatcttgctcactaaagagaaggggatacgatttggagaagtcaaagtacaactccatgctgataatggttgtacttctgttggtggctattgttttgggcatgatatatgccaagtgattcgtcctaggtggtccattgccctcaactagacaatctatgcgcatcagatttcttatcagcgccaactccaaagcacatgcagcaattataagtactgactgactgcaagaatagactgtacttctatgaagttggatctcttcacctatctgttcaccctaaaccttttcatggtttataagaatgcgggttgtttcttgcaaaattttgggtagaatggtgcaaaaaagaatttgttcgataatgaagatagctgtggttttgttagcttgtgttatattgatgtaatttaagatcatgcgagtgtttattttcccggcgacattcttttgtttattcattatatgcagtatccatttatcttggctctcaaaaaactaaagaaaaaaaaacaaaaaaccaccccccgaaaaaaaaaaaggggggggcctcgtgc

SEQ ID NO: 85076 - DNA, 218 bp, Oryza sativa
  unsure (1)..(218): unsure at all n locations
  Clone ID: PAT_MRT4530_8424C.1
gccctaacgaaaaatctttagcggtgactttgctaagccatgtagattattaaattggatgtctttgtaagtatatgtgtttagaatatcatgcaagtggttgccatggactgattaattatgccatgatgtaatatttggtactggtactactcaaaaaaaaaaaaaaaaaaaaaaaaaaaaaaaaaanaaaaaaaananaaaannaananaaaaaa

SEQ ID NO: 85077 - DNA, 492 bp, Oryza sativa
  Clone ID: PAT_MRT4530_84250C.1
atggcagcggcggcggcgaggtcgaagcagctccggatgccgcaggagcacatcagctggatccttcaccggagggagccgtcgttcgacgaggccgacaaggccgcggcgcgcagggagctctacaccgacgaccacgagctggtgcggagcgggtggttcgacgacctgctggcgctgcagcgggggttcgtcgagaggaggaaggcgagctgggccaggttctgcgagatggcggcgcgggtgcgcgccgagttcgaggccaacgggttcgtcgaggtggacgacggctacttcgatcggcaggaggagaaccgagctctcgtctgggagaattgcgggagagagttcgctcagatgctccgggagaacaaagacggggagtttggggaccgcgatgatgaagctgtttctgatgacgaacaccaacacgaagatgaagaggaagatgaaccacatgatcaggaatcagagtcagatggtgatctctga

SEQ ID NO: 85078 - DNA, 633 bp, Oryza sativa
  Clone ID: PAT_MRT4530_84251C.1
atgaagcctcagcctcctcccatccaaggagatggcgtcgccaagaaatcgagggcggcgaaggcatccaggcgtgagatgctcaaggtcttgtacgtcctgctcgctctggcctcgacaccgtttttgtactacatcttcttcgacctccctcccaagttctccctccagatcaacagcgccgagggcctcgacgcggtggcggcggcagcggcggcgcagcccctctccaccatcgtcaacatgaccctgcacgccagcaaccggcgcgcgccgggccgatgctaccgccacggcgaggcggtggtgcgttacgccggcttcaccgtcgcggcgggccggacgcgcgtcttctgcgtcggcgccagggacgcgctcgacgtgccggtcgtggcgtgggcggacggcgtgacgctgcccaatgaggtacacgatcgcatggcggcggagcagcgcgcctgctccgtggagctcgaggtcgacgtgaagttgttcgaccgcgagagcgagatgccgacgtggatgtggtgcaaggtgacgacgcaggaagcggagccgtcagacgtgacaccgtgcagagtgttcgctacccagaattgggcatcagacattgcacctcgttggatgcagtaa

SEQ ID NO: 85079 - DNA, 325 bp, Oryza sativa
  Clone ID: PAT_MRT4530_84252C.1
tagtggatccccgggctgcaggctccctagctgtcgcgactccgcgaccgacggcggcggcggcagatggagaggaaccagcaccgcgacggcgacggcgacggtgagggacgccatcatcatgtcgtccaggtcccagcgtcagcagtagaagttgcagcaatggaggagacctcatcagaggcagcagatcactctctgcgtcagaaggcagcagcgatggttgcctcctccatggagacgtaccggagcaagcccatgtccttctggctgctgctcgtcctcagcgccggcgcgatgctcacaggcggttcccggcgtcgag

SEQ ID NO: 85080 - DNA, 1854 bp, Oryza sativa
  Clone ID: PAT_MRT4530_84253C.1
atgggcgggcagggcgcgggcgggggcggcgggcggaggtggacgcagcggccctgccgtacgggagggggcggggtcgtcaggcggacggtggcggcgctggcgaaggagcaaggggccacggccgcggccgcagtcccgcggcgtgcggaaggaacaggactttcgcttgtgggcaaacaacgatgtatccgtggagtatcaaatttcagaagcaacactggatccacaaccgaaaatgattatatttgttcagactctagggtattcaattacagaaattctagtggcacttctacaagatgttctgccggtgaacaactgaaaaatggaatgggaagttgtcattcacagccttctgtgttggcagaattaatgcatcttgatacagcaaaggcagaaacttccttttcgagttcaagacggagcaaattctcttacaattggaaatcgcttcatggaagtagtactacctcaagttatggatcaccctgtcatcctatgttcaacctcagcaaacacagtactaatccgaagccacctccaccattaaagaactccgcacggatgagtaatttcagttatcaattggttagaagtgctgaaagtccaaagaatgcaaaatattccctatcagagaaaatgtcacacttactaaaaccacctaatagtagcagtcatcagaatggaaacttcactgttggtgctttaaagaggcgtcataatattgcacattttggaggagcaatcaacaagcttttgaaaaatgaggttcataagaaggccaccccatcagagggaagacattggcagactttattggataactcattaatccgacagaataaattgtactgttcagagccacgcaatgaagaatcaactgaacaatcatggagctctacagacagtgagtctgagaaggctgtgtgcttttcctccagtggcagcattgctgatttgcatgcatcggtttcaactgacaccagtgactcaagtgaccactctatgtcatcttcgtgcctatcagtaaatgatcgatggaagatgacttttaagaaggtacactgtgcccttgctgcaaatttagactctatgtatgtcactaaccacaaggagctagagcagccaagtccagtatctgttcttgaaattccagatgaggatttctctgtcactaaaagcatcaagctagatctccatccagaaagtgaacttgttagatgtccatctgttgagagtacagctgaggtaggagaaattggaatcagtgattatgctttgggggtggatggactagatgctagtctgaacggtgaagcaatacagcttgttgaagatatctttgaagaatttggagatgaagaggaaagagaattttcttacgtgctggatatactgattgtttctggcattcatggcaccgcggaggatcagctgtacaaggtatgccaatctcttgattgtcccgcaggctatgatgtgtttgagaagcttgaaaagaagtacatgaaagttgctgaatggtcaagatcagacaggaagcttatctttgatatggttaacaccatattatcagaaattcttgcaccatgtttggacatgcacccgtgggtgaaatctgctagaaaaatggcaccagtatggggttcagagggtctcctggagaagattttgcagatgttggttcagagacgggaagaacttgggctaagtaagactaagcctgagaagaaagcgttagatcggaagtggccagatttatcggattgcattgacagggtagggagggatgtggagaacatgataaaagatgatcttttggaagagatgcttttggatctgttcagttag

SEQ ID NO: 85081 - DNA, 428 bp, Oryza sativa
  Clone ID: PAT_MRT4530_84254C.1
ccttttactcttttgttttttttttttttttgtattatttgaccagatggttctttttgccttttaggttgccttttttgttaccggtctttcgggcagggagaaaacaaagctggatactcgagtgaaagaaaccctaaaaaaatcccaaccgcaaaacaacatatcgagaggggcacacccgagaggtgagccaaagggcgtaaaggagaggggggcaaaattaggcacccatagatgggctaaacacccaccgctcgacttgggcaaggggaaacagccggggagtaatgtaaagagggacctactggggaagagcgcccaaaaaacatatacctgaattaggaggctttggcaactgccgaagctgcaagtcatggacggcacggacctaccccctgtaaaaaaaaaaatttaaacccagctgg

SEQ ID NO: 85082 - DNA, 222 bp, Oryza sativa
  Clone ID: PAT_MRT4530_84255C.1
atggtgtggctgcagtacaccgccacccgctcccagcgcgccgccaccgcctgcttcttcctcaccggcgtcgccctcatcctcgccgccgcccgcctctcctacgccaacatcgagccccagcgcgccaaggccgccgaccgacgccgtgtcctcgaggacttcatccgccgcaagcgcaaccacgccctggacctggaggatccccctcctaaaccctag

SEQ ID NO: 85083 - DNA, 1377 bp, Oryza sativa
  Clone ID: PAT_MRT4530_84256C.1
cactagcttcagtgatctctcctttttaggccaaacaatccatccaccaccccctgcgcctccctcccccctctctaaaaatagtaacagtgcgcgtcaaatgcaattccccccactcttctctcctcgcacactcctactcctagatagcacaagctccagcagctgcaggagaagcagtagcagctgaggaagtggggattttatggccctatgaggggagaagaagacccagcagtagcagcagcagcttataccaccgcgagcaaggcaggattcttgttcttctccgccgctctgacacggctgccgacgagagaggaggagatcagccgccggtgcagccgccgccacagaaagattattgatggagctgtcgccgccgaaccacgagagctggctcgctacggcgggcggcggcggcggaggaggaggtgacggcgccggcggatcgagcagcgcgggcgcgtcgtcgtcggcgggaggcggcgccgccacgccgcagacgccgagccggtacgaggcgcagaagcggcgggactggaacacgttcgggcagtacctgcggaaccaccggccgccgctggggctcgcgcagtgcagcggcgcgcacgtgctggagttcctccggtatctggaccagttcgggaagacgaaggtgcacacggcggcgtgccccttcttcggccacccgaacccgccggcgccgtgcccctgcccgctgcgccaggcgtgggggagcctcgacgcgctggtcggccgcctccgcgccgcgttcgaggagaacggcggggcggcccgagtcgaacccgttcggcgcccgcgccgtccgcctctacctccgcgaggtccgcgagcaccaggcgcgcgcacgcggcgtcagctacgagaagaagaagcgcaagaagccaccccacccctcctccgccgccgccgcgcacgacgacgccgccaacggcgccctccaccaccaccaccacatgccgccgcctcctcccggcgccgccgcctgagccgagccgagcttgctccaagatcgccggaaaacgagctgctagcctcctacgcatgcactagttactccactccactccactccactatgatccctagctaggctgctcttgctactagcaaaactacggattaatctccatgcttgctactgctgctgctgctgctactgcatctaattaattaggttgattatttcctgatcgtttcttcccaactgggtcgctctcgcacgtcgtctcgtctactactatttgctggtaattttctcctctcctcatctcttcggccttctcctccctacttcatgtgtaatcaactactgctgtttgtgatgatgatatgatagctagctagcttctc

SEQ ID NO: 85084 - DNA, 248 bp, Oryza sativa
  Clone ID: PAT_MRT4530_84257C.1
gtgccgccgcgccgccgtctccgagccgccgcgccgccgccacaaagtcgccgcgccacgccgcgacttgcgccgccatagagtccgagagagttgcggatccaagcgaaggtcaagacccgaaagactttgagcaaggcaagtcatcactattctttgaacatgttgatcccaattgcgaaattattttgtttacaaataaaattgcatgcaatgataaacatcctacttgtgattatgccatgcct

SEQ ID NO: 85085 - DNA, 739 bp, Oryza sativa
  Clone ID: PAT_MRT4530_84258C.1
atgtcaggaaggagaaaggagacaacgctggggcaagatgagcctgatagtcgccgccgtgagcgtgagagggccgcgacgctggtgactacaacgcccgtagctggagctcctcgtcatcttcgtcggttcatccgcctcctcgcgtcattgctgcagtgctggaagaggtcgatcggcgggcgaggtgcggcattcggctgccgcaccatgagggcgtcggacagtctggcgacagccgcgcgcgctgtcaaattggcttgcggccgtggccgtgacgaggcggccgcgcgggctagacggcgccgtggagtacgggctcaccgccgtggccgccgagcacggtgtcgattggccggaggtacctcgacgccggcctgctaccgctgccgccgccgccggcggcatgcggcgaggtgagatcgtgctcctcgtcctccacccaaggcgcatcgtcgccgcaccatgacctcccggccggcgtgcacgagccctcagggacggccagtgggcgcccgtgggtggcgtcgacggtgtagacgcagtcgctggcgctgcagtcgacgtcgtctgggaagtactcatcatcacaaaagtcgaggttgccggcgtcggagtaggcgcccgtggaacacaggaaggcaaagccaggagtgacgcagagagacggcgtcaacgtggagggatggaaaacgcgacggagtggcttggcgggggaccgcagatcagagcagcccat

SEQ ID NO: 85086 - DNA, 827 bp, Oryza sativa
  Clone ID: PAT_MRT4530_84259C.1
cccacgcgtccgcccacgcgtccggacaaaataacggcagtcactctttacaaccagaagcaattgactacctcaagcactagccatgcgtgagtatcatccttctggtcggctcttaggaggatgcgcggacttttcgagtagctaggacacccagatgcgggtgtttcctaacactcgaaaactcgacatctccaatagccaggctttcctataacgccatacgcttacatccacaaagctcccaagttcgatccctccgaggtgaaggtcattcacctccgtgcgaccggtggtgaagtcggtgcctcatccgccctcgcccccaagatcggtcctctcggtctttcccccaagaaggtcggtgaagatatcgccaaggccactggtgactggaagggtctccgtgtcactgtcaagttgaccatccaaaaccgtcaagccgccgtctccgtcgttccctccgcttcctccctcgtcatcaaggcccttaaggagcctccccgagaccgcaagaaggagaagaacatcaagcacaccaagtctgttcctctcgatgagatcatcagcattgcccgcaccatgcgcttcaagtccatggccaaggacctgaagggtaccgttcttgagatcctcggaactgccttctccactggctgcaaggtcgatggccgcagccccaaggacatctccgacgacatcaaggccggcgagattgagattcctgaggagtaagcgttagcactaagaagtgttcaacgatcacgatggaacgatacatgccatagagggtgctacatagctgaatgaggatcatgtctcccccc

SEQ ID NO: 85087 - DNA, 411 bp, Oryza sativa
  Clone ID: PAT_MRT4530_8425C.1
aaaacttaaaattaataattttccaaggccttaaaaaaccccctttggaaaagcaaaaaaatttttaaagctcgacataacaaatgggttgggggttaatttccaacatggaacattgtccccaattgttaaagcactgttttttttttataccctccatacccgaatgaaaattgttggcgtgaaaaacaacccgctggaacaagcgggaagggaaaaaaattgctgggcaaaatttgcaagttttttttgacaagggattttcttgatgttctgggagacccatttgaacccgtcaccatagcccattttggggacaacactggacatgaacactttggggggccggacattggattcacctagggtgaccttgcccttcccagttgggaaattgttaaggcctaaaat

SEQ ID NO: 85088 - DNA, 4635 bp, Oryza sativa
  Clone ID: PAT_MRT4530_84260C.1
atgacaggaaagaaaaggtgcagagcaaagccacaaaagaaggacgaagatacaactgataaaggcaaactggatgagggacctctggatgctacaaaagagatgaatggagttggaaagggtgatagtcgtgctgcctgcaagaggccaaggagagcagcagcgtgctctgatttcaaagagaaatctgtacgcttatctgataaatcctctgtggtcgcgaccaatggaaataagatggaagaggaggaaatggatgccgtaaagctgacaaaattaggaccagaagttcagcgaccttgtcggaaattgattgatttcatcttgcatgatgctgatgggaaactacagccctttgaaatgtcagaaattgatgattttttcatcacagctcttatcatgcccatggatgatgatttggaaaaagatcgtcaaaaaggagtgcgctgtgaaggatttgggcgaattgaggactgggcaatatctggttatgatgaaggtactgcagtagtctgggtctcaacagaagttgctgactacgaatgtgtgaagccagcaggcaattacaaatcttactatgaccacttctatgagaaggcacaggtctgtgttgaagtttacagaaaacttgcaagatcagttggtgggaatcctaatctaggtctggaagaattgcttgctagtgttgttcgctctattaatgctatcaaaggttatagtggtacactgagcaaagactttgtgatctccaatggtgagtttgtatacaaccagcttattggattggatgagacagcaaacactgatgatgagaagtttgcgacactaccagttcttcttgctctaagagatgggtgcaaatctagagtggaagtaagcaagctgcagcctaacatttcaaatggaagcctgaagattaatgatgcagagtgtaaagaggtatctgaagatgatgatgagaagttagcaagattgttgcaacaagaagaggaatggaagatgatgaaacagagaggtaaacgtggaacaacttcccagaaaaatgtctacatcaaaattagtgaagctgagattgccaatgactatcctctgcctgcatactataaaccctctagtcaagaaatggatgagtacatatttgacagtgaagatagcttctattctgatgtgccagtaaggatcctcaacaactgggctttatacaatgcagactccaggcttattcctttggaactaatccccatgaaagcaggcgctgaaaatgatatagttgtctttggatctggttttatgagagaggatgatggaagttgctgttctactgctgaatctgcaaaattgtcttcatcaagtagttctaaccaccaggatgcaggcgtttcaatttatctgagccctatcaaggagtgggttatagaatttggtggatcaatgatttgcataaccattcgaactgatgtggcctggtataagctacggcaacctacaaagcaatatgctccttggtgtgagcctgtcttgaaaacagccaggctctctgttagcatcataactctactaaaagagcaaagtcgtgcttcaaagctttcctttgctgatgtcatcaagaaagtggctgaatttgataaagggagtcctgcatttgtatcatctaatgttgcactggtcgagagatatattgtggtccatggacagattattcttcagcagttctcagattttccagatgagactatccggcggagtgcatttgctactggtcttttgatgaagatggagcaaagaaggcatacaaagttggtcatgaagaaaaaggttcaagtgatgagaggagagaatctgaacccaagtgcaactatggggccagcatcaagaagaaaagtgatgcgtgcaacaacaaccaggttgattaacaggatatggagtgattactatacacaccatttccctgaagattccaaggatgcagatgtgaatgaagctaaagaaattgatgatgaactggaagaaaatgaagatgaggatgctgaagaggaagcacagattgaggaggaaaatgtctcaaaaactccaccatcaacacggtctcgaaagttggtatcacaaacatgcaaagaaattagatgggaaggtgaagccattggtaaaacaccttctggagaagctctatacaaatgtgcttatgttcgagagctcagaataaatttgggacggacagttgcactagaagatgattcaggagaactggtcatgtgctttgttgagtacatgtttcagaaacttaatggagcaaaaatggttcatggaaggctacttcagaaaggttcagagactgttcttggcaatgctgcaaatgaaagggatcttttcttaaccaatgaatgtttagaatttgagttagaagatatcaaagaattgatgtctgtcaatctccaatcattgccctggggtcacaagtatagaaaagagaatgctgaagctgacaggattgagcgtgccaaagctgaagataggaagaagaaaggtttgccaatggaatatttatgcaaaagcttgtactggcctgagaagggtgcatttttctcccttcctcatgataagctgggccttggtaatggtttctgtagctcttgtcagcagaaagagccagattgtgatgaattgcaaatactatccaagaacagcttcatttacagaaacattacctacaatgtcaatgactatttgtatattagacctgactttttctctcaagaggaggatcgtgcaaccttcaagggagggcgaaatgtgggtctaaagccctatgtagtttgccatctattggatgtccatgaacctgctggatccagaaaaattcatccagcatcaacaaaaatcagtgttagaagattttacagaccagatgacatttcatcagccaaagcttatgtttctgacattagagagatatttctccttacattggctttgatactttttctggatcaggtatactatagtgaaaatatagttaaagtgcctgtggatatgatagagggaaaatgtgaggtcaaaaagaagatcgacatctcaaactcagatgttccagtgatggttgaacatgaatttttctgtgaacatttctatgatcctgccactggagcattaaagcagttgcctccaaatgttaagctcatgtctgtgcaacaaaaggcaactggcgctttgaaaaagaacaaaggaaagcagatctgtgaaagtgatcaggtggattcagataaatgtacaaaggtgtccaaagagaaccgtcttgcaactcttgacatttttgctggctgtggaggtttatcagaaggactgcagcaagctggtgtatcgtttacaaagtgggcgattgaatatgaggaaccagctggtgaagcatttaccaaaaatcatccagaagctgcggtgtttgtggataactgcaatgtgattttgaaggcaattatggacaaatgtggagatgctgatgattgcatttcaacttctgaggctgctgaacaagcagctaaattttctcaggacaatattatgaaccttcctgtccctggtgaagtagaattcataaatggtggtcctccatgtcagggcttttctgggatgaacagatttaaccaaagcccatggagtaaagttcaatgtgagatgattttagcattcctgtcttttgctgaatatttccgccccagattctttcttttagaaaatgttaggaactttgtttcattcaacaaaggacagacatttcgactgacagttgcatcccttctggagatgggataccaggtccggtttggaattttagaggcagggacttttggtgttgctcagtccaggaaaagagcattcatttgggctgctgcacctggagagactctgcctgattggccagaaccaatgcatgtgtttgctagccctgagctgaaaataaatttgcctgatggtaaatactatgcagctgcaaaaagcactgctggtggtgctcctttccgtgcaataacagttagagatacaataggcgatttaccaaaggtggagaatggcgccagtaaactcctacttgagtacggtggcgaacccatctcctggttccagaagaagattagagggaacacgatcgcgctgaatgatcacatatctaaggagatgaatgaactgaacctcatcagatgccaacgcattccaaagcggcctggttgtgattggcatgacctaccagatgagaagcggaatgttaaccattatgagcgtgtgcaggtgaaactatcatctggccaactggtggacctgatcccttggtgcctgcctaacacagctaaaaggcacaaccagtggaaagggctttatggtaggctggattgggagggcaatttccctacttctgtgacagacccccagccaatgggcaaggttggcatgtgcttccaccctgaccaggataggatcatcacagtccgtgaatgtgcgcgatctcagggctttcctgacaactaccagttcgcgggcaacatccagagcaagcacaggcagattggcaatgcggtgcctccacctcttgccttcgccctcgggaggaaactgaaggaagctgttgatgcaaagcgtcagtag

SEQ ID NO: 85089 - DNA, 481 bp, Oryza sativa
  Clone ID: PAT_MRT4530_84261C.1
tcacaactcattgcatcaacagcttgtatttgtgaattttcagtgtctgaaattaaaatctatcctgtgtttgccaccaaatcacaaattttatatcatataaatatatttaatagttattataaatgccaagaaatttatgaaccaatgcatagatactagcataccacatcagaataattatcaaggtcttgaaaagacaatatctatatctgtttcactttcctcaggacagagagaatatgctctgttttaaaaatattgaatgtatactatacacattttctgtatatgtgattttagtatataaggtagagggttttgttaaaaagttatcatttttatctacccaaggaagaaaagccagctcagtgattattggaagctcttgggttataatagcagaatatagaatttagtagtaatcatagagatctgatgtcacactttcaggactttgtactgatgtttggtatattgc

SEQ ID NO: 85090 - DNA, 1298 bp, Oryza sativa
  Clone ID: PAT_MRT4530_84262C.1
atggatttcttggcctgcgtctgcctcctccacctgctcttcttggccacttcccgggtggcggcgcaggcgtcgtcgccggccagggccctggacgcaatgctgcaggaccacgcgtaccgggccttcgtgcacccgcacactggcattgtctacaacgccaccgtcccggccaacctcaccggcgtcgccctgtccgcggtccgccttcgcagcggcagcctgcggaggaaaggtttctccgactacttcgacttcaccgtccccaccggcatcgtcgtgcagccgtacgtcgagagggtggtgctcgtctaccacatctcgggaattggtctgaccactactacccgctgcccgggagctgagcttgtcgcctccgggagcccaatttctataaatttcagtgatgttagatcggtgccggcaggcggtccagctcctcggtgcgtgtggtttgatttggatggtgtgccacaattccgggacttagaggcaagcaatgtgtgctcgacgtaccgccgagggcatttctcgatagtggtgaactctagcgcgattcctcctggtccagtgccttcaggcaacattacaccgccaataccgactcctacaggtcgttctaagggcagctccaaggggtggaagattgctgttggcgtggttgggggcgtcatagcattggtcctgttggcgtcgcttgtggtttgtttggcaaggtacaaaagagataagaaattggaactgatggaacagaatgcagagactggggagacattgcgtatggcacaggttgggaggtcacaagcgcctgtagcactggggacaagaacacaaccggtgattgagagcgagtatgttgcatagatgttttcttgacatttcagcagaattcaggcaacaagggtaaccggttatgcctgcaagcatggaattgctcttcggtcggatgaggcaacaagtgttccatatcaatgagtgcggcacaaattgctagatgtaggccatagtcttggctcatgaggcttaacacattcttttaacagttttgtttggagggttatttgttctgcatggctgttgttgatgttcataattgccatgttcatagtggggagctcttttcatctccaagcaagcatagggaagaaatggttgtcgtgtcagatttggaatcccttattttttggattgttgtattcaaaggatttgggcttggcaataaaggtgagggaattttattgcgcatctgatggtgctacttcagtgaaattcattcaagcttcaaaaaaaaaaaaaaa

SEQ ID NO: 85091 - DNA, 198 bp, Oryza sativa
  Clone ID: PAT_MRT4530_84263C.1
atgagagctagcaatggtcatggggtagcttttataggggagagccacccctggttcggccgagccagggggttggccgaccccaagtgggcacctatgctgccctctattcaaggtccaaggcttgtgttgagtgtcaagagcgtaccagctggtttgatcctgcaaccagcaagaaagataataaaccgtaattag

SEQ ID NO: 85092 - DNA, 312 bp, Oryza sativa
  Clone ID: PAT_MRT4530_84264C.1
atggatgtctcggatttgctccgcgccgatgaagtgaccaacgaggtgcaaccggcgagcgagcggaacgacgacgatagcggcaacggtggtccggcgagcagtgcgcacgctagcggagttgattccgccgtggtgctccatcttcgtggctgggggccacagttcaagggcggcgctgagctgtgtagcttaggtggcatcgacagcctgaagaagtgggagcgcacaagcgacagtcatgcaccgtgcaactctggagtttgtcggctaggggatggagccaagccgaaccttcccgtcccggcgaag

SEQ ID NO: 85093 - DNA, 131 bp, Oryza sativa
  Clone ID: PAT_MRT4530_84265C.1
aaaggaaacacaactcattttttattgatatatgggggatgaatccaatagaggcgattcaagtcacgaaaaattagactagatgaatccttctagatcacatgagcaaaaactttcgacttaagcttttc

SEQ ID NO: 85094 - DNA, 159 bp, Oryza sativa
  Clone ID: PAT_MRT4530_84266C.1
atgcatacagtcaaggagatggacatgctcgccgctaagatggacctcctcatgaaacgcttggacgaatgtgctcgtgacaaggcagaaatgaatgcactgggtattcagggaatgactacccgtttctgtggacagaagaccggcgatcttgcgtaa

SEQ ID NO: 85095 - DNA, 268 bp, Oryza sativa
  Clone ID: PAT_MRT4530_84267C.1
cccacgcgtccgatggcgctcgccctcgtctcgccaatggcggctctctcactccactccgggaggatctcagcggcggctatcggcggcggcctcctctctcgcagggcatccccgatgggcgccgccgtcaccccgttcctccaggagctccttcgacttctacctacttcacgttatccacccactactcccccgccgtgctttttgccgagggctcgtctataccagaccttctaccactaacgccttattttgtctggtcatt

SEQ ID NO: 85096 - DNA, 1830 bp, Oryza sativa
  Clone ID: PAT_MRT4530_84268C.1
atgatggaggaggggttggcggtggcggatctacgggagctagtgcatctgccggatgttctggtggtatgcacttctgttggatggacaaatgaaaaacacatgctctatcttagtttattggaagaatcatttgtaagccaattacatgacagtaaatacagtttcaaggaactgtttaatcactctccaggtgcttgtatacatgaactatcatcgaagggacatgttaaaaatgtggaggctgagcaggaacatatggatgtagatgaagttgacagagctgaatcttggataaagattgaacatgtcagatcaccttctgaaaatcaagatgacgtaaaagtgtgtttttcagatgataatgcatcaagtaccaggctgattcaagagtgctatgcaagggcaacaagctctggacaatcttccacgtgccatttaggcaagaacagacattccccttctaggagtgcagattatgagtgccaaaagttagtctgtttcatttacatgagtgacatggccagatttttacaagagaactactcatgcatttccgtagagggttcagatcaaaacttcattgatgaggagacaaaaggaagtggagaaccaaatggacgatgcagcaaaaagcgactgaagtctactgctaatacgatggacgatcaagtggttccatttgtgaaggcagagttacaggaagcaagagaaaaggatgcagatatccatgacaactcaatggaagcggatgctaaaggatccgtcgacgtagggttcgtctctggcctctttgggggagatggagaccacgggggagaaggtgaatccctgcgctttcgttccgtgggggcgtctactgtcaagggacagaccaggagggagaggcctagaggagctcgccctcatggattgacgaagcagaagaggcaggaaataaaggaggcgtttgatctgttcgacacagataactctggaaccattgatgccaaagagttgaatgttgccatgagagccttgggatttgagatgacagaagaacaaattaaccagatgattgctgatgtggacaaagatggtagtggatccatagattatgaggagtttgagcatatgatgactgctaagattggagagagagacagtaaagaagaacttacgaaagcattcagtattatcgaccaagataaaaatgggaagatatcagatgttgatattcagcgaattgccaaggaattaggtgaaaacttcacttatcaagagattcaagaaatggtgcaagaggcagatcgaaatggtgatggtgagatagattttgatgagttcattaggatgatgaggaggactggatatggttactagatggatggacaggatggtgcagcgagtgtatgatctttgtgcagttggtttatgaccacaaccgaataggatccagatatctataccgcctcagttaaagctgatgctaaaggtcaaggctcacaaggataatgcccatccacgaagtgttcttcaagcctgactaacaacactcagtaactttaaatcaccatgacatctagatcgtagaggagaattcacttagtgcaagcttgtaaggttggttagacttaaaactatccactttgtaagataaagtgtttttttagagtgtagcttttccagctcttgataatggttagtagggaaccaaagtgttctgtttgggtctagaaaagttttgtttggtgtggagtgcaaccagcataaaccagcttgtttggtgcacccgactgtgaaagtgtgacttagcttcagagttcagaaagatgtgcgaccgtgattgcc

SEQ ID NO: 85097 - DNA, 453 bp, Oryza sativa
  Clone ID: PAT_MRT4530_84269C.1
agtaaaaagagtttgttttttgttttttaatgcaaggaaatgtggggggggtggataatggacacaagggaggtgggggaagaactgtaacaaggagcaccgtaccgagactggaaatacgttcaataagcacaatgcatataaagaaacggtgggggctaaggaacctaaataggatataacttatttatctagtgaagaatctgtgataatcacacggcggatgactggtggatggtttaaaaatccacgcccttttaatggaccacccacttcatacggcagtttacgggggcaaggtatcttaagcttgggattccggctttgctactggccttttctgtacgctgacagagatggttgtggtttggaatgcccaccccagacagcccatccggggggtgcgtggaggccatggatggtacagtgagcagacacccacttgagatggtt

SEQ ID NO: 85098 - DNA, 1119 bp, Oryza sativa
  Clone ID: PAT_MRT4530_8426C.1
atggggcgggtgccgtgctgcgagaaggacaacgtgaagcgcgggcagtggacgcccgaggaggacaacaagctgctctcctacatcacccagtacggcacccgcaactggcgcctcatccccaagaacgccgggttgcagcggtgcgggaagagctgccggctgcggtggaccaactacctccggcccgacctcaagcacggcgagttcaccgacgccgaggagcagaccatcatcaagctccactccgtcgtcggcaacaggtggtcggtgatcgcggcgcagcttccggggcggacggacaacgacgtgaagaaccactggaacacgaagctgaagaagaagctgtccgggatgggcatcgaccccgtcacgcacaagtccttctcgcacctcatggccgagatcgccaccacgctggcgccgccgcaggtggcgcacctcgccgaggccgcgctggggtgcttcaaggacgagatgctccacctcctcaccaagaagcgcccctccgacttcccctcgcccgccgtgcacgacggcgccggcgccggcgccagcgcgtccgcgctcgccgcgccctgtttccccgccgcgccgccgcaccacccgcaggccgacgacaccatcgagcgcatcaagctcggcctgtcccgcgccatcatgagcgatccctccaccgcctccgccgccgccgccgccgccgcgccctccgcccccgcggaggacaagccgtggccgcccggcgacatgtccgaggggctcgccgggatgtacgccacgtacaacccggcggcgcacgcgcacgcgcaggcccaggccgagttccggtacgacggggcctccgcggcgcagggctacgtcctcggcggcgacggcgaccagggcacgtcgatgtggagccaccagagcctgtacagcgggagctccggcaccgaggaggccaggcgggagttgccggagaagggcaacgacagcgtcggcagcagcggcggcgacgacgacgccgcggacgacggcaaggacagcgggaagggggcagcctccgacatgtcgggcctgttcgcctccgactgcgtgctctgggacttgcccgacgagctcacgaatcacatggtgtag

SEQ ID NO: 85099 - DNA, 1265 bp, Oryza sativa
  Clone ID: PAT_MRT4530_84270C.1
gcgttcagtttcctcttttttttttcttcggtggtgttgggagtggacaaggtagtgtgagtgagtagtgagcaccatggcgagccgagagcacctcctgctcgacccggcggcgctggccgtctcttgggctgaccccgctgcggtggagatcccgcccgagctcctcgccgcgctgggtgagtacctgtccgccaggcgtagcgacggggaggccgaggccgacgccgaggcggaggctgatgatgagttcatgatgtacgagttcaaggtgcggcggtgcgcgcgggcgcggagccacgactggacggcgtgcccgtacgcgcaccctggcgaggccgcgaggcggcgtgacccgaggcgcgtggcgtacacgggcgagccgtgcccggacttccgccgccggccgggcgccgcgtgcccgaggggcagcacgtgcccgttcgcgcacggcacgttcgagctctggctccacccgtcgcgctaccgcacgcggccgtgccgcgcgggcgtcgcgtgccgccgccgcgtctgcttcttcgcgcacaccgccggcgagctccgcgccgggtccaaggaagactcgccgctgtcgctctcccccaagtcgaccctggcctccctctgggagtcgccgccggtgtcgccggtggaggggcggaggtgggtggacggcatcgatgaatgcgacgcggacgcggagatggaagagttgatgttcgcaatgcgggagctcggcctccggaaggtgaggccgtcggcatcgtccgtaacgccggtgctaccgccggtgacggacgaggacgggccggatttcgggtgggtgtccgagcttgtgatgtagaagcacccgacaagctcaaagacatcatctctctcggcggcgacgattaagatgcagaggcgcctcgcagaacagcttcattaattaagttcacttcaattcgatgatcatttcgcaaattgcatcattcttctgtacataaacaaatatggtgcaagttaatctgaacacagcaatccgtaactgtaagtgtggcgtgcgtttgcctgcctttttttttcgaaaatcttggggagctagtagcacccttgcttttcgattattattattattatctaccagtgtagatatggagtgtaatatgctaatagcctctgcctgtttcgtgatattatcacatttgatgtacttaattatgctaaattcgatgcttttttttatctaaaaaaaaaaaaaaaaaaaaaaaaaaaaaaaaaaaaaa

SEQ ID NO: 85100 - DNA, 211 bp, Oryza sativa
  unsure (1)..(211): unsure at all n locations
  Clone ID: PAT_MRT4530_84271C.1
ccggattcccggtcgaccccgcgtccgcggtgattatgttgatccccatcctttggttgggtctcaaatatctcaatctgggtgggggatgtggggaggtgtagagagagggggaagagngngnnnnnngngnngngctntcactgcctccttcncagttnnntctcactatcgtcgtcgccgttccccattcctgcctgccggngaatga

SEQ ID NO: 85101 - DNA, 636 bp, Oryza sativa
  unsure (1)..(636): unsure at all n locations
  Clone ID: PAT_MRT4530_84272C.1
cggacgcgtggggcagtcacatacttacatgttgagagtctagattattttagtgacacatatcatgatttacaatctgacaacgaatcattctaaaatgatttgctccattaactgtcttaattatcacgaacccagatttggtttgtcacaatattaactcttgataaatcctttcacgtaaatcaacagactacactttgttaagtccgcctcccaaagaaattttgctaccttctgtccacacctctaaacaaaaccacctatgatagctaaaaaaataccaatccgaattaagataataagtttagccgtcaccatcttctcaaattgctttttgcccacataattagtcagagtgatcagctgaatgcttttcccactcagcagtgctctaaaatgttactgacaaattcattttgccaaacaaatttagttcatttacattccagaaatgtatatgtcctatcagttgaacatacttgcagggattattcttgagtccttgctccttgaagtagttgtattgtgccaatgttgaattattcagtatagatgctgagttttcatgtgttattgctctgcaaaccatggttcctgatttctactctggngtactattttngggtcagactg

SEQ ID NO: 85102 - DNA, 132 bp, Oryza sativa
  Clone ID: PAT_MRT4530_84273C.1
ctcctctccacctgcgatccatccgcgcccgcaaggaggattgatccaaacacctccgctcctagagcaatccaaagtgaggagcggttttcatcatcttattacacaccttccattacatttatataacca

SEQ ID NO: 85103 - DNA, 320 bp, Oryza sativa
  Clone ID: PAT_MRT4530_84274C.1
ggaggggacagaaaggggcaaccccggcacaataaagggcaaaaatggcccaaaaacggcccccccccaaaaaagaacccaaccaacggggacccccctacgggacaaatagttctgggccctaagaaaaccccccaggggggctttagggggagggccccttgggcaacaaggtagggcgggaaacaaaaagcccccgggtttccgggctctcccagatgaaacccggaagaacaacaaagccctaccaaggaggcccaacccggggccttccggtaaaaaaccaaaacagggaccacgggggggggcactttttccct

SEQ ID NO: 85104 - DNA, 395 bp, Oryza sativa
  Clone ID: PAT_MRT4530_84275C.1
caccacaccgggaaaaaatccacatcgataaagaggggccgagggcttacattaacgtttttgccataatcaaaacactactccggccaagctaacccggggggggagattacttttgcccgggtgcaaaagtttccaaaatagggaactggagggaagctaaacgtcccctgccacgaccgcgcccacgaccacgggcgcgcccaccccccaaaggcttccctgcagttgggtttttagccttgacccttggggtatcctcaaccagcaatggctccaggtttaagctgtgaggaaaaatgtgataccaaatgttgttcccccctccactggggggaccaaagggaacaggatttttccctttcaatgggggtctcacaggtttcaggggccgg

SEQ ID NO: 85105 - DNA, 328 bp, Oryza sativa
  Clone ID: PAT_MRT4530_84276C.1
ccggccgggccatcgtcatcgtcatcgtcctctagatgttgatctagagcttaaataatgaaagattttaataaagctccatgtcaactttgtattagagtaactggctagtagatcagtctaggttcttagtcagagctagatacaccaaaagtaatttggctagtagatgagaggataacaaaagtgtccatcttggactatagatagcaaaagtaggctgtcttgattggagaagttatcaggtagaacgcttctttttgccctttgtctgaatgaagccatagtcagtgctttcttctacaaaaaaaaaaaaaaaaaagcggcc

SEQ ID NO: 85106 - DNA, 2933 bp, Oryza sativa
  Clone ID: PAT_MRT4530_84277C.1
atggctgccctgcggatctgcacgccgggtggtggtgctccggaggccagaagaggcagtcttgctgctgccgggagcgcggttcagcatggaccggatttgatcgggttcagttcttgggtgctgccaatcagcgccggatatgccgtggaccggaggcacgcagcagctggtggagttgccgcatgccatgggctctcgtgtgctgacagtgggaggaggaagaatcatcccagggcaagtctggtgaatggtgtggtttcatctctggaggacagtagcggcggggagcctgcgctatgcgtatctgattcacctgaagacgctagctccagtggaaaagtgttgtccgatttgcgtcgggacatggtggatggtattagtggtattccaagaatttctgcgggaaagaagaaggggatgaagttcaggagaagagggcagggtggaaatagattgacacggcgtagtgctccgaggcgtgccagtggaaagagtgggcaagatcagaggattttgttgagcgaggatgatattgctgcaattttgtccagtgttacccatgaatctagcatcgaggagtgcaattctgttctcatctgtctcgagaagcatagtgataagacagctcttggtttctttgagtggatgaaggctaatggaaagctgaagggaaatgctgaggcgtatcacctagcgcttcaagcgatcgcctggaaggaggattgggaagcagctggacagttgcttcatgaaatggttgctgattcgggttgcgctctggatgctcaagcatttaatgggcttatatatgtttgtgccaaacggaggcttgttgactggggaacaaagtggcttcatatgatgcttgaaagagatgtgcagccgaatgtgtctacagttggtatgcttatgggactttaccagaggattgggaaccttccagaagctgaattcacttttgctaaaatgaggaaatgtggcattaagtgtgttaatgcctactcagctatggttactttgtatacacggttaggccattttgccaaatctgaggaggttattactctaatgaataatgatgaagtagttccgaacatggaaaattggttagtgcggctaaatgcttattgtcaacaaggcaaaatggaagaagctgaattggtattgaagtccttggtagatgaaggaattgctctgaatgttgtggcatacaatacggtaattacaggttatggaaaagtttctgacatgcagaaggcaatggaagtgtttgataggcttaagagtgcaggtttagctcctgatgaaacaacctatagatcaatgattgaaggttttggtagagcagacaaatacaaacaggcaattttgtactacaggaaactccgaaactctggatttaaaccaaatgcatccaacttttacacaatgattaacttgctagcaagacatgatgacagtgaaggtgcaacagagattctcgaggacatgcgggcagcaggctgccagtgttcatcgattgtcactgttcttgtccgagcatatgggtcagtaggaaggatgcataaagttcttcagattctaaaagcatgcttctataagaagattttgtttgatgccacctcatgctctattttagtaacaggattcgttcaaaattctctagtagaagaagctatgcgtgttttgcgcgaaaagaagtggaaagattctgattttgaagacaatttatatcatatcttgatctgttcttgcaaagaggctggctgttgtgatgatgctgtcaggatatataatcagatgcctaagtcggcaacacatccaaatctgcgtatttattgcagtatgattgatgttttcagcatcatggagagattcactgatgctgaagctttatatcttgaactgaaagcatcatcctgtgttcttgacatgattgcctacagcgtaattgtgaggatgtatactaaagctgggcgaccagaagatgcctgtttggttttggaagacatggagaaacaaaaggaaatagttcctgataagtaccttttccttgacatgcttcggacttaccaaaaatgtggcctactcgagaaattatctgatacatattactggatactaaagagtcaagttgaattggatgaagccatgtacaactgcattataaactgttgtgggcgggcaataccggttgatgagctctcaagaatttttgatgaaatgattcaacaagggcacttggccaacactgttaccctcaatgtattgctagacatatatggaaaagccgggctttttaataaggcagaaaaggtatttctcatggctcgcaagcagggtatggcagatatcatatcatacaataccattattgccgcgcatgcaaaaaatggggattttcgtagcatgatttatttcgtccagaggatgcaagaggcagggttccctgtttctctggaggcgtacaactgtatgctggatgcttacggtaaggcaggacagttggaggagtttgctgctgttctgcaaaaaatggagagagcaggatgcgagtttgatcactatacttacaacattatgatcaatatatacgggagaaagggttggatcgaaggagttgcaaacgttcttgcggagctaaagagccgtggtggcgagccagatctgtacagttacaacaccttgataaaagcatacgggatagcaggaatgcctgaagatgctgttaaactgatgcaggagatgaggattaaaggcattgccgctgaccgagtaacctatactaaccttatagctgctctacagaggaatgagaatttcctggaagcagttaagtggtctctctggatgaagcaaactggagttgctgcaactcgaacatgatggcctaagaattcagattttgttccacccaaaaaaaaaaaaaa

SEQ ID NO: 85107 - DNA, 459 bp, Oryza sativa
  Clone ID: PAT_MRT4530_84278C.1
atggcgaccgatgcttacccagtccagctcctccaccgccaagcaaccgccgccaccggcggcggccaatggcacaacctcggcgccgcctacgccgccgtcagattcctccgcccgcagggccgatccctcgtcctgtactccggccccgacggcggcgcccagcagcgcatcgtgttcgcctacccgatcctcccgggcgacgccttcgagaggatggacggcgagacgctctcctgggaggagccggagtgcggagacgagttcgcgctctgcttcctcgacgaggccgcctgcgccgccgtctccggcgccatctccccggtgacggagtcgctggccgcactggacggcctcgcggagaggctcgccgggctgcgcgtggcgagggaggagggtgcccccgccggagtggacatcgccggccggcttgctgcgatcagcatgggccgcccatga

SEQ ID NO: 85108 - DNA, 617 bp, Oryza sativa
  Clone ID: PAT_MRT4530_84279C.1
gtgagcagctggctgaactcagtgaccgacacacagtaactttgttgtatatctcaagacggcttgaaggctccctagagactttagtgaccagctgcagatccattagggacagatttctcgacatccacgacaaaatcccagatgaactagccaatactatcaccccaatagcatatcttgagcaacatcggcttaaacttgaaaaagcccaaaagaggattgccaatcggcgtgagagaaaggaccttgaagcaatcatccaagttagcaggacttctattaatgaagagaaagcaaaacttgaccaattggaagctggtccagattctacccgagttagcattgatcggcttaatgctcggaaaatagaactccttgctgagttagaacagtgcaatgctcaaattgatttagaggaacagaagcttgctgatctgcccaaggctattgaagatcaaaagtccaagttgaaagcatctgttaatcacttggccgaactaacgaagtctttgaaagtgatccctggctctgatgcagctgatgcccaaataatagatgaagtagatcaaattaggcaaagggcaatatcggccatccaaaaatatttgtctgga

SEQ ID NO: 85109 - DNA, 1067 bp, Oryza sativa
  Clone ID: PAT_MRT4530_8427C.1
gcacgaggccgtgattggggctcctgtccaacaaaaagaagagttaaatgaggatggctgatgaggtggcttttgagactgccaggaagatcatcatgcacccgctttatacgccgaggtcttcgccgtggcttgacttgaaggtgttctatgtaagggtgagcaattgcgaggtggatgagtctgcgccggaccgtctcacgctcaaccacatcccgctgtctcccgatacggttatcgaggtgaatggtcagcggagtagcatgcacaccgagttcatctcttcatccctcaggagggacagggttgacaaaatgaccgaggaggctacattcgtgagcacagatagtataaggatgacagggagtgtcaggtttcaggtgttcgataagaacgatctgctgctcacaggcgacctagagttgtgcagtgccaatggagttgtcggggaatcgaagaacagcagcaagagatggaatatgaagtgccaaccagcatcatcatgcaatggttttctcaaggggaagccgtccacagcttcagagtctgtacatcctgtgatagaggtttatcttgctggcactttctgtggcacacctattatattaacaaagactgtgcagcatatatcacggaggaaatcccaaatgaaactaaagcttgattccatccctgagaatgaggcaactgaacaacaaaaagaagagttaaatgaggactctttgcagattcagagaataatgataacagatatgagtacatactgtaaagttcttatctcgcagatatttgatagtttgtaccctttccttccatatcgctcatttcaggtatcagaatcacagaatcccaaatctgagcaagatgtggatgttgattataacagcttgtactcgaggcaggactttatagagggcgaggacggtgagctttcatggtttaatgctggtgtccgagttggggttgggattggccttggtatttgtgtgggtgttggattgggtgttggcctgctggtccggacgtaccaaagcaccagtaggaacttcaggcggcgattgccctga

SEQ ID NO: 85110 - DNA, 546 bp, Oryza sativa
  Clone ID: PAT_MRT4530_84280C.1
atgtcggccacatcgtctatctcctccgcgcctccgccggaactcccttaccgatctgctctgcccgagttgatctctcttgcccgcatcgccaccgacggcagctcaccgatcagctccgcccgcgccgatctctcccgtgctttttttaagatgttcctgggaccagtaaatctgtgggcaccgaggaaggaggatgagccccacgagggcctgagggctggagcaacacattcagccagattcaccccacttccctctatgcctaaaccccgacccacgcctcccgcatctaacctaatctctcttctctccctcccacgtgccaccaccgatccctccgtcatcgttgcatccgtccttggccaaatcggcgccaccgccatcgccgtcgctgctgccctcgaccaccaccactccgccgtcgccgcatccgcgtcctccgccacgattcatgtcgctatcgacgccttccgcgccgatctgttcctcgccgtcggctcgccctccaccgatccccgccgccgaaagccctttcgtcgctag

SEQ ID NO: 85111 - DNA, 384 bp, Oryza sativa
  Clone ID: PAT_MRT4530_84281C.1
agtgccaaccgtgcctgccatgccttgttctgggtattacgcacggcggctttacggattcctacatgccaagtgcggtgacagtgcaaaaagaaatctactaacttctgcgtctgtgcagcggacattgatgaaccaagtgtttgggtttgttatcactggaccccctaccatttaccaaggagtaatattaaaattccaagggtaagtggtaccttgtcgctcaattaacacccgggtgtgtaggtactttttgtactgcggccggcacccgcttaaaaagactagggaccatgaccttgggatgggcccggaaccgttttaccaagtgtgagtgcagttgcctcattagataaatcaaagacaccatgttgaatgttcttg

SEQ ID NO: 85112 - DNA, 288 bp, Oryza sativa
  Clone ID: PAT_MRT4530_84282C.1
atgagacggtggggtgatatcatcatagcagagggagtcaaggccgacgaccactctcgtatctcaaggttggcgattgcttcctgcctagctctagcgtcgctgtcgtcggccaaaaggcaagagaaaatctctatcgttgctctcttctatgctgcctacctcgctctctccggtgctgaccacctcaggccaccccgctggcgtcggtggcaatgtcggcctcttagcggtggtgggtggggactagggaggggagaggaggggttgcacatagaaggagagtaa

SEQ ID NO: 85113 - DNA, 754 bp, Oryza sativa
  Clone ID: PAT_MRT4530_84283C.1
gctgatggagcggcccacgcgtccgcccacgcgtccgcctcccttccctcctcttcttcctccgccttcgccgccgccgccgccgccgccgattactcgcttccgcctccgcctcaaccccgttcgtccccaaccaaccaaccgcaggtaacttcccctctggatcttccacagtatgtattcgtcgattcatttcattttcatccgggttcatcagtccaatccaagcgaatactaagctcacttgaattcggttggtgcctcgtcgtcattctgccaccacttgagagttccttcatacacacaccactcgcagtctcagcagcagcagcagcagcgcagtccgtagcaaagctgctgttatcttcctacatgcggatgcagcccagctagctaagctaggttagctgctgctgttggtcttggaggccaactagtgtaatatgttccataacgcctgcctttcttcatcaaccaaacccctgccaccactcaacccggccaacctcttcgagtcaggctgatgatgggaaccgctcatcacaaccaaaccgccggctctgccctcggagtcggagtcggagatgccaacgacgccgtgcctggggctgggggtgggggctacagcgacccggatggcggaccaatctccggtgtgcagcggccaccgcaggtctgctgggagcgctccttttggcacccagttcaccttcttcttgtaagccaatgggtaccacctagaatctccagccat

SEQ ID NO: 85114 - DNA, 1473 bp, Oryza sativa
  Clone ID: PAT_MRT4530_84284C.1
atggcgcggcggcagcaggcgcacttcctcatcgtcacgtacccgtcgcagggccacgtcacgccggcgcgccacctcgcgcgccggctcgtccacggcgccggcgtgcgcgccaccgtctgcgtccccgtctccgcgttccgcaagatgttccccgcggacgacggcgaggtggtggtggaggaggagggtggtgcggtggcgtacgcggcgtactccgacggctacgacggcgggttcgaccgggcggtggacgaccacacgcggtacatggcgcagctgagcacggtgggcgcgcgcacggtggccggcgtgctccggcggctgcgcggcgaggggaggcccgtcacgtgcgccgtgtacacgctgctcctgccgtgggtggccggcgtcgcgcgcgaccacggcgtgggcgccgtcgccgtgttctggatccagccgaccaccgcgctcgccgcgtactaccactacttccgcggcgggcgcgacgccgtcgtggcggcggccgcgtcgggggacgcgtccgccgaggtgaacctcctcccggggctcccgccgctgcgcgtccgcgacatcccgtccttcctcgccatcacctccgacgacgaccccttcgccttcgtgctctccgagttcgccgagctcatcgacacgctcgaacgcggtggcggcggcggtggcgagctcccgacgtacgtcctcgccaacacgttcgacgccatggagcgcgacgcgctcgcgtcgctcaggccacacatcgacgtcgtcgccgtcggcccggtgctctccttcctgcacgacgccgacgaaaccaagaccgcctcgtctcccaacgacctgttcgaccacgacggcggcggctacctcgactggctcggcacaaagccggccaggtcggtggtgtacatctcgttcgggagctcgtcggtgatgagcaagaaccaggtcgccgagatcgccgccgccatggcggagtccaagaaaccattcctgtgggtgatacgcaaggacaactgcaaggacgacgacgacgacaacgaggccatcaagaagctcgtcgcggcggcggcggcggcggacacgggcggcggcgggatggcggtggagtggtgcgaccaggcgcgcgtgctgtcccacgcgtcggtggggtgcttcgtgacgcactgcgggtggaactcgacggtggaggcggtggcgtgcggggtgccggtggtggcggcgccgcagtactccgaccagggcaccagcgcgtgggtggtggagcggatcggggtcggcgtccgcgccgccgcgcgcgcgggggacggcgtcgtggaggcggcggagctggggaggtgcgtgggcgccgccatgtcggaggccgtggcggggcgcgccgcggcgtggagggaggaggcgcgcgccgccgtggcacgcggcggcgcgtcggagaggaacctgagtgagtttgtgagacgatttgttcccaaataa

SEQ ID NO: 85115 - DNA, 387 bp, Oryza sativa
  Clone ID: PAT_MRT4530_84285C.1
gaacgtaacacattaaccagtttatgcttgggtgggggataaacgatgcataggcatacccatgtgtatgttacaacattgcactaactgatggaaaaacgaaacaaatgggtgacctaccattgcatgggctcttattgatcatactacatgcatattgcccgtaatcaactgcaaaaaaggcaattaagttttttgcaccctgattgtgctatgatgtggtactacatacactaactctcattgtcataaacattctttcacataagcgattgtattaaatggctcttttaacgcgtgggacatatccataaattgctgacccagaccagcatgtgttttagctgttgctataattgcatttgtaactgcagccacaactgatgg

SEQ ID NO: 85116 - DNA, 376 bp, Oryza sativa
  Clone ID: PAT_MRT4530_84286C.1
gaaacagaactaagattactggaggcacggatcagagaagacaaatccttagcgtgcgcggaaaaacaaagggacgacctgtatcattaactggactttaaaactcatgttcaataaaagaaacacactcgcacacacacatgccggcacggcatttttctgagcaacgaactcaagcgatcagagtaggctgcgctcgggataacagagaggctgggagggcgatgtccacgatcatgctacggtaaaggagctcgatgccctgtagacgaacatggtggcgcgcaggaaccaccaggtcgacgacggccagcgccttgcagatgtacagctaagccgaactcgacggtggccgggatcaggtggcgcttgtcga

SEQ ID NO: 85117 - DNA, 464 bp, Oryza sativa
  Clone ID: PAT_MRT4530_84287C.1
ctgtagaggatcgcgtttgcgcaatctgtcttgaaaaaaatgggtttacatattgagtttctttgccggtttggggaacggggcattactaagcgacattatggccccgccaatattgaccccgatgggcgatcggctattttttcccggtggtttgagcgggattctatattgtatcactctgataccgcatccactgaatccttattaattaatcatgcctatgaactggataccaaaaacagggagttatgatgggaatataatcccgttaacaggctaaacccatgcagggcatagataaacctaaagggggaaggggacatcatgccccgtatctcaccactcacctaagagtccctataccagttaaggatgaagtgcagggcattattgaccgctacagggaagacttactggcaagaagacaggttcaagatgttcctagcttctacgaggtcaaa

SEQ ID NO: 85118 - DNA, 1017 bp, Oryza sativa
  Clone ID: PAT_MRT4530_84288C.1
atggagggcgcggcggcggcggcggcggtcattaggcaccggacggtggaggcgaacggcatctcgatccacgtcgcggaggccggcggcgagggcggcgatggcgcggcggtgctgttcctgcacggattcccggagctctggtactcgtggcggcaccagatggagcacctcgccggccggggattccgctgcctcgcccccgacctccgcgggtacggcgacaccgacgcgccgcccgagatcgagtcctactccgccttccacgtcgtcggcgacctcgtcgcgctcctcgacgccctcggcctcgccaaggtgttcgtggtggggcacgactggggcgcgataatcgcgtggtacatgtgcctgttccggccggatcgcgtgacggcgctcgtcaacaccagcgtcgccttcatgcgccacgtcttcatccgctccggcgccgacgccatcaagaccaccgatcacttccacaaggcctacggccccacctactacatctgccgcttccaggagcctggcgttgcggaggaggagttcgcgccggcgcacgcgaggcacatcataaggcggacactgtgcaaccgcttcaccgtccacaaggccggcaagccggagagcgaggagtcgccgccgccgccgccgctgccgctgccggcctggctaacggaggaggacatcgactacttcgccgccgcgttcgagaggacgggcttcaccggcggcatcaactactaccgcaacatggacaggaactgggagatggcggcgccatgggcggacgccaaggtgcaggtgccgaccaagttcatcgtcggggacggcgacctgacgtaccactacgccggcatccaggactacctgcacaagggcgggctcaaggccgaggtgccgctgctcgaggacgtcgtcgtcatccccggcgccggccacttcatccagcaggagagggctgaggaggtcagcgaccttatctacaacttcatcaccaagttcataccccaacccaactga

SEQ ID NO: 85119 - DNA, 4644 bp, Oryza sativa
  Clone ID: PAT_MRT4530_84289C.1
atggctcgatccgtggcgtcctcctcctccatctccaccatgccgtcctcctccgcggcggcggcggccgccgccctagaggccgtgcaggtcctcgtcacctccctcgccgacgaatcacccgtcgcccgggacgccgcgctcgccgccctccgcgagatcgcgccgatgaacccgctgctcgtcctcgactgctgcgccaccgtctccagaggcggtcgtcggcggtttggcaatatagctggggtttttctcgtgatggcttctgcagtgaaggctctcgatcgctctgatgctgagcgtgaatttcttcggaaacttgcgaagattgcaacagcagagattgttagctcaaagattttacatttttggccttttcgggaaacaaaaccaattacagctgttacggaactcaatgtcgactggcaaagagcagcagcgagtcttcttgttgccatagggtcacatgatccagacttgatgatggaggaattatttctttacttcgctggaccaacttctgctttgccagccatgttacagatacttgcagattttgcatcagctgaagcattcaggtgttggtgccaggcagcatggcagtacataggagatgccccctctgagcttcctttcgatactgacgtcatgtcctttatgaattcagtatttgaattacttctaaaagtatggacaggttcgcgtgatctaaaggtgcggttgtcttctgttgaggctttgggagaaatggttggtcttgtcacaagatcacagttgaaatcagcactgccaaggatcataccgacaatgttggacctatgtcggaaagatcaagaaattgcttttgttgcatctcacagccttcataaccttcttaatgcatcattattgtcagaaagtggtcctcctttacttgattttgagacatacaatgaaatccaacattgcttcttggtaattagttcagcataccccgaggatttgtgcatgttccttttgaatctaattgttgttatggcttcacattgctatttaagtggacatcctgctgagctggcagttgagtttttggtgcgtcatagtgctataactgatgatgatctgaatgatcctaacactctgaaaaacgagtactttcaggacaaaagatttgagatgaaaataagcctatctggtctttcagagctaagagctgtatgtgaaaagggtttgcttttgctagcaattaccattcctgaaatggagcttgttctatggccatttatcttgaaactgataattccgaagaagtatacaggtgcggtagctacgatctgcaaatgcataactgaattgtgcaggcataaattgtctcagacaaacccactatatactgaatttaatgcttcaaatgagatccccaatcccgaggatttgtttgctcgtttgctcgtgcttctgcacaatccacttgctaggggtcaacttgccacacacatcctgatggtgatgtgttacttgggtcaacttttcccaagaaacctttctttatttttacaagatgaggtccctaagatgaaagcttacatcggtgaccctgaagaccttaagcaagatagcacataccaggaaacgtgggatgacatgataataaattttttagcagaatctttggatgttgtgaatgacagtgagtgggtaatatccttgggcgatgcatttgctagacaatatgatctatacgctacatgtgatggacattctgctttgctgcacagatgtttaggaatgcttcttcagaaggttgatgaccgaatttatgtccgtgaaaagattgactggatgtgtgcacattcaagcatgtctattcctattaatcgccttgggcttgcccaaggcattggtctggttgcagcatctcacttggatacagttttggagaagctgaagaacatattggagaatgcaggacagagcgctctccaaaggttcctatcacttttctcattgggagcaaaagttgaggatgttgatgacacatatgcagccctggcattgatgtatggatatgctgcaaaatatgctccatcaacagttattgaagccaggatcaatgcacttgtggggactaatatgcttggaagatttcttcatgttcaacatcctactgcaaagcaagctgtcattactgccattgaccttttaggccaagctgttattactgctgctgaaatggggatttcattcccactgaaacgaagagaccaattgctggagtatgtgctaacgctaatgggaagagatcaaaatgatgaccttgttgatttcagcactgagcttctgcacactcaaagtctagctttaagtgcctgtactactctggtttcgatagagccaagattacctatggaaacaagaaaccgtgtgatgaaggcaacactaggattttttgctttgccaactgagccctcaaacattgttgagagcctcataacaaacctgattattttgttaggggccattctgctaactagtggtgaagatggtagaagtcgagcagagcagctcctgcatattcttaggcagcttgatccatatgtttcatcttctgccgaacaccagagaagaagagggtgtgctgctgtaaatgaggtgttagttaagttccgcaatctctgttctggtggatttggtgtgttgggttcttatccaacattcacactgaacaaacaaattgatcaggcagcccctaggagcttgtcaagtttgccatctgcatttgtgttgcctacccgagattccttaagcttgggagagagaataatggcatatcttcctcgctgtgccgatacagatgctgaagtcaggaaagttgctattcagatacttgcacttttcttcaacattgcattgtcacttccaaagaagaaggcgtctgtgaacgacattgatctggagtcttcatacagcgctttatcctccctagaggacatagtctctatcattagaagagaggcatcaattgaccaggccgaagtatttcacagggttgtctcctctctgtgcgtcctattatcgaaagatgagatatcgtgcttagcagaaaacaccaatcacaccgtcgtgtttaatgaagttctatttgtggctgggcgggatatttgtacaaaggacatagcaagaattcgtggtggctgggctatacaggatgtttttcatgcattctcccagcataaggtgctagctattctttttctggagtacattttgtctatacttcacaaggaacctgtggcaacaaatgattcagaaaagggggagatcacctctgagtcatcagctgatgactgtattctacaagcaactatgtttgctctaaatgcatttatgaggggtggtggaaagattgggaaacaagcagttgaacaaagttacccttctgttctttctgcccttatactgaagctgggaagtcttcatggtcttgctgaattgggccggaatgaacttctacgatcattattaattgcgtttcagtcattttgtgactgtgttggtgatattgagatgggaaaggttttgccaacttgcagcatcttaagcaaagctctcaacaaaaaccagagggctgaaagggaggctgcagcagccgcactgtcagaatatattagacacagtgaaaaagaacctatattgcttgaccaaatggttctggagttgtgtcaacatgtctctgatgactcgccaactgtcaggagtctctgcctacgtgggcttgtgcagatacctgagagctgtattcctaaatacatccagcaagtcttaggggtaatattagcattacttgaagacaccaaggagtctgttcaattaactgctgtccagtgcttgttaactgttcttaatgtgtcagaacaagatgccattgacccagttttaatcaatcttttagtaaggctacgcaatctccaggtttcgatgaatacgaaaatgaggtccaatgcgtttgcagtttatggtgctttaagtgcctatggtgtaggttcacagcagtttcttgagcagattcatgccactcttcctcgcttgatcctccatcttcacgatgatgacctaagcgttcgccttgcctgtcggaatacgttccaactcctagcgcctttgatggaagtagatggtttgtcttcactcctcagcaaaaaatatttcacctctgatcgccgttcggattatgaggacttcattagggacttaacaaggcaactctgtcgactatctcctgccagagtcgacagctactttgaatctgctatccaggcgtttgatgcaccttggccagtcatcaaagcaaatgcagtttgcttggtgagctgcatgctatcctttttagatgatcaacggttcctcgctccttacttctcccaggtgtttgctattttggtcggtagactgagccaatcaccagatgcagttgttcgagcagcatcatcttctgcactgggccttctgataaagaggtctaacgtggttaagacgttgactccgaaatttgatcgggctgattcatcccagaattttcaacatggagatactcgtacgaaaacatcatccgagcctcaacaggagactatagatatgccaaacgatacacaacgagagccataa

SEQ ID NO: 85120 - DNA, 486 bp, Oryza sativa
  Clone ID: PAT_MRT4530_8428C.1
caaccgagctgtgtagttacaatgtcttttgcatctaaaaaagattagcactgttctgcccaaagggatcacaaaggcatatgactcttatgaccccatttaaaagtggatcttattatgatgcattataatccaccttgtgaacctaatttttcttgacagggttgcgttaggaaggagtgaactgccctcaaccgataaaaggggggaaggccattgatctaaagcggtaattttaattccgaagaaatgggccttgattaactcccatggacaaaggacctgctgatctgagttgcccctggggggtgggatggatcttagattctttgggaactgtcagggaatcgggcattcgacagaaaaaatccctggcaatccgattttggaccgtggtcacccggaattcgacgtacctgagcgtaccactttcctataggagcgatagagcttgcgatatggcatagctgttctgtggaaatgtat

SEQ ID NO: 85121 - DNA, 732 bp, Oryza sativa
  Clone ID: PAT_MRT4530_84290C.1
caagaagatcagaggccttcggacgcggctttttccggcgttccgccaccagtcttctcatctgcgactgcggcgctccccttccctaccggaatccccggttttgctgccccccagcccgcggagtggtcggatccttcttccgtatgcgtgcgtggtgtgcgtggagtttggttgtcgggttcaggttaaaaccctctgtagtttccatctccttttaccacttcccacatgctcgaatcgaagtaaatcgtgtgtagtagttttgagtagaatggcgctatgctatgctatgctacgctatgctacatcgtgtacttccaattgattcacagctcgcacgcttcaatctttgtagatcagtggtctgtttcactgctgtgagaaattgcgtgtggttttgcaattcatcggtgcttttttccccctttctttctaggttttgtgtatctaccgtctacagtcaccatggttggcaagctaatgggggattggaatataaatctctttttggtagttctttttttgtatgattgattttggcatgtctgtttgccatcaccttttttttttaattaggaccaccaatggatagggttgttggtattaaactcgcaccatatcaaatcatcatgttatctttctttttcaagtattctggactcgtggcctgcttgaaggaacatgggaacttttagagggtttcctttctaaaaagctggttttttttca

SEQ ID NO: 85122 - DNA, 4960 bp, Oryza sativa
  Clone ID: PAT_MRT4530_84291C.1
atggctcgatccgtggcgtcctcctcctccatctccaccatgccgtcctcctccgcggcggcggcggccgccgccctagaggccgtgcaggtcctcgtcacctccctcgccgacgaatcacccgtcgcccgggacgccgcgctcgccgccctccgcgagatcgcgccgatgaacccgctgctcgtcctcgactgctgcgccaccgtctccagaggcggtcgtcggcggtttggcaatatagctggggtttttctcgtgatggcttctgcagtgaaggctctcgatcgctctgatgctgagcgtgaatttcttcggaaacttgcgaagattgcaacagcagagattgttagctcaaagattttacatttttggccttttcgggaaacaaaaccaattacagctgttacggaactcaatgtcgactggcaaagagcagcagcgagtcttcttgttgccatagggtcacatgatccagacttgatgatggaggaattatttctttacttcgctggaccaacttctgctttgccagccatgttacagatacttgcagattttgcatcagctgaagcattcaggtgttggtgccaggcagcatggcagtacataggagatgccccctctgagcttcctttcgatactgacgtcatgtcctttatgaattcagtatttgaattacttctaaaagtatggacaggttcgcgtgatctaaaggtgcggttgtcttctgttgaggctttgggagaaatggttggtcttgtcacaagatcacagttgaaatcagcactgccaaggatcataccgacaatgttggacctatgtcggaaagatcaagaaattgcttttgttgcatctcacagccttcataaccttcttaatgcatcattattgtcagaaagtggtcctcctttacttgattttgagacatacaatgaaatccaacattgcttcttggtaattagttcagcataccccgaggatttgtgcatgttccttttgaatctaattgttgttatggcttcacattgctatttaagtggacatcctgctgagctggcagttgagtttttggtgcgtcatagtgctataactgatgatgatctgaatgatcctaacactctgaaaaacgagtactttcaggacaaaagatttgagatgaaaataagcctatctggtctttcagagctaagagctgtatgtgaaaagggtttgcttttgctagcaattaccattcctgaaatggagcttgttctatggccatttatcttgaaactgataattccgaagaagtatacaggtgcggtagctacgatctgcaaatgcataactgaattgtgcaggcataaattgtctcagacaaacccactatatactgaatttaatgcttcaaatgagatccccaatcccgaggatttgtttgctcgtttgctcgtgcttctgcacaatccacttgctaggggtcaacttgccacacacatcctgatggtgatgtgttacttgggtcaacttttcccaagaaacctttctttatttttacaagatgaggtccctaagatgaaagcttacatcggtgaccctgaagaccttaagcaagatagcacataccaggaaacgtgggatgacatgataataaattttttagcagaatctttggatgttgtgaatgacagtgagtgggtaatatccttgggcgatgcatttgctagacaatatgatctatacgctacatgtgatggacattctgctttgctgcacagatgtttaggaatgcttcttcagaaggttgatgaccgaatttatgtccgtgaaaagattgactggatgtgtgcacattcaagcatgtctattcctattaatcgccttgggcttgcccaaggcattggtctggttgcagcatctcacttggatacagttttggagaagctgaagaacatattggagaatgcaggacagagcgctctccaaaggttcctatcacttttctcattgggagcaaaagttgaggatgttgatgacacatatgcagccctggcattgatgtatggatatgctgcaaaatatgctccatcaacagttattgaagccaggatcaatgcacttgtggggactaatatgcttggaagatttcttcatgttcaacatcctactgcaaagcaagctgtcattactgccattgaccttttaggccaagctgttattactgctgctgaaatggggatttcattcccactgaaacgaagagaccaattgctggagtatgtgctaacgctaatgggaagagatcaaaatgatgaccttgttgatttcagcactgagcttctgcacactcaaagtctagctttaagtgcctgtactactctggtttcgatagagccaagattacctatggaaacaagaaaccgtgtgatgaaggcaacactaggattttttgctttgccaactgagccctcaaacattgttgagagcctcataacaaacctgattattttgttaggggccattctgctaactagtggtgaagatggtagaagtcgagcagagcagctcctgcatattcttaggcagcttgatccatatgtttcatcttctgccgaacaccagagaagaagagggtgtgctgctgtaaatgaggtgttagttaagttccgcaatctctgttctggtggatttggtgtgttgggttcttatccaacattcacactgaacaaacaaattgatcaggcagcccctaggagcttgtcaagtttgccatctgcatttgtgttgcctacccgagattccttaagcttgggagagagaataatggcatatcttcctcgctgtgccgatacagatgctgaagtcaggaaagttgctattcagatacttgcacttttcttcaacattgcattgtcacttccaaagaagaaggcgtctgtgaacgacattgatctggagtcttcatacagcgctttatcctccctagaggacatagtctctatcattagaagagaggcatcaattgaccaggccgaagtatttcacagggttgtctcctctctgtgcgtcctattatcgaaagatgagatatcgtgcttagcagaaaacaccaatcacaccgtcgtgtttaatgaagttctatttgtggctgggcgggatatttgtacaaaggacatagcaagaattcgtggtggctgggctatacaggatgtttttcatgcattctcccagcataaggtgctagctattctttttctggagtacattttgtctatacttcacaaggaacctgtggcaacaaatgattcagaaaagggggagatcacctctgagtcatcagctgatgactgtattctacaagcaactatgtttgctctaaatgcatttctgaggggtggtggaaagattgggaaacaagcagttgaacaaagttacccttctgttctttctgcccttatactgaagctgggaagtcttcatggtcttgctgaattgggccggaatgaacttctacgatcattattaattgcgtttcagtcattttgtgactgtgttggtgatattgagatgggaaagatattagcccgtgatggcgaacaaactgagaaggagaagtggattgatcttgttcaggaggttgcatgcagttcctcagtaaagaggcccaaagaggttttgccaacttgcagcatcttaagcaaagctctcaacaaaaaccagagggctgaaagggaggctgcagcagccgcactgtcagaatatattagacacagtgaaaaagaacctatattgcttgaccaaatggttctggagttgtgtcaacatgtctctgatgactcgccaactgtcaggagtctctgcctacgtgggcttgtgcagatacctgagagctgtattcctaaatacatccagcaagtcttaggggtaatattagcattacttgaagacaccaaggagtctgttcaattaactgctgtccagtgcttgttaactgttcttaatgtgtcagaacaagatgccattgacccagttttaatcaatcttttagtaaggctacgcaatctccaggtttcgatgaatacgaaaatgaggtccaatgcgtttgcagtttatggtgctttaagtgcctatggtgtaggttcacagcagtttcttgagcagattcatgccactcttcctcgcttgatcctccatcttcacgatgatgacctaagcgttcgccttgcctgtcggaatacgttccaactcctagcgcctttgatggaagtagatggtttgtcttcactcctcagcaaaaaatatttcacctctgatcgccgttcggattatgaggacttcattagggacttaacaaggcaactctgtcgactatctcctgccagagtcgacagctactttgaatctgctatccaggcgtttgatgcaccttggccagtcatcaaagcaaatgcagtttgcttggtgagctgcatgctatcctttttagatgatcaacggttcctcgctccttacttctcccaggtgtttgctattttggtcggtagactgagccaatcaccagatgcagttgttcgagcagcatcatcttctgcactgggccttctgataaagaggtctaacgtggttaagacgttgactccgaaatttgatcgggctgattcatcccagaattttcaacatggagatactcgtacgaaaacatcatccgagcctcaacaggagactatagatatgccaaacgatacacaacgagagccataaagatggtcaaaaccaatctctgctagatgtaactctgtaaatcgtgtatgtacggtttagtcgtgcatgtgcatgactgtagataatagaagagtttttgtgtaggacatgccaataggctttcggtagcgagtggcggctgtacagaaatccgtcacgttcgttgattgttatttcttttattgattgaattcgctcagcagtaagcatgtaaaacaaa

SEQ ID NO: 85123 - DNA, 122 bp, Oryza sativa
  Clone ID: PAT_MRT4530_84292C.1
atctcttcgaacgtcatactaatccaattaccaggggtcatttgaacccttggaggggtacccgacaacatctagaaacccgtggtctactccgaatacttcatccagtagacctaataagg

SEQ ID NO: 85124 - DNA, 291 bp, Oryza sativa
  Clone ID: PAT_MRT4530_84293C.1
atggaggagaaggctctgatacagtccaccttgaaatttgaggatttctggaagacttcttgctaccacctggaggaggatgtccccaagaaaaagaatgatgataaagagattgaaaggtattctgataggaaacgtaagacacattccaaacgtgaagctcttgcgtcatatcttatactaactcctgcaaatttccctgtggaactagtgcaaggttctaagcgaggacagccaagcagtaagaagctgcgttgggatagaagctcaggtttgtttcataaagaatga

SEQ ID NO: 85125 - DNA, 1352 bp, Oryza sativa
  Clone ID: PAT_MRT4530_84294C.1
cgcctttttcgagtgagaccgaagggaaagaaaaaaaaaaaaactaaaatctcatcggagatggcgagaggcggcggcgtcgcggtggccatggccgtcgcggtggcggcggttgtcctcctgctccaccctgccgcttctgcggcggcggcggggccgaagaaggtggcgacggccgcgaggaaggaggacatcccctacatccggtgccaggtctgcgagcggatcgcgcgggagatctcggcgcaggtggcgaagaagcagcaggcgctcccggcaacgaagaaggtgccggagatcgagatcatcgagatcgcggagaatgtgtgcaacctgaagaagcaggaggcagactggatgctcaagatcgatatcgtagagaaaggcgataagctcgagctcgttgagcaagatgaggaagggcactgtaatgcagaatgcaaaaccattgagcgtgcatgtcaggaggtgatggggtatgctgataccgatgttgctgaattcgtctacaagaaaaaaccttcagctgatcagctggtcaaatttctttgcaaagatctttctgaagcatgcgttgtggatccaccaccagttccaaaagatcgggtccctggcgaaccttttgctgctaagccatcaaaagatgctgagatggataggatattgaaatcgatggagggtattccaggagctccaagcatgaaaatgtactctagagatgatctgatgaagaacaattttggtgttgacggtgatgatgacgatgatgatgaagatgaggacgatgacttcccaaagaacttgggaaaagttttcaaagataagggttcaccaaagaaagatttgaaacaacaagttgtgaagcagatcaaggatacaggcaaaaagttaaaaggccatgtgaacaaggtgtcaaaggtggtaaagaaatggtggcaagggaagaagaaaccttcaaaatccagcaaaactgaactctaaataccacggaatttccagtccaattttgcattctcctggagatagattgattgtcggaaggttagcgtgccccccagcaaaacatccacagctttcatagatgatcagaacataaacgtgtacaatttttttccagaaattttcagtgtacacctaaactaggaaggtaactggacgagttcggcatgaatattcatgagtcatagtttgcaagtttaggaaaaacaccaattgattgttgctatgccatactctgtaaaacaacggccataccagtaaattagatgattggctgtctgaagttctgttcatctatttaattaaggatgcaatctacctgtccaaaaaaaaaaaaaaaaaaaaaaaaaaaa

SEQ ID NO: 85126 - DNA, 534 bp, Oryza sativa
  Clone ID: PAT_MRT4530_84295C.1
atgggcggtacagatgagaaaggggaggggaaaatgcaaataccggaagacaggttgactagtgcaggaatacctttacaaggttttggtggacaacaagtacatgcacttggcaagatagctttgcaagttgtttttggcaagggtgacaccgtaagaaaggaggaaatagtgtttgatgtggttgacatgctgtatcgatataatgcaattcttgggagatcagcgatgaacatatttgaagcaatcatccaccataattacatacgcatgaaacttccgggaccaaggggagtgataactatccgaggtgctcagctagcggcaagaaagtttgaacttcaaggaacaacaagcgtgaaaggggtacatgtagttgatcaaaaacatagtgaatacttgaaaatgcaaaagccagtcccagaagggaaaactaagaaagtactattggatgaaaacgacctgggaaaatatatcttgcttggagaaaacttggagagacaacatggatgtatttgcttggtcaccagatga

SEQ ID NO: 85127 - DNA, 642 bp, Oryza sativa
  Clone ID: PAT_MRT4530_84296C.1
atggcagtgatgaaaagccagcttgtcctggccactctgttcctagcgggccttgtagcgcgaggcgcggaggcgagtatagccggcgtcgtctactgttcactgcaatgcctcacattgcccaatcttctgccgaaggctaccgtgcgtctgcagatcagtagctacgaaatcccgactgctggcaaccaaggcttcatcaggaggaacagcaagggccaattcgtggtgttgctgaacgtgacatcgagcgagatgatgggttctctgatgagcggcagcggtagagtggcggtgatcactcctcctccggcggcgagcggcggcgcgtctctccccgccgccgccgccgccggcgggacgaccttggtggcgccggttgtccctcacggcgcaagaatactcggtgccaccgctgcagacaatacactgcgtcaaattctcgaccagctgcaatcttcgagtgatctgcttccaggacttgcgcaaggactagattacctactcagtaacgccacaatggaggttctccgtgagctagccgacgacatagtcccaactggagtatcctacggcggcgacaccgttgatgcttatgttgcttttgacgtcgggcccttctcctactctcctaacaattga

SEQ ID NO: 85128 - DNA, 370 bp, Oryza sativa
  Clone ID: PAT_MRT4530_84297C.1
tttggttttttttatttttgggttttttttaaccaaggatctgattttttggataaatttccagagtaactggaacagagaaaaagatggctcattggctgagacctgatacaaaatactttcagaatgcagttggacttgcaccaatagatccaacctcaggggagacattgggcgagagaggacactgaatggctggactggtactcctgggcaaaagcttggctcttagttgagggtcctctgtacaatggcaacaggaccccaagaagaaaatagaaaattaagttccatataaaggcaagaggagtatacatgcggcgaactactacttaggaggcccttcaatctgaagggcaccaatatacag

SEQ ID NO: 85129 - DNA, 330 bp, Oryza sativa
  Clone ID: PAT_MRT4530_84298C.1
atggttctttgcgacgacagtgaaggtggcgggagctcagtagaaccattgatgatgttggggccgatggtggacttggagggtcaattggatagagaagggcatgtggcgaaagcttccaccaagaaggtcgatggggatcatcgtccttgccagggacgtcagcaacagatgatagagttcatcgacaaggacttacatcaacagcatagtggtgagctcctctacatccaactacaagcatctaatttcatgagggtggagtttgtcgacgaggactacatcaacggccacggtggtcagctccgctacatgcaaatgcagatctaa

SEQ ID NO: 85130 - DNA, 312 bp, Oryza sativa
  Clone ID: PAT_MRT4530_84299C.1
attggaagggagagacatgcaataagggtaggtcgggaatacatacacgttaattattacactataggaaagcgggcattaatcaataacggaggattctcggtgctttacaggtacaggaaaggatcaagagcgctaggtaggacctccgcccccgccgactccctccctgagcctggtcctcaacccgaagtaccccggcgcccggtgcgcgcccgtcgtcgtcgtcgaccacccggtcaaggtcttcatgtacaaactgacagggagcaaacacgtcggcatgatggacgcctccgcctcggggtttcc

SEQ ID NO: 85131 - DNA, 551 bp, Oryza sativa
  Clone ID: PAT_MRT4530_8429C.1
acgagaaaccacgaacttggattttaaagatgccacaaagaaggttcacataaacaacgcaggacacaaaagctaaagctacaaacgaaccctgcctaatcgaaaaacaaatgtttttcaaaaccacacacacaaactgatagatagaagctccgcaccgcacagatcataggataagagcaccaatcaatcattgccaaggaaccaagcaagaaccctgaacctctctagtacttgttaccctgatgaccctagccaccattgataaaactcagagcccaccttctcttagaccttgttcagggaggtgaggccctggcgggactttaagaacttcccttactccatgccctcgccgacgtaccaggggaccaaggcgcgcttggagaacatgaggtccaacttggtgtccatgcgggagaacacactaactacgctggtggagttggagatcatgcacaaggtcctctgcaccttggccaagcctccccccgggacgacgatgggcggctggtacctgatgccgaacttgaaccccctggggcaccaga

SEQ ID NO: 85132 - DNA, 502 bp, Oryza sativa
  Clone ID: PAT_MRT4530_842C.1
gccaaaccgatccgcaaaagtaaaattgatctaatatgatacatactactggtgtaattgttgttacacatcaaaattttatactgacacatattattactattattcgcatgatactttcaagatttagaaaaaaaaacaaaataattaaaaatacctaatcattaaaatacactttcaatgaaagtgtcggaacatgaaaatgaaaattaaaatgttcttttagtagttaattgtacatataaaaattatcttggtcttgaatagataaataaacattagacgagttatatagatgatcaattttttccaaaaaatgaaataaatattgtatcctatacatgaaaaataaacttttggacatctaattcctctttttatttggattcgaaataagatctccaaatcatagttgtacgtatatgctgttatgtcattattgtgcactaatttagaacaattttacttgtatggatcattttggcccggttcgcacctacta

SEQ ID NO: 85133 - DNA, 261 bp, Oryza sativa
  Clone ID: PAT_MRT4530_84300C.1
atggcggtagctcgaaggtggcaatggtggctcaagcttgacggcggcaaactcatgcctctcgtatctctggcgacatccaacgatgacgtgaagctgattgggagcgcatgcaacgaatcatgccatgtgtggacgaagattgaaaccgcttgggccatatacacggaccagcccaacagccagaagcctgttgctctccatgggctcgtgccacgtgtcaatcctgtggttgggtttcgtagcggctgcgtttcctag

SEQ ID NO: 85134 - DNA, 793 bp, Oryza sativa
  Clone ID: PAT_MRT4530_84301C.1
ccacgcgtccggacggacttggatccatccatctcccattcattcattcattcattcatgtggccatccatccaccatcttgcatgctagctagctaccctgcaggcccataacgacattattcaattcgaattaattccatcatcatataataatatatatgatgctgagctcgtcggcgtcgaggcgggaggtcggcggcggcggcgccgcctccagcaccaagagcggcgagctgtccctgtccaaggtggccagcgtggccatacgggagtcgtcgggctcgggctcgggcgggatttccaagagcagcgaattgctgtcgagggcaggaaccatggcggcggcgagggaggcggcggcggcggcggtacaccacgaaggatggatggtgcgctacggccggaggaagatcggcaggtccttcttccacacccgctacttcgtcctcgacagcaggctcctcgcctactacaagaagaaacccaaagacaacatggtgccactaaaatcgctgctgatagacgggaattgcagggtggaggatagaggactcaaaacacatcatggacaaatggtctatgtcctgtgcgtttataataagaaagaaaaggagcatcagatcacgatgggcgcgtatgatattgaggatgctctggcctggaaaaagaatatagaactcattatcgatcagcagcaagaaaatatgaccttcaaaaaccgcaaggcctttgcttcaatggactttgatacggaactaggagggcagtttatattctcagaccatgacagc

SEQ ID NO: 85135 - DNA, 429 bp, Oryza sativa
  Clone ID: PAT_MRT4530_84302C.1
atgaggattgctgttgttgatctgtggtctttgatggatgaggatagggattattgtgtagtggtgaggatggagttgctgacggtgctagaggtcggtgttgctactgcggcgctaatgttcgccaaccgccacggccgcctctatgaggccaacacccgcagcttcctcgacctcgccgagcatgacattcgcgtcgccgttgtcaacatcaccgcgggatccatgaacgcgccattctacaacacccggtcggtcaaggtcgcgtatgtcctagatggcgagggggagcccgagatcgtgtacccgcacatgttcccgcacatgtcgcccggtggccgcggcggtgagagcgaggagcgccgccgcgagcgcggcaagggcaactggcgtgaggaggaagaggaagaggaggagcagaaggggtag

SEQ ID NO: 85136 - DNA, 1064 bp, Oryza sativa
  unsure (1)..(1064): unsure at all n locations
  Clone ID: PAT_MRT4530_84303C.1
cccacgcgtccggaaaagccgaaactgttggacagtacctgacagcaagctgtttaaagtccgtagcaagaacttcccgcatgataaatcaaagatacctgcagcgagttacctgatggagcttgcggccattgactggtttaaggacagcaagcgtatggataacgtangcaggcagaaaggctgtgtagcccaggtagctgctgagaaagggatgcatacatttgttgccaacatacagatccctggatcaactcattacagcttggtgatgtacttcgtgacaaagtcgctgaagaagggatcactgctgcagcgattcttcgatggggatgatgagttccgcaatagcaggctgaagctgataccctctgtacccaagggatcatggatagtgcggcagagtgtagggagcacnccgtgcttgctggggaaggcggtggattgcagctacgtgcgtggagccggatacctggaggtggacgtcgacattgggtcgtcggcggtggccaacggggtgctgggtttggtgtttggtgtggtgacgacgctggtggtggacatggcgttcctaatacaggccaacacctacgaggagctccccgagcaggtcatcggcgccgcccgtctcgctcacgtcgaacccgccgccgctatcgtcccccaggaccttactccccctcctcctgcccttgccgacgacgacaacgccgctgcttcttcctccgaggatgatcatttgtccaagaaaaccaactaagctagcacctctctcaacgcacgcactgcaacttatcaatcatttatcttcttgtaatttctaattatttccgaggctcatagcaagctttgttttttttcttttcatctttttttttatctcgttaagttgtttgcaaagtacagctggttttcttctacgtaggaacaaagataaatctagctagtgacagtatttcgttggaacctaatattatagactgagatattttgtttaggcttagatttgctgtctttggctttaagtcagacttttaattaacttacactccctccattttttt

SEQ ID NO: 85137 - DNA, 2058 bp, Oryza sativa
  Clone ID: PAT_MRT4530_84304C.1
atggcggcggcgagggaggcggcggcggcggcggtacaccacgaaggatggatggtgcgctacggccggaggaagatcggcaggtccttcttccacacccgctacttcgtcctcgacagcaggctcctcgcctactacaagaagaaacccaaagacaacatggtgccactaaaatcgctgctgatagacgggaattgcagggtggaggatagaggactcaaaacacatcatggacaaatggtctatgtcctgtgcgtttataataagaaagaaaaggagcatcagatcacgcgttatatcagtatatatatgactagatttaattcgcagatgggcgcgtatgatattgaggatgctctggcctggaaaaagaatatagaactcattatcgatcagcagcaagaaaatatgacctccaaaaaccgcaaggcctttgcttcaatggactttgatacggaactaggagggcagtttatattctcagaccatgacagcgcagctgaagatgaagaggaacgacctatgttgattcgcaggacaactatagggaatggactacgcatctttgaagaacttctggaattcgattatcttgcaagaagctgtagcagagctatgcgagctgttggtgttgtggaagccacatgcgaagccatttttgggctggtgatgagcatggatgtaacaagatatgagtgggactgcagctttcgctatggtagtttagttgaagaggttgacggccacaccgctatactgtatcataagttgcagttgcactggtgcccaatgttagtatggcctcgagacctatgttatgttcgctattggcggcgtaatgacgatggaagttacgttgtgctgtttcgatctacagagcatccaaactgtggacgtcaaaaaggatatgtgagggcttttattgaaagcctacgagaatacttctcccaaacagacgaaacacatataactccaaggattcctgtgatggaaaacatggttgacacatctgcagtacagaaagatgacaagaagagtaccgaagaagtagactccaagactaaaacaccagatcgaggacaagcggacagtaaaaacatgggaatcattgatgaagaaacagacgaggatgaggactatcaggttcctgaagctaacatagaggaagatcctaacaaagatgctaagcgtgcagacgaaccaccagaaaagattgatctatcatgcttttcgggcattcttcgttgcgatgcggatgagaaaagccgaaactgttggacagtacctgacagcaagctgtttaaagtccgtagcaagaacttcccgcatgataaatcaaagatacctgcagcgagttacctgatggagcttgcggccattgactggtttaaggacagcaagcgtatggataacgtaggcaggcagaaaggctgtgtagcccaggtagctgctgagaaagggatgcatacatttgttgccaacatacagatccctggatcaactcattacagcttggtgatgtacttcgtgacaaagtcgctgaagaagggatcactgctgcagcgattcttcgatggggatgatgagttccgcaatagcaggctgaagctgataccctctgtacccaaggtaggtagtccagctgttggtctcaggtggtggggtggggtgtgcccgcagggatcatggatagtgcggcagagtgtagggagcacgccgtgcttgctggggaaggcggtggattgcagctacgtgcgtggagccggatacctggaggtggacgtcgacattgggtcgtcggcggtggccaacggggtgctgggtttggtgtttggtgtggtgacgacgctggtggtggacatggcgttcctaatacaggccaacacctacgaggagctccccgagcaggtcatcggcgccgcccgtctcgctcacgtcgaacccgccgccgctatcgtcccccaggaccttactccccctcctcctgcccttgccgacgacgacaacgccgctgcttcttcctccgaggatgatcatttgtccaagaaaaccaactaa

SEQ ID NO: 85138 - DNA, 960 bp, Oryza sativa
  Clone ID: PAT_MRT4530_84305C.1
ccacgcgtccgggaacgacctatgttgattcgcaggacaactatagggaatggtccccctgaataatacatgactggaccaaagagcatgatatcggtccacccaatcagattgaccccattcaagttagctccaagaagaattggcgcctacttagatgccaaaatggactacgcatctttgaagaacttctggaattcgattatcttgcaagaagctgtagcagagctatgcgagctgttggtgttgtggaagccacatgcgaagccatttttgggctggtgatgagcatggatgtaacaagatatgagtgggactgcagctttcgctatggtagtttagttgaagaggttgacggccacaccgctatactgtatcataagttgcagttgcactggtgcccaatgttagtatggcctcgagacctatgttatgttcgctattggcggcgtaatgacgatggaagttacgttgtgctgtttcgatctacagagcatccaaactgtggacgtcaaaaaggatatgtgagggcttttattgaaagtggaggtttcaagatttctcctctcaagtgtcgcaacggaagaccccgcactcaagttcaacacctaatgcagattgatctcaggggatggctcgtcaactactctccttcctttcagtatcattctttgctgcagatacaaaactgtgtagccggcctacgagaatacttctcccaaacagacgaaacacatataactccaaggattcctgtgatggaaaacatggttgacacatctgcagtacagaaagatgacaagaagagtaccgaagaagtagactccaagactaaaacaccagatcgaggacatgcggacagtaaaaacatgggaatcattgatgaagaaacagacgaggatgaggactatcaggttcctgaagctacatagaggagatcctaacaaagatgctagcgtg

SEQ ID NO: 85139 - DNA, 330 bp, Oryza sativa
  unsure (1)..(330): unsure at all n locations
  Clone ID: PAT_MRT4530_84306C.1
cgggcgcgtcgcagacgcctggcagagagagtgagctctcttgcttttttcagctagctagctaccgccactgttactgttgctgctgctgctgctgcaacatctccatccggcattggagaatccaatcgatccattaattccagccatgtgtggaggaggccccgacaatcaccacgccatcaccgtcgccgccgacctgnngncgncgncgncgtcggtggtggcggtggagatggcgncgncgnggggccaccnnccngnnaagnagntggagtacaatnagnaggnagnaggacgangacgacgagtacgacgnncgtnaagttn

SEQ ID NO: 85140 - DNA, 1837 bp, Oryza sativa
  unsure (1)..(1837): unsure at all n locations
  Clone ID: PAT_MRT4530_84307C.1
catataaccccctctcccccacttctcccccacaaactagggtttcactcgccgccgccgcccccgccgacgtcatggccgccgacacctccaagcccttcttcccggcggcgccgaaccccgccctcctcccctccggccgcaagccctcccgcctctccccggaggcctcctactggcgctccttccgcgcctccgagctcacccccgccaacgagttcaacgtcacccacctcgccttctccccctcgtcggcccccaccctcgccgcctcgttgtccacctccgtgctcctcttctccggcgacccgctctccccgctcccccgcatccccgcctcccaggacgtcgccttctccccgtccttccgctccgacggctccctcctcgccgtcggcgacaagaagggcgtcgtccgcgtcttccgcgccgacaagaagcagtcgtcgggcgcgctccgcacgctcacggcccacaccgccgagacccgcgtcgtccgctaccccgtcgccggcggcgacaaggtccacctcttcaccgccggcgacgacgcgctcctcgcctactgggacgtgccatccgagacgcccgtgttcgccgcccccgccgcccaccgcgactacatccgcgccggcgccgcgtcccccgccgaccacaacatcttcgccacgggctcgtacgaccgcatcgtcaaattgtgggacgcccgcatggggaagacgtcgacgctgtccttctcccatggcgaattggtggagagcgtgctgttcctgccgtccggcgggctgctggcgacagccggcgggaacgtcgtcaggatttgggatgtcattggtggcgggcggcttctccactcggtggagagccatgtcaagacggtgatggccctcgcgctcgccaagatgaccaacaccggcgagacgcggctgcttagcgcggggagtgatggttatgtcaagagctttgattatggcgagcttaagctcacgcactcgatgcgatatcctaaggaattgctttccttggcgtgctcgccgtgtgggacagtgctggttgctggatcttcaaagggcacaatttatatgggtaggaggaaaaagaagtcgacaggggaggacgaggaagagggtaagggtgttggtggtgagcttgattgggcaccaaccaagccggagaagcggcggttggcaccgtccaactataggtacttcctccgtggacaaaatgcgaaggctaaggaaggtgaccttgtgattgagaagcctaagaaggtgaaggttgctgaacacgataagttgctgaggaagttcaggcacaaggatgctctagtttcagcgttagctcgaaacaatccaaggagcatagtggcggtgatggaggagctagtttcaaggagaaagctggtcagatgcatcgagaacttggacacggaagaactcgttcttctcctgctgttcctgcaccgaaatgcaaccttgccaaggtatgccaggttcttgatgggggtggcaaacaaggtgctggagatgcgcgcggatgatatccgatcagatgagaacctaaggggttgtgttagaaatcttaagaggatggctgcagaggagattcagatacagcacacattgcaggggatccaagggatgatttcacccatgcttgcacttgccagtagatgaacaggtgcttttcttgtatcggaattcttttttggtctgttaagtttacagtgagggcatgccacattccatgaatgntgtatgnttagtttacaaactattaatcgccactgaaaattttgggctgtcaatccaatcggntatactctgttgtgccgcgg

SEQ ID NO: 85141 - DNA, 977 bp, Oryza sativa
  unsure (1)..(977): unsure at all n locations
  Clone ID: PAT_MRT4530_84308C.1
cccacgcgtccgagatgctataaatgaccaggttatttgggcatcaaacagtgaatcttctcattcaactgattctccagtttcatgcgcaacacaaattcagaaagatgaccatgtaccgagactagatgaatcatcagttccgaatttcccagaaactaacaaggccatcttggttgaagaagatttcattagtgatccaattgaaggcatgcacagggaaacagtcgaaataaaggggagatgcagaaaaactgggctccatagaccaagaccaagagacagacaattgattcaggacaggatgatgnagttgaggcagcttgttccaaatacatcaaagtgcagcattgattctctcttggacaaaaccatagcacacatgcagtttctccagtgtgtatcagagaaagccgataagcttgagaaaataataaacagcgagggatcgaccaagaggcaaccgggaagctgtcctctgaaagttgaagtgctcgatcagccgggtcatctcctcctgatcgagatggtgtgtgaggagtacggtgtgtttcttgagattgcgcatgtgatgaaggaccttgaggtgaccatactgaaagggttgctggagagccgttcagacaagctctgggctcgctttgtcatccaggcttcacaaggcttcgaccagatgcagattctatacccactgatgcacctgttgcagaagcagagatggagctgagctctaccatcatacatctaccatgggtctgcatgttgatcattgtgggcttgttcaataatagtatgttaggctccggtttgatagaataatctactgcatgcatactgctgtcgcctgctttcttgctagaatgtatgtaaccacaggacatgaatgtatgttataaacttgtaacaaaatacagatataggctatcaacaagcattgcaaattggcatccattgaaatgctaacaccacatataatc

SEQ ID NO: 85142 - DNA, 224 bp, Oryza sativa
  Clone ID: PAT_MRT4530_84309C.1
ggcacgagcaatgatggtgatgcaccttttgttgccgtatatttttataacataaacaacaacgccaatcagcttgaacccaggcaaaaggagttcctattagccggcaacaacaatcgggctcagcaacaacaagtatatggtagctcatttgagcaacactctgggcaaaacatatccagcggatttcggtgttgagatgctatgtgagtctttaggcatca

SEQ ID NO: 85143 - DNA, 462 bp, Oryza sativa
  Clone ID: PAT_MRT4530_8430C.1
atggcagtggcacgggcgcagccgcacagagaagacgcccacgtgctcctctcgccgtcagtcaccgcccactcccagcgccctgaagaaaaagagcggcaagagcaagagggagaggagcgcagcaaggacgccgagcgcgacgggcggcgagagaggagcagtgtgcaacaagcggtgagagtggagcggccgctctccgtggggggggggatggccatcggggagaagggcaatgaccggcgggaaggagctaggcgatgggcgcggtgtcaccgagctcgaccgctgtggggaggtctagggacctccgctcccgcctcgccatcaggcctcctaagctcccgccgcggcgaggctaagcaccaaacccacgacaaccacggggatttgggtcccctcccgtcgatgatggatccaagagccagtcaaagttggatcccctctcgtcgcgtctcctaa

SEQ ID NO: 85144 - DNA, 174 bp, Oryza sativa
  Clone ID: PAT_MRT4530_84310C.1
ctacttctccccctctttaccttttcctcctcggttcggttccgtggctcgcctagggcttagcgggttgagatggccgccccggatgcatccatccagtcgcttcgtcggcggagctcgcctgggccacacgagagccgctccctcgaggcctccttctacacccaccgccag

SEQ ID NO: 85145 - DNA, 357 bp, Oryza sativa
  unsure (1)..(357): unsure at all n locations
  Clone ID: PAT_MRT4530_84311C.1
tcccaaagctnaaatttaagctgtccgaatccaactagaattggctaaggtcgcacatgntgatttacatttgntatttgcactgatttgactgttataatatgtgcgtgtcatgtgtcccttggatctcccatgagtgatacatgcataagactngggtcttttcacttagaggctgtatgattcacttanctaatgtttatttaagtaggatgcagtgatcaccatntgtcaatgtaagattgcatctncatgaagcaatcgtttttgnattgtgtnccagacaaagaaatagttttctaggatgtgcacccaancanccagtttttcacncatgaaaaaaaaaaaaaaaaaaaa

SEQ ID NO: 85146 - DNA, 527 bp, Oryza sativa
  Clone ID: PAT_MRT4530_84312C.1
cggacgcgtgggtttttttttttttttttttttactattaacaatgaacttatcaattgaattctcctaaaccccaaatataaaaaaggagatttgaggaagtaatcctcggtggtaaaaaaaagttggaaaagatatgaacaagaagatgaaagttctaagttttttttcttcttccctaattatgattttctgggatgggcaatgatgcctccgcaccagacactcacgagatggacggccgagatgagacgacgacagctcaacagaggatggcctccacgccccctgtccggacgcaatggcagacggggcacgccatggccacgtccacgtcgccggcggcgaagcaatcgccgcagaggctgaggtgcctgcaggggaggagcaccacggtggccggcctcaggcggcaggtgaggcaggcgcggtcagacccgctgcggcgcgggtccacgtacgccgacgaggacgactccgccgggcccgcctcgccgccacggagctcatcgccggacgcccgcgcc

SEQ ID NO: 85147 - DNA, 2389 bp, Oryza sativa
  Clone ID: PAT_MRT4530_84313C.1
ttacttcccaagcacggtgaagagccatgagcagggaacaagtggtagcgaatcatactttgcaactctcttcgtgacagtatatgggttggtctcgagcagattctccagggattttgccttcctgcttctcccccgaccagcctccttgagtagctctgcaagcctccgcttttcgtcatcgacgtctgggttagctgtgcccagcttctcttcgcgcatcccaactacatgttccaagatctcaatggcctcatccagccttcccatggcatcataagttccagcaagattgctgtacactcctaaagtatctggatgataaggtccatattcttgctccagaacagctctagcttcctcaaacagttctgcagcttcatttatcgagtatctttgaacacatgccaaccccatctggttcagggcaacaccaaagaaggccgtctttttctcaccacaagtgcggagctttgcaatcgcactcttgaatgagtcataagcttctccatagttccccaaaatatagtgcaagacgcccatctgagcctcaattccagcaattgtgctctgttgaccggcagaattgttgtacatttttaaggccttctggagtaacttgagtgcttgctcatgctcattcatggtttcataaatggctgaaacatcagttaaaccggtagcaatttcttccaatgaagttcctggaataggtttctgataaattttaagggcattttcacagtatgattttgactccctcagcttccctgtcttgttgtatagatccgcaagccgcacaaaaacagaggccaccgttgcatgattctcccctttgctagtcttgaatacagtaagagctttctgataagaaaacacggcctcatcataccggcccaaggagagataaatgtcaccaatgctgcaatctactgatgctacctcagtttcctggccattggccaccatggccatgctagccttcaccagatgctctaaggcagcttcatgacatccctttcatctccccagcaacaaggtggcgaagctccgagtcgatcctcgattcctccccgtcggagccgtagctctcccgcgagggggatccaccctcgcttgagctctccatctcgcacacattgttgtagagctgctcaatcgatggctccccggcgccggaaccctccacatgcatctccagcgcctcgctgtgcatgcttttcgaagccaccggcgatcttggggcggacgaattgtccttgttctgcgaggagttcacctcgttttgtgcctcctctgtgacaactccatccacgataattccaggcattttgcgggagaattgtaccaagatctttcagctcaagccccccaatttctccttcaagctcgatccgagccggagatgccggccgcgctcgcgcgcgaggaggaggcctgcggctcaatggctccggcttttcctctcgacgccacgcgctctcctctcctctcgtcttcctcttcctctcgatttgcatccgcgaggagagcaaatctctcgcatgcttaagaagaaatggaccaaggtctggattattaagcccagcatcttcagtcccattgtgtggattaggactagctttccgtcgacggccaactcggcttccgggtttgctgacctcggcctcaccttcctcggtggatgccttgccattaggaccaacagaagactcagattcaagctgtgatttcgcagcctttttcgacgacttcttcgatgaattcgaagacatcgccttgacgggagtcccattctcagctgcggttaccgcattagcggcattaccactcccttccccttcctcctcctcaattaccttcatggcctccatctccccagcaacaaggtggcgaagctccgagtcgatcctcgattcctccccgtcggagccgaagctctcccgcgagggggatccaccctcgcttgagctctccatctcgcacacattgttgtagagctgctcaatcgatggctccccggcgccggaaccctccacatgcatctccagcgcctcgctgtgcatgcttttcgaagccaccggcgatcttggggcggacgaattgtccttgttctgcgaggagttcacctcgttttgtgcctcctctgtgacaactccatccacgataattccaggcattttgcgggagaattgtaccaagatctttcagctcaagccccccaatttctccttcaagctcgatccgagccggagatgccggccgcgctcgcgcgcgaggaggaggcctgcggctcaatggctccggcttttcctctcgacgccacgcgctctcctctcctctcgtcttcctcttcctctcgatttgcagccgcgaggagagagagaga

SEQ ID NO: 85148 - DNA, 355 bp, Oryza sativa
  Clone ID: PAT_MRT4530_84314C.1
aataaaacaacaacaggaggggaaaagaagaacgcggggggaaaggaaaaaagggcggagggcagggaaaaaaaaggaaggggggggcagggcaacaaagggggggaaacagcaggagcagtcgaacaagaaagggcagataacaaaaaaggggggaaggaacaagaccaggggggctaggggggcggggaaatactaaggcatgtgggaggaggcccggttacgggggggggagcggggcacacagggccccaggacacaaaagacggcaattcaaacaaacaagagtcagcaagcaagaaagcgccctcaaaaaacggggatatgccccaccgttccaagaacttaaaggccc

SEQ ID NO: 85149 - DNA, 1209 bp, Oryza sativa
  Clone ID: PAT_MRT4530_84315C.1
tgttttgttttctcggcctcttctttccggcccttggacatttaaaattgaaccgtaatatgcctgtacaatttattatgcatgatatctgctgcaatatcaaccaaccaagctgttcagtctcacactgtctacaatataaagttataaaagctcagctgcgtatagcatggaagcagcgctttacttcccaagcacggtgaagagccatgagcagggaacaagtggtagcgaatcatactttgcaactttacaacaattaatcagaacatttgacatttctagattctcaaaacaaatcctattttcaattacccctctcaccaaatctgaaaaaagaaaaacagcccaatttgatacaccttagcgtcatgcttgcatcaagcttctcctcgcaaagcagtgtgtgcctcatgctgcaactgtacctctcttcgtgacagtatatgggttggtctcgagcagattctccagggattttgccttcctgcttctcccccgaccagcctccttgagtagctctgcaagcctccgcttttcgtcatcgacgtctgggttagctgtgcccagcttctcttcgcgcatcccaactacatgttccaagatctcaatggcctcatccagccttcccatggcatcataagttccagcaagattgctgtacactcctaaagtatctggatgataaggtccatattcttgctccagaacagctctagcttcctcaaacagttctgcagcttcatttatcgagtatctttgaacacatgccaaccccatctggttcagggcaacaccaaagaaggcccgtctttttctcaccacaagtgcggagctttgcaatcgcactcttgaatgagtcataagcttctccatagttccccaaaatatagtgcaagacgcccatctgagcctcaattccagcaattgtgctctgttgaccggcagaattgttgtacatttttaaggccttctggagtaacttgagtgcttgctcatgctcattcatggtttcataaatggctgaaacatcagttaaaccggtagcaatttcttccaatgaagttcctggaataggtttctgataaattttaagggcattttcacagtatgattttgactccctcagcttccctgtcttgttgtatagatccgcaagccgcacaaaaacagaggccaccgttgcatgattctccccccacgcgtccg

SEQ ID NO: 85150 - DNA, 776 bp, Oryza sativa
  Clone ID: PAT_MRT4530_84316C.1
gtgaggccgaggtcagcaaacccggaagccgagttggccgtcgacggaaagctagtcctaatccacacaatgggactgaagatgctgggcttaataatccagaccttggtccatttcttcttaagcatgcgagagatttgattgcctccgataatcctcgtcgggcactgaaatatgctcttcgtgccaccaagtcattcgagaaatgtgctggtggaaaaccgagcttgaacttggtaatgagtttgcatgttgtggcagcaatctactgcaacttgggaaagtatgacgaggctgtacctgtactacagcgctcccttgagatccctgtaattgaagaaggtcaggagcatgctcttgcgaagttctctgggtgcatgcaattgggggacacctatgggatgctaggccagactgcgctatcactgcaatggtatgccgcagggcttgaaattcagaagcagacattgggggagcaggatccaagagttggagagacttgtcggtacttggctgaagctcatgtgcaggcattacaacttgatgaagcacaaagattgtgccagaaggctcttgatatccacagggagaatggtgagccagcctcattagaagaaacagctgataggaggctgatgggtcttatctgtgacacaaagggtgatcatgaagctgccttagagcatctggtgatggctagcatggccatggtggccaatggccaggaaactgaggtagcatcagtagattgcagcattggtgacatttatctctcc

SEQ ID NO: 85151 - DNA, 442 bp, Oryza sativa
  Clone ID: PAT_MRT4530_84317C.1
ccgcgccacggctccagatccgtcgtccgccactgcccctcccctcgcccttgccggatctggtagccagaccaccaccgcgcctcccctcccgcccctgccggatctggcggccgggccaccgccgctgcccccgccggctcggcgacgcacctcccctcccgcccctgccagatctgccggctgggccaccgccgcgcctcccctcctgcccctgccggatccggcggccgggccgccgccgccccagccggcccggcgccgccgcgcctcccctcgccacggcacagagaaagagaggagagatagagaagaagtggaagagatagaggagaagtggagaagagggagccggccggccttatctcctcatgtgggccccgctgggagaggagacatatatatacagtggcagaagtcatctcaaacgggccggacttaa

SEQ ID NO: 85152 - DNA, 477 bp, Oryza sativa
  Clone ID: PAT_MRT4530_84318C.1
atgaacaaaaaaaaaagaggaagggttgggaggggaagcgccgccggggacatcctttttctcgaaatccccgggcagggaggaggggaaacactagggcttcagggggatttgggcgcggtcctcggcggccaaatcggcttgaaccggaacggattcaggctgagcagggaacactccatgaagcagccaccaacggcggcggcgtcgtcgggcgctcagtcgctcaccccggccgattcaggccaaaccgctcaccttcaacacgcgggcgcgcaaggaggtcttcgtcgggaagcttcaggtggaggtcgacggaggacgtcgccccatgccatgctaggagctcgctggtggcagtcatggtgcaggctcttgcgcaccttgagcgcccgctctgcatccgcaaggaggagctgctcccgcgcccgtcgcccgaggtccaccgcgcaccctcctgctgccgcctccacttga

SEQ ID NO: 85153 - DNA, 546 bp, Oryza sativa
  Clone ID: PAT_MRT4530_84319C.1
atggctgacattgctcgccgggaagcggaggtcgacggcgctgcttcttccaagatcgcggcggcgctggggctgttcggcgtcgccacggtctctctgatcatcaacctggccgccgcgtgcgacccaccgccggcctacggtggtaacacctactaccacctcgctcttgtgggttccttcctcgccggaatgggccaggttggcgcggccatctgggtctccgacgacccacgcggtcgccgtgccgccgtcggcaagaagatcatgatcgcctccatcgcgccgctcgtcgtcgccgtcggcctcaccggagcggctctgctctggagtaatattagtggaggaggagagggtaagggtcgcggatttgcggctgcggcggccgagggccacggccatggcgccggcgacttcgccttcgccctgcccacccactccaacgccgtcagcttcgcagtcggtgtcgtggtgggcttcacactgaagagaagactacgccggtgggccgctaggctgctgaaaagaatcaaggacgatgactag

SEQ ID NO: 85154 - DNA, 424 bp, Oryza sativa
  Clone ID: PAT_MRT4530_8431C.1
atgtcgaacaccggcgataacatcaacactggagccaaggagaaggaggctcccgtcaacaccaacggaagcaatactgcctcaaactctagcggagggccattctcggggtataacgttttactactattgttcgttcttcgtttcctgctagtgacagccacaatgtcattgcgttgtcttgtttatgttgacgcttattttatattaagcatactcatgttgtatacatttagcactgtcactagatccacttatattgcaaagattaaaatatgccaaattatgaccaaatttccaacagcgtcaagggtgcgcacagcaagctccatggtgagctgcagcacaagcgagccaggggcgacgctgcaggtgagctgagctgcaggcgttggggatggcggcgcggcactgtggatgtcgg

SEQ ID NO: 85155 - DNA, 486 bp, Oryza sativa
  Clone ID: PAT_MRT4530_84320C.1
atggggtcggtcgccgacgtggagaagcagcagccgctgctgtccgcggcggcggcagacgagaagccgtcgtcgggctgcgactgcggcaccaccgcgtcgccgcccttggcgacgggggcgctggcgctggtcgtcctcgcggcgggcgccgccttcgccgcgcagctcgcggcgcgggacgagtacgtcctcctcgccgtcctcgcgtcgcaggtggtcagcttcggcgtcttcacgtcgctgctcgcgctgtgcgcgctcccggaggaggagggcaagccccggcgcatcgccggcgcgccgggggcgcgggcgcgggtgctgctgctgtggccgttcgcgatggcgctgccggtgagcatggcgtgctgggcggccgagagcgccccggccgccgtcggcttggcgctgctcgtgctggcactggccgccgtcgtcgcgtgctacgccgaggtcgttcgctccctgtggccccgccagtga

SEQ ID NO: 85156 - DNA, 740 bp, Oryza sativa
  Clone ID: PAT_MRT4530_84321C.1
tcacacacgtgacgccaacgtggcaatccagtcagcaaaacaaaacaaaataactccctgggcccacttgtcagatttatccctcaacccccctgctctctcttgcgcatgatcttggactagtagccagcgacaggcggcggaagcggacctcgcccggtcggcagcaggtggcggaggcggacttcgtccggtcggcagccggcggtggaggcggacctcatccgggcggcggtggcggacttcgtccaggcggccggcggcggagacgagccttgctcagtcgttgggtggcggagacggaccttgtccaggcggcgggtagcggacctcgtccgtcttggttgaagtcgatcctctctttgtcgtggtcggagaagatgcggtcgccggggcggcctcgagcccatgacgagctccacggagatggaggcgtgccagtgctctcctctcctctgcactcctctctctcctctcctctgctctctgctctctcccctccacgcgcgccacggagccggcgcggccccttctacgactcccgcaaccacctccccaccgttgggagccgcggcggcgagccgatgcacgagtggtccgtgaggaggcagtcgtgcgaacaggaccgtgtcggcgcctcgtcgacctctgcccaggggcgaagctacatgcagctatgggggttcctaggaatccggccgggaattaagcagcagggcacgtgccacgccacgccatga

SEQ ID NO: 85157 - DNA, 626 bp, Oryza sativa
  Clone ID: PAT_MRT4530_84322C.1
gtcacactctttgtatatgagaggcgacttggaggggaaggaggaggacgggcgcggtgggggcgaacatggctcaccgagtgatgcgatacgcacaggcggacagggggcagcggaccacctggacataatgagccagccgctggctccgcacaaccagctacgggcagctgatgagaggcagattattaccagagacggcatagtatgtgcacgtgcgcccactgtcttcctttagatacctgcctgacatgcatgatacaagtacacagacatctgccagacatgcacgcgaactgataaatggcagccactgctgcctgctagatctgaactatgggctaccgtaccgcgctagggatacatcactaggtctcaatacacaagatgcaactccaaggagtgatgttgaaccgtaagttctttgctgaacagcatgatcgtatagatcagggctggaagcctaatgatcattcccatgggaaggcacgtgaaagtgacaccattctgaatgttcataggacaggaccatattacacagagtaattgagctcatgtacgccaatgctaactgcgttgtgaactgacaagaggtgctcgttgtcctgatctacatgatatgcctg

SEQ ID NO: 85158 - DNA, 385 bp, Oryza sativa
  Clone ID: PAT_MRT4530_84323C.1
caagcaaaaaattttaaactgattcaaacttcaaagtacaatataagcatgatgaactaacattcactcactccactccagaccagatgaacaacaataaacaacatagcacaactttgaaaaaaatttaaatgaaaaaacataactcaataaaattattgttggtccagctgcaactcacggtagtcaaaccaagccccaaattcgacttcagttcaggaatgctgctgttcctttttttattcgatccgcacttctcccgttattcatatacatgaacttgcaaatctcttcaaaaaagccatctgcggaccatgggcagttctttatttgaaaaatcctgacgaccatcctccgcatcctggaactgtacttgactagggac

SEQ ID NO: 85159 - DNA, 105 bp, Oryza sativa
  Clone ID: PAT_MRT4530_84324C.1
atggtggctgctaggagtttatataggtggaggaatgaccaggagaggaggtgggagcaaaccctagcctgggtcaaagttgatggtgaggtcacacatagctga

SEQ ID NO: 85160 - DNA, 288 bp, Oryza sativa
  Clone ID: PAT_MRT4530_84325C.1
ttcgaattgagggacggtggatctgattacttgggaaagggtgtttccaaggctgtctacaatgagaactctattattgtcccatctcttattgttaagttttctactatatcttgctcatctatataacttcaattttcatctttctaacttgttccaaatactatgttcttttttctactatcttttaattcttttttttttattcatctctatttttttttcctcttctatttcttttatccttttttatttcatttctttcttactatttcactctattctttt

SEQ ID NO: 85161 - DNA, 220 bp, Oryza sativa
  unsure (1)..(220): unsure at all n locations
  Clone ID: PAT_MRT4530_84326C.1
anntgggcaaacacataatatacacattaaataatcgggcacacagtacataatcaatattacaaaatttatcacacggatttggaaattaagaccacttttggccgttgctcaccttggaaaattctggccactctctaccctggagacaaccggttgcgactacattatatttatataggatgggggaaaaaaaaaaataaagggggaaactgccctt

SEQ ID NO: 85162 - DNA, 214 bp, Oryza sativa
  Clone ID: PAT_MRT4530_84327C.1
attaatatacaaaatatatatttgcgcagggtaaaattaactatgacaacataaacacacttattgccataattaaacctgtttcacaacaaagcataatgcataaacacgcataccagtcacagcatgcatacagattcatacaggaactcaatttatataacaaccatacacactataaaagtgaaagtaccaaataaaattagacaacaaa

SEQ ID NO: 85163 - DNA, 835 bp, Oryza sativa
  Clone ID: PAT_MRT4530_84328C.1
gagagagagaggaaaaggaggaggaggaggagatcgaggaggggatggggatccggttcgtggtgatggtgaacaagcaggggcagacgcgggtggcgcaatactacgagcacctctccgtcgacgagcgccgcgccctcgagggcgagatcgtccgcaagtgcctcgcccgcaccgaccaccagtgttctttcgtggagcaccgcaactacaaggtggtgtaccggcgctacgcctccctcttcttcctagtcggcgtcgacaacgatgagaatgagttagctatccttgaattcattcatcttttggttgaaactatggaccgtcactttggcaatgtgtgtgagctcgacattatgttccatctggagaaggtgcacttcatgctggaagagatggtgatgaatggttgcattgtcgaaactagtaaacagaacatcttggcaccaatccacctgatggagaaaacttcttagaaaaatgctatccaacaggggagtgcctcatactcttctgcttatcgccaccgcctctgtgattctatggatttttcatctcaatgtgtaaccatcaacgatttccatgtgcatagactattaaacttgacctgataggaaataatgagaatatgtcagatgacgtctctgttctttaaaaaaaaaaaaaaaaatgactggagatgattatatgctgaatacaaagatgcgatgtacttttcttcatgttatttcattttgattttttacacatgatttgtgaagattacaaagccactgattgtgagatcataataagtgctacggcttaaattgtcaaaaaaaaaaaaaaaaaaaaa

SEQ ID NO: 85164 - DNA, 205 bp, Oryza sativa
  Clone ID: PAT_MRT4530_84329C.1
gcggcgtcttgttcgatgaggacctcgtgcgacatgcgtaggaagggagggcgctgccgagatgactcaatctacatacgggtcctcaagttcttctgcaatgtagacctccttgcttccctacccatagacgggccactaccgtacctgcaacttattcggcaaaaaaaaaaaaaaaggacctccgggccttccagattaaccg

SEQ ID NO: 85165 - DNA, 1133 bp, Oryza sativa
  Clone ID: PAT_MRT4530_8432C.1
atgcagatcttcgtgaagaccctgacggggaagaccatcacgctggaggtggagagcagcgacacgatccagaacgtcaaggcgaaggtgcaggacaaggaggggatcccgccggaccagcagcggctcatcttcgccggcaagcagctggaggacgggcgcacgctggccgactacaacatccagaaggagtcgacgctgcacctggtgctccgcctccgcggcggcctgaacgtcaaggtgaggacgctcaccggcaaggagatcgacatcgacatcgagatgacggacacggtggacaggatcaaggagcgcgtcgaggagagggagggcatcccgcccgtgcagcagaggctcatctacggcgggaagcagcttgccgacgacaagacggcgcacgactacaagatcgaggctggctccgtcctccacctcgtcctcgctctccgaggcgggatgcagatattcgtgaagaccctgaacgggaggaccatcacgctcgtggtcgacagctgcgactcggtcgagaacgtcaaggcgaggatccacgacagggagggcgtcccgccgcaccagcagcggctcatcttcgccggcaagcagctggaggacggccgcacgctggccgactacaacatccagaaggagtcgacgctgcacctcgtgctccgcctccgccgcggcatgaacgacatcaaggttaagatgctcactggcaaggagattgacgtggacatcgagccgacggacactatgggcaggatcaaggagcgcatcgatgagagggagggcaggctcgtctacggcgggaagcaacttgccgacgataagacagtgcacgagtacgatatcgaggccggatccgtgctcctccacgatcgtccttgctctcaggggctagatgcagatcgtcgtggagacccagatggggaagctcatcacgctcgaggtggagagcagcgacacgatctgtcaaggagaaggtccaggagaaggagggcatcccgatcccgccggaccagcagctgctcttcttcgaccacaagttgctggagaacggctgcacggtggctggctacaacatccaggacggctcgacgctgagcctctatctccgcctccttccaggcagc

SEQ ID NO: 85166 - DNA, 126 bp, Oryza sativa
  Clone ID: PAT_MRT4530_84330C.1
atggcgctgatcggtattgctggctgcagccagcctaatgcaagttcattttctaccgctgcaacaggatgcccagcttgctggctgcaacaaccagcagaaacgatcagcgccaatatggtggtg

SEQ ID NO: 85167 - DNA, 1256 bp, Oryza sativa
  Clone ID: PAT_MRT4530_84331C.1
atggcgagcggcggcgcgcggcggaggaagggtcgccggggagggagggggaatgtgaagaggaggaccaagtatctgagtcttagtcggttcttgattaagaaggaggaggaggaggaggtggtggtggtggcggtgaggtcgccggagttggtgcccaaggatgaggcgccgtcgtcgccggaggacggtggggatggaggtgaggatgaggaggaaaagccgcagatggagccgttcgcgctgcatcctgagccgtccacgctgttcgcggcggcgccgtcgctcaccgacatcctcggcgcctccgctggcggcggcggcggtgccgggggcgagtcgtcgtccgcggcctcgccgggcgtttctggcgggaaggagctctccggcgaggaggatgacctggcgcggcgcgcgctacgggggcgggagcggtgggtgtactgtagcagctcgtccccgagcgcgacgaccaccaccaccaccacgacgtcgtcctcgtgctcctccgcggcgagcacgggcgcctcaagcggcggcgccgcggcgcggtcgctgctgctgaagctcgactacgaggagatcctcgccgcctggccgggccgcggctcgctctacatcggcggcgccgccgccgccaccgccggtggcacggacaacgccgcggcggagctggagctcgactccgtgttcgtcgaggtgtcggcgtcgcctgagcccgcggcggcggcggcggcatggagcgtggcggagccggcggcgagggcggagaaggtgaggcggtacaaggagaagcggcaggggcggctgttcgcgaagcggatccggtacgaggttcgccggctcaatgccgtcaagcggccgcgcctgaagctcctcctctttccccctctccctcgtcgcctgccgccgagccaccgtcgccatcgccatctcatcgccgcggccgcgccgtcgccgtcgcgtcccgcctcgcgccgcgcgtgcgtcccatcgtcgcctcgcgccgcgcgccaccactgccgcgccgtcgttgtcgccatcccgtcgccgcgtgcgcgttccatcgccgcctcgagccgtgccgctgccgcgccgcgcgccgtcccatcgcctcgcgccgttgccatgtgccgcgccgccttacgccccgagccgcgccgggccgtcgtgatctccggccgcgcgccgcgcgccgtcacattgccgccgtgcgccgtcgtaccattgccgctgccgcaccgcgttgccgtcgc

SEQ ID NO: 85168 - DNA, 426 bp, Oryza sativa
  Clone ID: PAT_MRT4530_84332C.1
atggccaaaagtgagcttgaggttgagcttggggtcaatggattggcgagttgtcaagtgacagacttattccggttgcacttaaattggattccatcgacggacaacggcacagacgccacgctcgagcagcgcgaccacccccacgggaggagaaagggaagtgctttcgcgacaacaccggctcaaaacaagcggaacccgtcgcgagacgacctccgtgctgccgccgccggacgccgagctgaagccgggaaccatctgccgtcgccgccgccgcggcgccgcgtcgagcagaagaacggggaggagacgacgccgcggttacaggcttgcagtgttgggccgggccgagacatggtgtacctggaaggtaggccgaggaatggagacacctctaggttcaacgccggcgggtctgggtag

SEQ ID NO: 85169 - DNA, 2093 bp, Oryza sativa
  Clone ID: PAT_MRT4530_84333C.1
cttgaaccaactaaatccgagctaagatgaattagttatgaatttttgaagatttaatcggattaaaacacttatatggattttaattgaattatgacgcacatccaaaacggacggccgagatcgagtggtccacgaccggctcacggcaaacggccacgatgacgtcagcggtgacgtcaccaccggcggcggctcgggcggcgcaggcggtcgaacggccaccggcggcgacggcgcgtcacgggcaggcccgggaggcggccagcgaaggggaggaagagggagagggagaggagtgggagacggagggggcgtcggcacggccggacgtggctccgaatgccagcggcgagcggctggtggctgaggagttgaagcggctcgggtgtggtggtgcaatggcggttccagtggtggagggggaaaatggagcggaggccagggtggagctcggcggggcgatgccggcggtggcggcggcatggcgcggcggtggctagagcggcgaggaggggcggccggagctcgtcggtgagtggtggagagagggagcgcggtggggaggtggttccggcgatggaatggggaaacggagcgggggccgaggtgtggcaccgtgcggcggagcctacggcggtggctacgcggcgtggcgaccactagggcggcagtggcgggcggccgaaggttgccggcgagcggcggcgatggggtgcggcggtgtcgcggtggtttccgggcacgggagggctcgggagagaggggaaaagagagaaggaggtgcggggatcgttttatagagctcgggaggttgaaatcgtggccgggagaggtgggattggccgatggaagcgggacgccgacgtggggtggtggcggctcggccggcgccggtttttgtgggacgagtggggggaaatggtggggaagaaggtggcggcggcggcggcgcccgtggcggcggcggcgatggcgggcgcgttcttctcggcgctggcgtcgacggacgcggcgctcgcggcgcagcagatcgcggacgtcgccgcggcggcggcggtgggcgcggcggcgggtgccgggctcgcgttcccgcccgaggcgtcggcggcgcaggaggtggcgaggctggcggcggaggcggcggcggcggaggtggttgggaggggggcaatggcgagcggcggcgcgcggcggaggaagggtcgccggggagggagggggaatgtgaagaggaggaccaagtatctgagtcttagtcggttcttgattaagaaggaggaggaggaggaggtggtggtggtggcggtgaggtcgccggagttggtgcccaaggatgaggcgccgtcgtcgccggaggacggtggggatggaggtgaggatgaggaggaaaagccgcagatggagccgttcgcgctgcatcctgagccgtccacgctgttcgcggcggcgccgtcgctcaccgacatcctcggcgcctccgctggcggcggcggcggtggcgggggcgagtcgtcgtccgcggcctcgccgggcgtttctggcgggaaggagctctccggcgaggaggatgacctggcgcggcgcgcgctacgggggcgggagcggtgggtgtactgtagcagctcgtccccgagcgcgacgaccaccaccaccaccacgacgtcgtcctcgtgctcctccgcggcgagcacgggcgcctcaagcggcggcgccgcggcgcggtcgctgctgctgaagctcgactacgaggagatcctcgccgcctggccgggccgcggctcgctctacatcggcggcgccgccgccgccaccgccggtggcacggacaacgccgcggcggagctggagctcgactccgtaagcgccccactcgccccactcttcttggacacgccccgtggtgacactgacaccggcggcgcatgctcgtgcaggtgttcgtcgaggtgtcggcgtcgcctgagcccgcggcggcggcggcggcatggagcgtgtcggagccggcggcgagggcggagaaggtgaggcggtacaaggagaagcggcaggggcggctgttcgcgaagcggatccggtacgaggttcgccgg

SEQ ID NO: 85170 - DNA, 520 bp, Oryza sativa
  Clone ID: PAT_MRT4530_84334C.1
gaactgaaataactggacacaactcgattctgatttcagagtccataagagggttgatgatttgggagtgaactctaaagcatagaagagttttcacctccatcagcaactcaatctgcagttaatcgcaggtggcatttgaaattttgcatttacaattttagccatttttgtgtgtacagaaaccattttgcggcaagaacttgagttctgaatcgtggaacattaggaaggttgaagtatccaaaaggggcactgatcagcatcccccttgcatcaaacaaccgaagcgtccaaataattttggcatccatacattatcactatgtccaattgtagacaaacgtagatggatcaaattcccgatgcaactttatattgcacctcgtccatgctaggtaacattaccatgttcttatctgtgacgactgaaacacgtcgaagtttagacacagtgttacctaccaatgattctgggtttccaacaaaacattcttcccttgacaaataacaagcaagc

SEQ ID NO: 85171 - DNA, 592 bp, Oryza sativa
  unsure (1)..(592): unsure at all n locations
  Clone ID: PAT_MRT4530_84335C.1
cnaaaattttnanaagggnaaaccnccttttgaccntccaaatttnggngcaaatttngaaaanaanttcngantgggggnggttnaanggggttttggngggggagggggccnaanaaaaaacccttttgtttttttggaattttttgggcnnaaangggnanccggcccaagggtttttgggngggnantccangntttgggngcccaaaaancaggccnccnnatccccnnngantntggggttttttttttncggaagcanaattgnaantnttggggggcccaagttttannanggggggntntttttttttngggnanaaanntttaaannntttggttttggatcccntncnaaattttttngngnngngggnggaatnaaaaaanttggngggggntacccntccccngnnaaannaannaaattcaaaggntgggnatnaanttttntnaacccannnnannntngggnnccaaaaaaanggngnnttggngggnaaaaaaaaaaaaaaaaaaaaaaaaaaaaaaaaaaaaaaaaaaaaaaaaaaaaaaaaaaaaaaaaaaaaaaaaaaaaaaaaaaaaaaaa

SEQ ID NO: 85172 - DNA, 220 bp, Oryza sativa
  Clone ID: PAT_MRT4530_84336C.1
ccttgggaagggcttctacacggacacggtggcagcatgcgggctcgagaacagcggatccaccgtcggcaggatcgggagcaccaaatccgtcctcagcattggatccgccgccagcgtgctcgggaagggcggatctgccaccggcaggctcgggagcgacagatccaccctcacgcatgatggagaggaggcatatggctgtagtggcgacgcctga

SEQ ID NO: 85173 - DNA, 1676 bp, Oryza sativa
  Clone ID: PAT_MRT4530_84337C.1
cccaaaatatgggcccctgggggggctcaaaagtgccggcaccgcacaacattgctaacagaacaacattgctagctcttttcgagataggttcttgatctaatgcaaagataattagacaggaactatgtaagttcatcaaaagatgcacagcagcatagcggttttcttgtttttttttacaatggattgctagtgcaataccagcgcggtctacttgtctgtgcccctttcatgtctcatatgaaatcaccatcgtatgggcaacctgaaggaggaatgatcatcaagccatcgatgtatgacatgtctagaagatctgagacattcgccagatgttgctccagtgtgcatgggtctgaggaggtctccaaagaacaaacattcttagcttggttgaaatcagccagtggtggttcgacaatcttttcacatactgatggaacttctggtgaaaaaccttggagtacagctggtggagaaacgatgttaacttctggactcatttctttactttcctgtaagtgcctttcagattctgccacagcagacaccttgagctccaccgggcttgacaggaaaaccagcttcttccttgctcttttacgccaattcaatctatcccttatcctctgagaagcttcacctgaatcaggatctggtctttctgtacatatcaactcagaactttctccttctgatgtatcagtattttcacataggtctatgaacccttgtttagactttgagcttgtcccttgtttagatttggagcttgccccttgtttatatttggagcttgccccttgtttatattttgagcttgttctttgtttagacattaaacttgcttgtaaatctgataacaactgattctcaccagatgaaccatcacattttgagcttgccccttgtttagattttaagcatgctcgtaaatctgataatagtttattctcatcagatgaaccatcacattttgagcttgcccctttagattttaagcttgctcgtaaatctgataacagttgattatcaccagatgaaccatcacactttgagcttgcccctttagattttaggcttgctcgtaaatctgataacagttgattatcaccagatgaaccatcacactttgagcttgcccctttagattttaggcttgctcgtaaatctgataacagttgattatcagaagatgaaccatcacattttgagctcaccccttctttagattttaggcttggtcgtaaatctgataacagtttattctcatcagatgaaacatcacactgctgaagaatatttgagtcactactctgcgaaactgatagattttcaggcagaccaggagattttttgagcaatcctgaagctaaatacgaatttaattttcttttcataggacctctccagtgttctttgattgcagcacttgtcctccctgtgaaatgttctaacaattttagttcagaaagccttttgaagtggttagatgcatgctcccttactctgcattgttgtgcatttcgaccaggtatagcgcgtgcaacagtttcccagttgttatgcccatatatgttaatcatttgaataagtgactcatcctccaggttacccttcccctccccctcctcctccccctccccttccccctccactgctctgctcgccat

SEQ ID NO: 85174 - DNA, 474 bp, Oryza sativa
  Clone ID: PAT_MRT4530_84338C.1
cccacgcgtccgcggacgcgtgggagagcgtgcacagccaggcgaagatcgccgggacactgttcacggtggctcggagccggtgctggagtggtgtctgtacccacaggcactcggtgggtcgctagttctccgatggaccgaaggggcgagcacgcacagacgagcgagctctccgcgccggttgtgcggcggacggcggcttcctgcagggcaccatcttcatcggagacgaatgcgtgtgctggtcggtcttcttcgtccttcagtcccacacctgtctgggtgatgaacgtcgtgccgacggccgccgttgccaacacgctcggcgtgatctacgagcgagggctcatcggaacgtaccaagattggtgagaggcgatgtcaacttatactaggacgtatgccgtctctatacctgcgtatacgccggtatcgtgtgctgcgcttagcgtactacgtgcaggggatcgt

SEQ ID NO: 85175 - DNA, 1999 bp, Oryza sativa
  Clone ID: PAT_MRT4530_8433C.1
cccccggcgccgcgcggggcctccgccctgcgccccgccgcgccccatgcccgcctccgccgccgccgccacacgccctgccgcagagggcgtcggcggcaacgacggcgccaccctggccggccgcgaccacgtcgtcgtcttcccgctcatgtccaaaggccacatgatcccgctcctccacttcgccgcggcgctcgcggtgcaccacggcgaccacctccgcgtcacgctcgtcaccaccccggccaacctcgccttcgcgcgccgccgcctgccgccgtcgccgtcggtgcgcgtcgtcgccatcccgttcccggcgcacccgcagatcccgcccggcgtcgagtccaccgacgcgctcccgtcgcagtccctcttcccggcgttcctccgcgccacggcgctgctccgggagcccttcgccgagttcctcgcgtccctcccgtcgccgccgccgctcgtgctcgtctctgacttcttcctcgggttcacgcagcgggtcgcggacgacgccggcgtccgccgcctcacgttcaacggcatgtcgcccttctccctggcgctctgcttcaccctcgcctcgaggcgaccacacgtcggcgtcgagggcggcgcggagttccacgtgcccggcttcccggacgacgtgaggatcaccgccgacgaggtcccggacgccgtgatccaggggggcaaccccgacgacccggtgacgcagttcctccacgacgaggtccgcgactgggaccaccggagctggggcgtcctcgtcaatagcttcgccgcgctcgacggcgactacgcggccatcctcgagtcgttctaccaccccggatcccgcgcgtggctcgtcggcccactgttcctcgccgctggcgagtcgccggagacgaagcaggaggaagacgacgacgacgacgacgacccggaaggctgcgtcgcttggctcgacgagcgggcggcgaggccagggtcggtggtgtacgtgtcgttcggcacgcaggcgcacctccccgacgcgcagctcgacgagctcgcgcacgggctagtggactccggccacgccttcctctgggccatcggccggtccggcggcgagtggtcgccgccggtggacgccggcggcgacgggaagatcgtccgcggctgggtgccacagcgccgcgtgctgtcccacccggcggtgggcgcgttcgtcacccacgccggctggaactccgtgctggagagcctcgccgccggcctgccgatgctggcgtggccggtgatggcggagcaggcggcgaacgcgaagctcgtggcggacatcatcggggccggcgtccgcgcggtccgcggtggcggcgtcgtcgtcgggcgcgcggaggtggccggcaaggtcgggcggctgatggacggcggcgaggagggccgcgcgatccgcgccagggccgaggaggtccgggaggcggcgcgcgcggcggtgggagaaggcggcgcgtcgcgggaggcgctgcggcggctggtcgacgagctgcggtcaagctacgtcgtcgccggcgacggcacggcggcggcgagctcggcgaatggcggcagtggcaaggtgaaaaaattgtcgttcggcacgctcgcgcacggccggcacggggtagtggactccggccacgcctgcctctgggccatcggccggtccagtggcggcgacgggaagatcgtccgtggctgggtgccacagcgcgcgttcgtcacccacgccggctggaactccgtgctggagagcctcgccgccgttcgtccgatgctgacgtggccggtgatggcggagcaggcggcgaacgcgaagcatgtggcggacatcctctgcgctggcgttcgcgtggaccgcctcctccgggggccgaacgccgctgttgttgtcggacgcgtggaggagcagaacctgggcttatcccaggccgaagaggcccagataaaacaaggctggtctacactggaacctcatcggatggcctaa

SEQ ID NO: 85176 - DNA, 131 bp, Oryza sativa
  unsure (1)..(131): unsure at all n locations
  Clone ID: PAT_MRT4530_84340C.1
agcnaagaaaaagaagntgnncaagcaagtctctcantgagtggacagtcacnnaacacagcagaagccnacanccatnnagnnggccagtantanatcaccanggnagagtacgntactntntacaagaa

SEQ ID NO: 85177 - DNA, 666 bp, Oryza sativa
  unsure (1)..(666): unsure at all n locations
  Clone ID: PAT_MRT4530_84341C.1
cgatggaagggcatgaggaaagaattgtcgtgtcaaatacactcgtgtatgagtacatctattactccagaattgttctaacgtaaggaagcatgcggtaccatttttgcagagccatcaaccaagacatggcgaccaagtacatcgtcggatcagtgacggcatcctttgcctttgcttatgtttgcggcgtttacttcgccgacaaaaaggttttaggaggcacaactcctcgcacggtggcagacaaggaatgggggaaagtgaccgaggagaagctcgacgcatggcctcgcgttgcagggaagccggtctccatgaacccagtcacccgccagaactacgttctggtgaagaagaagaaggcttcagggtcaaagaaggcatccgagccctgaaaactgcaaggagagagtttgctgtgaggtgctaaaacattctgtggcagttacaaataaattacatcgaatgggtgtaatagattaagaatgttgtttgaagtgtgttactgcttaagctttgatttttcatacctgacatgtttgtagagcatcagctgagtggtgacttcaagcagcaggacatcatatcatcgaattttcgtcaaaaaaaaaaaaaaaaggcccggtacccaattcgccctatagtgagtcgtattacaattnc

SEQ ID NO: 85178 - DNA, 444 bp, Oryza sativa
  Clone ID: PAT_MRT4530_84342C.1
gcacgaggcacgaattcttcggcataactcgatcgcctctccaaacacagaaagcacatactgcgtgtcagtaacaatggcaaagaactactcgacctccgttcagctgcttgtcgtcctcctcgttatactggtttctgtcggcggcatcctcggacgaagtggaccaagcacctgcgcaaacaacccggctttccagcaatcctgcccgccaatacctggtagagggcactaatcgatccatggacgatgcataggggaagaattcgcgttcgatcgatttaatttctacacatcgggatttgaaagcttagcaagtttattattatacacgaaacaactactctatgttttttaaggtgctcgtgtgttcgtgttgatgttcccatgtccatgcagtgtcctgctttaccaatataataaaacggacagcataattatccg

SEQ ID NO: 85179 - DNA, 313 bp, Oryza sativa
  Clone ID: PAT_MRT4530_84343C.1
tttttattttttattttttttctttttttttttttttttttttttttttttttgtttttattatctttttatcattggaatcaattgtatttcgttctaggaacacatggaaatacctggcactgccgggccggtcgccccggcgaaccaggtccccctatggaaagtcaaacaaaaatccggatggagcatggaaatagcgccaggcggtgacaagtaaacacccgttccagacacagaacaggaaacgacccggggccaaaaagggcacaccatgcgactccgaaaggattaaaccccggccacacaaaga

SEQ ID NO: 85180 - DNA, 497 bp, Oryza sativa
  Clone ID: PAT_MRT4530_84344C.1
cctttctcccccaaggtcgttctcctggatttggaaatcagaatgtgttaacaagataagggtcttcatgtggctgttactctgtgatcgcctaaatacaggagatatgcttgacatgagaaagtgtgcaaaatagaatgatgatttaacatgtgctttgtgtggtttagggttaagagaaacgagagagcacctctttttcagctgtccctttactgaagcttgctggcataaattgggttttcattggaattacagccttgaattgaatcaaatgctatctctggcaaggtcagcttttcaaagaaatggattttttagagatcatctccatcgcctgttggcacatttggaatcagaggaatgttcttattttaagaaatattccaccttcggttcagtcttggcttaggtcttttaaggaagatgtactcctgcatttctgtaggatgaatggtccccttttaaattcagtttcttcctggttacaaactttg

SEQ ID NO: 85181 - DNA, 3228 bp, Oryza sativa
  Clone ID: PAT_MRT4530_84345C.1
atggagctagaggaagagaaagatcccccaaaacatcaatccaaaatcaagatgaattcagcagagatcaagaagagaaagatacgcttaggaaaagatcaaggtccagaaaagaaggaaatgtcaggaaagaatatcaaatctatcaaagaaactggtactaaaggtcaatccaaagaactccaaaaagaagaatcgaagagcagaaagagcacaaaagacaagtccaagaagaacaaagatctgtctcaagtttcagcaaatgcagaagaatttcacaaggaatacaccaccaaagtgatcagaaaagaatcaagaacagattcatcaagcatagaacaagtcatcggttcttcaagcatacaggaaatggagacaaatgaacaagtaaaatcaaaagacacttccaaagatatgactcaagttccagcaaatgcagaaggaattcacaaggaatacaccaccaaagtgaatagacaagaatcaagaacaggaaacaaagataatggacaatcagggagaagcatttctttagacacaaaaaaagatgttaatttgaagtacaaggatgatggactaattttgggaaaagcaaagatattctccaaatatcacagtgaaataacttattatatttttaatttctatgaagcaggaagaagtatttctttggatacaggaaacaaagataacaaagatgcagaaagaagcattcagcatggaaacattcagaatatgactcaattagttttgacagaacataacgcaaatacattgatttcaggagctcaaaatttttcatatacaagtctcatggaacaaattatatcatctcaaccttcaatatctgaagttcagcaagaaatatcaacagaatcaaactttgttgctacaccaagagcatttcaggttgaagatgaggatctggaagataatgaattggaaaattggaatcttgatatgttcaatctgtcaaacggtcaaaatgtgcaaaattcagctgacaacagtactgaaattggaaatcaagcaacaacaaatgttgatacagtggaaagtaatgatttagatgcaaatggagaaatgttgacagaagaagatataaacaattttttggagcaagaacaagaagaagctacaaaaggaaataatgcagcaattgatgcgaagtacattccaagagttgatatgcagttcaaatcaattaaagaagcacacgatttctttaacttttatgctttgttggctggattttctgttgtcattgctcacagttaccacagtacaagcaaaaaaaggaatggagaagtgattagagtaacattcaaatgcaatcgacatggaaaagcaaagtcagaatcacaagaagaagaaacagaagagacagtagtagcagagagaaacaataatgagattaaagccacaagttgtaactgtgcactggtaatttctaagagaaatttgatttggagaattataagggttaatttagatcacaatcataagatgagtccaagagatgaagttagattcttgaagtcacacaaaaatatgacaacagaagagaaaatgatgataaggacactaaaggaatgcaatattcccacaaggcatatgattgtgattttgtcaactttgagaggagggctgacatctttgccttatactaagaaggatgttagtaatgtgagaacttgtataaataaagagacaagtagcaatgatatgatgcaagttcttcaatttttcagaaagaagaaggagaaagatccaaagttcttttatgaatttgatttggatgagaataagaaggacggagctatgaggtcagcaataagacagatttttccaaattcaacacataggaattgcttctttcatatagtaaggaaagcattcaatctgtctggaactttgttcaagtcaaaagaagggttgtatgatgagtatgaggatataatgaacaattcagttactgaagaagaatttgaatatttgtggaatgaaatggttgattcctatgaggttcagcacatctactttttgaagcacatgtggtcaattagaaagagattcataccagtatacttcaaaacaaatttttgtccattcataaaaagcacagctctaagtgaaggtacaaattcaaggtttaagaaagatgttggtccacaatacagtataataagctttttgatagaatatgtcagagtaatggacactattcagaatttggagcagctagatgatcataattcaaggacaaaaaggccaagcaaactttggtctcattactacattgagtaccaagctgtcaagctgtacaattcaaaaatattcaaaaagttccaagttgaacttaagaggacaacaagattacaattgattgaggtcgagaaattgaagacttatgaagtttttcttgcattgaatcagaaaataaaagtagtaagaagaaggaagtaccttgtaattgttgactctgaaaaggaggaatacacttgtatttgctcaaaatttgagaaagatggccttctttgctcccacatattgaaaattatgcttcacctcaacattatgaagattccaaagaaatatattatcgatcggtggagaaaaaaggattacaaagaaaaatatgattttgaagatagaattatacctttatcggagagctcaatcctcagattcaatattctgtcaaggaaatgtgctgaaatagcctcacaaggatcaaaaagtattgattcgttccaatttacagttgatcagattgacaagttagaaaaagaatcaatatcaatgaattcagagcaaagaacaaagcagcaaatggagatagacaaaatagatacaacaaatggagaagtcattgaagaaacagaagaaaacaatgaagaaattttgatagatccagacatagcaaagtcaaagggaagaccatctcaaagatacaaatcatttagagaggaattacagagtaaagaagtttatcattgcagttattgtcaacgaacagatcacacttttccaacatgcccactaaagcacattgaatttgatttgccaagaaagaaaattagaaagacaaaaaacacagcacaaaagaatgcagaggaagaacaaactgatggttcaaagaagacaaataaagggaaaaaacaagaagcaacaacacaagtattaatggagcaaaaagggactaagaaaagaaagacagatggctaa

SEQ ID NO: 85182 - DNA, 3018 bp, Oryza sativa
  Clone ID: PAT_MRT4530_84346C.1
atggagctagaggaagagaaagatcccccaaaacatcaatccaaaatcaagatgaattcagcagagattaagaagagaaagataggcttaggaaaagatcaaggttcagaaaagaaggaaatgtcaggaaagaatatcaaatctatcaaagaaactggtactaaaggtcaatccaaagaactccaaaaaaaagaatcgaagagcagaaagagcacaaaagacaagtccaagaagaacaaagatatgactcaagttccaacaaatgcagaagaatttcacaaggaatacaccaccaaagtgatcagaaaagaatcaagaacagattcatcaagcatagaacaagtcatcggtacttcaagcatacaggaaatggagacaaatgaacaagtaaaatcaaaagacacttccaaagatatgactcaagttccagcaaatgcagaaggaattcgcaaggaatacaccaccaaagtgaatagacaagaatcaagaacaggaaacaaagataatggacaatcagggagaagcatttctttaaacacaaaaaaagatgttaatttgaagtacaaggatgatggactaattttgggaaaagcaaagatattctccaaatatcatagtgaaataacttattatatttttaatttctatgaagcaggaagaagcatttctttggatacaggaaacaaagataacaaagatgcagaaagaagcattcaccctggaaacattcagaatatgactcaattagttttgacagaacataacgcaaatacattgattttaggcatctcaaatgagttatctcaagaagaaataagcatcaacgacaatatgaaattaaatagagaaaaaacaaattcaagtgatgagtacaacaattgtactctacatgatgaatggtctcttttaggagctcaaattttttcatatacaagtctcatggaacaaattatatcatctcaaccttcaatatctgaagttcagcaagaaatatcaacagaatcaaactttgttgctacaccaagagcatttcagaattcaatgatattgacaacaagtagaacagaagatattccttttgatatggattatgctaatacaaatcaggttgaagatgaggatctggaagataatgaattggaaaattggaatcttgatatgttcaatctgtcaaacggtcaaaatgtgcaaaattcagctgacaatagtactgaaattggaaatcaagcaacaacaaatgttgatacagtggaaagtaatgattcagatgcaaatggagaaatgttgacagaagaagatataaacaattttttggagcaagaacaagaagaagctacaaaaggaaataatgcagcaattgatgcgaagtacattccaagagttgatatgcagttcaaatcaattaaagaagcacacgatttctttaacttttatgctttgttggctggattttctgttgtcattgctcacaattaccacagtacaagcaaaaaaaggaatggagaagtgattagagtaacattcaaatgcaatcgacatggaaaagcaaagtcagaatcacaagaagaagaaacagaagagacagtagtagcagagagaaacaataatgagattaaagccacaagttgtaactgtgcactggtaatttctaagagaaatttgatttggagaattacaagggttaatttagatcacaatcataagatgagtccaagagataaagttagattcttgaagtcacacaaaaatatgacaacagaagagaaaatgatgataaggacactaaaggaatgcaatattcccacaaggcatatgattgtgattttgtcaactttgagaggagggctgacatctttgccttatactaagaaggatgttagtaatgtgagaacttgtataaataaagagacaagtagcaatgatatgatgcaagttcttcaatttttcagaaagaagaaggagaaagatccaaagttcttttatgaatttgatttggatgagaataagaaggtgacaaatttgttttggactgatggaaggtcaattgactggaattgcttctttcatatagtaaggaaagcattcaatctgtctggaactttgttcaagtcaaaagaagggttgtatgatgagtatgaggatataatgaacaactcagttactgaagaagaatttgaatatttgtggaatgaaatggttgattcctatgaggttcagcacatcaactttttgaagcacatgtggtcaattagaaagagattcataccagtatacttcaaaacaaatttttgtccattcataaaaagcacagctctaagtgaaggtacaaattcaaggtttaagaaagatgttggtccacaatacagtataataagctttttgatagaatatgtcagagtaatggacactattcagaatttggagcagctagatgatcataattcaaggacaaaaaggccaagcaaactttggtctcattactacattgagtaccaagctgtcaagctgtacaattcaaaaatattcaaaaagttccaagttgaacttaagaggacaacaagattacaattgattgaggtcgagaaattgaagacttataaagtttttcttgcattgaatcagaaaataaaagtagtaagaagaaggaattaccttgtaattgttgactctgaaaaggaggaatacacttgtatttgctcaaaatttgagaaagatggccttctttgctcccacatattgaaaattatgcttcacctcaacattatgaagattccaaagaaatatattatcgatcggtggagaaaaaaggattacaaagaaaaatatgattttgaagatagaattatacctttatcggagagctcagtcctcagattcaatattctatcaaggaaatgtgctgaaatagcctcacaaggatcaaaaagtattgattcgttccaatttgcagttgatcagattgacaagttagaaaaagaattgatatcaatgaattcagagcaaagaacaaagcagtaa

SEQ ID NO: 85183 - DNA, 213 bp, Oryza sativa
  Clone ID: PAT_MRT4530_84347C.1
ctagagaggatcacccctcgacagctggcgcgccaggtagggggaagtcgcgcgctttaaagagaagtcgtcgccttccgtcccaagtttcccatgaccctcgacgatcatggtcgaggtcccccactcctcgcaaggcagcgggcagtcccctctcgtgcctaggtgaatccggaagcgacagaggccgtcgcagggcccgccccgctccat

SEQ ID NO: 85184 - DNA, 789 bp, Oryza sativa
  Clone ID: PAT_MRT4530_84348C.1
gacgacgttgacaagacaatggatgaaattaatgacaatatggagaatatgaggcagatccaggatctactatctgctcctattggagctgcagctgattttgatgaagatgagctggaagctgaattagcagatctggagggggaggaattggaggcagagcttctagcacctacaacgactgcccctactgctccagtgcgtgtacagcaaccaactcggccttctgcccagagcagcaaaactgaagatgacgagttggcagctttgcaggcagagatggctatgtaattagttttgcaggctttgatagggtcatgccaaaagatcagatacttcaaatactcctatattggactctggtgtactcatgaagatcttcctaggaagatgtcagagacacagaagcaagctgcatgccagcctaacccgttatgtatggtatcatgtcatgttactgccttgtaaatcaaacagagctatttgagcacattatgagctaataaaatgtactacccgtgatggcgtcattatgatgtgtttcagtctgtaccatatcgttttgacgtttttagtgtaggtcaatttatagtttctcttgattcgaatctgaagtactacattgatggtcgaatatagacagttctctaaataatgtgaatgatgattgtatagggtgctgtacattccttcagttgttggtactgtcgacctgtaataaattattaacctaggctttgtagctgtctaaacagtgatgtatattagtcgtgataattggacacattt

SEQ ID NO: 85185 - DNA, 130 bp, Oryza sativa
  Clone ID: PAT_MRT4530_84349C.1
gtgtcgctgaacctagacacacacacagaatcaaatggtttccatggtcttctagcctcacaggatacatatatatagaggccccacaccacactggagcctgtcaatgatctccaggaaggcatttctc

SEQ ID NO: 85186 - DNA, 663 bp, Oryza sativa
  Clone ID: PAT_MRT4530_8434C.1
tcgcgcgcacgctggcgacggcgacgcgagcctccgctatccgaccttacctcgacgctgccgcggccgccggctgggagagtgaggggcggacgcgcggaggacgcggcacgcgcctcggttacggtcggccgaggacctgcagcgagttcggttcgatccgacatgcttaattcgaaataaacaggacaaatcaggaatcttgaagcgcatcaggtagcttagcttggtctgaacttcaccagaatgtagaagagattatgcaggattgcaaatatcttgtacctaaggtgagaatacagcaatcgttgttctcttgttggaaatacaaagaaaattgaagctccaaatatgttcttactataatcttgctaatcgtactaccattgccagagtaccaatcaatcagagcactacaaacatgtggccttggatttcacatgccattttcactatgaatggcatttttcgattgacaatctatttgcagtggcactgatctcggtttgtcttggaagaactagtgacaaaaatgtgccaatacgtgtgttaccagctaaagtatcttgtatccagtaaatatgttggcagaagaactaggattaattttgaagagtggctaatctgaaacgtgctccatcttgtgttcatttgttgcctggt

SEQ ID NO: 85187 - DNA, 457 bp, Oryza sativa
  unsure (1)..(457): unsure at all n locations
  Clone ID: PAT_MRT4530_84350C.1
ttgcgtccgaaaaatttttaaaaaaaaaaaaaaaaaatttaaaggaaaaaaaaaaaaaataaaaaaaaaaaaaattacaaacacattcatacacacatcataatttcttctctccttcctaactaaataactttttcttttactcgtccctttacaacattaatttcattgcaaaacccttttttcttaccaaacttatttgtgtttccccncacatccccccttttttaccccttaacaacaaattacccccttattccctcctccntttcttccttccaaacaatctcccccaacctgcctttctcaatcattactccccctataattagtacattatccccccccctcttttcatctcatcattcaacntcaccttttctctttccacccccctattcccctattctattcctctcctcccttcctttcccttcantttctttctttttttcct

SEQ ID NO: 85188 - DNA, 482 bp, Oryza sativa
  Clone ID: PAT_MRT4530_84351C.1
gaaaaataggtacggtaaaccgtatataaaatattgcgtagctttataaaaacatgccggacgtatctatgaaattagtagattaatttaaagaatcaatctactaaatatctttattgactgatactttataatagaccgtatattgatgcatatatggcctccacgtgcacagccatgcgtacagcactcgtgtgcatgtacgtgttgtacatgcagggcatgtattccctcctgtgacttgtccgaatccaatccaagagatattgctccaccagccaaccggatggcaatcggactcgattgaagacaaggctctgtagattgaattgttgatagtgattccgatcacgttggcggacgtactttggccgggttggatctccctggtccgaagttgtcgagtagcttgggggtggagaatccgtctcttaaacttatctcgtcgagaaccttgaagcaccaaaaatctctttacctgg

SEQ ID NO: 85189 - DNA, 405 bp, Oryza sativa
  Clone ID: PAT_MRT4530_84352C.1
atgtctatgaccatccgtgtttattctgctagtgctatatataggatgtacattatgcatgagaaagaaaagccaaatgaacgcgtgccgctcgccgccgacctccgcggcgccgacagcgtggctcagctccacagcgcggcgaaacataacgcggcatgccccggtcaggagccgtcgaggatcatgcagctgtcggagagaaccttcgttgccgtcgccggcaagacccactgcacgtcgccggttgatttgtctcaggattcgtttgcttggcgcttcctcgctcgccgcctcgatgaatcaatccccttcacgcgccagagaacagagattgtggcaccctacaatgaagcaaaagcaagagaggcgttggatgctccagggacggtggatgaaggatga

SEQ ID NO: 85190 - DNA, 541 bp, Oryza sativa
  Clone ID: PAT_MRT4530_84353C.1
ttttttttttttttttttttaaccataaacgaaaactttcgatcgcgtgggtttttttttttttttttttttacccctaaattttaaatcttaatatgcacaacaaaaaagacaggagaagcctacagcaatttacatggatgaagctggctctatgcacagcgcacagcctagagtggagtttcagtgatcaactgttcaaaattacatgatgttctctctgtttctcagtggaaaattggcatgacgtggattagcgggcaaaacagggctgttcatcaggaaatcctcaagagagaccaaccttgtagttctcagatccagcagatgattttaatcctcagaagatcagattttctgtccaccagatcggattctggcatggtggcaataggagcctgatgtgtatcctcaattcaccatatctagcgatccggaccaaattcagatgttggagatgtgatagcccccatcatggaaacctgatgtaatcaagaactaatgtttgggccggaacgccccatccagtgggaaaccctgg

SEQ ID NO: 85191 - DNA, 246 bp, Oryza sativa
  Clone ID: PAT_MRT4530_84354C.1
atggactgcatggtagtgaaggaagagactaatgtgcgggcgaagcgggcagaacgagcgtgcctcgccacattaaatgtggcctgccgctcgcttgaccgaatcttgaccgacggacgggacggtggcaaagccacgtgcggtccgctcgggtctcaggcggagtgcagtaggtatgccctgtcccatcaagatgacgggaggcgcagcgcccaggacagagttcccggtgcgtacaaacctcaa

SEQ ID NO: 85192 - DNA, 1304 bp, Oryza sativa
  Clone ID: PAT_MRT4530_84355C.1
agccacgcgtccagccacgcgtccacccacgcgtccgcgccgccgcctcctatagccacccttccccctacccccaaaaatcccccacctcccaatcccccaaacccctcctccacctccacctccgccatgggcagcttcgcctcccccctcgacgccgcccccgcccctcccaccgccaagccctcccctccgccggcgccggcgccggccaacgggctggtgacccaggaggagctgaagcgggtggcggcgcaccgggccgtggagatggtggagcccgggatgacgctgggcctcggcacgggctccaccgcggcccacgcgctggaccgcctcggcgacctcctccggtccggggagctcgccgcggtggccggcgtcccgacctcgctcaagacggaggcgcacgccgccagggtggggatcccgatgctgccgctcggggaggcgggcgggatcgatctgtccatcgacggcgccgacgaggtcgacccggagctgaacctcgtgaaggggcggggtgggtcgctgctcagggagaagatgatcgaggggtccgggggaaggttcgtcgtcatcgtcgatgagtccaagctcgtcccgcggctcggctgtacgggcgccgtccccgtcgaggttgtccccttcgggtgcgaccacactctgggcctcgtccgcaaggtgttcgacggattgcctggcttcagcgcgaggctcaggacggtcgcctccaaggacggcgaggggaaggaggagatgttcgtcaccgacaacggcaactacatcgtcgagatgttcttcgaggatggcatacgcggcgacctcaacgagatcagcgaccgcctcctacggatcaccggcgtcgtcgagcacggcatgttcctcggcatggccacctcggtggtcgtcgccaagaaggacggcaccgtcgccctgctccacaagaagaagtaaccgccccggcagcggcggcggggccaccaccgacgccaaaataaaccaagattttgcagcgaagcgagggcagccccagcagctggtgcccctccccaacccaagtatctattgctctctagtatgttgaacttgatgtacgtctctactattaccatgatttctctctttttttcatggtaatgttcttgagtgatgctatcaatggacgaagctaataacttgtggacttttgatccatggtaatatcaagtcaatttcttcgtcaaaaaaaaaaaaaaaaaaaaaaaaaaaaaaaaaaaaaaaaaaaaaaaaaaaaaaaaaaaaaaaaaaaaaaaaaaaaaaaa

SEQ ID NO: 85193 - DNA, 558 bp, Oryza sativa
  Clone ID: PAT_MRT4530_84356C.1
aagatcgtgaatagaaaaaaaaaagaaaccggtgaaatgacaaaaagacaggcactggtttgcagttttgttttgctgcgggaaattcggatttgtttgttttggaaacattccgaaaaatccgttgcgtgaaaacggcgtggagtccggataagttacgcgcgacttatccggttcggttacgtggagtggagatcgtgcgggcaccctgatcaagtgacctttctctatataaaccgagccaccgccttcacgcaacatacgcgaaatcaatctaaggtttgcctcctactctatgccgtgccatcgctcgtagactactccatcccgctcgctggcgtacaccggcgatcgggaaagcaggtctccggaacctctgccttcgacatcctgcaccgagaaaagaaggcaataaggtttttgggaagcgcttcacgcgactgctccctgttcgtacatgacggctcgtcttcctgttcgctcgcgtgttgcgcactttcatcaacgcccgcaaccgcaagtaattcctgctgagcaaccgatgtttcggcaacctcg

SEQ ID NO: 85194 - DNA, 210 bp, Oryza sativa
  unsure (1)..(210): unsure at all n locations
  Clone ID: PAT_MRT4530_84357C.1
taccagaacttgggggccagttaccaagccccttgaatatgtattacttccttgaatgctgcctcncccgtaagggtctgtacctgagaagttcnaggaaaaagacccngccttttcgggctntgcgactgttacttacgaggctgttcatagctgactgtactcccctttctccntgcatataaatggccgtgtgctgcaccatgcgac

SEQ ID NO: 85195 - DNA, 485 bp, Oryza sativa
  Clone ID: PAT_MRT4530_84358C.1
gcgcagcgccagtcgccggcctcgctgcgcaccccgcccctcctggtcaccgcgccgcgccgccgagcgcccccgaggctggccaccaacgccgctgggttggtttactgcttcttataaaaggatgatgaagacactgaacaaaatggagtttgaagtgaaggattcagtggtctggcaaaagtatttcacggctacaacaaatagcatagtactgaaaggtgaccaaatgctgctgtagtgttgtattttactactattacttgcttttgaccaaatttaagtaatgaaaaatctaggactagtcgacgatttactcaaagtttatgatagtatgcccatctttgaattttatctgctggttaaaataagctgccattagccagaagagagggtgtttcttagccaatttgacgctatgtcggctggtatagctgctaatgttgttgagttaatttttctgcacaaaaaaaaaaaaaaaaaaa

SEQ ID NO: 85196 - DNA, 198 bp, Oryza sativa
  Clone ID: PAT_MRT4530_84359C.1
atgcgttggccaacacgaagctatctcgtcggagtggagcctggggtggccagcgcagcggccggattcaacgatgttcggcgcgcctactccgctcatcaccaccactgccttgtcctccagatccaggaggtgacgctgagggtgctcagtgaggacatgatgcacttccgtgccaatgacctcgccaccgcctag

SEQ ID NO: 85197 - DNA, 4599 bp, Oryza sativa
  Clone ID: PAT_MRT4530_8435C.1
atgtcctcggtgttctccatcaatacaagaaccttcttcaatgcaggtgttgatttgtgggcttcttgtgccatagaggttatcagccttgcccagaaggtttcacataatgagaggaatggctgtactgttctttggaaccttggaaattgtctgtttgagcaattttcaagctttctgagattctatgcaaatcctaagaatattttccgcacttttgttgatacggtccttgacaatttgtcggagttgttttctcttttatggatagacggaatattaagttatcttgaagctgtaggaaacattttggcattacctgagatcaacatgtcaaaagaattgtacactcaagtagttaatgctcacttgagagctattggaaaatgcattaagcttcaaggaaagaatgcaactctgcctacccatgagatgggatcaagtacaaagacacaatatttgcagaatagatctggtcatgttgttgctaaaggtatcatcaataggcagaacagattaaattgaaggtcttgaagtcttagactatcactgggaaaatatgtcaatgtttcactcaaacatgcatctaaatacagctgtgcaagtcattgaaagagcataggttggagtgaatcgtttcagtcattcaatatatgaaataaacacaggaaattgtgatggtgggacagtttctctaatttaggggtcacaaagctagtagaagttcattgtatgttgaaatccatcaacaaggtattgacaacagttattgaagagaaaatccctgtaccgacagaggtcacatcgggacttacatcttgaaagtccttttattttctacacagagaggatgcctgttcattaccctaatttgcacccagatgctggagccatggtcctaatgtgtatggaggttataagaagatgctacctttaatgtttgctgagattgtcgatgcagttcgtcatttgttagatattgaatacaaggtcacggggtgggggcttcaaacattttctttcatgtcggaatatgccccattcttgcaaccagagtgaagagcaactggcagctagtaatgaatatatacttgatagacaattttcagttgacatgtatgcttcatattcagtgagcttcgtcaggtttccttctccatttttacattgtgtggtgctgtgagaacattcagagctgctgttggtactggtgttgcagcgagttcattttctgtgtcttcgttatcctcagataaatgtttggaatcactagcagcattgttaagttcccaggaaatgtgcttccttttttagaaggatttatgaagagatgcgccagcaaagagaactcctaggaaagcactcgatgtactttctttgcaggttacattgaagtggatgagaacttgtggccttttggatgttaaattggaagtgcagggggaatcatccttggttacaagggattcagtgtttggtcagagagctgaacttctaggaaggcatttatcggaaatatacacaaatgtgctcgagtcaataactgtgaccacatcaaatagtacactcgttgcaaaatctgttgaaaggttggttgatgcaatcagaccaaatttatgtcatttggtgagaaatgaatcaaatagttcaagtgagtttgtttactcagttataggaaagcatatctctaacaaacaaggtgccaactggcagaagatcccaagtttatcttggctttatgtcttcttttttcgcatatatatgtcatgtagaagtttgtatctgcaatctattggcctcatgcctcctgattcagcgatagaagcaacagaactagtggggaattcattcgttgtatgctgcgggaaggaatggaccaattcagccaatattctcgcagaaggctactttgcttggattgtccaaaattcattccctctttttgatgctatcgagattttaacacaatctctttcgagaaattgttctgggtttactctgcttgttttcatccttcatgtgatggctctgcagagactaaatgaccttaacaggcagattaatgcttttgattttttgcttgaagatgatacagatcaatttgacaaggagaatagtgaaggcactgagttattaaagaagtctagctttctcgaggccacacaactcaccagttttatgatgagctataggtcatgcaaagatgtggagaatagtggcagccaatcttctcaccgagaaattactctttgtaatgtttcagtgcagctcctttgtgatactattatttatgaccgaaagtacagttcctggatttcatgcaaactccaagtcattgttgcaacttatagcttacattctccatctggaaagactgctgctattggcaatgaatttccagagttgaagcaatactcagcattttccaaaatttttggtggctcctgtctgatttggcttttgaggtctgttcaggaacttgtcagtttgtcacacaaaatatttgaagagcacactgatgagttgaaaaatacaattttctccctggtaaataagacatcagaaatattttcaacactaactaacatgaattctgtattttacttgttgggtgcaaagaaacaaatcatatcttccagcggagaaagcagtactccaaaacatgatgatcaggcattcaacatactagaaaattcagctttggagcatgtcaaaattatggctgaactgttagagaagtctacaactggcattcctgtaactgttaagggtagtcagtgtgttatcaaattagagaactgttatgacactgtatgctgggatagattattatgcaccatgtcttgcataagaggattcttgtggggtcttatttcagcactagaaggcacatgcaaagattatctatcaagcccagaggaaaggaacgtgatgtttcagtatgcctccagattcagtgggtgtgttgctaagtttgaggcctttgtagatatttgcatgcatgtcttgtttatggagaccaaggattgcgagttggctgatttaatctctgttcatcttccacaagagctggactgcgagaacaactctctgaatattactgcaatcatggatgaatggactaggcaccaacctgaggagaacggatttcactcagatggtgtactaaatatttcaactgagactcgtggttttgatctgcccaaagtacaatttgtgaaaggatttcttttagaaaaccttttaagtggtgagggtccatccatagcatttactttaagggagctctacaatgcatctgctgctattgttaagctgaagggaatcctatcatttccaagtgaggtatgtagacagatatgcagtcctttccaaaagcttccattgggtccaatggttgcgacagcttacatcgctctacacaaattagcagacatgtctaactggcctgacatgttttctcttttatggattgacggaatattaagttatcttgaagctgtaggaaacattttggcattacctgagatcaacatgtcaaaagaattgtacactcaagtagttaatgctcacttgagagctattggaaaatgcattttgcttcaaggaaagaatgcaactctgcctacccatgagattggatcaagtacaaagacactatatttgcagaatagatctggtcatgttgttgctaaaggaaattgtgatggtgggacagtttcttctgatgttgctgctgggatttattgcctctatctggttcttgaaactgtgccaggaaataaacgtgtttttaagagaaccgtcccaggcctaattggtgctttattcaatattgtcttacatcttgaaagtccttttattttctacacagagaggatgcctgttcattacccttatttgcacccagatgctggagccattgtcctaatgtgtattgagatgcgccagcaaagagaactcctaggaaagcactcgatgtactttcttgcaggttacatttctatgtattctggacagggtccatttcagacaggcataacacgagggtccatgccgaacaacttttgcaaatctggtgcaggactacaaattacacttccagtatcagggcaaaatctagtcaaacttgctaaaggctttttggagcatttgatgttgatccgtcttattctgcatttaaagctcatcaaattaatctgctggatttggaacaagatgaaaaggagcaaacaagaaaatgagcttagtaatcaagatgagaaggacttggtgatctgcagcctttggctcttgttccataaatcacaacttggtgctaacaatgataaagatgatacggttctaaatgaggttataatttctccgaaggaggttttggattatccacgttgcgatacgtggtcagtgtcaattcgtggccacgagagaatatctgaggtgattggaggaggggataagggaaccatggaaggtgtgatgtgctacacatggtgggggcatgcggaggaattaggtggatgcggcaacaagatagccgagaaatggaccaaaagctggagcacacacgcgcacacagtagccactatcattggataa

SEQ ID NO: 85198 - DNA, 189 bp, Oryza sativa
  Clone ID: PAT_MRT4530_84360C.1
atggcgcggtggggaagtgtcacgcccagaaattcccgaatagaattccatgcagaatgtgcattaaaaccctcgtccaggaccgcccggggcatcctcgacggcacggacgaagcctactcctcggaaaagtcaccatccgacgcatactcaaactctggggttttggggaaaatagagcaagactga

SEQ ID NO: 85199 - DNA, 1923 bp, Oryza sativa
  Clone ID: PAT_MRT4530_84361C.1
atggcgccgcctcccgccggcgtggaggccgtctgcgccgccgtcatcaaatccacgctaacccaaccccacaaccaccaccacctgctcgcggcctcgccctccctcctcgccgccgtcctccaccgcctctccccgctcccctccaccgcgctcgccttcttccgctccctgcctccgccccacccgctcgacgcctccctcgccctcctccgcctcctcgccccccacccgcgccaccaccccaccgcccgctccctcctccgcgacctctccctccgccacccgctctcctccccgctcctcctcccttccctcctcgccgacccccacctccccagctggctcctcctcctcctctcccagtccgcccgcccgcacgacgccctccgcgtcttcgaccacatgcgcgcgcgcgaggtcgtccccgacgcgcatgcctcctccgcgctcctcaccgcgctcgcgaagtcccggatgacggccaccgcgcgcaaggtgttcgaccaaatgacgcgggccggggttgccatgaacacccacgtgtacaacgccatgctgcacgtctgcttgaaggccggggacgccgcgctcgctgagtctctgatgacgcggatggacgccgccggtgtgccgctcgataggttctccttcaacaccgtcatcgcgctctactgcaggaagggcatgcagtacgaggccatgtgcgtacgggagcggatggagaatcagggtgtcaaggctgacgtcgtcacatggaactcattgatccatggcttgtgtaaggagcgcagggtgaaggaggcgagtcagctgctgagagagatggcgatggcaggggtggcaccggaccatgtcacatacaccacgcttgtgatgggtactgtcgagcaggcgacttggaggaggcggaagctctgtgaagatggcaagatgaaggaggtcaatgtgttacttaatgagatggatgagaggaaggtgcaggctgatcatgtaacgtgcaacacgctgatcaacgcatactgcaagagaggggacatgacctcagcgctcaaggtgaaaagaaggatgatggagtcagggctacagttggatcagttcacttacaaggctctcgtccatggtttctgtaaggccaaggagctggatgaagccaaggaagccttgtttgagatgatgggtgcaggattttcacccaattatagtgtgttgtcatggattgtcgatggtttatgcaacaagaataatgcagttgcagttctagccattcctgatgaacttatgaaaagaggatttccaccagataaagcagtatataggtctctgatccgaaggctatgcaagaaagggtttattgatcttgctgggaatgtgttcaatgaaatgcaaggcaaaggtctagaagctgactgtcttgtgtatgctacacttgcgtgtgcatatctgactgctgggaagccagttgctgctttggatatcttgaatgagatggcgaagaagcagttgtacataacaccccagatttacaactacaaatcaagctgcaaatttgcaggtgatggggtgcttcaattccaaaccaaacaatgccggtgcgatcagaagaagacatgggagggtagaagtggatgtttgcgcctggattatgagttcctgaggctcagaggagctgcgtcgaggacttggataattttcatggctactcgctactcatgagcactactcctgactaggcccaggaggcgcacgatcactcttcatggttcattcatggcacatctgctaaattgattatcaagaagaataatggcagaggtgatgaactaactgtctgaaatcagtgttttttttttcgccgggaaggctgaaggagaccattctggttattaagaaggagttaaagtacaagaaaaacaccacaac

SEQ ID NO: 85200 - DNA, 1618 bp, Oryza sativa
  Clone ID: PAT_MRT4530_84362C.1
atggccaagaagaccctttgcgaattcgctgccccatctgctgacaacgtgcctgttggcccgctgtcaacattggagacaccgatttcgaccttaagagcagcctgataactatggcgcaggcaagcccgttctttggcaagccgaatgaggacgcaagcgttcatctgcagcaattcctagagatctgcaccacttacacggtaaaaggtgtcagtctggacgccgagaggctatgtttgtttcctttctcactcttgggaaaggcaaagcagtggttctacgtaaaccgaatgatagttaacactcgggacagatgctccactgcgttcctctccaaattcttcccgatggaagcatgggaatgtctgcaggagtatgtagctgcctgccctaatcatgggatggatgactggctcatcctgcagagtttctacaatagactcactccatcgtcgatggatcaccaggatgctgctactggggttgccttcttctcaaagatagtccgtgcggcaattgatattattgagaagatggtatccaacatgggctggagtgaagaacgactccagaccagtcatcgtggcatgcacaccgtcaaggagacggagatgcttgctgctaaactggatgtcctaatgaagagacgggacgatcaggagaaatccaagccgcaggacactgtcaaggcattggactcgcacatcacatgcgaggtctgtggaaacactggtcactcaggaaatgattgccccgaaacccatgaggaagccatgttcatggggaacaatggctaccggcaacaaggaggccaggggtggaaccagctccggccattctaccaaggaggcaacaacagcaacaataacggtaatttcgaccagccctccttaaaggacttagtttttacgcaagctaaaacaactgttgctgtaaaaaaaagctttccattaatgataaagtagccgctttagtacctactaaggagacgggaaggattctgaggcagcccgaatcaccacgaggggacgaaaatccactcgggatccgccatatcctaacactgcagggaccaggcaagctggcgaggaggaatggggcatagcagaacccaaggaagatgaggaggcgcagctcgacaagatcccgccgcaggaatactatgactcaacgctgctgccgttccctccatgccagaagaagccttccgtggactagcaattcgctcggttcatggatgtcatccagaagatccacatcaacatcctgttggtggatgcaatgcgggtaccaatatacgcccgctatctcaaagacatcctgaacaacaagaggccactgcctaccatggagatggtcaagcttacggaggagtgtagcaatgctatactccactgactcccggaaaagaagaaaaatccagggtgtcccacgatatcatgctcaattgggacattgcatttcaaccaagccttatgcgatcttggggccagtgtcagcgtgatgcggaaggacgtctttgacaagctgaactatacgatattgatcccaacaccgatgaggctccaactagctgatttctctatctgctaccaagcaatcttggggggagatg

SEQ ID NO: 85201 - DNA, 292 bp, Oryza sativa
  Clone ID: PAT_MRT4530_84363C.1
tcatgaaccacttcagggactcgagctcgacgtccagcagatcgagaatggcatggtgcccttcccggtctacggcgccgccatattactcagcacgtttacactagattcttatacctatcatggcctcaaatactccatgcacgaataccggtttgcagatgcttgatcgacaatgcggtgcttgttgaaatcttttgaacatattgctagcaacaaaacctaacaaaaggataagttgtttagatgcatttatgcaccccttactattgtgacctaaataacttataaa

SEQ ID NO: 85202 - DNA, 828 bp, Oryza sativa
  Clone ID: PAT_MRT4530_84364C.1
ctagcgcagcgagtggcaacaaggtgcatggagcccagcaacgatcgcggagctttttgcgcggctccaaagcaggcgaaggccactaggccttttcgtgccctgctgtagtgagcggaggccaggtgcacgatggctgcggcctgcgggcttcccgtgcccatctgctagcaactcggtagctggtagctggaagggaggtggaggtggagctcggtgatgaagttctccagctgcatgcagtggcgcggtggagtacgccgccgccgccgccgagagaacctccagtctacgaaccttgtcggtgtccctgctaagatcaagggtggttgtacggctgctaacagtgaaatttggtaagcccttatcatccggcggaatttggcacctgacgcggggctgcatcggttcagttcgatctccggcgaaggggtaagtccaacgttccgccggccctggtgaatctatcgggtactccagcttgtcgacgttgcgggttagttcgccaaccttgtcgatgatgatcgacggcggagcagactcgtcgttggcccgcctcgaacgttcaggcttcgcggtgccgcacgaccgtcggtcccacgttttcaccccgtccgccaccgccgccagcccgcttttcttggatcgaatacagagaaggattgcggtctgatcgaagtagtcgtgccggtctgaccgcctggaagccgtcggtctgactgaggttatgtctctggtctgaccatcgagatcaatcgccgcgcctgaagtcgccgccagtctgaccgcctcgtacccgcatatagaatcttcaccaaccacgtgcat

SEQ ID NO: 85203 - DNA, 264 bp, Oryza sativa
  Clone ID: PAT_MRT4530_84365C.1
atggcttatgaaacagggtactaccaggagaagtatgcagaaagtacatcgctttgtgttatggcattggagcgtacagtttggtactccatggctttcgtgacagctggcctcctgcgcaagccgcctgtctccccacagtcacatgccgcgctgcctacttcaccatctcctgcggtggacgaggaaacatcacattctttaggtggtgtttggaaaagagggactaagggtgtgtttggatggagggatatgggtggatag

SEQ ID NO: 85204 - DNA, 510 bp, Oryza sativa
  Clone ID: PAT_MRT4530_84366C.1
atgaagccggcgggagcagtggcggcgccggcgccggcgagcggcggcgcggtggcgttcgcgtgggagcacgagccgggggtgtcgaagctgctgcagggcaccgccacgacggcggcgggagaagccgagaagctgccgccggcgaagaaggaggcggtgccgcacagtatacgagtgcgtccgccgccgggggcggcgggtcggggcggccggcgaggcggcggcgccgctgccgccgtgcggccggaggaggacccgttcctcgcggcgttcctggcgtgcaccgagcgcgggaacagggggacgcccaagggtgggagcaagctgctcgggctcgggcttgggcttgggtccgggctcgggctcgggctgtcgtgcaaggggcccggcggtgtggtgcagagcgtggacaacatcgtcttcgagaccctcgtccctagcagttgcgtcgtcattgagttcgtccctagcaggggaacaaccatcgttggtgctcgacctccatga

SEQ ID NO: 85205 - DNA, 1173 bp, Oryza sativa
  Clone ID: PAT_MRT4530_84367C.1
tttaaattgatactatctgtttttggaaagttatctagcctgaaaataaatttttataaaagtgaattattttgttttggtcagactcaggactgtcgagaacaatattccaatattttttattgtaagcttagtacttttcgtgttaggtatcctagtaacaaagattggaaaataattgaggaaagaattgaaaagaaacttggtagttgaaatggcaagcatatgtcagaaggagggagattggttttgattaattatgtgctttcaagtctagttatgtttatgatatcttttttaattccaaaaggggttcttcaaaatattgattattatagatcacgtttcttttggtaagatgatgatcataaaaagaaaaagaagtatagacttataagatgggacataatatgtcaacccaaagatcgatcaagggggttttggtgttcataatttggaagttcaaaataaatgtcttttaagtaaatgttgtttaaatttataaatgagcaaggtgtttggaaggacttattgaaaatgaaatattttaattatcaatcaatttgtcaagttgataggaaacaaggggattcacatttttggttgggtctcatgaaagttaagactactttcttaaacatgggttcctggatagtgaataatggtgaacaaatcagattttagttggatagatagataggtaattattcctttaaagatcccgtctttatctgctatagctggagggagaaattcttcaattgcaaatgttatgaattcttttagaagagatttagtaggtcagaatctaccttattgacataatttatgtgcatcaaaagttcatattcatttgacagaagaaagtgatattttagatggaattttcatcaaaatggtcagttctctgttcgttcgatatacttagctttaataaacaatggttacattgagaagaataatattgtctgcaaacttaagatgcctcataagatcaagatttttatgtggtacttgcttaaggcggtagtgttgataaaggacaacttagttaagagaaattggaatggtattttgagatgttgtttctgtatgaaaaataagactattcaacatctttttatggagtgtcacttgcgagaggacggcagccggtcgggggaggggcggcgg

SEQ ID NO: 85206 - DNA, 294 bp, Oryza sativa
  Clone ID: PAT_MRT4530_84368C.1
gaaaaccccaacttttttaagtttttgaattttggggggatcatttcaaattcatcacaggattgtacaatttgggcaagcattggtacattgagggatggaaagagagagtagtctacaatggggggtgggccattaacgagcccggggtgaacttgggggggtaaacccaagctttgttggcaacggggtcggcgaggtggtcaagcaggttttccaaggggcccttgccggtgaccatggcctggaccaaaaaccccaacttggagaacatggggagggggccatttttga

SEQ ID NO: 85207 - DNA, 1133 bp, Oryza sativa
  Clone ID: PAT_MRT4530_84369C.1
ccgcacgagggcgagttgcgaccttgctgggaaaacttgtacctagagctagctgaagggaagcaatatggccaccgtggatggcacaacggcgccgagctccggcggcaagacggcgacggtaggcgtcggcaccgggcggcggccggtccgctggtgggcctcctcctccgggttgcgaccttgctggaaaacttgtacctagagctagctgaaggaagcaatatggccaccgtggatggcacaacggcgccgagctccggcggcaagacggcgacggtggcgttggagtcgggcggcggccgctacggtgggccggctccggcgaaatgctccggcgccaacctggccctgagggcgctgctcttcgccgtgtcgctgtccgcgctcgtggtgcttgtcaccgccaagcagacggtgatggtcccgttcgtcatccggccgccgcagttcatcctcgcgccggtccccgccaagtacacgcactcaccggcgctcatatatctgctggctgcgctgtgcgcgacgtgcttttacagcctgatcacggccatcagctcggtgaggttgctctccagctcggcttgctctgccaagacgctcttctacctcatcctgcttgatgtgttctacgcagccgtgatggcgtcggcgaccgggacagcgggggccgtggcgtgggtgggactgaaggggaactcccacacccggtggaacaagatatgcaacgtctacggcaagttctgccgccacatcggcagctccaccttcctcgccctcatcgccgccatcgttctcgtcctcctcgccttcctcaacgcctactccctctaccgccgaagccgttgattcattccccatgaacttgtttgctgccgccgcccccggaccgtagagttgcttgcttccgtcgtcgcatcgaccgtccgtgtgtggatggattcttgtgtttaattagtttttgtccctaagtgtttgaaacatttgggtggtgtgatgtttttttagtgcttgccggccgtatatgttagctgttgtctcacatctccggaaattcaacgttatcctctcagtgatatataatgtttcatggttgaactaatgaactagaacatgtacgttaacgttgtcgc

SEQ ID NO: 85208 - DNA, 2373 bp, Oryza sativa
  Clone ID: PAT_MRT4530_8436C.1
atgaaaacctgggggcttttggattgtaaattggaaaggccagggggatcatcccttgttacaagggaatcagtgtttggtcagagagctgaacttctaggaaggcatttatcggaaatatacacaaatgtgctcgagtcaataactgtgaccacatcaaatagtacactcgttgcaaaatctgttgaaagaagtttgtatctgcaatctattggcctcatgcctcctgattcagcgatagaagcaacagaactagtggggaattcattcgttgtatgctgcgggaaggaatggaccaattcagccaatattctcgcagaaggctactttgcttggattgtccaaaattcattccctctttttgatgctatcgagattttaacacaatctctttcgagaaattgttctgggtttactctgcttgttttcatccttcatgtgatggctctgcagagactaaatgaccttaacaggcagattaatgcttttgattttttgcttgaagatgatacagatcaatttgacaaggagaatagtgaaggcattgagttattaaagaagtctagctgtctcgaggccacacaactcaccagttttatgatgagctataggtcatgcaaagatgtggagaatagtgacagccaatcttctcaccgagaaattactctttgtaatgtttcagtgcagctcctttgtgatactattatttatgacagaaagtacagttcctggatttcatgcaaactccaagtcattgttgcaacttatagcttacattctccatctggaaagactgctgctattggcaatgataagacatcagaaatattttcaacactaactaacatgaattctgtattttacttgttgggtgcaaagaaacaaatcatatcttccagcggagaaagcagtactccaaaacatgatgatcaggcattcagcatactagaaaattcagctttggagcatgtcaaaattatggctgaactgttagagaagtctacaactggcattcctgtaactgttaagggtagtcagtgtgttatcaaattagagaactgttatgacactaccaaggattgcgagttggctgatttaatctctggtcatctttcacaagagctggactgcgagaacaactctctgatattacttgcatcatggatgaatggactaggcaccaaccctgaggagatcggatttcactcagatggtgtactaaatatttcaactgagactcgtggttttgatctgcccaaagtacaatttgtgaaaggatttcttttagaaaaagttttaagtggtgaggggccatccatagcatttactttaagggagctctacaatgcatctgctgctattgttaagctgaagggaatcctatcatttccaagtgaggtatgtagacatatatgcagtcctttccaaaagcttccattgggtccaatggttgagccagcttacatcgctctacacaaattagcagacatgtctaactggcctgacatgttttctcttttatggattgacggaatattaagttatcttgaagctgtaggaaacattttggcattacctgagatcaacatgtcaaaagaattgtacactcaagtagttaatgctcacttgagagctattggaaaatgcattttgcttcaaggaaagaatgcaactctgcctacccatgagattggatcaagtacaaagacactatatttgcagaatagatctggtcatgttgttgctaaaggtatcatcaataggcagaacagattaaattcactgaaatcaagacttagactatcactgggaaaatatgtcaatgtttcatcaaacatgcatctaaatacagctgtgcaagtcattgaaagagcattggttggagtgaatcgtttcagtcattcaatatatgaaataaacacaggaaattgtgatggtgggacagtttcttctgatgttgcggctgggatttattgcctctatctggttcttgaaactgtgccaggaaataaacgtgtttttaagagaaccgtcccaggcctaattggtgctttattcaatattgtcttacatcttgaaaaggcttttattttctacacagagaggatgcctgttcattacccttatttgcacccagatgctggagccattgtcctaatgtgtattgagatgcgccagcaaagagaactcctaggaaagcactcgatgtactttcttgcaggttacatttctatgtattctggacagggtccatttcagacaggcataacacgagaaattgatgaggccttgagacctggggtttattcgcttatcgatatctgcgaggaaagtgatcttcaactgctccacacatatctgggtggtcagtaa

SEQ ID NO: 85209 - DNA, 150 bp, Oryza sativa
  Clone ID: PAT_MRT4530_84370C.1
ctcgccgatcctgtccacccacccgtctccgagttctacagttcgcaacgtgccgagggcagatgccacatcatgaaccaacttggaccggccggttaagttggctttatagcttcttaatgcggttaatgacctggaatgagcttggtt

SEQ ID NO: 85210 - DNA, 823 bp, Oryza sativa
  unsure (1)..(823): unsure at all n locations
  Clone ID: PAT_MRT4530_84371C.1
gagacaattctccactgcttcatcacagatgctcaaatccaaccgaggaactccaagttagttcaaagttcaaaccaattcccttcctccaatacaccgaacttccagaaacacacgcgtacattgaaaccacactcgattaagaacaaggcacgcagaatccgaaccaatttcaaaagttcaagagctccggagtttactcaaattcgccacctcgaactcgaagccacgcgcgcacggggagcagagcgaatcacttaccagttgaagtgagggcgacggcgagcgaggaaggaggcacacggaagcctacacgcccggagcggcgcctcgcacggaccgcacacggatggctgacgcacagggagcggcgccggcgggagaggagggagcgacgcacgcgcgctcgccggttgagctcgcctagccatccaccgcccttctagctcgccggcaggagaggagggagctcggcatggctctagctccttcgttcctcttctcctttcccatacgcgcgtgcccgggagggagtgaggcgagtacgagccgccgccgccgctgctgccgctgtcgtggcggacagggagaagaagctgagggtggcctcgagggcggaggccgggtcgggggaggaggcgagggcacggagcgtggtgttgagcatgaaggaattgggggcgcaggggagggaggcaaggaggcggacgcactggcgtcgggaggggagagcgcggcatagacggcttgtggagcggcggcggaaggatgacgagcgcggtgtagaggcgcttggcaatgccncggactgcgtgggtcgatt

SEQ ID NO: 85211 - DNA, 450 bp, Oryza sativa
  Clone ID: PAT_MRT4530_84372C.1
atggcggtgccggcctctcccagccgcagcgatcggcaatggaggacacagggaaggcaggggacgggatccggcggcagcaccatcttcttcggtgatggtggaggtgtcgtgcacacacttcaggcgggcggcggcgccaccgccatccccttcctcattgacgatgacaacgacgacgacgaggaggcgaccagctccatccacaccccccccctgacgctgccaccgctgacgacaaggaggcgacaacagtggtcgacgtcgggcggcaggcctcctcctacccatatctggcaacggtggaacggcagtggtgggagcggacggcagcggcggctcgcctcctcccgcccagatccgacggtggcaggcctcctcccgcctagattcggcagcgggagcggacggcaatgggagcagagggcacgacgccggcactcggctgac

SEQ ID NO: 85212 - DNA, 230 bp, Oryza sativa
  Clone ID: PAT_MRT4530_84373C.1
ggcatctgacggtgacaaggggccgggagtatcttgacacgcggcttgaggcggacacaatcgcccacgaggcctggcaccctcggcggacgccgggcccgtgggtgatgcgcgccccccccccttgggaagaccaagaggtgggcgcgcacatcaccctcgggcccgacgtcccccgagggtgccaggccacgtgggcgattgtgtctgcctcaagcctcgagtcatga

SEQ ID NO: 85213 - DNA, 861 bp, Oryza sativa
  Clone ID: PAT_MRT4530_84374C.1
ctatctcctattcccacgcctatctcgctcagttaccgatgccgtatgagcctgcgcaagagacagcagtcgactcttccacgccaaaatcagatcccgtgctcccttcccccaaatcgccccgccgcacctcccgcccacccccgcgcgctgcaccccgttcccgcccgatcccgcgcgctgcaattcgctcccccaccccctggcgcgccaatttgctctcccccgcgcaaatcctccagccacccgcgcgccaatccttcccttgcaccctccctcctcttttcttctccagtgtgtgaaatcttcctcgtcggcgtcgacgtatccgtttccacgagcccaacgatgaatccactcctcttgccaacgacgacgagctgtagagcaggatgagccgccggtccaaacgacaagtagctccgcggccgccgccgtcgtcgtcgccgccgccgccgccgtcgggatctgcgactgatggggattgtagtggctctgccttgcttgcttcctggatgttggagtagaacaataagctgatgatgctctcaactcctttgaccctgcgtcgccccacggctgaggatctcgagcgtttgctccaagttggagagtctcgtggattccctcgctgacgtcatcaagggggaggggcggcgccggcaagcgggccccaccggtcagcggcacatgggcgccggtccaccgtggaccgggaccaccgaggctgtccaccgccggtccacgggaaccgacggctcggatcggcacaaagccgatcggacggtcacgaggcggcgcggctggggcacgggcacggcatgagaccggctcggccgagccaaggcgcggcggcggcat

SEQ ID NO: 85214 - DNA, 482 bp, Oryza sativa
  Clone ID: PAT_MRT4530_84375C.1
acaagaaaccgaactatggatataccagaaggattgacacagataactacatccacaaatgtttatccgctcaaatatgatctctaagaccggaatttatacttccatttcacatggcagcagcatgtaagaacattgccatcaaccagtcatttctccataataagttataataacggaggctgaacaaaagaagtcataaaaaagtattcaagagcgccaacttactagcaactgctgcatcagaacagccaatataccaccagttgagatatttagtacattgacaacatcattggtgagccattcaaaaccttctttatcttgtagtgtggcaccaatataactctcacaaaaatttgcaatctgggatgcaaggacacatactgcgccttgtgatacattaacctgccccaggagataaccaacacttgcaagaattatcgatgcaagaattccagctagagtacccttaatactga

SEQ ID NO: 85215 - DNA, 1378 bp, Oryza sativa
  Clone ID: PAT_MRT4530_84376C.1
caggcggccggtcatgcttggctgctgcgagtccgcacgtcgcgcagtcacagtcgcggagtcggtagcatcggggcgaggacttggaggcgacaatggcgtgctctctcctgccgccgctcgctcccgtttcccctccgcctcgtctcctcctcccctcctcccgctcggctctgctccctcgcggtcctagggttgcgccccgagtccccgtttccccaccgcgcgcgctgccggacaccgctgtgggggcggcggaggcgctccgtggcgcgctcgccgacgccttcctggcgtcgcctccgacgtggaggcccgccgaccggtgccccctccccgcctccttcgtcgccggctccccggtgctcctgtctgcctcctccgcctccggtttcgccgccgcgtacctcctcggcaccctcacgtggcgcgccttcgggcccaaggggctcgtcctcgtcgcctcctacttcgtattgggcacagcagcaactaagttgaaaataaagcagaaagaagctttgggggtggcggagaaaagaggaggaaggagagggactggaagtgttattggttccagtgctgctggttgtgtctgtgctctgctatcaatctacaatgtaggcagtgcagcgttggctgagctctggagacttggcttcgttgctagttattgtactaaactaagtgacacagtttccagtgaaatagggaaggcctacggaagaacaacgtacctggtgacaacacttaaggttgttccgcgaggtacagaaggtgcgatcagtattgagggtactctagctggaattcttgcatcgataattcttgcaagtgttggttatctcctggggcaggttaatgtatcacaaggcgcagtatgtgtccttgcatcccagattgcaaatttttgtgagagttatattggtgccacactacaagataaagaaggttttgaatggatccagtgaggtcatcagaagaatgcaacaacgtcgacaagacttcttgaaccagatacactgctagccattgcagccacaaaccgtaagaggcagggtaaagaaaaaagtgcattcttctgagaatatctcaactggtggtatattggctgttctgatgcagcagttgctagtaagttggcgctcttgaatacttttttatgacttcttttgttcagcctccgttagtataacttattatggagaaatgactggttgatggcaatgttcttacatgctgctgccatgtgaaatgtaagtataaattccggtcttagagatcatatttgagcggataaacatttgtggatgtagttatctgtgtcaaaaaaaaaaaaaaaaaatccgtctggtatacccacagtgcggtttcttgt

SEQ ID NO: 85216 - DNA, 474 bp, Oryza sativa
  Clone ID: PAT_MRT4530_84377C.1
ttacttttcccatctttctctttctttttccatcttcttccttctctcttcagtcttctctctcatctctctgctgtcacgcctcccgcgcgcctcatggaggacgataaccgcgcagtcatcggcgtgctcgacgccatccatggcaggcggcggcgggcagcgtagcatggtagctccgcgctctcctctcccttctcttccggatttggtggcgaaacccaagcgggcgagatctcgtgcggaagcggcggcgaaatccccaaatccccttgtctcctcctcctcctctgccaccacatggatccagccaccggctcgccggatccggcgccaggggcgacttcctccacggcggcgatcgcggcgatcatcctcctccgccgcctcgacaccaccaccgcactccgcgctctgccctgcctcccgcgcccctggcctccctgacggtgatggcttcgtcttcttccccat

SEQ ID NO: 85217 - DNA, 257 bp, Oryza sativa
  unsure (1)..(257): unsure at all n locations
  Clone ID: PAT_MRT4530_84378C.1
tgttgttccacccagccaaccagacangcttcgggtttttttatgcttgggcccgcctttccccccggctgcctatcgtatgagcagatatggaccgctgtatgctcgaaagacccccggcctcgcgcggccgactggcggatcccgggccccgacaattcacggacggtcacgcctcgtgacgctcccaggcttaaagagatgcttgcgcgcttgctacccgttccaagggcagaggtgttaccacaagtacgacg

SEQ ID NO: 85218 - DNA, 1425 bp, Oryza sativa
  Clone ID: PAT_MRT4530_84379C.1
atgtcgctaaggcgcttcgacctcgagatcgcctcccgggagcttgtccgggcgtcgcgcccgccgccaggcttcccgcccgtcctcgccgtctccaaccttgacctcatcctcggccccttccccatctacctcgtctccgtctacgctcccccgccgggcggcgtcgccgccgtggtgtccgccgtccgcgccgcgctcccggcgtacctctcccacttcttccccttcgccggccgcgtcgtgcgggacccggcgacgaacatccccgaggtcgcctgcaacaacgccggtgccgagctcgtcgtggccgacgccgccgtgcccctcgcggccgttgacttcgcgcaggtcgaccgctcgatcgggctgatgcgcgtggcgttcgacgcgagcctcccgctgtcgctgcagctggtcaggttcgcgtgcggcgggttctcgctgacggtggcgacgaatcacctcctcgccgacgggagggcgttcatcgtgttgctcaacgccttgggggagatggtcagagaggggaggctcaccagcgagccgctgctcgatcgatccctgctcatgccgcggtcgccgccgcggttcagcccgtcgctggacgaggagttctcgaggttcacgccggccaccatgatcaatcccctcatggcggcggccatccagcggcgcctgtaccgcatcgaggccgccgacctcgagcgtctccgggaggaggcgtcggccggcggcggcggcggccggcgcgccacccgcttcgtggcgctctgcgcgcacgtgtggaagctcctcgcccgtgccgtcggcgactccgacacccactgccggatggcgtggatcatcgacggccggaagcggctcgagccgccgtcggtgggcggcggcgagggcggcgcgctggaccggtacatggggaacgtggtgacctacacctcccgcgaggcgagcgtggaggaggtgctcggcgcgccgctgcacgccgtggcgggcatggtgcgcgcggcgatcacggcggcgatgaccagggacaggttccagcagctggtggactggatggagacgaagaaggcggcggcgttcaaggacggcgggaagtggacggaggcggtgaacctcggcctcgggagcccggcgatggtgatctccggcctgctcccgttcgccatcgacggcgacatggggttcggcaagccgaggctggtcatgccgtggctgcagcacggcaggctggggtcggcatcggcgacggtggtgcccagcccggccggcgacgggtcgtggttcttcgccggcacgaggttgtggccgcggctgctggaggtggtggaggccgccggcccggattgcttgctgaagccggcgacggcggcgagcctggggctcgcttaccccgccggcgcccatggttccagattgtga

SEQ ID NO: 85219 - DNA, 549 bp, Oryza sativa
  Clone ID: PAT_MRT4530_8437C.1
gggtccatgccgaccaacttttgcaaatctggtgcaggactacaaattacacttccagtatcagggcaaaatctagtcaaacttgctaaaggctttttggagcatttgatgttgatccgtcttattctgcataagatatccaatgcatcatctgcatgatcttgggtttgtgctgtactattaattgctgactgcttatgcactgaattttcacccttcagaacggaaagggaatatggctgttgctgaagatttaaagctcatcaaattaatctgctggatttggaacaagatgaaaaggagcaaacaagaaaatgagcttagtaatcaagatgagaaggacttggtgatctgcagcctttggctcttgttccataaatcacaacttggtaatctctagcacgtagtgttcatattctggggtaatatttaacacacttgccccccaaactaaactaattcttttggaaggtagttcaatcagactgatcctatccaggccatactccatattactaaaattgaatttgttttcaaaaaaaaagaaaa

SEQ ID NO: 85220 - DNA, 301 bp, Oryza sativa
  unsure (1)..(301): unsure at all n locations
  Clone ID: PAT_MRT4530_84380C.1
tcgaccacgcgtcctcttaaacatagtagataatgatgatactggacataaacactgcactggtcaatatttcgggtaggggtcattcattgacaaatgtncaacacccaaactccttaagaagctcaaatgattaccaactgctacttttgtatcattgacttgttctatttacgtaacctttttcgcactttaaactgaatgagataattgtttctattgtaactgtcnttctttcatgacttttaataaaaactcacattttactaatttaaagcattttgatttattctctcttaat

SEQ ID NO: 85221 - DNA, 250 bp, Oryza sativa
  Clone ID: PAT_MRT4530_84381C.1
catgcacttacgtatgatacaatatcaacatggaggggggtttgctggatctatatgggggaacataaaaacaccgaaacccaatatggccattatgccgcacctagcctagcttgctgaggacatgggcaagagcagatctggccaacgtgaagaacttctccacattttcggcgcacttgatcttggctgcatggtcttccccactaatcgtggccaacagctcgccggtgaggtcttcgaggccctt

SEQ ID NO: 85222 - DNA, 176 bp, Oryza sativa
  Clone ID: PAT_MRT4530_84382C.1
atgatcttcccacgagattaaataaatatgatacccttggaatactctcgagtgaaatgctacaatggtttatccgtgcgcttgcggatgaactctgtaaccataatataccaggagtatttctacaccattgctgggaattatatttctagtaatgtcgttaagaaataccaaca

SEQ ID NO: 85223 - DNA, 168 bp, Oryza sativa
  Clone ID: PAT_MRT4530_84383C.1
atggaagataaagtgagcaaagctggaggcttccagaggacagcgtttcccacagcacagatgtggaatagatggagggaaggcattaaagcaaatggtgcttggggaccagttaaagtcatgcaattgcaagcagcatttagcaccgaggacatccttctattatag

SEQ ID NO: 85224 - DNA, 473 bp, Oryza sativa
  Clone ID: PAT_MRT4530_84384C.1
gttctttgacctctacggcgccaacggcaaccccgtgggcaggtggtatttacctgacttcgaacatggctcaatcaaggatgattattgtgggggaagctcaggatacaactcggaattactgaagatcatggaaactaaccaatctcccccttgcaagcgaccgcggagagatcgaaaccgtgaaaaggcaccctcctcaaacaaaattgaagtcatggaacaagagatatggagagatttccctgaagatcttttcgaaactgtcatagcaaggcttcctgttgctgcaattattcgattccgcactgtctgccgaaggtggtcttcccttttgggctcagacagtttctctcgtcagtactctgaagctccacatggactgccatggttctatacaatcactcatgagaattcaaacaacaatgttgggatgaatgatcctttgctgaagaaatggcatcaccaatctg

SEQ ID NO: 85225 - DNA, 342 bp, Oryza sativa
  Clone ID: PAT_MRT4530_84385C.1
atgggcggagcggtgcacgacggccgggcgatgagggaggcggcgcgcggcggccgggcgagaggaggggccgctcgcggcagccgggcgagcagggaggcggcgcacggcggccgggcaaggagggaggcgacgctcggcgaccgggcgaggagggagggctccaacccggatgtgaccatcgaggacgtcggcggcggcggccgggcgaggagaggcggcgggcggcacccaagcgaggagggaggcggcgctcggcgaccgagcgaggaggggcggcgccgttctgctgggcatctcgggcggagcagccgacgacgtggagcccgcgctcgccggtga

SEQ ID NO: 85226 - DNA, 281 bp, Oryza sativa
  Clone ID: PAT_MRT4530_84386C.1
aaacatccctcccctccctcctccccctcaaatccctatccctatctcgatcggatcttggttattccatggtgcgttgctgattagtttgtttgaggtgaggatttgaggagatgaaggtggatacggagatggagaggctgctcgacgagatccccatgctgcaccatggcgacctcctcgggcggcgcgacgcggcgggggatgatggcggtggtggtgtggttggttttttttgcgtgttttgcctgatcagggagcttgaggagatgggggtggtg

SEQ ID NO: 85227 - DNA, 522 bp, Oryza sativa
  unsure (1)..(522): unsure at all n locations
  Clone ID: PAT_MRT4530_84387C.1
tgacggtgtttaagacctttcttggatggattggggagtgaaagtgcatgttgtggacctgttgaaatgtttaatgcctgaggatgcctgagtggttgttgtgttgaaaaaatgctggatgccaaggtgtgtaatgaggaaaaaattgagtgaaccactgtggtgatgagcaccggaaatgtgagcctgcaggatgaggtgaatggtgtgcgttgtgtggcgtgtggaaaatggtgtgccctgaatgagtgttgtgtgtgtgtgtgatgaaaattgggttgaaacttacggaatgagaaaaaaatgtgaaaacatgtgtgtgatgaatgatggaagtggaggggcacatgctgctgttgattgtatgctgaatcctgcttgtttgctgcattgaatgtacacaccacagccacaggaggggatgaaatggggtgatcccaggacacaaggctcgcctgccagcttgcaaggtaaagcaactggctaccnccctacctagctacgccatgtaaaaaaaaaaaa

SEQ ID NO: 85228 - DNA, 438 bp, Oryza sativa
  Clone ID: PAT_MRT4530_84388C.1
gtagtctgtaatgtgagtgagactcctattaggttcaggatatgaagctcttgttccagtgtccctgctgctcatgcttctgcgtcatgaaggcaaagaagaacagcagccaaggcaaggaaggaggaggaggaggaggaagcaaattgcaagggggatcagtcatggtgaaaaactgaaaaccacagaccattagtagcttctgttgatccctgtcttaatttggaccatgtgcatgtccagttagtttcttcggttcatctctgttgctgcagcagtttggtagttagttttcatgtgctgttgattgctgctgccactcatctggccggccactgtcgatctccgatcttgatttttaagtctttatctagattttgttgatgtatctactatagtcaaataaaaaggcatcattatttaccttatatacaaaga

SEQ ID NO: 85229 - DNA, 412 bp, Oryza sativa
  Clone ID: PAT_MRT4530_84389C.1
cggacggcgacgtcgccggcctgcgctacctccagtgcgtcgtgaaggaggcgctccgcgtgcacccgccgggcccgctcctgtcgtgggcgcgcctcgccgtgcgcgacgcgcacgtcggcggccacgtggtccccgcgggcaccacggccatggtcaacatgtgggccatcgcgcacgacccggagctctggccggagcccgacgagttccggccggagcggttcgcggaggaggacgtcagcgtgctcggcggcgacctccgcctcgcgccgttcggcgcggggcggcgcgcctgcccgggcaagacgctcgcgctcgccaccgtccacctctggctcgcgcagctgctgcaccgcttcgagtgggcaccggtcggcggcggcgtccacttgttggagcgcctgaacat

SEQ ID NO: 85230 - DNA, 506 bp, Oryza sativa
  unsure (1)..(506): unsure at all n locations
  Clone ID: PAT_MRT4530_8438C.1
gaaaaaaacttttaggctgcattcattcacattcaacataattggtgcctccataccacagccaatgggagaaacatataataactgatccagagggagcatagacttttaacaccatgtcttgcattaatttacaccagtccattaacactcataaagaagcaacagcatctgatagctgcaacataaaacactgtgccacaaacgagatggatgactatctagctttccttaaccatagctaagacggaacatgtcactatggacatagaaaatgccttcatgaacaagcacgtgcaacatctggacagaacttgagggggtgctcaccgggcccgcggcgaagagatcctgagacgaagacaagaatgccttcctgcagacccgactgctggaagacgacggggttaacgcncgtgggcggcactgcgcgacagggagggaagctagcttgccgccgatggcggcggccccgagaaactgctgttcctcgaaggtgagatgga

SEQ ID NO: 85231 - DNA, 2367 bp, Oryza sativa
  Clone ID: PAT_MRT4530_84390C.1
gctgatggtaccaagttaacggcaggatattcaagatgccgtttgaaggataaactagataagatagagaaactaattgagaaagcacaggacattattaagttagctaacctgccaggcaataataatgaaagtggcgatcatagacgatacgttggtgtcactgccaaacatacatcgaagcccaccgctgcatatctgccacgcaaggtaatcggtcgagacaaggatcgtgaggaaataataagtatgcttcgtgatgaaaaccagtcaagtgctgatagatgtttttccgttattggcattcacggcatccctgggtctgggaagacaactcttgcacagtatgtttgcgagtacgaggaggaagccaaccacttcgacattgtgatgtggattcatgtctcccagaattttggcctggacaccatcttgagggagatgattgaacaggctacaaagcaaccatgccctcagttcaaaagtcttactgctttacagaaaagattgaaacaagacctgtgcgaaaagcgtttcctgttggtactagatgatgtcgagcataataaggatataagcgaggatgatctttctgcattggaagttgggggagcaggaagcaagattctagcaaccagtcgaactagagatgctttattggctttgggtgctgtgagatcgaaatgcattccaatatctaagttagatgagcatgtcttccgagaattgttcttgcaatatgcacttgacggtgcagagatatgtgagcgagatcgaatagtactgcagatgattggggctgacattgcaaagaaactgaagggatcacctctggcagcaagaacagtgggaggacaattgcgtataaggcaagatgttgagttttggaggagtgtacgagataaggattttttcagtgacgcaatggaagctctgcggtggagctaccagcttcttgatgagaaagttagacgatgctttgcttactgcagtatttttcccagagggcatcatttgggacgcagtaagttaattaacttgtgggcagcagaagggttcataagcagagaggaagttggaggagattacttccacaaattagtggcgacctcgtttctgcagctcgaacgaaaggactcgtcgggcgaggagtactatttacttcatgatctgctgcaggatttagcagagacggtcggacgtagtgattgctgcagaattgagggtggctgcacaggacaagttcctcgagacgatgttcgccatttgtatattaaggcttgtaatggagcaacagttgctggcaataaagctttcgagaaaatgattaccgaaaatattgtcaaactgaaggagctgcgcactctgatcattgacggaggggagacaggaattgaggcaaaggtgttcgatgatatcttcgacagcttgaagtctctacgagtactgattgtagagacacagagtagaagaatattgcaaatcccagaatctattggttacttaaagtatctacgatatctttctatcgagtatagatgccgtatattttttccgcgcacggttacaaagctttaccacttgcgggtgcttgattttggtgaatatggaatgttggaacgtagttgctcccctgaaaatatgagtaaccttgtgaacttgcagagagtggtaggccgttcacttggggattttccaaacataggcaggctgacattgctccgaacattaccaaccttcagggtgaaaagggacctcctgggttacgacattaagcagctgaagcacctaaacaagctccagggaaaattggtgatcagtggtctccaacatgttcgcagcgaggaggaagccgttgaagcgaagttagctgagaaggagcacctcaaacaactgacactggcctgggacgatgataacacaagcagtaaccacgatccagcagtactcgagtgtctatgcccgccaatggggcttcaagtcctggaaatcataggctaccgtggttcataccctggctggatggtgggtaagcatagtggtcaactgtaccttcagaaacttgagctccgccaatgcagcccactgggacctgctcctagactttttgagtgcttcgttcatctggaatcgctctgtctctctcacttaagctggcacaccttgccagataacatggagcaagtcaggactctcaaagttctgatgatctcccactgcaagaatatgaaggtgctgccaacactgccgcagtctctttcgcgttttaaactctcaaactgcgggcacgagttcacaaggtcttgcaaacagaatggagaaaattgggaaaagatccagcacattctcgaaaaaataatcctatga

SEQ ID NO: 85232 - DNA, 2991 bp, Oryza sativa
  Clone ID: PAT_MRT4530_84391C.1
tcatgggttgccagaaagatcatggctggcaacaatatcaggtgtcagtagcatcgtcatcctctgaaccccagttataatcactctcttcgctattatcctcttggacctcttctgcatctgctccgaagatggcaagtctaggatggttgggatttgcacttgcttctctcttgattgcagccaccgcagactcggtatcagaacgtacagtcccctggttgtcttggccacattgtttagcagccctccccccttaggggcttctttcccccgaagggcgttggaggctgttgaacttgctagcactttgttaaatccatattgaagacgtcttgatgcggatggcccatgaccgtaatcttcagtggccctccctcctttggggcttcctttcccatgggattttgccattaatacgtgaaatggaatctcaagcttctccagctttggcatagcccctttcccaaatgttaggtacgctccaccatcgtgatcgccgcaaacaaggagaaactccttgagacatgggaatcctgtgctttggactgtaagctgtttttttgggttaggttctagccatatttctagacagagtaaggctggcaggtctccaagtgtttccatatcttcctcctttatctcacgtaaattgatgttcaggtatgccattttggtgagactcggtttaatccactttggaagttgtgggagaaagtgattagtgctcatgcgaaacaatcggaggaaacaagggatagggaaccaacgttctaagagatcatcggaactgttatatataatatgcaacgattggagtttgtagctgcttagtttacaaagtgaggcgagtaacatctcttcttttgtcttgcacttgctgagtttatcagacaaacttattttgaggtccctcaaactggttagttcaccaagctcgggcactgtacttgctgagctattacttatattaatgcctgtcagcacctgtagattcctcatattcccaatcccatctggtagcttcaaggaatttccgaatagatgtagtaactttttcaacaggcataattcggtgggcagctcttctacgaatgtttcacttatgtccaatgtcagcaaattttggagctttgcaatttgtcttggtatgtgtgatatgtctgaaccacgaaggcttaagtacttgagttggaatagcttgtctgtattttccaaatcatactgctccaaattcatagagccttcaaactccaacactcgtatagcctcaaatcgggcaagctgtggcaaaagattcatgttcccaccaaagcaggttagagatcgaacatggcttaaatctttgtttactaacagacttgacaaatcattatcagtgtcctggatggataatcgacgaacgtagccatgcaaatttgttttccttgtttggccacgtaacaatgtaataaagttttcttctgtcgcctttgaagtgataagttcaagcattatatcatggacgcggcatgcacgggccttactgtcaaagcgaatgtccacaggttggaccaggcttctgttgaccagctcacaaaagtagctctctgcaacatcttccaagttcattccacaatcctcagagacaaagccttcagctatccatcgccgtaatagcatgtttgtttcaataatataatcctctggaaatatgcacaaatatatcaaacatgccttaaaatagtttggaaggtcattgtagctaagggagagtatgcttttcattccttctagattttggttcttgtccaatacaaaaccaatcgattctttcactttctcccactcttccttgataattggtctgtttgataacaaaccagatatactaataattgctaatggaatacccccacatttcttcaagatatctgttgaaacttcttgtaaaatatctgggcagccatcctcatctgtgctgaaaattctctggcaaaatagtcttctagagtgaatttcacttagaggttccatctcaaaattgcggtcaattccatttaagcagcatgaccgtccaacatcggaaatgcgtgtagtaactataattatactagaaccattctccgggaaaacaacactgatagctttccatgccgaaatagaccagacatcatcaattataacaagatacctcttatccacaagtagttctcttagcttttcaataaatttcttttcattccatgtgtcaatatctttgaggaatgcatcttttgtaggcatatggtatataatatccttgaagattttcttcatatcaggcttttgtgataccgacgtaaaagcagggcaatcaaaatggattttaaccctacgatatacctcatttgctagagttgtctttccaagacctccaaaccccacaattgacctgctgtctgcatccaaccaattgacaagttcatcccttggactatctataccgacaagatggttctcttccgcgaagagagcagccaaccgtggatcaacaaaagcattagtgttgctagagctactacaaaaaatatcatcaagcttgtagttgttcttttgatctctcaccgagataactcgcatcttcagttcttcaatctcggcagcaatattatgccttgagccaagagttttgagacgttttgcactcttcccgaagaagtccttgacgccattactagtgtggtgctggtcgtcgttggcaccaagttggtgcatgaacttgtctatgcagtcctcgatgtcataggcaagctccctcaactcgcttgtccaggtcttcacctggatgtcaggatcctcgagtgatgtgtacttgtggagcgccgcatgcatgttgctcaactccgatctaagagagcgtatctcacggtggacacctttcaggcgtgcgcactcgtctacgagcaaggtattgagcttgcccagcagtggtcccagtgccccatgtgagacgctcaccacgatatccat

SEQ ID NO: 85233 - DNA, 774 bp, Oryza sativa
  Clone ID: PAT_MRT4530_84392C.1
atggcatcttcctcttccactccggttggtgcattgcccttcgttgttccggtgatagagaagttgggaaaggggaactatctcctatggaaggcgcaagtccttcccaccattagaggagcccagatgtttgggtatcttgatggcaccgctgaggtccctgtaaaggagatcaaagtgaaagaaggagacaaggcgccgagatcgtcagctgaggtaggccaagctagatcttttgtcgcttcagaagttgtccgaccacacactcggtcacaaagtggagtggtcaagccaaaagtctatactgatggccatattaggtataattttctgactgctttaggagaaccacaaaatattgatgaagcattggcaaatgaaagatggaaagaagccatggatagtgagtaccatgcattgatcaagaacaaaacttggcatcctataccagcaaaagaaggaagaaatgtaattgattgcaagtgggtgtacaagatcaagaggaaggctgatggctctcttgataggtataaagctggactaatagccaaatgtttcaagcaaaggggatggtgcctcaggcaacttgatatacagaatgcgtttcgtcatggcattcttgaggaggaagtttatatgaagcaaccaccaggatatgaagataaatcaaggccagatcatgtactcaaactagacaaggctctctatggtctcaaacaggcgccaagagcgtggtttgaaaggttaagtcaaaagatcactggacagcagtga

SEQ ID NO: 85234 - DNA, 1319 bp, Oryza sativa
  Clone ID: PAT_MRT4530_84393C.1
ctctagttgggagaggatctccgagagtgcggctgccttctcaaccaatgaggacgcgtctgctcccaatcaggcgccgagatcgtcagctgaggtaggccaagctagatcttttgtcgcttcagaagttgtccgaccacacactcggtcacaaagtggagtggtcaagccaaaagtctatactgatggccatattaggtatgattttctggctgctttaggagaaccacataatattgatgaagcattggcaaatgaaagatggaaagaagccatggatagtgagtcccatgcattgatcaacaacaaaacttggcatcctataccagcaaaagaaggaagaaatgtaattgattgcaagtgggtgttcaagatcaacaggaaggctgatggctctcttgataggtataaagctggactaatagcctaatgtttcaagcaaaggtatggaattgattatgaggatacctttagtcttgtagtcagtagggaatggtgcacctagtaggggatggtgcctcaggcaacttgatatacagaatgcgtttcgtcatggcattcttgaggaggaagtttatatgaagcaaccaccaggatatgaagataaatcaaggccagatcatgtactcaaactagacaaggctctctatggtctcaaacaggcgccaagagcgtggtttgaaaggttaagtcaaaaggtacatcaacttggttttatttcctctaaagctgattacttcactatttttcataataaaggatcagtcacaatgtttctgctagaacgactaatattatcagccctgagggagtagcacttactagaactaacatatcttttcctgtgaataatgtttgtcaattcctttagttgccaatggcagatcactggacagcagtgaaacagattcttagatatttgcaatatactcttggcgccggtctatagatcaagaaagagtcatctactttagtttgtgctttttctgacactgattgggcaggaaatgttgatgatcggcactcaactagtggtttggtagtttttcttggatgcaacttggtatcttggagtgctcgcaagcaagctatggtttctagatcaagtactaaagctaagtacaaatctctagcgaaaaaaaatccccccccccaaacccacataaataatttggatccaaactcttttgcgggaactaaaagtttcttctccaccggcagctcaggtttggtgtgataatattgagcaacttatttatctactaatctagtgtttcatgctagaacaaaacatatagatattgattattattttgtgc

SEQ ID NO: 85235 - DNA, 504 bp, Oryza sativa
  Clone ID: PAT_MRT4530_84394C.1
atccaacccgcggaggttgcttttaccgcgcagacccccaaaccccggcccatgcccggcctccaatccacatcgatcccctgcagattcacaggcggacatgggggaggggatcaacggcgacgccggcgacctcgcggcggcgccgaacgaccagggggtcccattgagccccgccgggggatccccgcgcccatccgcgcgttacaagcatgctgcggaagtgggtcgcgaaaaactctatgaggctggtgggagccccaaaggccgctatgtatcagatatccaggcctttgattttaggacacacaagtggtcagcattaagtgctgctagagattcaagtcagatgaatagccaaaataataccacagacccttcattccctgcactagcaggccacagtctggtcaactggacaaaaatatattgtggttgaagctgggaacaccaggaacatcaacatcaaacaaggttgcaggcaggcttattaatgtggaaaca

SEQ ID NO: 85236 - DNA, 2118 bp, Oryza sativa
  unsure (1)..(2118): unsure at all n locations
  Clone ID: PAT_MRT4530_84395C.1
atgggggaggggatcaacggcgacgccggcgacctcgcggcggcgccgtacgaccagtggctcccattcagccccgccgggggatccccgcgcccatccgcgcgttacaagggaacgcacgttaagaacaaacgaatgcgagtagtagatgctgtcgtatcaattctcagggaacgcacgttaagaacaaacgaatgcgaaaatgtgacaaaccgcgtgcctaatcctgtggctttggagatgccatctctgcgtatagtgggacaatgccgagggattggcattaggactgaaatggccgacagaagtagtcttgagagaattttggtttcagatacgcggcatgctgcggaagtggttcgtgaaaaactctatgtggttggtgggagtcgtaatggccgctatctatcagatatccaggtctttgattttaggacactcaagtggtcagcattaagtgctgctagagattcaagtcagttgaatatcgaaaataataccacagacccttcattccctgcactagcaggccacagtctggtcaactggaaaaaatatattgtggttgtagctgggaacaccagaacatcaacatcaaacaaggtttcagtttggcttattaatgtggaaacaaatagctggtcttctgttgatacatatggaaaagttccaatatctcgtggtggtcaatctgtatccctggttggttctcgactgataatgtttggtggagaggataacaagaggcgacttctgaacgaccttcatatacttgacctggagacaatgatgtgggaagaagttaaaacagggaaaggtggtccagctcctaggtatgatcattcagctgctgtttatgctgatcagtatcttttgatctttggcggttcctctcactctacatgctttagtgatatctaccttcttgacttgcaaactatggagtggtctcaacctgacactcaaggcgcgcacataaatcctaggagtggtcatgctggtaccatgattgatgaaaattggtacatagttggtggcggagataacgcaagtggttctactgatacaattatgatgaatgcttccaagttcgtttggtctgtagtcaccagtgtgccagcccgagatccgcttgcttgtgagggtctcactctttgctcaaccacagttgatggcgaaaagtttctggttgcctttggtggttacaatggacaatacaataatgagatatttgttatgaaacttaagccaaggaatttagtgcaacctcgtctgctccaatcaccagctgctgccgccgcagctgcttctgtgacagctgcctatgctgtaataactgatgagaaaaccagagacattgttgcaacggatgatttagatgtgaagagagttcagccttcaggttcttccaaacaaattactactgaacttgatgcacttaatggagagaaaggcaagctagagtccagactggcagaagttcgtgatgaaaactcaaaactaaaggatagactagatatggtaaagttatcgcatggtgaattgacaaaggagcttaaatcagttcaacatcagttagcagcagagggttctaggtgccagaaactggagtcccaaattgctgctgctcataaaagactggaatctactgattctttggagaatgaactagaagtgttgcggcaacaaatatctcaggtggagcaaaccatgacaactgctcaaagacagaaatctgggggtgtttggaagtgggtggcaggaagtgcagagatctctgatgatgaatagtaagtgctacttgcaacatcctggagtggaacttctggtgtacttgtgctttaagtaattgtcaaagcgcttttgttttgcaccactttactactggaactttattttaagaatgatgagatttgtgagctgccaattttaactcattttggtattgctattgtaacattgatataaaatggtaatatataacgaacggcaacacgaacatttcaagagttattgttttatagtatttcttcctatgtagtggttgtgtgagtcggncgataaaaaagttggtatttgtgaaatgaacccaataacagatcatctggggtagaacct

SEQ ID NO: 85237 - DNA, 247 bp, Oryza sativa
  Clone ID: PAT_MRT4530_84396C.1
cgccgccggacctccctccgccagatctggtggcatggaggcgctcgccctcggggcgcgcccggatggcgtggagcggcggtggtggccccgatttttttttttttcaatttttttccatcgctattgctaacctaatcggattgcttatggaagaaaactcggacgaaattagatgtgacgaccagaaaaatacgaatatttatattagttattatagatatatgcgactcaaaaaaaaaaaaaa

SEQ ID NO: 85238 - DNA, 534 bp, Oryza sativa
  Clone ID: PAT_MRT4530_84397C.1
atggcgatgggcatgcgaagcgacggcggagccctccctcgccggcccctctaccaccccgtctcccatctcactggcgccgccgctcccttcatgctgtcgccgctcatccattcttctctcctcagctctcgagaacaggcggcgagcggaaggccttcgcggcggcggaaatcggcgctggaggccggtggcaacgagcgggagaccgcggcgacgctcgctgtcatgccgccctgccgccgcgccctcttccctgatttttccccgcgcgagtttccagtcgccgagtatattgctagttgggacgcaaaggatgaagcggttgcattggtcactggcacaggaggaagctgtggtggtagttgtagttgcagtgagaagtggacatcatcatcgatatcaagggtgacggcatacagggacgaggcacataaggatgcatcggccggcgccatcgcccacaccaacaccgtcgtcgtcaccgatgccctcacactgccacaccgtcgccatggctgcatcaagctctaa

SEQ ID NO: 85239 - DNA, 1256 bp, Oryza sativa
  Clone ID: PAT_MRT4530_84398C.1
atgcacacgcctttcgtggacaagagcccccaccgccgcctcgacggcttgggcgccggtggctggctgaagcagaggctggctcagatcctagtgcgatctacttgcaccaccaacaccaccaccacgacaacgaccacctcgtccacggccttcgtcagcctcgacaagaccaatgccgacacgcaccaagaaccgccgccgccgccctcgccgtacttctgcaccccctgcacctaccagaggcccaagcttgatgcccccggccgtccccgccgacgccgacgcagcgcgtcgctggtccacatctccatcgactgcaccggcggggccggggccacctccggccgccgctccgtccactccgacgcgcccctcctgccgtactcgtcgtcgttgccgacgaaggatggcaggaaacagagcagggcgaggagaaaggcgcgctcttcgccgtcgacatccaggcggcattgcccgtcgtcctcctggggccgcgcgcggctcccgaggggggcaccggggcagtacagctcctcgtcgtccacggtgaccgacgacgagctcgcgccgttcagcaccgacgaggagggcggcgaggaggccgacacgaggacgctcttctcgtccctcagcttctcctccgactccacctcggagttctaccacaccaacagcagcagcagcctcgccaggaagggccacaagaacgcgccggcgcgccgcccgccggcgcggcgcgcgtcggcgaggatcaccagcgacccggccgacgccttccggccggtggtatccgtggcggcgacgaagaagcagcacaacgacatgaagaagaaggaggagacggcgatcaagaggcagctgggcacggacgacgacaccgccgccggcgcgggcatggcggtggtgaagcggtcgagcaacccgtacgccgacttccggagctcgatggtggagatggtcgtggagcggcgcatctgcagcgtgccggagatggaggagctcctggggtcgtacctctcgctcaactcgccgcagcaccacccggccatcctcgccgccttcgaggacgtatgggaggccgtcttcggcgaggagtgagtgagcgatcactgatcagtgacagtggccaaccaaccgatcgaccaaagccttgtttgattagccaaccaagctataactcgttcgttgtgaggccagtagagcagaggtgtacgtagttaggagatgcagcgagcgatcggcattaatgcgtg

SEQ ID NO: 85240 - DNA, 378 bp, Oryza sativa
  Clone ID: PAT_MRT4530_84399C.1
atggaggattacttctacttctccgccaccttggagttggagcccgttggcaacctcgagtcagtctcaccgtcgccgagcccccggcgcacgacgtcccgcgacgtcgacgtcgccggcgagctccgcgggcgccaccaccactacctcgacgcctgcttcctttgcgggcggatgcttgccgggaacaaggatatcttcatgtacagaggcgacaccccgttctgcagcgaggagtgcaggcagcgccagatcgacgccgacgacgcgtcggagatgatgaagaagagggcgaagatgcagcccgccgccgcgaggggagagcagcagccgcagcggcggcagagcccgcacggcatcccggtctgggcccggtag

SEQ ID NO: 85241 - DNA, 742 bp, Oryza sativa
  Clone ID: PAT_MRT4530_8439C.1
tacacacacaaatggcatagataaactatggatttgtgagaatttacttaatttttttagtacagttcctggatttcatgcaaactccaagtcattgttgcaacttatagcttacattctccatctggaaagactgctgctattggcaatggtatgccatcgttatgaatcttgtaattccatggggctacttcgtctgtttgtatgctgtcgaagagcaatgaaaaatcttatcttcaattttggtaaagaatttccagagttgaagcaatactcagcattttccaaaatttttggtggctcctgtctgatttggcttttgaggtctgttcaggaacttgtcagtttgtcacacaaaatatttgaagagcacactgatgagatgaaaaatacaattttctccctggtagataagacatcagaaatattttcaacactaactaacatgaattctgtattttacttgttgggtgcaaagaaacaaatcatatcttccagcggagaaagcagtactccaaaacatgatgatcaggcattcagcatactagaaaattcagctttggagcatgtcaaaattatggctgaactgttagagaagtctacaactggcattcctgtaactgttaagggtagtcagtgtgttatcaaattagagaactgttatgacactgtatgctgggatagattattatgcaccatgtcttgcataagaagattcttgtggggtcttatttcagcacta

SEQ ID NO: 85242 - DNA, 2624 bp, Oryza sativa
  Clone ID: PAT_MRT4530_843C.1
ttttttttttttttttttttttttttttttttttttgcccagaattatgtatgattcatccctgaacaaagaggagaaaaagttaagagaactacagcaactagagaattggatgccctctatctatgctgagaccaacatgattctctttgaatttttttttcctttttggagtagtgcctcacacagttaagaactgagatttgaatttaacataaacagaaaataacagttgattgtaggtgcctctccttctagcagtgcatttccattttcctccttgagaacacttttttctagtatttttgcaggttaggcggttaggccccttcgctgtacattgattctgaatggcctaaactttctgccattgcaccactgcaaaaaccagaagattgaccggtatcatttccatttccatttaagtttatgtgactaagtaaattttctacttcacatgtcaacttatctaccccactttccaaaaactgaagcgccttttctgacatcgaatatcttagagcaactgagtgttatggactctgcctcgctttggacgaagacggaagtggtaggaagttaactccaagtagatggagagctgatgatatgcccagaattatgtatgattcatcccttttgtaaacatagtgtgaggggaatgtaaaaatattgctgtagttaaggactcgcagcgcgtgcttgcatagcatacctgtgcactcatacatcctgcaagaacatgatactgttgtatcctcagaattaaaaacaacatatgcttcttcttcagaatttaaaggtgtcaatttgtaagtactgattgttctgtcttgtgatagcaacgaacaagacagagtgaacaattttttgaattcttcttcaaaatgcgaatacaaattccttgtataggactcagcagccgtcttcaacataggcaaatcaggaacatagggaaccggactggtttgacgggaattataatctgcttctagttcattttggcggaaactagttatgcacttctcatactcctctaagaattctggaaggcagagtttcctccgaaaattcttcaatgcatcacttgtgccttcagcattttggattgtcatcatgtcagcgtaaaatgagtcacgggaatacacagcagcccacttttcacgcattgcatataaattattcatccaatcattgccgtctagattatatgcgttaaccaattccttccacttcaagtcaaagaacgttacagacctttcttcatagatacgtctcttaaaatcagatagaaattctggatggttgcaaattacgtgattcaaatgcttaacagcattatgacagatatgccgcaaacacaggcggtgacttgagtttggaaacactaacctaacagactttattatttcagcagagggatctgtgaaaattgttgccggttgcttcccagacattgccgtaaggaaggtttgaaacagccaattgaaagactctgaagattcatcatatatcagcgaagctccaaacaaaatgggttgtttgtgatggttagtccccacaaatggagcaaacggcatttcaaacttgtttgtttcaaatgttgtatcaaaagacacgacatcaccaaaacaagcataatccacaatagcttgacaatctgtccagaagaagtttgctattcgaccatcatcattcagctgaactgcataaaaaaatgaaggattttctgtttgtttgttcttcaaatactcaagcaatttctgtgcataacttggttggaggtactttctctgagtatctttcttcagaagatgcacattttcagctcccctggaccattgccgaaatactctttgcatatcagctgctgtaataccttcttgccgcatttcattcactatctgttgatatgacggtgtcaaacggcgctgggaccttaacatgtgtgacttatcaggacttacgagatagtgcttatgatcgagctcaaccttctgcactgtccagataccttctcgggaaatatagaactgaagacgagccttgcaatcagatcttgttgaagaacgtttcttccgccccggctgggtagtgcttgccaccggctgcccttcattgctgcacaggaaatatttggagcaaagactcccatccgccctagtatttgcgtggttcttccggatactaaacccaacatttctagcataggagttgtagaaatcataagcttcgttctctgaattaaaggtcatccccacttttggcacacagttaggtaaaccaccttgatcatgatccccaagctgaggagtcaccgcggggggcagcccgctagcggagggctcacgaccgccggcgggcaccgacgaggagggcgccggcggatcgctagcggcggcggaaacggggagcgggccagagccaggggagggctcgcagggcccttgagccgtcgaggcgaggggaacgacggggccggacatcgccgccggcccactcgcggtcgggggcgcaacgtcgccggcggcgagcggtttagggcacgggcggagagggaaatcctgcggacgccgactcgcttcgccccatggcgtggcgcggttgttcacttccgctaaaaa

SEQ ID NO: 85243 - DNA, 471 bp, Oryza sativa
  Clone ID: PAT_MRT4530_84400C.1
cacaagccaatttgaaagtctttgatgtctcctaggtgccgctactttctatggttggtcgctctgaataggtgctggatggcagaccatcttcggagccacggcctgtcgcaccctgattgttgtgttctctatgatcaatgcgagaagactatcgatcatcttttggtcgcatgtgcagagtctcatcagctgtggtggattgctcttagagcgattgggcattcagactgcttgctgatcaatgaatcctcctttcacctgtggctttgcgacagccggagaaagatgatcaaggaactccatcaggggttcgataccattgcaaccttggtagcgtggacagtttggaagaaaataaacaatagagtctttaatcagcagagcagaacttgggcggaggttgtaagggccatggcaggcgaatcagaactctggcgtttggccaaagcagtaattcctccattgata

SEQ ID NO: 85244 - DNA, 610 bp, Oryza sativa
  Clone ID: PAT_MRT4530_84401C.1
tcagaaacggaatcgaaaacggaaatattttctcggaaacggaatcaaatatgataatcgcagtttgcgtcggaactcggaatcggtcggaaacattccggaaaatttgtcgaaatttccgaagttaaaaaggcccatccaatcaatagtccataatccctccccaagtccccagccggcccaacccaagctgctaacccaagagaagagagtggagagagagaagtcagacagatcgggagggaggccgggagcggcgcatcgccatccagaggcggcggcggagcggcgcatccagagcgcgccaccacccaccgccggcctgccgtcctcgcttccttggctccccgcgacctcgcagcccgccgtctcgcatctcgcgccgcccttcctcttcgctccgtcctcgcccccaccatctcgcggcgccgttccgccgcctctcgccttgtcgccggtgacaccaccaccgacgaggcgacgacgacgccacaggcacaccaccgacgccggccataccgacgacgacgcgacatcgacgacgagaccacaggccacagccacaccacaccgacgacatctcaagccccactggcttcctcaccgccat

SEQ ID NO: 85245 - DNA, 422 bp, Oryza sativa
  Clone ID: PAT_MRT4530_84402C.1
ccgggcgggggacacccgcgaataccctagcgactcttgccccggcggaggtggttggggcagtaaggcgaataagatctacagacgtgaacaccgctgtcttccgctccttgctcaatacagaagggcggtgcctccttcgcaaaaggaaaatggaaaagcaaaaggcaaataagcagcaggtccaacgacagtgagaacaagcctgtgatgaatgaatgaaagctttctgatgaatctgcgccttacaaggaatatgctttaatcaagcgatggctaccatgattatgtactgggtgtgattaagtgagatggaagcgaaccatgtatgaacacatgagagaacgtcccaggtaagagtccttaatgatacatgagaaaataaatgaaataaatggtgacacctggagctgcagatgttg

SEQ ID NO: 85246 - DNA, 260 bp, Oryza sativa
  Clone ID: PAT_MRT4530_84403C.1
cacgagggcctagggtttcgcgctccctccctccccttccatggcggacatcgagacggcgctgcctccgccgccgccccagcaggcgcagctaccgaggtgggcctccgcggcggcggccctgcgcggggtcgctgacgtcctggtgtacagctacgtcaccgcgatgtgggtgaacgccgccgccaacggcgccgccgtcttctctcgttgggcctgcggcgaggactccccggctgcggccgtgaccatggaggtct

SEQ ID NO: 85247 - DNA, 2441 bp, Oryza sativa
  Clone ID: PAT_MRT4530_84404C.1
agtcccgggtctattggcgagtctgggttaatctcctccccggtctggtcgattcgaagccatggagatatagcctgcaagcttcatggggctggagcgagctcgtatttcttgatgcaagtttcagcccctccaagaacagggtaggagagattatttgtgttccttccattgctggttggttgctgcagtctgcatgtggtggattcttgggaagaaggtggtggtgaggtgaggtgaagagggagatgcccaaggtggccggagatggcggcggcggtggccggaggagcgaggacttgcgcgttgttttcctcagggtcggcgccgccgtcgcgctctccgtcgccgggctgctcctctcgcggcggcggccacggcagcaactccggttacctcctcctcctcctcgctcagattcggatggaatgaagggtggtggagggctcaaggatgagctgaggatcctcaagaatgaggataccaaggccaaaatcatcaatggaaactctgtccacactaccactaccactacaacgatgaccaccaccgcgttagtaccactgcccccaaaatgtagaactcttgatgatgatgaagaattcctcctcccagaattcaacgaaatagttctcaaagaattcggccgagacatgggcaacattgcaacctcacctgcaccaagggtaagcgaagaagatgcaacgaagaccccggaaatttttgagcttagagaaatggtcagatcacttcaagaaagggagaagaccctggagctacagcttctagagagctatggtttgcaggagcaagatgtcgcggtgcgggagctcgagaatcagctgaagatcaacaccgtcgaatcgaagctatacacgctgaagatcgaatccttgcagtctgaaaatgagaggctgcaggctcagttaactgaaagctcaaagctggcttcagagcttgaggcagctagaatgaaatgcaagctgttgaagaagaagctgagacaggatgcagaacaagcaaaggagagaattgcctcacttcaggaaatggccgattcttggcagtgtaaggagattattactgaggggaaattcagtgctgaggttgaggaaaaattgagtaagctagaggagttggaaaatgaggcaagagagcttagggttgtcaattcaaggctgcagcaggagaatgcacatcttgccaggcgattggagctcacacgcctgccccctgtacccaagcccatcaataacatggaggtaaaagcattgcaggaagctgatcatttgaggcaagaaaatgacaagctggcaaaagaggttgaacagctcaagactgacaggttttcagatgttgaggaattggtatatctgaaatggatcaacgcttgcctgcgttacgagctcaggaaccaggatgctccatcagggaaaaatgttgcaagggatcttagcaagacactaagcccccaatctgaagagaaggccaagcaactgataatggagtacgcaaatgctggtccggatgagaaaaactttgatcatatagagttctgttcagagtactcttcctcaagagcatcatcattaggcgaacccgacgacgcgtcgatcgatgtctcactgatgaacaagcacaagaaccctaagaagaaaaagttcttttcgaagcttcggaaattggtactgggaaaagaaaaggagaacaaaaccattcctactctggagaggaggatatcgatttcgagctgttcatttgacgagttcaatggaagagagtcaattgatagctattcttcattcatgacagaacctggtaattctggcaatcaacagcatgataatcacggctcccgttggcattctatggacagccaaagtgctcgacatctcagcaaggaaatcgcagatgcaagaaacctccatcttggggtcaagagtgtgtcttttggggaggggagagtgagtaattttgggcatagttctcaccttggcaatggtgaagccacggttcctgaagatgccaagaagattcacaaatttgcagaggcactgaagacatctagaccaggttctaggtcatcaaggaaggaccactgataaacaaatagcataggaacaatctgctgcagagtgcagtaggcccatcttcctggatgtatatatttctccagttcttgatgggagattacttatagaagatgctactggaataaagcacacatgctttattctgtgtaaaatgtacaatacagtatatagtagtgtagtgtactaacctttaatcccagccctcaaactattcatttggggttggcttgtacttattcagtgtattgttcatgtattgctctatgcatacttcactccagctacaaacatacagctctttgacaagttatttatgtgtgcaaaaatatgtaatttacacggatccac

SEQ ID NO: 85248 - DNA, 653 bp, Oryza sativa
  unsure (1)..(653): unsure at all n locations
  Clone ID: PAT_MRT4530_84405C.1
ccggcccggngaaaaaaaaaaaaaaaaaaaaaaaaaaaaaaaaaaaaaaaaaaaaaaaaaaaaaaaaaaaaaaaaaaaaaaaaaaaaaaaaaaaaaaaaaaaaaaaaaccaaaaggttttcgttttttaaccccaaaaaaaaaggggatccaaaaatcccccccaaatttttttccaaggttggttggtccctttggggggaggccccccaaccccacaatttttaagcccaaacccttatcaaggggaaaatttccccccgggaaaccccaaagggtggaaattttaaaaggtggaaacattttgacccatttcgggggggggggcccaaagtgggaaaaatggatttttccaaggccccaaaggagtgtttccaaggacccgaaaattttgttgccccccaattttttaacccaaagggccaacaacacccccttaacctaaggggggcttctctggaatattccccccagggaaagggtataacgggcccaatttccccaggttgcctggaacccaaccagaagaattcccaaaaataggggaagccccatttgcccaaaagtaaaacccaaacccttattttcagggtgaaacttcaaaaatttcccctttccaaacaagaaaatgttaccccgtgcccggtgggggaa

SEQ ID NO: 85249 - DNA, 738 bp, Oryza sativa
  Clone ID: PAT_MRT4530_84406C.1
atggctctctccgccggggacgtgcagttcatctactccgtcctcgccaactcgctcagcgccgacgcggccacgcggcagccggcggaggccttgctcgcgcagtgcgaagcgcgccaggggttctgctcctgcctcctcgcgatcatcacgtcgagaggggaggaatccgacgacgatgtgcggctgctcgccgccgtacaccttaagaactgcgtcacccgctgctggcggaacagcgtcgattcccctgccatagataatgaagaaaaggtctacattcgaaaaagtcttctgctaaatatgcgagaagaaaatgggaagattgcacttcaattggctgcactgatagccaggattgtatactttgattatccaaaggaatggtcagatgtcttctctgtgttggcacagcaacttcagacatctgatgtattcacttcatatcaagtgtctacagtcctattccgatctttgaagaaactatcaaaaaaacgtcttgctttcgatcagaggaactactctgagatcactgtctacttgtttgattatatctggaacctctggaagagcaatgcacagattgtattacaaaatttttcagtgctttctcagcataattccagtttggaccaatcaaatgatctactgttaatatatgaaagatggttagtctgtttgaagatcattcgcgaattgatttgctcaggttatgcaagtgattcaacaaccatgcag

SEQ ID NO: 85250 - DNA, 468 bp, Oryza sativa
  Clone ID: PAT_MRT4530_84407C.1
tcgttagagatccccaaaatcagcagcgaaactccctgcagttcgcgagtgccaaaccgcccgggggctgagctgagctgagctgaacctcagcttagccatggggcggttctccaatggcgtcctgggcgccctgagcttcgccgccctcctcgcctccgtgccgctcatcggcgcgggcgcctacctcctcgaccacccggccagcgagtgccagcgccttgtgcgggtgcccgccgtggcgctcggcagcgcggcgctcctcctctccctcatggcgatcgccggagttacctgctgccgcggcgcggcgctcctctgggcctacgcgtccgccatgttcctgctcatcgtcggcatgttctttgtcaccgccttcgtgttcgtcgtcaccaacaggggcgtcgccaccgccgtgttcggaaccggctacggtgactaccgggtcagggactactcggagtggct

SEQ ID NO: 85251 - DNA, 342 bp, Oryza sativa
  unsure (1)..(342): unsure at all n locations
  Clone ID: PAT_MRT4530_84408C.1
cgtcgncaccgccgttcgtttcccaaattcacacaagccatggtgctaggcctctacgccttcgccgacatcgccgccgacggcgccccccacctcaactccgccgccggggaggagctcgtccgcgtcgagcgcgccgctgccgtcgccctcggctcccgcgcgccggagccccccgggaccctgttcatcaccaccagtgaggtggagaagggcaaggcctacgcggtggatttcctcgccgtctcgctccacgccgtctctcgcgatccggaggcgtactcctccccctgcatctacacgcaggagagattcggtcgagtagagaagggaagagattga

SEQ ID NO: 85252 - DNA, 505 bp, Oryza sativa
  Clone ID: PAT_MRT4530_84409C.1
cagtgggacccacgtcatccctttctttcctatctcttctctcccttcctcctccgtcctctctctcttgggttcagaggagagcgcgccgaacggcgagcgaggagaagcacgaggcggcagagctcgttgaggcggcactcctgtgggattctggccgccactcgtgcgacctccaccacctccgccatgatgaagaccctcttccttctcccgtgccgctaccccctccactgcctccgtgcccgctggcctccacctcgtcgaggccactccctctctgtccctgcattcaccgtcatggtgtcctggttgaatcccttgactccgtgcaccgccctccgatggtcgtcggtgccgatcttccaaacccgccatggtggcccaaaagccgttcttgtgctccaccctcaccatcgcgccatccggccccatcacccgccacttcgggtctctcgctagcgacgccaccgtagccacggatcaagctagtactagagcttag

SEQ ID NO: 85253 - DNA, 733 bp, Oryza sativa
  Clone ID: PAT_MRT4530_8440C.1
ccggccgggaaaaaaaaatcaccaacaccaattacaagctagtcgagtgagtctcttagcgaggagagacgaggcgagaggagaggagaggcgccgccgcggcgaggagagcgagaatcggaaggcgatgggcaacgccgggagctcgccggagcaggccgccggcaataataaggaggacgcggaggcccgccgccagccgccgtccaccgtgcgattctaccccagcgccgaccagcccaaggccaggcagccgccgcccatcaagctggaggaggaggacgtgccccctccgcccgtcgccgacgaggagatggccccccgcaacctctggcaggtttatgctcttggagcgtttattgtgttgagatgggcctgggttaagtggaaagaaagcaaggaaagagatgattcgcctgatggccgatccccggacgggtcttcttagtttgctccagaaagctttagtctctgctttaaatcctaagaagataaagatgttgtgcgatgatggtgcacctctctaatctatgtccatctgattagagtttttcttccccgtcattgttgccttgtgtttggattctgtatttgcccatcatgcgcaagtgacttccttttccttgctgtcatgttagaacttgcaatatctttaagtgaaaggcttgtagtaaaagtaaaagacctcttttaatactaccatccatgatccaactgcaagtttgattgccta

SEQ ID NO: 85254 - DNA, 2202 bp, Oryza sativa
  Clone ID: PAT_MRT4530_84410C.1
ggcgggccgcgcggcgccgcgcattgcttcacctccgctccgcgcggcggacgccgcagagacccctgggtggatcgaagcggggagagaggacttgaggagacgcgtcgtggagggaagtttttgaaaaaaattttccccaacccgctgggcgcgatgccgtcatgatcccccccctcgcctcgctgcccaaaaatttttcaatctctctcgcccacattaatcaccttcctcacgaggccaacgagcagaaatcccatttcatcatcattcataccaatcctctcggtttcttccgcgtccccggattcagtttcctcctcctctccccccctctcgatccctcctcctcttcccctcgttccagcgcgctcgccgtcgcccgccgccgtccgccgaccatggaagcagctggagtggaggtgaacggaggaggaggaggcgacgtcgtggtggtggtgccgcagcagcatgagggtggcggcgaagcaggcggcggcggcggcggcggcgaaggggaagtccgtcgaatccaacggggtccgcgtcgtcggcggacggatctatgatccggagaacggaaagacctgccaccaggtaacccctcctcctactcccacctacctgcctgactaccatgtgttcgacaccgtgtctagccggtgtcctatgaggagtggtgcgtccctgttcttcctccccggtggttgggtcgggttggatctgaggaattcttgctcgcccccccttgcttttgcggggaattcttgctcacccttgggtggagcggttgctctgtttcttgctccctcgcagtgccgtcagaagacgatggacttcgccgcgtcatgccacaagatcaagaagaacaacaagcagtgcacgatccagtactgccgcaagtgtctctttaacaggtacggccaggaagccgagaaggtggccaatgacggcacctggacttgccccaagtgcaaggatatctgcaattgcagcttctgcatgaagaagaaggggctgccgcccaccggaatacttgcccatgctgctaaggcttcaggttgtgcttcggtccatcatttactgaaaaaggggaaagaagcggtggctgccgcgcagaggagcacccagaaagtgagatctacacctgtgaagaagagcccaaagagggccatacagccagatgctgctgctgatgaacctttggctgaaggggatgagaatgtatgcattgatttcaatgctgctccagtgaagaagcagaagagaagcaggaaggtgggtaatggtgtggctctgacgaaggatgaaagccctgatgctcccaaggaacaagttgttctgcccaagggcactccagtcactagtgttgccggtgcagagtgggagcctgaagatgttggtcttgcacttcagttcttcgaattctgccgcacatttgctgagattttccaagtacgcaagggtcaaccagaaagaatccttcgggacatagctggaggtcgtggacttcgagtggtgtcctcagtcatcgctgacttccacataactttgttatccatcatccaagaaggccgaggaatcaagcctatcacatattcaagagataatgatgcatggattgttgatactggaaaatgcataagcgagtcaatctttgtcccagagggacttccccttgactccctaagtcagggggtatcgggatataaaaatctgagcccttcttgtaagctcagtgttctgaactttttgtgtgatgaaagtctttctactgagaagttgaggagctgcatattatctgaaacaaaaaacccctccagagaaaaagctcattctgcaaaagagaaggaggagccaaaagaagaaactataaagaacacagatgaagcagtgcttttgaaaactgaaggagcagctgttgctattgaggaagataagaatggcatttctcaacaaaaggatgtgaaagaagtaaagaatgcagacacaaatgaaaagaagcatggaggtttccttaggactaatcctttcatggtagacaaaaaggtaatctattggaagctggatgactattgtaataacacaacaatgatgctccaagaggttgatgctgatgatttaatggggaacaaagacaagtggtttatgcttaatgaagatgaaaagaaaatagttgaaaactatttatccacaaggtaa

SEQ ID NO: 85255 - DNA, 279 bp, Oryza sativa
  Clone ID: PAT_MRT4530_84411C.1
atgacagcaaggggctcactagccgacccggcgatcttgcgcttcctccttgcacctggtacatgggacctatggaaagggagaagaggatgggggatgccatcagtgttggggataatggcggtcagtcctccggcaaagggaggcgggattgattggagcggaggagttgagggagggagcaaggtggacgacaaaaataatgagtcggagagaaaggaggatgagaaaacagatccggggaagaagaaactcatctgggttgttcttattaagtag

SEQ ID NO: 85256 - DNA, 421 bp, Oryza sativa
  Clone ID: PAT_MRT4530_84412C.1
cccacgcgtccgcggacgcgtgcgaatacccaaatgcctgcggaatcatctagctgacctgtattcgtcggtcagcgatccggtcaatctagatgtaggaatgccttgatcaggatgcagactccaataaatataactgtccattcgatgactatactgatcgttgaactcacatacaaaaatttgcaaatgattcagaactaactctgaaagcgctaaagatctacgctagcactcatagaataagatcccctgatgacattatgccccttttgatcaaagataatgactctgtagagaatatgcttgatactacagcctgataatcatgctgtcgcaagtctgacggagaatgcggtctatctgcttatgtgttcagatcaaacctggatactgtggctgcattcgaatctaaacccat

SEQ ID NO: 85257 - DNA, 939 bp, Oryza sativa
  Clone ID: PAT_MRT4530_84413C.1
tttttttttttttttgtacagattgcaacatttcatactccacaagcatagaaaagcaaccagttaacaggacaatcacgagtatcactttaattaaccttgaaaattaaactatagctagaccaacatgcttttcaacgatctgtttaccaacctggggagatttttattatctctaaattcctctcctatctttacacacgggattgatacagcatcaaacacactaacacgccaccaaacaatccaaagggtttaacaaaaacacaaacccgtttttacgtaaaaaagcgactatatttggtggggttttatgaaagaaaaaggtgagagatcttataggcaaatttagcttctacattggcggcgacatcatagggctaggatggacccggcccggacgctgttgccccgctcctgtgggccctccacctccctgcgtgaggagggggccccacgtgtcagcttcccggcgcggcgggctttctccgtcctctccgccgccgcgtccgcctccatctgctcccgcctgcactcctcgctgcagaacggcgtgtcccctctgtacatgaagatgtcgcggttgccggcgagccgcttccggcagaggaagcacgcgtcaaggaaatgcgtgtgccctcccctccccatctcctcgatcgatcggatcgccgcgcgcagccacaccacaccagcttctccgccgccgccgccgcgcgtcgacctgactactccggcgcgagatccggtggtgccgtagaataggccgtgcggccggctgactcctccggcgagatccggtgcggattcccctcgcttgcggcggaatcgcccgtggtttccctgtctgtgggctctggcaggattccgcgtggagaccgacgcgctggtgttgtggcacgggaggtgggccccacggtcgccgacccgctcgtccat

SEQ ID NO: 85258 - DNA, 2165 bp, Oryza sativa
  Clone ID: PAT_MRT4530_84414C.1
ttttgttttgctgtttcccgttttcttttttttttttgggttgttcttctctcgtgtaaaatataacttcgattaggatatccgtagcatttaatttcatacaatgtcatgctggtgaataacaataacaaataacaaatgacaacatgaatagcctatatctcggctatagctcaatgcttgctgaactatgtattgcctctcgtgcctactacatttgctccacagatgtgaactactaccagccaatggtcaatcgacattgcagaaataaagttacaaacaaaaacaactgctcttttctgcaacgtccaatcttattcagcagctcggtagaaatgaattgcagtatgccacatgcttatattcgatctgtttgtatgatcctatcaatccttaaggattcagtggctcatcttcatcaaccatctcttgtgcttttgtcgatgatttgtgtaggtcagaaacaaccattagccgtctctgcaggattgccgccatgaagaggaagatagaacacatgccaaacatgacagtgatagggaatgcattcacattgtaaagcaccacacaaacaaacaagttcagtggtatgcggaagaaattcatgattgtgcttcttgcctcctcaggaatatattgagatctcatcttcatgattgatggccagaatatgccaacgcatgcctcaaaggtacagaaaccaagcagctgcagagtgcctccaaatgagatgctacctcctttcactgaagaagttggcactagaatgttggtgacaacaggaaggaaaagggtgaaggctgatattgtaaacacgatctgcatataaccttcgaccttcagctttcgggctaacaagcgtgcagcaattgagctacccaacattgatgacagcatgaatgtggcaaatatgaagccatgaggaatatcttcttcatttgggctcaacgccggagtccagaggaagacgaaagtatacattgagccctcaaacaatgactgtatggctcccagtaatgcaattttttcatctgaagcaattgctttggctgcaaccttgaactgggacatcaaatccttgctttcagatgggtctccatagttttcactccatgaagacattatgatagccatgcctattgccaggaagcatgcagcagcatcaaatggtgccacgggaccaaagcccaagttgtcggcaagcaggtttgcaaatagcccggatacaattgcgaccaggccattgccaagaaatatagccttggagaatgtgatcgacagccattgtgaatcaaaacctctcttgttgtgctccgcgacgagccatgactcgaacgccgagaagagcagcgaggtggcgattcctccgagcacgcggccgatcatgaggatcttgtactcgggggagtgcttggtgatgcagctgaggatgtagctgatgcagtaggtgatgcacgccctcttcctcccctgcttgtcggcgagtgatccgacgatggtgccgaagagcatggaggatccgaagccggcgatgaagaggcggccgatgtcgcccttgtcgaagccgtactggctgtagaggtagtacacgtacggcccttgcagccagtccccggacatcatgagggagtagacgaggacgtagttgttcttgaaggagttgaaggcctgggaggtggtgacccggtccttggcgctcttgccgagctccagcccggccaccacggcggcgaggcccccgaacacgaggtagtagaacacctccatggctcctccgacctccgcgagagagagagagagagatggaatggacgaagcgcgggtggatggatcggcgagtcgactcctcaagccggtgggatttatacgcgcgtttcttgggatttcgggtgcggtgcgtgtgtgtggtaattctggctggttgggggttgggttttgggggcagtggagtggggggtttgagtgtgcgtgcgccaaatcttcggccggcacgcacttgcggttgatgggaattgcgcttgctgctgccgccgcgggatcggatgtgtttgtgtgtgtctgtgcgtctggggcccaacggtggttgagatttcttccaattgatgatgatgaatccagtcccagtggtggtggatagatgattcttgggtgttcatctgctc

SEQ ID NO: 85259 - DNA, 116 bp, Oryza sativa
  Clone ID: PAT_MRT4530_84415C.1
agtcagtgtgctgttgagacactgggcgtcggtgggcgcgcttccagataagcagcctggtactgcgcgcgagcatgtagcctggcggtcgccgaacacacgagtcaccgctcgga

SEQ ID NO: 85260 - DNA, 662 bp, Oryza sativa
  unsure (1)..(662): unsure at all n locations
  Clone ID: PAT_MRT4530_84416C.1
aaccaagcactgcttgatcagctgtttgatctgaagagcaaggagcaacagctgcaagatctcaacaaagacttgaggaaaaagttacaggaaaccagtgcagagaatgtgctccatatgtcctggcaagatggtggtgggcacagcggttctagcactgttcttgctgatcagcctcatcaccatcagggtcttctccaccctcacccagatcagggtgaccattccctgcagattgggtattcttcttttcttccagttacagttaatttcttgcctgaaaaaattcccaaaatgcagaggtcatgttctttttaaactattcactaaattattaaacagagtatttgctcaagttcgaacaatacactttcttaaaagatggtttgctatgtattacttagaccacttatctcgatttacttgtatattttattttttttcaaatatttaatttataactatataatcgagtatatcgataatcctgacaataattcgcccaataatctagatcaaattgggcctaattntgtctttgttattcagtaatntaaaatttatgtatatatactccatcgttttcatagctntaatttaatttttccttggtgaaggtatcatcaccctcatgctcaccatcaccaggcctacatggacca

SEQ ID NO: 85261 - DNA, 1527 bp, Oryza sativa
  Clone ID: PAT_MRT4530_84417C.1
atgtacagcttggcgacgcacagcttgccgccgccgaggtgcacgacgttcgtgccgtacggcgcctccggctccggcacctcgaagaccccgcacccgggttgcgccgccggcggcggctgcggctgtgcgacggtggaagcggacaggtcccacgcgccgagcacgccgtcgtccgccgcggagaggccgaaccagaggccgtgctcggggaccctgcgggagatagggccgtgtgatctgtcgaagttgtcgccggatcatcgctgtcctgggctccaagatgccggcggcgattgggcgctgcccttccgcggcagcagctgccgccgcgccgccgcgctcgccgaccgcatctactcctcgttcgcaaatgctaaccccattagcagattgggaacaattcccaataatcgctccggcatcttggaaaaaaagaaagcgaagaagcgatttgggaagacgaagaaccggcgattcctctacatggttgatttccgggctgtagacccctccttccagaggctacgccgaatcgacccatcaagtctcttctacgcagacccggcggcggcggcggcggcggcggccgtggaggacgtccgcctgtctccagccgacatgaacttctttcccccccggaacgacgacaagatcatcgccgtcgaccatgctggccgcacgatcgtctacgaccccgccaagcacagcgtcggcgcgttgcccgccatggtcacgcccaagttccggacgctgtcgctcgccgtcggcaaggatctgtacgtcatggcggtgtcacctcgccccgacggcgtcaccgaccgttctttcgaggcgctcgtccgttgcaagaaggaggcagaggacggttgcctctggcgcgccatgccgccgccgccgtacgtgcacgccgccggctacgagaacgccgtcggcgacacctgcgcgtacgcggcggtcggcggctcgcgcatcctgctgtcgtcgaggaggcacggcacctactccttcgacacggcgcgcgccacctggagcaaggacggcgactggacgctgcccttcagcgaccgcgccgagtacgtccccgagcatggcctctgcttcggcttctccgccgcggacgacgacgtcctcggcgcgtgggacctgttctcctcctccaccgtccagcagccggagccgccaccgccggcgcaccccgggtgcagggacttcgccgtgccggggccgtcgcgtcgcagggcgcgcccgtcgcacgccgtcgacctcggcgaatacaccgaggtgtactcgtcgcacgtcgtgcacatcggcgacagcaagctgtgcgtcgccaagctgtacacggtctctcgccgggggacctgcaccgaatactgctgcgatttcgagtcggatgaaaggaatttcgccgtgctcaccggcgtcgaggtggtgcgcggccacgacgacgagcttcgcatcatcacgcataagtcgcaacgttatagttttggtgaacgctacatacccacatctgtactctga

SEQ ID NO: 85262 - DNA, 966 bp, Oryza sativa
  Clone ID: PAT_MRT4530_84418C.1
atggcagagaccagaggcgtgggtgggcgccttgcggcattggcttctaaggtggactcgaagatatattatctcaaggatgtgttggttgagtacatggacatgaaaaatgtggttgctgaaatagcagaggagagggagaggttccagcttgaacagcgtggaaatgacgcacttctggaagcaatgaaggaggagcttgtggcagcaaacaacgagctcgaagcagcaaaagaggaaatctctcgaaagaacaatgagctagagtctgtaaagaaacagcttcaagagagtgaagcgagaaatattcaggctgagcagcagagcggcattgtggttgagcttatgcaaccaagaggggtgcaaacaagatcgatgcaaaaacgcaaaaggccattgcaaggacttcgggctggattccttgacattgataacggtggacggaaacttgggataaaggaaatgggacagttgaatgagaaggtgttccagattgcatgtcttgctaagctacctccagaagaagttggcgaggcatcgtatgaactatactcatcgtggcagaagcaactcagtgacctaagctggaatcccttcaagacaatcacagttgatggtaacggtaaggagattgtgaatgttgatgatgaaaagctgcaagagcttaagagggactatggagaaggtgctcacaaggctgtcatgaatgcactaatggagatgaaagagtataatgtcctagctgacagaagcatcgcgtatgagctgtggaactacaaggatgggaggaaggccaccctgcgtgagtgtgttgagtacgtttgcaatcaagtgaagcaactcacagtgaccaagcgcaggaagtctcgcagggtggtcaacaatctttctagcactgatcagaaattcacaagggaagttgacctgctggtggcaccacaacaacacaagggtggtgagggctga

SEQ ID NO: 85263 - DNA, 456 bp, Oryza sativa
  Clone ID: PAT_MRT4530_84419C.1
ggtgacagccagccagccactgcgtcacatcgcttgtgagttcgtctcgtcggcttacttactaactccggcgccacgtcgtccccgtcgtcggctcgccgccggcccgctgccggcccgctgcaagagcttccggcgatgtccaagaggcaggcaatcctgaagtcgatatggtcgccgctcaccgccgtcttcaggaccaagaattgtgctgcgacctcgagcaacctcgtcgtcgtcaatgccggcggggagatcatcgccggcggcggccgtgaggatgcaatcgtaacgagaaaatcccggtctagcctggaggacctcctgaagatcgaatcgtcatcgaatcctggaaccatggccgccgacgagccactaccaaatcacatggcttcgccgaagaactcctcgatggagagcgagttgcaagtagtgctggccggctacccggagaac

SEQ ID NO: 85264 - DNA, 1572 bp, Oryza sativa
  Clone ID: PAT_MRT4530_8441C.1
atggagacggcgaccgcgaccccaggcgcggcgaggaagcggcggcggcggcggcggcggagccagtcgccgcctcccgccggagaggggccgagcgagcccaagttatccaagcttcgtttcggttgcggcggcggcggcggcggcggcggcggcacgaggagtggctgggaaaacctcgacctcgtgctctcgctccagggcaaggagctctccctcgaaagaaagattgagctaaccttcaattttacaagcacagagtcaaattggtcaaaccatggccgtagactagacatcgtgcagttactacgagctgtatcatttattggaaactgggtgcagtctatcttaattttgcctgagaacagtaagaaaacgtcagaaccttttgatcctgtgctagattatagatgctgggccattttaagagtttgcattgaaaagaagccatccatctccatttccccaaacgtacttaaatcgcttggtcgtgttgcaaggaatggtttgagcagagttgatactggtgctttatatgatgacaaggaatcttttgatctctttggacacgttttagggtgcatgtcctcggtgttctccatcaatacaagaaccttcttcaatgcaggtgttgattcgtgggcttcttgtgccatagatgttatcagccttgcccagaaggtttcacataatgagaggaatggctgtactgttctttggaaccttggaaattgtctgtttgagcaattttcaagctttctgagattctatgcaaatcctaagaatattttccgcacttttgttgataggattcttgaccctctgttggagttgttggttttgcttaattcacaagtgaattccctcacgcacaagcaggacagaaccatgttgaaggttgttgaagaaattttgtccaatggattgtttcacccccaacatctcagtggatattttggcctcaagaatttgaataaatcatctacttccagggatgtcataggaagctaccataggcatctatttgagagattcaaagcaataaaagcagaaaacaagtcagtgatgctggctgggtttggctacttgcttcagttgtttgttagaagatctggaaatcagagagcctctctaggacccagggaaacaagcttgcagaaaagtagtgagggctctgaagaacctcatcatcacagggaatcactttttgaagtgtttatgcagtttatggaaccattgattttagagtgtaagtcatattcggagaagaacttttctaatttaggggtcacaaagctagtagaagttcattgtatgttgaagtccatcaacaaggtattgacaacagttattgaagagaaaatctatgtacctacagaggacacatcggaaggatcttactttgagttcttgcaagatatttacagggtcttagtctcaatggccgaaaaaatgtatgaattctgggtgtcagctgtgcatttggaagatgcaaacgttaagaagatgctacctttaatgtttgctgagattgtcgatgcagttggtcatttgttagatattgaatacaag

SEQ ID NO: 85265 - DNA, 1488 bp, Oryza sativa
  Clone ID: PAT_MRT4530_84420C.1
acgtttcagagcacgtgcagtcggtgtgggcttcaggactggtggtgataactggctgttggtaaggaaacatggcagagaccagaggcgtgggtgggcgccttgcggcattggcttctaaggtggactcgaagatatattatctcaaggatgtgttggttgagtacatggacatgaaaaatgtggttgctgaaatagcagaggagagggagaggttccagcttgaacagcgtggaaatgacgcacttctggaagcaatgaaggaggagcttgtggcagcaaacaacgagctcgaagcagcaaaagaggaaatctctcgaaagaacaatgagctagagtctgtaaagaaacagcttcaagagagtgaagcgagaaatattcaggctgagcagcagagcggcattgtggttgagcttatgcaaccaagaggggtgcaaacaagatcgatgcaaaaacgcaaaaggccattgcaaggaccttcgggctgtgaggctgatgaccaagagtatacgagtcaaatcaatgtccaatctccacgttgcttggaatcgatgagaactcctgatgtcaagaaaagatcggtgcagaaacaaaaacatttatctcaaggacttccaggtgatcctggtgagcttcagttaatggaagggcatctgagtgacccgaatgctggggaagcctcaggtgctctggtgagcaaagatgatgacctggaggcagttagagaagagttgatcaagggattccttgacattgataacggtggacggaaacttgggataaaggaaatgggacagttgaatgagaaggtgttccagattgcatgtcttgctaagctacctccagaagaagttggtgaggcatcgtatgaactatactcatcgtggcagaagcaactcagtgacctaagctggaatcccttcaagacaatcacagttgatggtaacggtaaggagattgtgaatgttgatgatgaaaagctgcaagagcttaagagggactatggagaaggtgctcacaaggctgtcatgaatgcactaatggagatgaaagagtataatgtcctagctgacagaagcatcgcgtatgagctgtggaactacaaggatgggaggaaggccaccctgcgtgagtgtgttgagtacgtttgcaatcaagtgaagcaactcacagtgaccaagcgcaggaagtctcgcaggtggtgagggctgagttttgggggcagtgtaggactaatccatgaagttcctgagcaagaatggaagtcttagcttgcttatgtcttttgtaaaaatgtcatgactaggaagtaggaatcctgaagaacctgatcgtatgaagcaacggatggaaaactatgaactactactactactactactagtacatctattttgtgttttgtaaaaccaagttgtggcttatgaccactgtactgcttgtgcacccagctcattacatgctatagtatgtatttacatgagacct

SEQ ID NO: 85266 - DNA, 309 bp, Oryza sativa
  Clone ID: PAT_MRT4530_84421C.1
atggcggggaagaagtttgaaagaacatatgggtccgacgtggaggcccacgtgagccacaataggagggcaggaggacgtaagctcacagcgcgtgggcccggttctgttttgtgggccaaagtgggccgggcgcggtgggcctacctctccgctgctcagacacttcacatgacgcttgtctttgcgaaggtttgccacgtgggcccccacttgggcacacacagcatacggaaacaaatacgcagggacaccatctgccagtgtactggtgtacagtgtatacccgtacgtgcctacctatcctag

SEQ ID NO: 85267 - DNA, 199 bp, Oryza sativa
  Clone ID: PAT_MRT4530_84422C.1
acagagataatccaactatacaaatgcaagacggtacaagatacccatacgatcaatatgtatgccgggggaagttgcaactagatgttcctggagatgcgggggaggatgaccaacgatgctccttgtgctgcctgtgaagtacgcgacgaacatgactacgggcactattgtggtaggtgcagggcctgtgaatggg

SEQ ID NO: 85268 - DNA, 321 bp, Oryza sativa
  Clone ID: PAT_MRT4530_84423C.1
acttctcctacttctcctcctcctccgtcgctgtctcggcgagatcgtatcccgccgcctggggcgcggggaccgacaacaacgctccgttccaagaagcggcgcgcgctgactccgtcgctcttgaatgcctctgaagaccaggcggggatagagacagagagagaggaagcatatgacggacggggagggcgggggtagcctcgtagagctgcccatggtggcgccgtcgacggcgacggatactgctcccatccaccggatctacatccgtgagtggggtcactcgggttcacccctacgtggtggtgtcttcccacg

SEQ ID NO: 85269 - DNA, 833 bp, Oryza sativa
  Clone ID: PAT_MRT4530_84424C.1
gcggcgcacctcgaagtcggactcggcaacatgcatggtgggaaatttaagctcaattggtcctaaggtttgttctccgttcggtatggtggcttgggggttccaaacttagaaaaatttaccatagcttttcagctaaggtggctatggtttgaatggagcacgtcagaaaagccttggattggaactaaaactccttgcgatgaattggataaggatacgtttgatgcatcgatgaaagtccaaattggtgatgggcaaaaggcgagcttctaagaatctaattgatttggtacctaaagtgtaaaatgtcaagtgccgaacctctataggcattcgaagaggaaaaacagcaccatccaggaagctctgcaacaaagaagatggatcaatgacatccgccacaacctcactatccccctccttgatgaattcttatgggaagttctagcccgtgacaccccacaactaacagaggaggtacaagatttgattgtcttgcgatggacaaccgatggggaatatagtgcaaaatctgcatatcaattccaattcaacggaatggtactatcgccatcaacaaagttgtcctgggaggaatgggcttcagcaaattgcaagattttcagctggctagtgcttcaaaaccgggtgtggacagctaaccagttgcagatcaggagatgaccaaataattatttctgtcagttatgcttccggaatcttgaaactgtcaaccattgttcgaatgcccgatctcgaagcaaatctggtgtctagtacgaaactggctacgaaacaatccaatggatcaattagctctccagcaaatc

SEQ ID NO: 85270 - DNA, 204 bp, Oryza sativa
  Clone ID: PAT_MRT4530_84425C.1
atgcggtgtcagcagacggcagcgagcttctccgcgacttcacccttcatcagcgacagcaatcgcgtgcggtgcatctcgccgtcaagcacagtccagcacgctgcgagccgtagtccagagctccccccattcccttctcccccaccccccaatgtcatatcatatcctagctttgcccctgatgttaacagtctactgtaa

SEQ ID NO: 85271 - DNA, 373 bp, Oryza sativa
  Clone ID: PAT_MRT4530_84426C.1
cccatgcgtccgcccacgcgtgccgcacccgagccatggccctggccgaagccgagaacccgccgcgccgccgccgacctgcgccggaccccgtcgcggtgctccgaggccaccgcgccgccgtcaacgacgtctgcttccacccctccctgccgctcatcttctccggcgcggctgagggggaactcagggtttgggacacagcgagccaccgcactgtctcctcggtttgggctcatggtggatcggctggtgtatattcagtggctgctagcaccagacttggaaacaaaatcattagtcaagggagggatggatcatgcaaatgctgggaaatcgaggaagctgggcttggaggggagggccctatata

SEQ ID NO: 85272 - DNA, 1221 bp, Oryza sativa
  Clone ID: PAT_MRT4530_84427C.1
atgctgcagtttcaagaagaactcgctcttggtgtcaaagaagaacaaggagaagaagttgattctttgcttgtcatgatgcttgtccgcacagtgaagaaaccgagcaagttcgaagattccgacactgtcacggccaaaccggccagggccgtgtttgagatgccgcaccggacgtcgccgcgagcgccgaagaagccggcgggcggcggcgcggccgtgtcgcgggtggcggagctggaggcgaagctggggaaggcggagggccagctcgccgagatgcgggagcagctcgcggcggcggagaaggcgaggaaggacgcgcgcgccgcgctcgtggagtccaagaagcgcttctccgccgccaagaagagagtcgccaccgcaggcgccgcctcctcgtcggcggccgccgaacagacgccgccgcaagccgtcagcgacgagaaatgcggcgtgatctcgccggccggcgatgtccctgaggctgccgagccgggcgacgcccagggtgaggagaccaaggagatggctgatgatgatgaggtgaacagcgtcaccgccgccattgttggagaccttgaagggaacaagggagggcaggaggtcgaacagctgaggacgaagctgatggagaaggacatggaggtctacgagctgaaggcgaagctgattgcgatggacgccgaggcggacgatctccgggcgagcttggccacgaagggcatggagatcgacgagctgagggcgaagctgacgtcgaaggacgcggacatcgccgccgtcgaggccgacaacgccgagctgatgaagatggcggaggaggcctcccatgccgtgaaggagacggccacgaaggcgagggacaccgagcacgcgctgagggagagcgcggcgcgggaggcggcccgtgtcgccgagcgcctgcgggcgtcggagcgcgcgcgggaggcgctggaggcggagttgcagcgcggccgcgcgcagagcgagcagtggcgcaaggcggccgaggaggccgccgcggtgctcgccgcggtggagcacggcgccggcgcgcccgccgccgacgtagagtggcggcgccacagctcgggcgccgccgctggcgagagggtggccaaggacacggacgaacaccacgtctccggcgggaagcggaacagcggcggcgccatgcggatgctcagcgagctgtggaagaagaaggcgcagaagtga

SEQ ID NO: 85273 - DNA, 245 bp, Oryza sativa
  Clone ID: PAT_MRT4530_84428C.1
cactgccctccgccgcctcgaacaggtcgtgcccggcgcccgccgcggtggacgaagtcgacagcggcggcgttgacggcgtcaccatgggcgtggacgacgccagctgctgctgctgcatcggcacgccgtgcgagtggtggaactcggcgcagcgcgccgcctctgcaagtcgcaaccgcggcctccgctcggcgtggcccgccactccgctcgccgcagccgccggcatccgctcggcgtag

SEQ ID NO: 85274 - DNA, 732 bp, Oryza sativa
  Clone ID: PAT_MRT4530_84429C.1
ttattctaccctgatcagagggtcgttgtgactgttagcgctcaacttggacgaaaattttttgaaattatactgtttatcaattgattgtgcaaaaatataccggatagcgaacgatttgcggaaataaaccattagtatcgctttttggaatagcgataccgatgttcgctcgttgaaagtgcgatagcgtggcgaaatcgcgatctgacagagcgatagcgaagttgagctggcgctctcgcgcaagcgagacgcgagaccgcagcggtatcgcttttcccacgagtgagagcgccacgtggagaaatccccacgactacctcgggcggagccatcgctctcgcactttcgttgcgcgagaccgaggccggtttcgtaatatgaaaccgcgagaccagttatgacgcgacggggaagacgtgggcacgcggtatcgcgctttgcgtgtgcgagactgctgacgcggcatgcgcgcgagagagaaagcctgggggagggcagtgggcccgcggcgtcgcgctttgggagcgcgagaccgaacacggtgtcgctatacgcgtgcgcgagagcgaggagcgaggtggggcagcgctgtcgcgctttgagggcgcgagaccgcttgcggtctcgctctacgcgtgcgcgagagcgagtgcatcgagggcgcgacagtaggctcggtatcgcggtacgcacgcgcgagaccgccctcggtatcacgctccgcat

SEQ ID NO: 85275 - DNA, 450 bp, Oryza sativa
  Clone ID: PAT_MRT4530_8442C.1
atgcctgccatgcatattctcccctttctgcccggcgcccgcgtcggtcgatatctcaacacgaagcaagatggcgccgtcccgatggagagaagccactatcaactgggagatcatctcgtcggcgacgccctaccgctcgcccctgtcggctttgctacttttatcacgctcatcgtcaagccgctagaggagattgccagtcggagcgccgctgcccggtgcccgcacgccgttgttgcgccaccatcatcaaaagtcgtcgtcgatcgtctcatcaggccgaggggtaaaaaccttccagctcctgcacttgaatcttgacgaattcgccctatagtgagtcgtattacaattcactggccgtcgttttacaacgtcgtgactgggaaaaccctggcgttacccaacttaatcgccttgcagcacatccccctttcgccagctggc

SEQ ID NO: 85276 - DNA, 493 bp, Oryza sativa
  Clone ID: PAT_MRT4530_84430C.1
agaacaaaaaaaaaaacccgacgggccaaaaaaaaagaaaaaaaaaaagtaacccaccaaaggcaggggaccaaagagaaaaaaaaaaaagggacaagcttgaccggcaacaccacctgggccgaacaaaagaaaacagcgaagcacccaaaaaatgaagaccccaaagaacaagaaagaggggggggaagaaaaaaaagaaaggattgcgaaccaagcacctcagggccaaccgacagacaaaccaaggacagagcccccgcaaggaaccgaacaaggaggacgaacacccagaaaaaaaaggccattctcttggatctcaaaaaacggccgagaaaacgggaaaaaaagaagagtaatccgaaacccacgtacagaacgagccaggtcaagaaaaccaaaaaaggcctatcaagggccccaccgaacaggtggtgcaacaagatcatttcccgcaggaagcaccaaccgccccgccgaacatcaacagcaa

SEQ ID NO: 85277 - DNA, 201 bp, Oryza sativa
  Clone ID: PAT_MRT4530_84431C.1
atgtccaacatgcttcagcttggtgtcatctacctcaagctaatggcgatcggtgagcgaccgtcggtggcgatgcggacgggagagatcggctcgggcggaggcgcggaggagatcgacgacgttggtgacgctggccgacgggagagggatgggcgttgttggcgtggcggcgtctcgatggcggatggcgctggatag

SEQ ID NO: 85278 - DNA, 545 bp, Oryza sativa
  Clone ID: PAT_MRT4530_84432C.1
cccgggctgcaggtttcatttagagaatctatgcatgagttctggaatataacccaaactcaaagcaaagtgcattttccatttggagaagctcgctccgtttgctgctccgtttgtcaaaacttgcttatctttcgatttcagaatttacattgattttgtttgaagagtgcaattctctacaaaacacatgatctttgaatgttttttaagaattcatgttcatgcattttaattctttttcaagcaccccctatctgcacactggtctggaaatctggttcacagttcacacgttttttgcatgagggcacagggagagagtggtagttgcaggctgcttccaaacttccacctacctccacagtgttagagatcccttcccatttgctgagtaggaagctttcactctctagtagtaggtgtgtcctttacatttgctagcctccactttccgagctcgatcgatcgagcatggaagccacaacctccagcttgctcgtgcgccccgtcgacacgcggctctccgccgcctccctccccat

SEQ ID NO: 85279 - DNA, 1728 bp, Oryza sativa
  Clone ID: PAT_MRT4530_84433C.1
aaacggcaggaatgaattacgtgaactttagaagagctatgacgtccatgcacgcgtacgtagcttggatctctagagcggcgctcgccgcccggaatccgcaccgtcccctttcctctcgccgccgacctcgtcggcggtctccaccgccggccggactacgcttccccatcggtgcggccaccccctcgaggccttcacatcagcgccgccaccaaccggttgcagtatcgctgatctcctcctcttaccaggaggcaagatgtcgtcgctcgccgcggcaagggcggataacttctactacccgccggaatggagcccaaagaagggtgggctcaacaagttccatggacaacatgctctcagggaacgggcgaggaagctggaccagggcatcctgattataagattcgagatgccattcaatatttggtgtggtgggtgcaactccatgatagcaaagggagtgaggtttaacgctgagaagaaacaagttgggaattattactctaccaaggaccagggttcaccaaaccgctttgggtggggttaccgtcaccccatgatatggagcttcaccatgaaatcaccatgctgcaaacaagaaatagttatacaaacagacccaaagaatactgagtacgtcataattagtggagctcaacgaaagactgaagattatgatgtggaggatgcagagacactactgctacctgcagatgaagaaagagacaagcttgcggatcctatgtataagcttgaacaccaggaagaggatcttaaaaagaagaaagaagctgaaccagttttagttcgccttcaacgactctccgatagccggcattctgatgactacgctcttaacagagcccttcgtgatcgtcttaggagccaaaagaagagagttgctgaagagaaaagatcagctagaaagatgggacttggagtacggcttttaccaccctctgcagaagatgccactgcagcggcttctgtgaagtttgcatcaaaatttgagaagagcagaagggacaaaagagcagcaattaaggctgcttccatcttcccggagtcatcaagctcaacttcaaagaacaagctggatcttgcactgaagaggcgaaatataaaagctggtgctgcctcagcgctgatggcgagcagggtgaagccgtcgtcatggcagagcgccggttctggaagttcaaggactcagatgccgatcatggcaacacgtaagtagccaccccaagaagaaaggcatttttctggttctggaagcagaaggacccagtgcttgatcgcgccatcagaagttaaaaccagcttgtttcggttgtttctttgctccagtttctgtacgagtatgtgtaatgtgtagtgtataacttgaaatctttttggctgtatgcattccggtgtccagctcatgttagtcggtttgttacattatctttttcgttaagaatttaatattttttgtatataacataaaaggttttagaccgtatgcttcccgttgttcatttttttcttgtactataaatattttattttttatattaataaaataaaaaaaaaaaaatataagtcatgacccgtcactcggtcgcttcgcatacacctccgaatggtttgcgataaacaatgggaaggtggaaaaaaaaaaactgcttgatggccaaaaaaaaaaacaaaaaaaaaaaaaaaaaaaaaaacctgcagccc

SEQ ID NO: 85280 - DNA, 979 bp, Oryza sativa
  unsure (1)..(979): unsure at all n locations
  Clone ID: PAT_MRT4530_84434C.1
tcgcttgaatccgcaccgtcccctttcctctcgccgccgacctcgtcggccgtctccaccgccggccggactacgcttccccatcggtgcggccaccccctcgaggccttcacatcagcgccgccaccaaccggttgcagtatcgctgatctcctcctcttaccaggaggcaagatgtcgtcgctcgccgcggcaagggcggataacttctactacccgccggaatggagcccaaagaagggtgggctcaacaagttccatggacaacatgctctcagggaacgggcgaggaagctggaccagggcatcctgattataagattcgagatgccattcaatatttggtgtggtgggtgcaactccatgatagcaaagggagtgaggtttaacgctgagaagaaacaagttgggaattattactctaccaagatatggagcttcaccatgaaatcaccatgctgcaaacaagaaatagttatacaaacagacccaaagaatactgagtacgtcataattagtggagctcaacgaaagactgaagattatgatgtggaggatgcagagacactactgctacctgcagatgaagaaagagacaagcttgcggatcctatgtataagcttgaacaccaggaagaggatcttaaaaagaagaaagaagctgaaccagttttagttcgccttcaacgactctccgatagccggcattctgatgactacgctcttaacagagcccttcgtgatcgtcttagggtcatccaatgaaatcctttatcatattttttttccaaaatagttatttaaaagtgtcatgattcttatccacttgtcctatttgtgtagagccaaaagaagagagttgctgaagagaaaagatcagctagaaagatgggacttggagtacggcttttaccaccctctgcagaagatgccactgcagcggcttctgtgaagtttgcatcanaatttgagaagagca

SEQ ID NO: 85281 - DNA, 201 bp, Oryza sativa
  Clone ID: PAT_MRT4530_84435C.1
atggttcctcaatctcttgcgagggaaggtgtgctcacgagcagcaccgaggccaaggccatgccatccactgcgtttgcatgcatcgatctcatcgacccattgtggccggcgttgttgcaaaagcgccggccggtcgccgccgtcgatcgacggatcgactggagcgtcgtgatcgtaatatatgagcgtgacgtgtaa

SEQ ID NO: 85282 - DNA, 102 bp, Oryza sativa
  Clone ID: PAT_MRT4530_84436C.1
atggcgaaccaggatgccgacgtggaatacaggagaggaggaacggatagacaggtgagagtcctccagagatctattcagtacaatgaactaatgaagtga

SEQ ID NO: 85283 - DNA, 216 bp, Oryza sativa
  Clone ID: PAT_MRT4530_84437C.1
atggaggtagtagggggggtaaaaagagcaacatgttacaatgtggcagttggtggtggtggatccggcagtagggatccgcctcaacaggtcacccacttgaggtgtagagggggagggcgcggggaaggaggaggggaggaagctgaccagataaacctcactggcaccatcgacatcttccggccacccaatgaggttgggcgacattggtga

SEQ ID NO: 85284 - DNA, 894 bp, Oryza sativa
  Clone ID: PAT_MRT4530_84438C.1
atgagcgaggtgcacgcggagcacgctagggtttgggagggggaggcgcggcgcacgcgcggcttgcaatggacgcgggtgtggcgggcccacacacagcctcacggctcgcggtggaccgcgcgcgcgagcgggacggaggggagcggcggaccggggtcagccttgacccggtcgcgtccgaggtggcgccgacgtggcggcagccacgcgggtcggcgggaggaggaagacgaggccggccgggaaaatggacggcgggcggcggccgagttctccggagctcgacaagatgactatggtcaagggggagcacaccggattggcgagcggcgcaagagaggacgagccaacggctcggatcgcgccgggagaggtcaagggcggcggattgcgacggcggccaccggcggcaagcaaaaggggaaatttcaccggagcgacgggagttcgattcaaaggggtgggagcatctccggggctcggggaatccgtttccggcgccggatggggaggagaggcaccgaggagggccaacgacgagaggcggcctccgggagcgggcggcaatggcggcgtggccatgccgggcggcagcgggcattggggcggcgtctatgcgcgttcgggacggctaccgagcttctgtgcgagctaaaggaggcgagggagagcgaggaaggggaacgggaggaggcactaccgagccgggcgggcagtgatgggcggtcgacggcgcggggcgagttctccggccttgggctggggaagaggaagaagaggggtggccggagtcctcttcggctcctcgcgcactccggcttcccggcacacgcgatggcggagggaggcgaggacggcggcagcaaggcggcgatggcactgcagcggtag

SEQ ID NO: 85285 - DNA, 2196 bp, Oryza sativa
  Clone ID: PAT_MRT4530_84439C.1
ggaaaaaggttgctttttttcactatctgcataattacaggataataacaggaaattgctgcattttgataagcagaacatggcctcataaatacagactaggaccaaagctgttctttgattcaaaagtgttccagatataagacttaacagtaatactgacaacttgtactatagatccataagcatagaagacgattagttccttgcttcacctatcatcatacacaatattaaccaatgttcatgcagctcacagcatactagcagcagagctgaaaaaagtctccatctcaattaaaaaaacaaaaaatgaaaaaaaaaatcatggagcagagtgtcaaactgtcaatagatgcccccaattaagaggatccaagtgaatgacacccattttctgaatgaatatcacttgatcatttcatttgcttccccacttggcctcttgttatttctttcaggtgttcctcattttctctctttttttgttctttttcttgttgaagaaaactgtcaccttcctccaccacttgctgttcatcatccctcctgataagaggacctgtcaaggcctatatcacttgtactcaagcatcatgttgttctcaggggccagtccaacacaggccctcaggatgttctccagcatggccctctgcttggccagtgcattcaccactggtgtgcctgggggaacaagaggagccttgctgaggtagctcaggatggtagccactggatggaaagaatggtacttatcctggtcttcagctttgagctggatcctggtgctgagctcggcgaggaggacgaggtcgaggatgatgggcgcggcgaggagcgagtcctcgcaggtgttgtgcagcacgatggtgttcttccctcccatgaagatctccgaggtgtactcgtccatggccctcttgctgtccccaacgtatggaatatacttgatgacgatgacgtggtcggggtgctcgccgggctcgtagaggatggcgttgctggagaccatgtcgtcgacgacgccgctcttggagatctccttggaccggaacgtctgcggcgccgacaggttcatgccgtcgttgttgcctaggtggttgtagctcgcgatcgacgtcggcttgatgccggcgccgacgaggaagtcgacgaggacggacttcatcttggtctgcccactcttgaagtcgtcgccgccgatcaccgagttcttcttgatggcgagctcgatcagcccgggcacgaaggtgttctgggggctgccgttgatgaaggggacgccctccatgacgcaggcgatggcgtagagcgtcgacggcgacatctccggctcgtccttgtccagcgacgccagcaggttgtccatggtgtcgttcatcccggccaccacgttgctgtaccgctccgtgttggccgtccacagcaccaccaccttgtccaccttgctcttctccttgaactccctgatgtccttcttgacctgttcgacctgctccttcttggtgcccttgatgacattgttggcgcgggagccctggttggcggcgatgaagtcagggttgtagacgccggggaggggcaccatggactccatgtgatgccggagctgcttctgcaggtcgatgtccagcacccgagccctggtcatggcgtcggccaggttcatgctgctgatgtcccacccaccgaacacgatgtcgtttgggtttaccatgggtacaaggctcttaaaaggcgcatagatctcctccccgttgtagctcccaaccctgatggtggatgattgtgtcagggaaccaaagtagttggccttgtgcaccttctccttggtcgcccatgaaattccctctctgttggcgatgacaccagccgtgagcgtggtgccgttgttgcctccccatccaaccagcatcaccccgagcttggggacggtggtggtggtcttgaagtggtaggtgacggacttggggcggacgacccaccccttctccggcgacggcggcgccaccacctccgtcgtgtcatatcggtactccgactcgatctccccgtcgccgtaccgcacgcgcgggctctccaccctgaagccctccacgaacatcctcctcctcctcctccggctccgatcagatcacccgcgagttcagccagcggcggcggatgggtgttcggacggacgcgggaattccg

SEQ ID NO: 85286 - DNA, 163 bp, Oryza sativa
  unsure (1)..(163): unsure at all n locations
  Clone ID: PAT_MRT4530_8443C.1
cctgtgccttgcatggtgtgcatttnttgttgccccaactggttgtgtgttcgacatgaaaaggaagacggtgattgacggatgcttgaatgcctcggatttttggtagaaagagatactagcatctacctaattgttgcataagtgtcgttgaaaaaaaaaa

SEQ ID NO: 85287 - DNA, 207 bp, Oryza sativa
  Clone ID: PAT_MRT4530_84440C.1
atggaaacagatctggcagtggggaagcagtgcggccaaaggggatgggagcgcactcaaagaggatggcggaaggtcgggccgcggcagcgcgcggtggggacgcatcccatcctccccaatgggttaaatattatgttgaggctcttccaaaagctgttcgccatcgacaaatcgctgcttgccaccatggcaggagctcgatga

SEQ ID NO: 85288 - DNA, 454 bp, Oryza sativa
  Clone ID: PAT_MRT4530_84441C.1
gaattcggcacgagggcccgcatgtcttccattccacaaacatttccatggcgtgataacaggcaccccaaagctaacaaacaaatgtgggcattgcaagaacaagctggatttgggcaaagaatttgtatgctgctctgatagctctgacccaaccattctgatcaagcatagcaaaatgggttactgtaagagtggtgctgagctatcaatgcagttaaaaccagacggtatatttaactgttcatgaacatgtgaatcctgcagtttggatggaataattggatgtttacaaaatattctgtgatttatctttcagatatttggcggttcctagttcttttcaggttcttaggtccttcaattgttcttgctcaatttaccattaaaatgtttcctctacctttttattctttgcactagagtcgcactcaaatttagtactacccaagga

SEQ ID NO: 85289 - DNA, 937 bp, Oryza sativa
  Clone ID: PAT_MRT4530_84442C.1
caagaagcaattaacattcgcattcatcagctggtaggtagtgtgagctagagattaagggagagagagagatccggccgggaacaaagaactcaagaagcaattaacattcgcattcatcagctggtaggtagtgtgagctagagattaagggagagagagagatcatggcgtccaaggttgagctggtggtggaggtgaagtcgccggcggacaagctgtggacggcgctgcgcgactcgacggagctgttccccaagatcttccccgagcagtacaagagcatcgagaccgtcgagggcgacggcaagtccgccggcaccgtccgcctcctcaagtacaccgaaggggtgccgatggtgacgttcgcgaaggagaaggtggaggtggcggacgacgagaagaaggtggtgtcgtacagcgtggtggacggcgagctggtcagcttctacaagaacttcagggtgacgctgcaggtgacccccaagggcggcgccgccgcccccgccgccgacggcgcggtggtgagctggaccatggacttcgacaaggccagcgaggaggtgcccgacccggacgtcatcaaggagaccgccgccaagaccttccacgacctcgacgactacctcctcaagaactagccagacagccagatcgagcgccgccgtgcgggtgcgtggcttatgtgttagagtccactatagcgtcctcgccgtcagtcgtcgtcgcacacggtcgcagtatcggggtgttgcatttgctagctctccggctagccactgtctcccacgaattagtgtacgtatcggtgcatgagtgaataataaagtgttcaggttaaaccgtttaaaaaaaaaaaaaaaaaaaaaaaaaaaaaaccttgtattgattttcggtctatccgactctatcaaaaaaaaaaaaaaaaaaaaaaaaa

SEQ ID NO: 85290 - DNA, 858 bp, Oryza sativa
  Clone ID: PAT_MRT4530_84443C.1
ctatgggtagcgcacaccggcggatccagaaccgcttcctgagccactcccagaaccactaccgcctggaacgctttgcccaccaccgccaccaccaccttgaccacctgcctgagcatatccaccaccgtaaggccaatatccgccatagtagggcccatatccaccagcttgaccatatccagaaccagaccccgagccctgaccagatccaccattttgtccaccgccaccacctccaccttggcctccaccttgagcatatgcaccactaccaccgtaaggaccatagtaaggaccatatcccccagcttgaccatagccagaaccggaaccggaaccagatccggaaccaccattttgtccacccccaccgcctccaccttggccacctccttgagcatatgcgttaccaccataaggaccatatccaccggcctgaccatagccagaaccgaaaccagaaccatacccagacccaccgttttgtccaccgccgccacctccaccaccaccttctccttgagcatatgctccaccaccataaggtccatatccccctgcttggccgtacccagaaccggaaccggaaccatatccagaaccaccattttgtccgcctccaccacctccacccccaccacccccactagcatatgctcctccggatccgcttgactggccataccccgagccagagccagatccccacccagaaccgttccccgatccaccaccacctccccctccaccaccgccgcccccggcactagcatatctcgctacccttgccgcattggacagtccaatgctcagtagcacgatgaagctaagagctacaaacctggttctagccat

SEQ ID NO: 85291 - DNA, 222 bp, Oryza sativa
  Clone ID: PAT_MRT4530_84444C.1
atgggccacccgcgccttcgagccggcccggcacggcctgacagttggtggaccgtgcctgggcgggaggcgcagcccatgggccggcacagcccggcacgaagtgccgatcgggccgtgccggcccgatggctggtgggccgtgcctgggccgggccgtgccgggcgggccttttggccatctatagtttgcacaaggttgcatcatataaatcagagggg

SEQ ID NO: 85292 - DNA, 1726 bp, Oryza sativa
  Clone ID: PAT_MRT4530_84445C.1
tggccaaaattggctttcctggatttccgcgatcgtagggagctcctcatccaaaataattctaaatggcagggcgggtaatagcttcctccatgggcggggtctacgacaaggtgatcccctctccccgatgttgttcattctagcgattgatccactccaacaactactcgcagcagctcaggaagaaggcctcttgaaaccaattcataagaggacggcccgcttcaacatggccttatatgcagatgatgcagtaattttcactaggccagataaacaggaattgtagacagtacagagcattctctagttcttttgtcaagccacatggatgataacgaacttagccaaaagtgagatctttgccattagatgtgaaaacttggacctacaggacatcttatcccccttcccagcgcagcaaaaatccttcccttgcacctacctgggccttccactacacatcaggaaattgaaaaaattggatgtccaacctctaattgacaggttctcggccagacttccgaaatggaaggggaaacttttgaacaaatcaggccgtactgtccttgtcaaatcaactctttctacgctgccaacataccatcttacggtctccccgcttaaaaaatgggcggaaaaaaagatggacaaaatccgtagaagcttcctatggacaggatctgagcaagctcatgggggacattgcttagttaactggaagaaggtatgcagaccaaaagacctaggtgggctaggtgtgacaaaccttgaaatctttggtcgctcgcttcgcctttgatggctctggcaggaatggatagatgaagataaaccatggaagggctcaaatctaccatgtgacgagaccgataagcaactctgcagggcctcaatgatcatatccttagggaacggaggaaaagccaaattctggcatgacaggtggctacagggatcctcaccaaaggaattaacaccttccctctaccagttggtaactagaaaaaacagaacagtagcacaggagttacaggataacagatggcttagacctatgaggaggatgaactcgactacccaagtaagagagttcattctcctttggggtttaatccaacaagtccacctggatgaaagcgcaacagactccatcacctggaaatggacgccgaatggggcatactcagctagctcggcatacagaatccaattcctaggtagcatacaggacaacagagcaaatttcttctggaaggcaaagacagaaaacaaatgtaggtttttcgcttggcttatggtacataaaaaaatcctaacctctgacaaactccagctaaggggatgggataacagcccgatatgctccctatgcggcattgaactcgagacggctaggcaccttatcatggaatgtgctttcgcaaagcaggtttggagctcaatttggtccaagctgggcctacagatgccgaccacaagcctcttcaatggagatatcttggcatagtgggattcttgttggaaaaaaattgtcaaagagcaaaggcgaaacctagatggcctcatcatttacacgacatggggaatttggttgcaaagaaacagcaggatctttcatgacacctacaacacggtctcacaagtggtggagtcaagtgcacaagaagagagtatttgcatgcttgagtgtcacgcactgtttcaggattgtctcggactg

SEQ ID NO: 85293 - DNA, 1180 bp, Oryza sativa
  Clone ID: PAT_MRT4530_84446C.1
gcactagacccggccggccggccgggggcacacacgcgcgttacacaccactccccagcagcggcaaagcagccagcgagagatcgaggcaaggcaaccgccatggccaccgtcagcgccgccgcggcgacctccgtcgttgcccgcgccgtcctcgccgggccacttgggctgccgcagatgagggcgaggaggagcgagagggtgaggtgcaactactccaaggaggcggcgacaccggcggcggccgtcaagggagccggcgcgtcgctactggcgatggcggcgacggcggcgcccgcgatggcgctcgtcgacgagaggatgtcgacggagggcaccgggctcagcctcgggctgagcaacaacctgctggggtggatcctgctcggggtgttcggcctcatctggtcgctctacaccatctacacctccgacctcgaggaggacgaggagtccggcggcctctcgctctagagagcctctatacatgtaaacatggtggttgtgaacggtgtaatttgaggagaacgtacatggctgtgttgtatctaaactgttcctattctgagagatgttttagcatcagataaagtactttctccatgggggattgtgcacgcatctggcaacttaacaagataaatttgcagaaaacaaaaaaaaaaaaaaaaaaaagtaaattcaggataaacaacaagagcaaattaacctgcacgctgaacctaccggcgcccaaggatggcgacgctgccgcgagtgagacgccgacgacggggttcacgaggaactacccgaggtgcggcgtggactggtgacgggttcgtgtcactgatacgacatggaggcatgatcgaactcctcggctgggaacgacacgacacagtctgccatgctttatttaatttgttcagcttgtagaaaattctttcgaaaacatgtatttgtatatgcacgaatgaatagatggagctatatgtatttatgcacgaatgaattgatcgagctagccgggtttttgtgccgctaaaaaaaaaaaaaaaaaaaaggaagatgccctgaaagcaggttatgaagacttcaagagaattcgcaccgacccggatctagaaaacttgaggaaaactgaggaattcaacgtcctgctgaacaagttcagttttggatggaatctggcccc

SEQ ID NO: 85294 - DNA, 435 bp, Oryza sativa
  Clone ID: PAT_MRT4530_84447C.1
atggcagcggccgccggcggcggaggcggaggcggcggagagagccagcagcagctgttcgagaggctgcacggcgagctggtcagggaagctgaggacgtggcggcggcgtcgttcggcgccgacatcaccgtgctggccgtctccccgcgctccggcgagccgcgcgtcagccgcttccacggcggcggcggcggcgccggcggcgaggagttggagcgggcggtgggcgtcagcacggaggagatcgcgcgcatgggtcgggatgaggtggcggcgctgctggagaggctgcggctacttcggatggtcgtgctgcggaggatggtggtccagaggcagaggagacggcgactccggcggcagcggccggcggcgccgccgcggagcatcatggtcgtccagaaaagacgacggcggcggcagatctgctag

SEQ ID NO: 85295 - DNA, 409 bp, Oryza sativa
  Clone ID: PAT_MRT4530_84448C.1
tggcgctcaaaatcagcgataccaacaaggtgacataatcgtgtgcccgaagatccttatgctaaggttaagtttaaaataccatctttttcaggttattatgatgctgagaaatattttgattgggagatgatagtagagaaaaaaattagtacccaccttgtgcccgagcaacatagagttcgacaagctactagtgagtttaaagagtttgcttatatttggtggactaggttagatgtatggagacctttacctactactaggaaagaacttaatgtagctatgcgtgatacatttgttcctccatcttatcttagagatttaaacaagaaactgaagcgtttagaacaaggggataaatctgtacatgattactatggtgagctacaaaagggattgaagcgat

SEQ ID NO: 85296 - DNA, 384 bp, Oryza sativa
  unsure (1)..(384): unsure at all n locations
  Clone ID: PAT_MRT4530_84449C.1
cgacgccggcgcccgcgatggcgctcgtcgacgagaggatgtcgacgnagggcaccgggctcagcctcgggctgagcaacaacctgctggggtggatcctgctcggggtgttcggcctcatctggtcgctctacaccatctacacctccgacctcgaggaggacgaggagtccggcggcctctcgctctagagagcctctatacatgtaaacatggtggttgtgaacggtgtaatttgaggagaacgtacatggctgtgttgtatctaaactgttcctattctgagagatgttttagcatcagataaagtactttctccatgggggattgtgcacgcatctggcaacttaacaagataaatttgcagaactcagttttggatgg

SEQ ID NO: 85297 - DNA, 1216 bp, Oryza sativa
  Clone ID: PAT_MRT4530_8444C.1
ccacataggatgccacatgtactagaggtccatgtaagcccttatgcattatatgggccctgctcatattggctgcctactcgttgctcgttggcatcattgtgaacttcgaacactcaccctcctcctccctccaccctccccccctctcccacacactcctcctcccgtcgcctcgccgccggtgcagccgccgcccagtcatcggcctccctcccctcaccgcaggccgcccctgtcccccaccagcggcgccgctcctctctccgcaccaacgacgctcctcctcccaccgcgagttgccccttccccaccggtggcgcctctccacgcccctcccccaccggcagtgcctctccatgccctcccttctcccgcggtatcgctcccccttcctcccccctatccttcggctcctttaattcctcctccactctctcccacatcgacctccacgccgacgacgtccagaccaccgtcacctgcgtctaccccaaccctgccccctccggcgccggcgatttcgccgccgtcgtcgccaccttcacggccaacctgccgtccttcctcagccacctcttcttcctcaccagccgcatccccaccaacccggcgtccggcccgttagcctcctcatccctctctcccttctctctctctctctcctcacgtcggcgtcatggagcctcgactccctgtcgtgggtgtctccacctcgccaccgtcggtgccccggcgtcgtccaccaccgaagacgccgtcttcatccgcccaagccgtcgtcgtcaccacccgagcccagctcgagctcgtcgccgaaccgccgccacgatgcatagccaagtcgtctgcgagggcgccgcctacgaggccgacaccgtcggcgccttcggcaagctctagggcaagcccgccgtcttccgccacgaccgcatgcccatgtggccatgttcgggagaggccgcatcatggccgaaggcgacgagtgggctcgccaccgctgcatcatcgcccctgccttctccgccaccaacctcaacgttgtccggaacgccgccgagatcatcgccaaggccaacttcagcatcgccgccgccgacgccacgtcggcgtcccgctcgccagcctcctccatatccgcgccacctacgaggcgtggaaggtgggccgcaagatcgacgcgctcctgctcgacattatcgactcgcggcggcgg

SEQ ID NO: 85298 - DNA, 404 bp, Oryza sativa
  unsure (1)..(404): unsure at all n locations
  Clone ID: PAT_MRT4530_84450C.1
atatcacccaaagtttcacatgtcacatatgaggatatctgagcttattttaaacttccgaaccactatactgtaaaaacggaggacaggacacccccaagggggggaatggtactgggggcaccatagtacctagggtagataccatatttagaggggacgttaaaagccaacaaagcttgagcttgagccagattccgatcaaaggggagatcaccaaactgctggggttgtagttgttgcgctatggcctaaacaatgttaatgtcctgatagggagaatgtggggnaaaaagggggaggtgttgcaaaaattggttgtttttaagttgaaagtagtttattgaaagaagggggttgnagttatattaaaatggtggtttaaaaactaataatatggggta

SEQ ID NO: 85299 - DNA, 312 bp, Oryza sativa
  Clone ID: PAT_MRT4530_84451C.1
tacacaccactccccagcagcggcaaagcagccagcgagagatcgaggcaaggcaaccgccatggccaccgtcagcgccgccgcggcgacctccgtcgttgcccgcgccgtcctcgccgggccacttggtatggcaacttcagtaattccatgccatgcatgatccattttgcactggtcgtcgtcgtacgtcgttgtgtctgagcatggtgatgagcgtgttctgtatgtgtgcagggctgccgcagatgagggcgaggaggagcgagagggtgaggtgcaactactccaaggaggcggcgacaccggcgg

SEQ ID NO: 85300 - DNA, 665 bp, Oryza sativa
  Clone ID: PAT_MRT4530_84452C.1
actcttgaaactggggactagcttacatgtttgatactgagacgcttgatgacgatgaggtggtcagcaacctcaactgccgtccggattcatgaagtgacgctaaaaagttttcacttgtaaatcaacacaacttattgttgggaaaggagacaaatggtgaatggtgaaatgattcagatggctgctagatcagctatatctattgttgctcttacactaaattataaaatggcaaggaaaaaccggatgcaaaaccacggaaagggtggcataaaccgcctaaaggaattctcaaggcacttgcctcatgttgctgatgcaacgatggcagaagcctacgccctcaagtaaggactcgttcttgcccagcagattggttgtcaaaatattattacccaaacagattgcttgcaagtggtggaaaactggaaacgatgcaagatggaggctttcggcaactttggtagtgattttttactgatgcaatattttgatttgtgattttgtagaagtttctgttaagccctgtaatagggaagccaatgttgtggcacaagttctagctaaacatgcgtctaatttaaagagttcttgtaattgggttgatggccacccatatcaataaaacacgccaaatggcttccaaaaaaaagaatcaacag

SEQ ID NO: 85301 - DNA, 219 bp, Oryza sativa
  Clone ID: PAT_MRT4530_84453C.1
atggccgccgcgcgtgtcctgtgcaagagattgacgcccctgttccttgccgctcatgcgtcttcttcctctgtcacctgcgcaggcgctgctgctgcagcaagaactggcatggccttaatgaaaaacaatcccatgaagccgccattttcggattctattaatggagccaagagacctttttcatccacatccaccaagaacactgatcctttgtaa

SEQ ID NO: 85302 - DNA, 259 bp, Oryza sativa
  Clone ID: PAT_MRT4530_84454C.1
gataattatctgattcatcagcggcatccacacttgacaatgcttattgggacccttattttagtgatgagtcactattgcatgaagacaattcactgtcagctgatttaagcagcagtcttcacctcggggattcagctaatccaacaagtggatccgccagaacagcaaatgtccaaagccacattttcatgggctcgaaccctttaccaggaggcgaaagttacagagcagaccattttttttcacgcatcttctc

SEQ ID NO: 85303 - DNA, 363 bp, Oryza sativa
  Clone ID: PAT_MRT4530_84455C.1
atggtggtacccagatccacaaaaaaagaggtgtacgattcttacaaaggatcagtgttcttggtggatgtggatgaaaaaggtctcttggctccattaatagaatccgaaaatggcggcttcatgggattgtttttcattaaggccatgccagttcttgctgcttgcgttagacaatatcacaagttagaagacaataagcccctggatggtggaagagaggggatcaagagagataagagtttagtgtgggcatacagcagcagcgcctgcgcaggtgacagaggaagaagacgcatgagcggcaaggaacaggggcgtcaatctcttgcacaggacacgcgcggcggccatctcagctag

SEQ ID NO: 85304 - DNA, 285 bp, Oryza sativa
  Clone ID: PAT_MRT4530_84456C.1
atggcgcagaaatactcctgggacatctttatgggtatacagtgtcttttgctcgtatgggttcctaatgggccaagtgacatggccttgtccctggcgaagcctctggaaggcgtgtcggcccgctgggccttctcctggcaatgttcaataattggcgaaacccatgccctttgtggcaaggctctcgcctcgcggccttcaaccattcgcccctccaacagggcctggtcgaaggtcctcgtggtatacctccaacaagcccctcacggcaagggtgagtag

SEQ ID NO: 85305 - DNA, 537 bp, Oryza sativa
  Clone ID: PAT_MRT4530_84457C.1
atgacatttttacccttatcttcttctaccgaatcctccattgattccccccaatccatcaccccattggcagacggcgactgcttggagcctagagccggcacgccgcatgcagcagggcaggcggaggctaggaggggcgcggccgccgggttcctgggccacggcacgggcggcgcgacggctgcacctgcggtcacgggtggggatcgcggtgtccttcttgtcgcgcgccatcgtgcctttcgcccgttcctaggtggcggaggcagcaagaaggctagcaagaaggctatctcgtcgtcgtcgaggaggaggaggaaggtcgggctggagctaagcttccacgcggaggacggtgtgtggaggaaggagatactgatggaggagcagtgccagtcgttggacttctccggcatgatctactacgacgtcgcagggaggcgtctggagcagccgccaccgccgcgcacgctgctgtgcagcccgctgccgtcgtccatcaagctcgcagccaacgccgctggcggctactag

SEQ ID NO: 85306 - DNA, 1000 bp, Oryza sativa
  Clone ID: PAT_MRT4530_84458C.1
gcacgaggatttccaatcacacagatttgctctcttcttcttcttcctccatccaatctctcggaatccgaaccctagcctggtagggtgggggcacgatggggtgggcggcgcggttcctcacggcagtgtccttcctcgccgccggcgtgctcttcgcgccggacgctctcctcggtggctccggccgctccggcgccggggtcgcggcggcgaggctggcgcacgtcctctgcttcgccaccgcctggggcgccgcgctctgggtcaccttcatcggcggcatcgtcatgttcaagtatttgccaaggcaccagtttgggagtctacaagggaaaatgttcccagcctacttcatgttgatatcagtatgctcggctatatcagtggcagcttttgcgtatctacatccttggaagacggcatctaccattgagcgctatcagcttggattcttgatctccgcccttggttttgacctttccaaccttctggttttcacgcccatgaccactgagatgatgatgaggcggcacaagatcgagaaagacctcggcatcggcagcgaggtcgggttttcgaagaacgcggaggtggcgaggacgaacccaacgctggcggccatgaacaagaagttcgggatgatccatggcctgtcgtctctggccaacatcatggcgttcggtagccttgcaatgcactcctggtacctcgccagcaagctccagatctgacggcatcatcaccactgcttctcccatgtctccatgttctgtgcctctgagttctgaagcttgttgccgtaagctgctgatcaaaagttgtatactaggtttatgtaacagataaactgatgaaggaacttgtgatagaaactttgcaataatttggagaaatgatgtacagatcgctgggtgtttgttttgatttgtttcaatgcattacaaatactacgagggagatacctttctcgctgataaattgagccggccttttggag

SEQ ID NO: 85307 - DNA, 906 bp, Oryza sativa
  Clone ID: PAT_MRT4530_84459C.1
atgaagatcgagcgagatttccacatgatgaaaggggacagtgagttcagttatgccaagaattcaaggatccaaaaaagagttgttcttgctgccaaaccaatagttgagaaagctgtacgggaagtgtgcatagatcttcatcctcaatcaatggtcattgctgaccttggctgctccttcggtgcaaacacactcctcttcatctctgaggtgatcaccacaatatatgaggactataacaacaccatcaaggagagccccatggaggttcctgagcagcttgatggcagcatgaatgaggggaacattcacataggagcgactacaccaccatccgtggcaaagctctaccaaaatcagtttgagaaagacttctcacggttcctccagatgagatgcatggagattgtgcccggaggccggatggtgctgacggttgctgggaggaagagcaaagatgtgttcaatgcaggagggacgaccacgatatttgatttgctttcacaagggctacgtattcttgttgctgagggtcgtgttgccaaggagaagctggactctttcaacattccagtgtactgcccttcagctgatgagctgacgcagctggtgcagcagtgcgagctgcttgacataagtgacattcaactcttcgagatggatgagaaccgcatgcatgactcggagcaagcagagggcaccaccgccgctcacacagcgggacagagcatgtctgcaactctaagggtggcgacagagtccctggtagcaagccattttggggaggacatactcgaggagatcttcacggtgtttgcacgtaatttcactagttatattgagagtgaggttgagaaaagtggcatcaccatcatcacactgtacttgcaggcaaaacactag

SEQ ID NO: 85308 - DNA, 143 bp, Oryza sativa
  Clone ID: PAT_MRT4530_8445C.1
cccgggctgcaggaacattgctgctcgccctcgtctcgccaatggctggctctctcactccactccgggaggatctcagcggcggctatctggcggctggcctccgctctcgcagggcatccccgatgtggcgccgccgccac

SEQ ID NO: 85309 - DNA, 1390 bp, Oryza sativa
  Clone ID: PAT_MRT4530_84460C.1
agctaggcacgtggcaccgctgttgtctagctaggcagatagcaacacatacagggaattaagcttctagaccaaagcatcttgcagccatgaagatcgagtgagatttccacatgatgaaaggggacagtgagttcagttatgccaagaattcaaggatccaaaaaagagttgttcttgctgccaaaccaatagttgagaaagctgtacgggaagtatgcatagatcttcatcctcaatcaatggtcattgctgaccttggctgctccttcggtgcaaacacactcctcttcatctctgaggtgatcaccacaatatgtgaggactataacaacaccatcaaggagagctccatggaggtccagttcttcctcaatgacctaccaagcaatgactttaaccacatcttccaatcactagagcagttcgagcagttgataacgcaagattgcgcttgcaaagggttacaacctcccccgcactttgtcgcaggcctgccaggttccttctacactagactcttcccttgtaatagcgtccatctcttccattcctccatgagcgtcacgtggctctctcaggttcctgagcagcttgatggcagcatgaatgaggggaacattcacataggagcgactacaccaccatccgtggcaaagctctaccaaaatcagtttgagaaagacttctcacggttcctccagatgagatgcatggagattgtgcccggaggccggatggtgctgacggttgctgggaggaagagcaaagatgtgttcaatgcaggagggacgaccacgatattcgatttgctttcacaagggctacgtattcttgttgctgagggtcgtgttgccaaggagaagctggactctttcaacattccagtgtactgcccttcagctgatgagctgacgcagctggtgcagcagtgcgagctgcttgacataagtgacattcaactcttcgagatggatgagaaccgcatgcatgactcggagcaagcagagggcaccaccgccgctcacacagcgggacagagcatgtctgcaactctaagggcggcggcagagtccctggtagcaagccattttggggaggacatactcgaggagatcttcatggtgtttgcacgtaatttcactagttatattgagagtgaggttgagaaaagtggcatcaccatcatcacactgtacttgcaggcaaaacactagctagataatggtactatacggtagagtgtcaacaatatatcctggcagagaaacataaagtttaaatataacgtgattttatagagtaaagtgcgctcatgataagcccgcttggcacagttcggtgaaagttaatgcccagaaattgaaaataaaaaaaaaaaaaaaaaaaa

SEQ ID NO: 85310 - DNA, 178 bp, Oryza sativa
  unsure (1)..(178): unsure at all n locations
  Clone ID: PAT_MRT4530_84461C.1
aagggtaaccccttaatctttcccaatttatcacgcttactcaatcatccaagatagcacttataactaatacgagggacggaganagtacgcccgctnctagccacggtggagcctgacttcgacgcacgggcgatgaattgggagttctctcatcacgtggctgacaagaggaagg

SEQ ID NO: 85311 - DNA, 475 bp, Oryza sativa
  Clone ID: PAT_MRT4530_84462C.1
gaacctttttatcatgtccaccagtagcagagctctaaagcctacatgggcgtgtcgatgaaatggatccatagcttacctgctcttccatgcagaccaatcattctcgtattgggtacatctaaactcagacaactcgccccgggtttacaatgctgacactgaaaaaatccagtcgttacctaacttagttcatttagcatcatatcctgtctattcgacatttgatcctaatcaaagaagaggtcattacgctattgccattgcgaacagtgagctcacgcctgatatggcaatatggaactgctcacctgtactcacctcattataacgtgtctaatggagggggctactcacatgctaaccgatcctcttgcgggagcctatatcggccgctgctttagataaggtcctcttacttactcgacagatagacacgctttgcttgtaaagatctaatgcaggggctcactta

SEQ ID NO: 85312 - DNA, 666 bp, Oryza sativa
  Clone ID: PAT_MRT4530_84463C.1
atggtcagcgagcaaacggcgccggtggcgaccgccgaggcggagctggagagcagcgccgcgccgcccgtcaagcccgacgaggccgcggccaaggcgcagccggaggacgacgcccccgttgtggaggatgccaaggatgatgacgacgacgaagaagacgacgatgacgacgaggatgaggatgaagacggtgaacaaggtgcaatcggaaacgagggctccaagcagagcaggagcgagaagaagagccgcaaggccatgatgaagctcggaatgaaacccgtcacgggagtcagcaggattaccatcaagagagccaagaatatactgttcgtggtgtccaagcctgacgtcttcaagagcccgacgtcggagacgtacgtcatattcggggaggccaagatcgaggacctgagctcccagctgcaggcgcaggccgcgcagcagttcaggatgcaagacctgagcaaggtgatgtccaagccggacgcggcggcggcggcgccggccgacgaggaggaagaggtggacgagacagggatagagccccgcgacatcgacctcgtcatgacgcaggccagcgtgtcgcgggccaaggccgtcaaggcgctcaaggcgcacgacggcgacattgtgagcgccatcatggagctcacggcctga

SEQ ID NO: 85313 - DNA, 338 bp, Oryza sativa
  Clone ID: PAT_MRT4530_84464C.1
gtgatttgctcggaaagaacagaacgcaaaccagaggttccagagagaggaggtacaaaaagatgcccaatgccatgatcccttcacacacccgcacgctgtatacttcgactacgatcacggcaccagtatctggggagcccgggaccaacctctacggtggcaggggcggcgaccgagatccacaaagccttcttcggagcaacaggcctgaaccctgtggcctcttctacgcatcgacacgcatgtgctacactgcacttgctcgcaccgggtcaagccatacaatctccatacacacctacgatcatactactaactgcatccaatgtgtcttg

SEQ ID NO: 85314 - DNA, 1866 bp, Oryza sativa
  Clone ID: PAT_MRT4530_84465C.1
atggcatttcctaaagattttagtggcctgggtttcacagaaacaaggaaaatgaacattgctctcctggccaaatggatcataaagattgaatcagatgataagagcttgttccttcgacatggtcagcgagcaaacggcgccggtggagaccgccgaggcggagatggaggagcagcgccgcgccgcccgtgaagcccgatgaggccgcggccaaggagcagttttgggacgacgcgggttttgggtaatggtgagagtatcagcttctggcaggatgtctggtggggcacctgtcctttaaaaactcttttccctgctatctttaggatctgtaatcagcaagagctgttactcagccatctcaatcaggagggtcctgactgccttacattcaggagatcctttggcccggaagaaatcctagagtggggagacctgaaagaaattatcgaacaaattgaggtttccgagtcgtcttcaagagcccgacgtcggagacgtacgtcatattcggggaggccaagatcgaggacccgagctcccagctgcaggcgcaggccgcgcagcagttcaggatgcaagacctgagcaaggtgatgtccaagccggacgcggcggcggcggcgccggccgacgaggaggaagaggtggacgagacagggatagagccccgcgacatcgacctcgtcatgacgcaggccagcgtgtcgcgggccaaggccgtcaaggcgctcaaggcgcacgacggcgacattgtgagcgccatcatggagctcacggcctgaagccccctcctgctgctgcattggcaccacctctcttcccccatttcagtatcgtgttttttttttatggcgtttcgtcgtgggtttgcataagatgccctgtttgttcagctgctggactttgcatcaaacttttcataccatgttcccatattagtgtcatcttaaatggagttttcagacttgtttgaacggcaaccgcgagcctctcctggtgcgcgcgccaccaccgcaagtcgttgttgcaaccgcgagcctcgctcggatcctcctcctcctcctcgacatggtcagcgagcaaacgccggtggcgaccgccgaggcggagctggtgagcagcgccgcggtgcccgtcaaacccgaggaggccgcggcaaaggcgcagccggaggacgatgcccccatcgtcgaggacgccaaggatgatgacgacgacgatgaagacgacgatgacgatggggatgaggatgaagacggtgaacaaggtgcaatcggaaacaagggctccaagcagagcaggagcgagaagaagagccgcaaggccatgatgaagctcggaatgaaacccgtcacgggagtcagcaggattaccatcaagagagccaagaatatactgttcgtggtgtccaagcctcatgacgtcttcaagagcccgacgtcggagtcgtacgtcatattcggggaggccaagatcgaggacctgagctcccagctgcaggcgcaggcagcgcagcagttcaggatgcaagatctgagcaaggtgatgtccaagccggacgcggcggcagcagcgccggccgacgaggagcaagaggtggacgagacagggatagagccccgcgacatcgacgtcgtcatgacgcaggcctcgtcgtcgtcgccgccgccgtatcgtcgccatcgccgtcaccgtgtcatccgccgtcgtgtcgttgtcgcgtgtccttccgtgtcgtcgtcgccgccgccgcgtcgtcgccgtcgtgtcgcccgccgcctcctcctctcccgtctcaccttggtggtctcctccgccgctggccggcttgcccatagaacaaaagagaagagtgtgtga

SEQ ID NO: 85315 - DNA, 356 bp, Oryza sativa
  Clone ID: PAT_MRT4530_84466C.1
ggagatacaaagcctccttattaaccgtaagcaatacatcttgttccgccagaattagggcaagctgctacagaatactagcatcggggacgatattactaacaatagcgtcctaggtctagaaagagtactaacatactagcaagcccagagctgggtggttaccataatatacatgcggtgatcggattgcagcgagatcctgcaatcgagcttaccaagcattattcgtcggagctcccacccttgatgttgatgctccatccgtcatataccttgttccaggatctggcgtcaccagcttcttgggtgcccttgggactgtgcccgccatccgccttgtcccaggagctacc

SEQ ID NO: 85316 - DNA, 954 bp, Oryza sativa
  Clone ID: PAT_MRT4530_84467C.1
ggcaatttggcatttgctgacaagtgtacaagaccacacagcttttctactacattttcttgggtttcttgaatggcgaacgcgagtgttcctaagccggcgaagcgcctgtcgcgcaagaggagcttcaggctcggcctgccgctgctctgcgggcagtccgacgtggcgagcccacgcggcggcggcggcgccgccgccgccgcccgttcgtcgtcgtcggggagaaggcagggcgagctgcacaggatcttccagcacttcgacagggacaacgacggcaagatctccggcgccgagctgagcgcgttcttcgcgtccatgggcgacgagatgccggcgccgtcgccgggcggcggcggcgccgccgccggctacatgctcgacttcgccggattcgttgccctgatggagagaggtgacagccaagaagaggacctgaggagcgccttcgaggtgttcaacgccgtcgagtccgccggccggatcacggcgaggggcctgcagagggtgctcgcgcagctcggtgacgagcggtcggtcgccgactgcgaggccatgatcagggcctacgacgtcgacggcgacggcggcctcgacttccatgagttccagaggatgatgagctaagtccatggaatgcctcagcttgaagctgctacagcgagtgagtgactcagcgaggtgtttttcagtttcagagtcctgagaaaattatactgctactataggttgttgataagtctgctgcatccagatgacacattgcagattgtttacagggcagaagagttcttcagagctcttttgcttgcctggagcaaatttgttgttgtcatcttgagttgtttggtgtgccacacacttaatccagtgtatcagtaaagttacagttgatttccttctttcaaaagaaaagaaacagttacagttgaaaaaaaaaaaaaaaaaaaa

SEQ ID NO: 85317 - DNA, 665 bp, Oryza sativa
  Clone ID: PAT_MRT4530_84468C.1
tttctgatccctcaaccctagctccccaggtgtgcttttacggcggcgcggttgtccgacagggaggcggagcctggcgtcccagggggtggcgcgggaggcggtgtccggcggtgcgggaggcggagtgcgggggcagcgcaggagtctgaaggcggcgtcgtgtctgcatcagcatcgcttttctcctccgaatcctctcccaaaaaaccgagagaaatatgttggtaaccagatcgaggttatttggagtgtcccagttgcgcaaatcctctcttaagcatctgttgaagttcaggtctatgtctgatcagtcatctgttctagctgccgatgataccgaaacttcatgggctatgtctgatcagtcgtccgttccagctggcaaggctactgaattttcattaggtgatttccctaagcatctgcgcaagctaccaccatggatccaagagccggcgtctgttcatgaagttaatgataccttgaagcacattgccgaaacatcaaacgaattcaagctgctttcttcggattgcatgcagaagaaaatctttgagcaagagattagacctttcttactctcaagaggtctactgtgcactagtcctatgggaagctcgtttgtcaaaggtttgcacaagatgaatcatacaattcatcac

SEQ ID NO: 85318 - DNA, 7083 bp, Oryza sativa
  Clone ID: PAT_MRT4530_84469C.1
atgggggaggaggacgcgcccgagatgcctgacgcttcgccgcggctgccgtgggagcccggtggcgtcgagcatttcgacgccgcgttgctcggcgatgcggcgtacatcgtcgacgaggaggaggtgtcggacgtggagatgagcgagggatcgccggtggcaccctcggagtcctccgcgctgccttctccgccatcgctgcggaagcgcctggcgccggtcgtgccgtcggacgtgccggaggaggtggtgcgggcggtggacgcggtgatcatgggcggcggcctcgagcgcctccgcgagatggtctccggagaggacggagagctctcgcatttcgtcgtggacgtgctgatgctcacgatgggcggcgtcgacggtctggacgagggggcaggcgacggcgccgtcacgttgcctagcatcatgtccagctcgcgcgcggcagccatcgcggccgagctcctgccctacatcccctgcggcgtcgagccgtcgccacgcactcgcatggcccgcgccctcctcgccaccctcagctcctgtacccgaaaccgcaccatgtgcacttcatcgggccttctcgccatccttctcgacgctgcagagaagctgttcgtcggaatgggtcagagaagcaagtgggacggagcaccgcttgtgcaatgcatccagatgctgggtgggcactcggttagtgtcaaggacctacattcctggctcctcctgatcaagaagacacttggcacgtgctgggccacgtcgctgacccttgcgttggagaaggctgtgggctgcaaggaggccaagggtcctgcagtgacatttgagctcggtggggagggctctggcttgcttgcccctgcggaaagccgatggccattctcaaacggttttggttttgcaacgtggatatatgttgagtcattctcggactcgctcaacacaggcatggctacagcagcaattgcagccgccgcagcctcaacgtccgggaagtcatcaccgtcagcagcagccgctgctgctagcacacttgcgggagaggggacgaagcacatgccccgacttttctgtttcctcactatggataaccatggcgtggaggcctacttccatggccagtttctggtcgtggagagtggggctgggaaggggaagaaggcttctctgcatttcacttatgaattcagaccacagtgctggtattttgttggtttggagtacacaagcaagcaggccctgctagggaaggtcgagagtgaattgcggttgtatgtggatggggagcttcatgagagctgtccattcgagttacctcgcatcttgaaacctctggccttctgctgcattgggacgaacccaccaccaactattgcgggcctgcagcagcgccggcgacaatgtccattgtttgcagaaatggggcctatctacatcttcacagagtcaattgggcctgagagaatgagccgtatagcttctaggggtggtgatgcactccccagcttcagcaatggttctggtttgccttggaaagctacaaatgctcacattaggcacattgcagaagacaattatacacttgacattgagattggaggaagcttacatcttctttatcatcctagtctactcaatggtcgattctgtcctgatgcttcaccttctggttcaacaggtacccacagaagacccgcagaagttcttgggatggttcatttatcatatcgagtgcgacctgcagaatcattgtgggcattagcttatggaggtccaatggctttgctaccattgactgtgagcaatgtcgagatggataatatggaacctatactcggggatttgtcatcgtctcttgcaactgcttctctttctgttcctatttttaggattatttcgctggcaactcaacatcctggaaataaggaagagctatgccgtgcccatggaccagagcttttatcacaagtgttacattacctattagaaacactatcgagattagaaagtggggagaaagagatactgagtgatgaggagcttgttgcagcaattgcatctctgtgtcagtctcaaaaaaatgatcatggtctaaaagtgcagctctttagcactttgctgttggacctgaagatgtggagttcatgcaactacgttttgcagaaaaagcttctatcttcacttgcggacatggtttttgcagaatcggcttgcatgcatgatgcaaatgcactacagatgctccttgatgggtgcagaaggtgttactgggtaattcatgaagcagattcaatcgatacattcacatttactggaactgagagacctttagagaaagtgaattctcttgttgatgagcttttggttgttattgaactgttactaggagcagtatcttctacattggcttctgatgatgttcgctctttggtgggctttgttgttgactgtccacaacctaaccaggttgctagggttttgctcctcatctatagattgattgtacatccaaacacatctagagccaacgtgtttgctcagtcattcatttcccgaggaggtgtagaggcattacttgttcttttgcaaagggaggctaaatctggtgataacaatatttccgacagttgtattgtgccacagaattctctgtggaatgctggttctgacccaaaatctattagtagtgatttggatttgaaaactactgctggtgaagcaaactgcaatggtcataagactcaaccattggagcaccatgaaccaccctgtcacgaaggcagcactgaacctggattctctagcaaatggtgcttattgaagaatcagttcctaaagaatctaggtggcattgactttctgaatattgcagacaatgttcagaacgacatatacaatatcgataatggagatggagttcttgttggaattgttcatgttttgggtgctttagttgcatcaggtcacctgaaatttaacttgcctgctgcaaagccaaagttgcccagcagtttcctaactacctctaatggcgaaggaaattccatgtttgaagacagagtttctttgttgctctttgcaatgcagaaagctttccaagcagctccaagaaggcttatgaccagaaatgtctataaagctttattttctgctgtgatcaatgttccttcagcaaatggtagcttgaaactacatgattctggtcaccgtgttaagcatactccacttttgtcagttctactccgttctcttccatttgcatcacgggcattccaagcccatgctattcaggatcttctatatttggggggaactaataatgagaatagaattgcactgacttccattgcggaatggcccgaatggattttggaggtcttaatttcaaatcatgaggatgtagaggcaacgatacattgtgcagaatggctttcaatggttggaggatctagcactggggaccaaagaattaggcgtgaggaatcgttaccgattttcaaaaggagattattgggtaatctgcttgaattttctgctcaggagcttcaagttcagaactccaaaatcatcttccctgacttaagtttcagtttaggaaggagcatagccttaccaaataagcatagggataagcaggtgtctgaaaattccagttcaattactcatgagttcattcttagggacatagcacatattgtgtctatgaagcagactgaaggaatcaatgctgcagcagctggtgttgcagaggagggtatgatgcccaaggaaactaaaatccaagcagataaagctacccatctctctctagccttggctgagaatgcaattgttcttctgatgctcgtagaagatcacctgaggtcacgcagtcaacattatttcttatcgtgctcaattgatagtgctgcatctcctgcctcaggggcttcatcagctgccactagatcaaattcattgagcaggactggtagtgaacctttggatgcagggggctcaaggcaatctttgtccagtgatgctggtggtcttcctgttgatgttcttgcttctatggctgatgcgaacgggcaaatttcttctgaggtgatggaacgtgtcactgcagcagcagcagcggagccatatggatctgttaggcatgcatttgtatcctatgggacctgtatttcagatctttcagaaggttggaagtacagaagccgattgtggtatggtgtatgcattccacccaaatccaatatctttggtggtggaggaagtggttgggaatcttggaagtctgttctagagaaggactccaatggaagctggattgaacttccattagtgaagaaatctattgcaatgctgcaggcacttttactagattctcaacttgggggtggccttggcattggagggggatctggggctggcatggatgctatgagtgcacttaatcagttgttggatagtgatcagccattcttttgcatacttcggttgacacttgcttcaatcagagaggatgacaatggggaggatgacatttttatgagaaacattagcatgaagaatgtcatatctgaaggattaggctgtcaaactggaagcatgatgattcatgatgataattcttgttcgccttccaggaaacctcaatctgcgcttctgtggagagtgcttggtcctattttgaatatgcctgtttctgaatctaagagacagagggttttggttgcatcttctattatttattcagaggtatggcatgctgtaagtagtgatagaaaaccactaaggaaaaaatatgttggattgatcatgccaccatttgtagctgtactgaaaagatatcgctctgttttggctggaattcatgagctcacatcttcagatggacaaaatccactagttgttgatgactgtgctttagcagcagacactttacctattgaggctgctgtctcaatgatatcacctggatgggctgctgcctttgcttctcccccggttgcaatggcattggccatgattgctgctggtacctctgggacagaaacaatagcaccaccaacaaataagttgcgcaggcgtgacacctcattgctagagcgtagatctgctaaactacacactttctcaagttttcagaagcctattgatgcaacaccaaacctaccaacatctgcaccaaaggataaagcagctgcaaaagctgctgccttggctgctgctcgtgaccttgagcgcagtgctaagattggctcgagaaggggtcttagtgctgtagcaatggcaacttcaggacaaaggagggctgcaggtgatattgagagggcccagaggtggaatacatctgaagctatgtgtgctgcttggttggagtgtcttcaatctgctgattcaaagtcagtatcaggaagggatttttctgccctttcatacaaatatgttgcacttcttgtttccagttttgcattggcacggaacttgcaacgagttgaggaattactaacttgtgaatacaccattgaggcaacttttggacatgcagatggagaggcgaacacagtcaacaagaggaaaaagaacatcttagcagtaaacactatgcatgccttcttttcttatagacatcttgatttgctttactatttttctacacagattttctggaagttagattccacagaaacttcatcaagaatgagaagatttatgaaaagaaactacaaatggtctgaacatttgagtatggccaataattatgaggagaacatgcttctatgtgatggtgcagaatccaattatagccacagggaagatgcagactctctatttgcaaatgctcttcgaacaaattcttccattatagtagctgacgcaatatcagtagatggaggacatgggaatgccaaacagacagaaactgagactatctatagcagtgtagatgattcaacaagttctgacttttctagtgttcacaacttggttcgatcgaccgtggttgcaccgtgttacagttctagcaaaaataatgagagaattattgttgaactgccttcattgatggtgcgtccattcaaggttgtgcggggaaccttccaagtcacatcaaagatgattaactttataattgatgagcatatgagtgatagcgatagttacatggatgatgctgcatctactagtgggcaatacgatcagcaagataaagatcggagctggttcatatcttcacttcataaaatttatagtagaagatatttgttacggcgaagtgctttagagctattcatggtagataggtcaaatttcttcttcgattttgaggatacagaagcatgtaaacatgcttatcgggcaatcgttcataccaaacctccttatttgaacagcattttcctagctacccagagacctgagaaaatccttaaaaagtcgcaattgacagagcgctgggctagatgggagctatttatgcagtaccctgtttttccatgggtattagcagattaccactccaaaacactggatcttgaagatccgtccgcataccgagatctttcggagccaattggcgctctgaatcctgcacgactgaagaaattccaggaacattactctagtttcaatgatccaaccatcccaaaatttcactacagttcacattactcctgtcctggcacggtcttatattatcttgtcaggatagagccttttacagccctttctattcagcagcaaggtggcaggtttggtcaagatgatcacatgttttcttgtatcaacaaaacatggaatagtgtccttgaagacatgaatgatgtaaaagagttagttccagagatgttttaccttcctgagttatttacgaatgtgaattcggttgacttagggtcaactcaacttactggaaagctatcctctgtgcaattgcctccttgggctgagaaccctgttgatttcatatgtaaacacaggaaggctcttgagagtgattatgtctccgctcatttgcatgaatggatagacctaatatttgggtacgttatctatgtgctgttcctttttgttgccacctcttag

SEQ ID NO: 85319 - DNA, 498 bp, Oryza sativa
  Clone ID: PAT_MRT4530_8446C.1
catcttgcagcacttgcacggcgggctcatgactggaacctgaccgagtgcgctaggccagccccacatcgggacgcgcatcggtctagcaagcgacgaccacggagttgttcaccttgtataaacagcggacctcggatactacgtgaaacccggcttgacagatgtgctagctatggacatatcgcatacacgaacccatgctcccactgcgcgctctgaacgacaagcgccgagccacatgacatgagcgcgcccaatgcacgagcactctgctcaatacttgacgcctgctcatgggcacggccagcaacacaaaccagtacgggtccgactaaatccaccagggtagaaacttacttgtaatgcatcaacatgctcgcgctgaggccatatgccgtgccgatgaataccctcctcataatattgatgatccatcagctcccaatagatgggatcatccgagtgttcggaacactgctcgcagaaagtactatg

SEQ ID NO: 85320 - DNA, 652 bp, Oryza sativa
  unsure (1)..(652): unsure at all n locations
  Clone ID: PAT_MRT4530_84470C.1
aaatccaatagctgctgccgcacaacgccatttctccaaatgggttgaaaagcctgagtttgtttttgctcttgcttataagataactagagactttgtagattccatggatgagatattacagccccttgtggataaagctaaccttgtagggtatagttgcagagaagagtggatttctggaatggtcatcacattgtcgacatacttggtgaaagagatatttcctaagcatattgaacttcttcaggaaattagctcggctgatgctagcagcaaacaatctcaagctagagtctcatggcttaatcttattgacctgatgatatctttcgacaagcaaacccaagctttgatctcaagttcagggctcctacttttcgggtggagggatgatggtaattnggcaggaggatctcgggttctctccgtcttctgtgatcggccagactggcttgaaatatgggcagagattgagagacaggatactcatgataagctgagattatcaatggagaatgagaaaaactggaatacaaggtttcaaggaacagtgcttgaatatggttcagatgactataagtctccagcaattaccggtgtaatccaaaagggcctgtccttgctaatagatcgtgctcggcccattccc

SEQ ID NO: 85321 - DNA, 121 bp, Oryza sativa
  unsure (1)..(121): unsure at all n locations
  Clone ID: PAT_MRT4530_84471C.1
gnnggttcggtggccccagaacacttaaaatttttcagggcacacattgaagggaaagccctgtccacaggcccaataaaattttataagggccagctctgttaaaccccccagttaaatt

SEQ ID NO: 85322 - DNA, 201 bp, Oryza sativa
  Clone ID: PAT_MRT4530_84472C.1
accggcgtgcgtccactcgacagggaaagtataaaaggtagggcatccgatcgacattggaagaagaagaaatcgatcgatcgatcgaacatataatgtagcacgtacgtaccaccacgctgatcgatcatggcgcgggagctgacctgcacgatgaccttttcgagcgtgtggtgcaagctcgccaatgacgccgacgaa

SEQ ID NO: 85323 - DNA, 388 bp, Oryza sativa
  Clone ID: PAT_MRT4530_84473C.1
gtaaccttcatttagtactgatatcttacacaatcaccaccaagtgtcatacttttggcgtattatttcactcaactccgattctagttctcaattacgttgctatgaggtctcgctttcggactcattctattatcctgggtagcattgatgatgaaatctaggagagaaggcaccgtgctcttcttccctgttgttcttgaggctttgggcttgctcccttgagatgcgatacgcattatcgactacatcaactggcaaggcacggaatacggaatttttccctgtaatgcgggctgacaaaggctttaccgtttgtcttgattgcaatatattggcatccttcacgctcttgtttttttaagaacaaacatattgttgcggaatg

SEQ ID NO: 85324 - DNA, 195 bp, Oryza sativa
  Clone ID: PAT_MRT4530_84474C.1
atggtgcggataattgtgccagcagttgatagccgctgcaagtccaaggtccatcctgttcgacaccaagcagatcgttggacacggtgggcagtgatttcattggtgacgtacgatggtttatgcaggaactgtggtggacgccggaatcgtgccgtcggtgactcggcgttctccttcatcttcagagattga

SEQ ID NO: 85325 - DNA, 440 bp, Oryza sativa
  Clone ID: PAT_MRT4530_84475C.1
tcgcctgcccatgcatatagaagcgatcaatctctgaagatgaaggagaacgccgagtcaccgacggcacgattccggcgtccaccacagttcctgcataaaccatcgtacgtcaccaatgaaatcactgcccaccgtgtcctgcactatgcaacatcaagcatgcagtacgagagatcagggtgacgatcatgtgcagcgtccgtatctagatcgacgtacaataaaacgatgcacatgacgtgcaccaacgatctgcttggtgtcgaacaggatggaccttggacttgcagcggctatcaactgctggcacaattatccgcaccatcacctatcacaagcaagatgaccgcatatttaatccccataggtatatattctttttgtttgaatccagcaatgtattgtctgaaaatatatatgcactctaattttgtttt

SEQ ID NO: 85326 - DNA, 297 bp, Oryza sativa
  Clone ID: PAT_MRT4530_84476C.1
gttcccccatgccagcatcaccaccacagagctagtcttcaggatggcccaccggcaatgcgacgaggtttccgagttgatgggacactgtaggtaggaaccagcaggattatccaaggaggggaacgaggagtgcgtggtagaggaggatgcttcgcgacgcccccctgcgactgacatgctgacacgccagaaggagggaacacgcccttggaaatgcttggaatgcatgaatgctcccagtcgatacaagggaggaattgaatgcagtgagggaaactgacatgaaattgaatt

SEQ ID NO: 85327 - DNA, 938 bp, Oryza sativa
  Clone ID: PAT_MRT4530_84477C.1
aaaatcataggcaataccacaatatgttatgctttataagtcaaatttcatacagatgaaacaaacaaaggcaagaccaacaaaaatggttgttatgcagtactttctgtagataaaaaaaagccttcgctagacaaataaagatgacagatcctatgagtgggaagaaatagtaccatcctctctcctgttgcaagcccacctcgggataacctcgttaagaccgtgcagaataagctgcttacctttcctgattagtttcttatagttgcccaagccaaataatatgggcactaaagataacgataaccgtgattaccatatctccactcgcttgacacagtgttgtccaaagaaatagacagctggtgcttatgttgtgtcaagggttgtacaacatcagattgaggtgcttgggaacttaacccatcctcaaaacgtggtcacaaaaagtctgaactatagaatacaacaaagtgaggaaaactggagccttttgcaggattttttttaaaaaaatcatatgttaatgcaatgcaagaagtctgtactcgttgtgagctcttctttgtactcacaattccttttcagaagttctcccttgcaatgctcttgcaatcccagattttttttccaactctaaggtagccttgccaatttattttcgtggagaagaacctgttcttgaactgtactgtgtccacttcatacttttggttacagggaattgttgcactccctacagtgagaactcaggtccatattaaggctaaaagataagtacaaatgtcccaccatctccataggttgcctcctcttgcaaagatgggaaaaaaaactattaccagctcattacagtgcttcaataatcccatttgaatgccatagtactaactgtgccatccattcaaactttaaaaaaaagctgagactttttt

SEQ ID NO: 85328 - DNA, 429 bp, Oryza sativa
  Clone ID: PAT_MRT4530_84478C.1
gatctattatttataagggagagtacgtgcattgctttctaacactatgggggtactgcgacatggtacaaggatctggtggatagatcgtacaccggtctcacactcgcaatgcgtccttaattattgtagcataatcgtcaaacgttcacagccaatatttgcaggatgctgcttgaaattaatagatcaagatttctatgtacctgataactacctctgagcaaccaaaggttgtctgcctaacatgtgcacgcgcgcgctgtgtatgtaactatatacacagttttctaagcgaccaggtcgctgcactgaacagacatcctgacgtcgtgtgtgactactagaccgagatccactggctacttttgcagtaacaaggcacgcacgacctcatgtagcttttctaataaacttgaatgtttttca

SEQ ID NO: 85329 - DNA, 1251 bp, Oryza sativa
  Clone ID: PAT_MRT4530_84479C.1
aaaaatataatagataaatagatagatagatgtgcatgggcctttagtgatgttaggggcatattaattacagccgtttacattgtggaaaggagggagtatatagtactatatatacactatgtttgttgtttattttcaatatatgacaaccatcgatcacagatatggcagtaattatgaggaaggaattggtggcagtggtggcaggggacggaaaggaaggatggcactctacgttgctagctagtcggagcgggcggcgaagcgctcgacatgtatcttggggtcggagaggttgatgccaaccatggcctcgccgagcccactgctgacctccgccagaatcttgggatcgctgtagtgggtgacagcctgcacgatggcacgggcgcgcagcgcggggtcgccgctcttgaagatgccggagccgacgaagacgccgtcgcagccgagctgcatcatgagggcagcgtcggcgggggtggccaccccacctgccgcgaactgcacgacggggagacgccccagctgcttggtctgcatgaccaggtcgtagggcgccgcgatgcgcttggcgtaggagaagacctcgtcgtcgtccatgctgcggagcgcgcggatgtcgcccatcacggagcgcacgtggcggacggcctccacgacgttgcccgtgccggcctcgcccttggtgcggatcatggcggcgccctcccggatgcggcggagcgcctcgccgaggtcgcgacagccgcacacgaaggggacgcggaagttgttcttgttgatgtggtgggcgtcgtcggcgagggtgagcacctcgctctcgtccacgtagtccacgccgatggcctccaggatctgggcctccaccaagtgcccgatgcgggccttggccatgaccgggatggtgacggagcgcttgatgtcgcggatgaggccagggtcggacatgcgggcgacgccgccctgggcgcggatgtcggcggggacgcgctccagcgccatcacagcgcaggcgccggcctcctcggcgatgcgcgcctgttcgggggtgaccacgtccatgatgacgccgccccgcagcatctgggcgaggcccaccttgacggagaagctaccggacttgtgcgagaggccattggcgccgccgtagagcgccacgacatcggtgccgtcggaggccatgggcgtcagtgtttgtgtttgtgtggcaataacaactcaacgatagatcgatccagctccgcc

SEQ ID NO: 85330 - DNA, 3207 bp, Oryza sativa
  Clone ID: PAT_MRT4530_8447C.1
atggcgacggcgaagcaggcccccgaaaacgaatcccctccccctcctcctcactgttggatctaccccgagtgcacgttggttacaaggtcatgttgcctcctcctccgtctcaagcttttgaggcatggacacccactacatctaggctcccatggcggaagggggcaaccaggaagtagggaggctgtcgggaaggatgttgaccaacgtgggcttctcgaactcctagacgcgttgctgatggtgatggaggggcatgaccatgaagcttctagatgtagagctttcattggcggcgacgcgatggtgagccatcatatgctcattgtcggagtgtgtgcaggcgttattgggatgagaaatctagggtttggaacggcggtgtgcggaggctcagattgtatgaaaaaggacagaaatgtgcaaccacgatttaattggccatggagaagcgaatcaccattatcagcacaactgctcattgatattccacctgaaatagagttatcggactacagaaggttgccaggttcaggaagcgagagcccatctggacttctccatggtgaaggcttcaaggacgaaccaattgctgacttggatattttctttgaaaggctttatgaatatttctgtgcaaaagggctacgatgcattgttaccaaatggataattgagatgcttaacgtactttttatggtatgctgtattgggttctttttcttaattgttgattggaatgccctcggccatttgaaatgtggtgtagaggcactcgaatccggggaaaaaccatgtgatctaatgcaagtcgttaagcataatccattagttccattcacatttcctaaaatgatcactattggatcaatggttatattgacaacttacggtcttatcaacttcctcaagtttttcgtgcaactcagaagtacattgaatattcgtgacttctactgtaacagtctgaaaattacagatcttgagatccaaaccatctcatggcccaaaataattgagaaggttgtcctgctacagaaatctcagaaactttgtgttgtaagggacctctcggagcatgatattatcatgagaataatgaggaaagaaaattacttgattgggatggtcaataaaggcattatctcatttccaattcgtccttgggtacctggagctggaccaactgtcaaatcccatttgcaaaacaggagaaaccatctgatactcccgaaagccctagaatggacattaaattggtgcatcttccaaagtatgtttgatagtaaattctgtgttcggaaagattttctaacaagcccagctgtgttaaagaagcgacttgtatttgtgggcatttcaatgcttatcctttcaccctgccttgtaatattcccattagtgtacctcattctgagacatgctgaagaaatttataatcaccccagtacagcttcatctagaagatggtcaaacttatcaaggtggatttttagagagtataatgaggtagatcatttcttcagacataggatgaacaacagcgctgtgcactctttaaattacctgaagcaatttccaactccactgatttctataatggcaaaattcatatcttttgtttctggtggtttggctggtgctcttataatcattggatttctgggtgaatctgttcttgagggccatatctttggaagaaatctattctggtatactattgtttttggaacaatagctgccataagtcgaaaagtagtggctgatgaacttcaagtaattgacccagaaggcgctatgtgcaatgttgtccaacaaacgcattatatgcctaagaggtggcgtggtaaagaggacagtgaagtggtgcgaagagaattcgaaacactatttcagtttaccatagtaatgctgcttgaagagatggcctccattttcatctctccttacttgctcatctttgaggtaccaaagcgtgttgatgatattctgcgattcatctcagacttcacgatttatgtagatggggtgggagatgtgtgcagcctaagcttgtttgacttcagaagacatggaaatagaaactatgcttcaccatttgatgcacttaaaacgcttaggagctcccaagggaaaatggagaaatcatttttaagttttcaaagtgtgtatccatcatgggaaccaaatgcagaaggcaaacaattcttaactaacctccaaaagttcaaggaaaagcaaatacggcagcaggctcttgcccaatatcaagcaatggaagcatcaggctttgtggcaagcaccagaggtcacagggatgatatcttccaccaactactccctagtgatatccatacccgtgctgaggccatctcacctgctgtttacaatttgggcccgttaggattgcttgacacagatcaaagaagtcatccatatattctggattggtactacgtctgccatccacctcacttggatagaaccgaggctccttatttcaacgaagtgttccctgagaccagtgagaacacaggttcagcagcatttaaagcatctgaaattgaagaagcaaggggctgggactctgatatggttcccccgcctcgagcagatcgcgatgagtggaactttaaccatgaaagggttcgaagccatatggatgcatcgacatcaagcaatttgtttcatcatgctccagtagaacaccatgataccaaaggaaatattatcgattggtgggatcaagcacctgaacattctactggtcaacaaggaagttttctggagcctccggaatttggaaatcgatatgttgctggtaaccgttccagttatcactctggtgatgtgtctgatggaagtgtggaagagcttgagcgaagctataacagaagtagcagcagctggagaagacctcaagatttgtccactacaaggtatatggacgactctgacattgaggaagggttgaatcttccttttgctgatctcccgcagaaggatgaagatgctcgacatggcacatctgatactaatgaccccacgccagtcggccttcctgagtacagcataaagcaatcaggacatgcagttgatccagtgattgatcagcaacccaagctgtatgaaggaatccgatgctgggggccattaccttggtcgtccagacgggcaagggtcgaggcagagggaagcgtctag

SEQ ID NO: 85331 - DNA, 1393 bp, Oryza sativa
  Clone ID: PAT_MRT4530_84480C.1
ttttgttttaagtacgagtaggtaaaagtggccatgggtaccaacagaacgggaagtatgacagtttccatagaaatggatccagtccacagcaattagcaaaaataacaatacatgctcctaatcgatacatgtgctgttccatgttacatcatcaccaagaagggaagggaagggaagtgagccaagccaacaaagtcctggctggctggtgtctaattcattttcttcttatcacgacgatgatagtagatgtaattattacttaatcgaaggaaggagcatatatatatagcgaaagaaggataaggcggatatgaatgatgatggatgggctactcggagcgggcggcgaagcgctccaccttaggatcggagaggttgatgccaaccatggcctcgccgagcccgctgctgacctccgccaagatcttggggtcgctgtagtgggtgacggcctgcacgatggcgcgggcgcggcgcgcggggtcgccgctcttgaagatgccggagccgacgaagacgccgtcgcagccgagctgcatcatgagggcagcgtcggcgggggtggccacaccgccggccgcaaactgaacgactggtagacggcccagctgcttggtctgcatgacaaggtcgtagggcgcggcgatgcgcttggcgtaggagaagacctcgtcgtcgtccatgttgcggagcgcgcggatgtcgcccatgacagagcggacgtggcggacggcctcgacgacgttgccggtgccggcctcgcccttggtgcggatcatggcggcgccctcgcggatgcggcggagggcctcgccgaggtcgcggcagccgcagacgaaggggacgcggaagttgtgcttgttgatgtggtgggcgtcgtcggcgagggtgaggacctcgctctcgtcgacgtagtcgacgccgatggcctcgaggatctgggcctcgacgaagtggccgatgcgggccttggccatgacggggatggtgacggcgcgcttgatgtcgcggatgaggccagggtcggacatgcgggcgacgccgccctgggcgcggatgtcggcggggacgtgctcgagagccatgacggcgcaggcaccggcctcctcggcgatgcgcgcctgttcgggggtgacgacgtccatgatgacgccgccgcgcagcatctgggcgaggcccaccttgacagagaaggtggcggacttgtggttggagggctcgagcaaggcggcaccgttggtgccggagccgtagacggtgacgacgcctgtgccgtcggtggccatggccggaggggaaatttggggatggggaaggagaggccttaagagcgcagatgcggcggcggccgggggagtgggtggtaggggtgtggttttccggccgg

SEQ ID NO: 85332 - DNA, 417 bp, Oryza sativa
  unsure (1)..(417): unsure at all n locations
  Clone ID: PAT_MRT4530_84481C.1
aattgttattttgaanngnttgggggcggccctaaaccttacagcatgcaagttttaaagcgcattgaaataaacgagttttaaacgactaacattggggacaatgagggcagagattaacggtgcatgcaaagggggcaatggccgtgggcaaaagttaatgaacgctaaaatttataaaaggcggccgggataaccaccacttaaaggatgctaatttttttttgggggtagtcttgggcaccttgggaccgggtgggtcctggttcttcacgttcttgaggaggccaacagagaccgtttgcctcatgttacgtacgggaaaaggaccaaagggcgggtgctgatagaagggctacacaaccatgggcttggggggaacaatttgaaccataccagcatcaccgttgttgagga

SEQ ID NO: 85333 - DNA, 1317 bp, Oryza sativa
  Clone ID: PAT_MRT4530_84482C.1
ggaatgaaacttgggaaataaaaatggaaattcaacaaaacttgaaggcaatttggcatggtaatgagtggtggcggcagtagagaagtgctattgccaattagtagtactccagtagcaatgaggagaaactaatcaactaataataatggcagcaacaatcatccattctccagtccattgtgaggagaaaattagtgagagaagacgattgttgattcacattcaccatccaccggtgcggagctgagagagaagaggagagagggagcaggagcaggagcaggagctgctcagtgggagcgggcggcgtagcgctcgacattttggtcgttgaggttgatgccgacatggcgtccccgaggccagcgctgacgtcggcgaggatctccggatcgctgtagtgggtgacggcctgcacgatggcgcgggcgcggcgcgcggggtcgccgctcttgaagatgcccgagccgacgaagacgccgtcgcagccgagctgcatcatgagggcggcgtcggcgggggtggcgacgccgccggccgcgaactgcacgacggggaggcggcccagctgcttggtctgcatgaccaggtcgtagggcgcggcgatgcgcttggcgtaggagaagacctcgtcgtcgtccatgttgcggagcgcgcggatttcgcccatcacggagcgcacgtggcggacggcctcgacgacgttgcccgtgccggcctcgcccttggtgcggatcatggcggcgccctcgcggatgcggcggagggcctcgccgagcgtcgcggcagccgcagacgaaggggacgcggaagttgtgcttgttgatgtggtgggcgtcgtcggcgggggtgagcacctcgctctcgtccacgtagtccacgccgatggcctccaggatctgggcctccacgaagtggcctatgcgggccttggccatgaccgggatggtgacggcgcgcttgatgtcgcggatgagcgccagggtcggacatgcgcgcgacgccgccctgggcgcggatgtcggcggggacgcgctccagcgccatgaccgcgcaggcgccggcctcctcggcgaggcgtgcctgctcgggggtgaccacatccatgatgacgccgccgcgcagcatctgggcaaggcccaccttgacggagaaggtggcggacttgtggttggagggctcgagcaaggcggcaccgttggtgccggagccgtagacggtgacgacgcctgtgccgtcggtggccatggccggaggggaaatttggggatggggaaggagaggccttaagagcgcagatgcggcggcggccgg

SEQ ID NO: 85334 - DNA, 1212 bp, Oryza sativa
  Clone ID: PAT_MRT4530_84483C.1
atggtgttcccttcagtgcctgcctacctagatccacctaattggaataaccagcaagggcagccgcccaggccggcgaacgtaggcggcggcgatgcacagcacctgccggtcgggccgaccgcagctgcggcggcgccgggcgagatcggggggctgccaacaagcagctcgtcggccagcgcggcggcggccgcggcgcagcaggcgcggccgaactcaatggcggagcgcgcgcggctggcgcgggcgccgcagccggagccggcgctcaagtgcccgcgctgcgactccaccaacaccaagttctgctactacaacaactactccctctcccagccccgccacttctgcaagacctgccgccgctactggacgcgcggcggctcgctccgcaacgtccccgtcggcggcgggtgccgccggaacaagcgctcgggcaagtcctcctccgccgccgccgccggcgcgtcgtcctcctcctccaagccgtcctcgtcggcggccaggcagctgcccggcggtggcgcgtccccgatgccgtccgccgcggcgtccacgcagccaggaggcgccgccgccggcgcgatcatcccgccgtcgggcctcagctccatgtctcaccacctcccgttcttgggggcgatgcacccgccggggcccaacctagggctaaccttctccgccggattccagcctctcggcggcatgcaccaccacgtggacacggcggaccagttcccggtggcaagcggcggcggcgccaccattggcgcgtcactcgagcagtggagagtgcagcagcagcagcagcagcagccacaacagcatcagttcccgttcctcggaggagcactcgagcttccgccgccgccgccgatgtaccaactgggactggaagctactcgagcagcaggcaccggagcaacggcggcggcggcgttcacgttagggcagaccagtgctacagccaccacgtcaaggcaggaaggttcaatgaaactggaagatagcaaagggctggagatgagcctgcagaggcagtacatggcggctctacgccaaggagatggtgtctggggtaacaacaacggcggcaatggcggcagcgacggtggcggcaatggcggcggtggcagctggacaatgaacttccctggattccattcgtcatcaggcggcggcggcgatgatggcggcggagtgttgtag

SEQ ID NO: 85335 - DNA, 357 bp, Oryza sativa
  Clone ID: PAT_MRT4530_84484C.1
attatatacccatttattttttatgttatctatgtcattatctacttcgttcatggttggtccggtggaaaacaaattattcatggggccgttgccactgacagacaggcccgaggagctcaagaccagcctcctcacaacaacagaggaaccatcacagaataacaccgggccattttcaactgggagagcagggtcattactacatgcattaacaaggcggcccgcagcagcaacatgttatatatgggaggccgtagcctcctcaagggggggtggggccgggggacacacagcaaaaccacttttttgaggccgagaatgaccgcggagggcggggctgaacccccccggggc

SEQ ID NO: 85336 - DNA, 187 bp, Oryza sativa
  unsure (1)..(187): unsure at all n locations
  Clone ID: PAT_MRT4530_84485C.1
tccacgcgttcggtagtccatcgtgtctcgcgagatgacccggcggtacatnacctttttgttctcctacnccgacaccgtactcgtcgtcttcggcgcctgctccgtggtgctcttctgcgcgtacgatctcttcaaggaccccttcgtcagcgtcgccgtcatcgagcaagtcgtgtcccccgct

SEQ ID NO: 85337 - DNA, 342 bp, Oryza sativa
  Clone ID: PAT_MRT4530_84486C.1
acccctgtgtgtgggagacctctcctgtgggtgtcgcgcctctggtgtgagatttttggtgtgtgtagaagaagggttggtgtgtctccctctgccagatatgtccccagcgccagtacatttcacagggagatgttctctggttgttaagacctctgggctctttggaaccccgtgtggccgccgtgtggtttccggtgtctggtccaacctctgtctgtccctccacatggggatgtagaaaaggagtctcacaggagattccttgtgtccccacacggaagacccacttttagatattcaagttttccaggtggtgttgtccagttagagatccaagtg

SEQ ID NO: 85338 - DNA, 246 bp, Oryza sativa
  unsure (1)..(246): unsure at all n locations
  Clone ID: PAT_MRT4530_84487C.1
cgacccagcgtccggtctcatttcaacccagcagcgcagcagctcaagccttctcgcgttgcagcgccgcgccgaggaggtgtttgttgatttgtggagatggtggggggagaggtcatgtgcgaggcgtttgcgccgtggttcttgggtgtgcgcncgtccccgctcctctttttttccccctgtcctttcttctctgtgcgggccctcttttttttccccccccccttgtcctttttttctttt

SEQ ID NO: 85339 - DNA, 256 bp, Oryza sativa
  Clone ID: PAT_MRT4530_84488C.1
cccacacgtacgcgttgattcacgccctggatttctatctccagctgtatgacaagctccggcgagcctgtggcctgactgtggataggacttcgacaacccccttcaaaccgtcgtcttcgacgtcgtataccactcacgatagccattgccattcttactgacattggcaatgatctttgttctggtctgatctattgtcataattattttcatgcccataatataggggttaaactagcttcttcattgtatc

SEQ ID NO: 85340 - DNA, 2106 bp, Oryza sativa
  Clone ID: PAT_MRT4530_84489C.1
gggctgagtacttaatacatgttgagacgatgagaagcagttatttttgttttacatatgaggctattgcaaactctaatatagctggcatatgcttacttggggacgtgaccctccccacatttggtagccttttctgcgatacagtatttaataatttaagggagcacttttttaactaatttaactttttttggcgaatgagagtaaacatccaggaactataattatcatacagaaacgatcaccacttgtataattagtacgttactatttgcatcatttgattatattgaatgcagtttgtgttactctggatgatgatcttcagagaaatcaggttcttcaggtcgctccttctgtgcttttttgaatattgatgctatttttgagacagtaactgtttctctgtgtgatacagtgctagaagaaccattaatgtcctcacatctcgtgtcattgaagtcattgaccaatgagaagaatgacttccacctgttgcttagacctacttctgccattttttgtcgattctggcgccttcgccatgctgattggataaagcgagcggcccatgttctccactggtatgagtgtaacctgaatgtgtgctgcaggtgcttggaatgcatcatcctgaatgtgctggctacgcacttaatgtcatcggcttggagggagaatgcttccaattcggcaattgttttaacagttcttgttgatgatggatagctgtctctagagctgggaagcaatgcccatgtaagcaactcctcaccacaaaaatcacctggttttaggatgatggagttgaagaagccagttctgccaccatctgttgtggagctctctagcttgccacgaataatgaagagcatcaccttgacagggtctccctcacgggttatgtaggtgccttcagtgcgaaggaagtaggtcatgcgttcacagatggcatcgagtagttgatggtccattgcagaaaaaaatggcacacgttcgacaagatcaaggcacaggtaccgttttatatctcgatgaagatctgctggtagttgtctcaagattgaatcctcttcaactccctgcatgttgcctattagttgtgcaaacaaaccaatgctgagaagggttaaccctattgcaaataggttttcaccaatgaaggaactagtcaccaaaggattgccatacgtgagtcctttgtgtgccattctgtcctcaatagagcactgtgtttcccagcatgtcttttgtcgatccactgcagttagatagaatattgctccaaccacgtgacttgccaccaaataaagaactagactgtagatagctccttcccacccattttttgcgatgaaacccaccatctccatgatactaaggctgagaagaattacgatgtataatctgatggcagattggaccaatattataagaaagaaaggggcattgatatgcttgaagctgatagatggcatggctatccaaacaagaacttgtggaactggcaatgcagctactaggtcaatgaagaagtttgttctgatgtatctatttgcaatctttttaggatctgtgacaagctcacccctgccaagcactttggagcttggatcaacatgtgcagtggagaaacttatagcaatatgagctatgaagaatatgtcaagaaaagaccgtagacaaacgaggaagacacggttccacatcagcacaacattgcctccagggcctagcatactctcttccgcgggcttatagccagattctgggtaaaatccgtttaacttgaagcatgctatgcttgctgctcattgttttaactgaacctgtggccaagttattcttgtctgtgtcttgcttcggttctcaataagtttgaagccttcagtgtaaaaaaaatcaatgtaaatttttattgttttaactgaacctgtggccaagttattctgtctgtgtcttgcttcgttctcaataagattaagcctcatatgattctgcaatcattgtacttaaagactggaggtagttgccagtgacttgacaattggcagtaaattaataatagtcattgagtaaaaaaaaaaaaaaaaaaaaaaaaaa

SEQ ID NO: 85341 - DNA, 405 bp, Oryza sativa
  Clone ID: PAT_MRT4530_8448C.1
atggttattataattacttcctttcttcttcctgatcttgtcctcctcatctctagctcatatttacttacaagaggacaagcaacagaggtgctagagaaaggcaacatcaggctgcaggaccgtgaaatcgcaggattagaagagcaaatccggacgcttaggatgaagcttcagaaccacgagagctacgaggagcagaagcgcagggagtactacaacctggaaagcgaatacaacaagctgcacagcagctacagaaacctgcaagcctgccaccacaacctgcaaaccagctaccacaacctggaggccaggcacaatgctctcaggtggcaaatgagttggcccggccgctccggccgcctatcgaaccgcctgcgcctgtcgctgccgcaggtctaa

SEQ ID NO: 85342 - DNA, 736 bp, Oryza sativa
  Clone ID: PAT_MRT4530_84490C.1
gcacgtattgtaatcctttggtgactagttccttcattggtgaaaacctatttgcaatagggttaacccttctcagcattggtttgtttgcacaactaataggcaacatgcagatacacatgagatctctttctaaaaatactgaagattggagaatgtggcaaacagaaatggaagattggatgatagatcatcaaatacctgatgagctgcgataccgcatcagtcaattcttcaaatacaagtggtttgctacgcagggagttgaagaggattcaatcttgagacaactaccagcagatcttcatcgagatataaaacggtacctgtgccttgatcttgtcgaacgtgtacgtgccatttttttctgcaatggaccatcaactactcgatgccatctgtgaacgcatgacctacttccttcgcactgaaggcacctacataacccgtgagggagaccctgtcaaggtgatgctcttcattattcgtggcaagctagagagctccacaacagatggtggcagaactggcttcttcaactccatcatcctaaaaccaggtgatttttgtggtgaggagttgcttacatgggcattgcttcccagctctagagacagctatccatcatcaacaagaactgttaaaacaattgccgaattggaagcattctccctccaagccgatgacatttagtgcgtaaccagcacatttcggatgatgcattccaagcccctgc

SEQ ID NO: 85343 - DNA, 636 bp, Oryza sativa
  Clone ID: PAT_MRT4530_84491C.1
atggccgagggcgacgagtgggctcgccaccgctgcatcgtcgcccctgccttctccgccaccaacctcaacgacatgatcggcgtgatggaggagacgacgtcgaagatgctcggcgagtggagcgacatagtggcgttgggacacagctgcatcgacatcgagaagggcgttgtccggaacgccgccgagatcatcgccaaggccagcttcagcatcgccgccgacgacgccacggcgtggaagctgggccgcaagatcgacgcgctcctgctcgacatcatcgagtcgcggcggcggtgtgaaggcggcggcaggaagacgacgacgacggacctgttgtggctgctgctggccgggaacgaggcgagcgccgccgcagagaggaagcttacgacggcgctggcgctgtcgtggacgctactgatgctggcgacgcacccggagtggcgggcggcggtgcgggaggaggtggaggaggtgaccggttggtctggccccatggacgcggcggcgatgggaaagctcaccaagatggggtgcatgctaaacgaggtgctccggctgtatccgccttcgccgaacgtgcagaggccggccgcgtgcgatgcggaggttgtgcgcgggaagaggtga

SEQ ID NO: 85344 - DNA, 743 bp, Oryza sativa
  Clone ID: PAT_MRT4530_84492C.1
accacttgtatttgaagaattgactgatgcggtatcgcagctcatcaggatctgtgacaagctcacccctgccaagcactttggagcttggatcaacatgtgcagtggagaaacttatagcaatatgagctatgaagaatatgtcaagaaaagaccgtagacaagtgagtataatggcgagatgatggtccattgtcatacacaactggcggtctctgcgctcaacaattggcaggaagaagaagagaggatcaatgaagtgagaagcaacgcatgagacgaggaagacacggttccacatcagcacaacattgcctccagggtctagcatactctcttcgcggcttatccagattctggtaaaatcctttaacttgagcactatcttgctgctcattgttttaactgaacctgtggccaagttattctgtctgtgtcttgcttcgttctcaataagattaagcctgcagagtaaaaaaaatcaatgaaaaattatacgacctaagtacaaagaactttacttttttgtttcctggagatgtttatagttacagcaatgttggtcaacatatgattctgcaatcattgtacttaaagactggaggtagttgccagtgacttgacaattggcagtaaattaataatagtcattgagtaactcatgtgttgctacatttgtaatgacctaattgtttataatcaatcttgtcagtactaaaaggtgagtatcaacattttctagt

SEQ ID NO: 85345 - DNA, 802 bp, Oryza sativa
  Clone ID: PAT_MRT4530_84493C.1
agcaactgattttaggttcgtttcgctaatccctagtaatgattttaggatatatatatataagctgtcatgcatttatcaacaccgattgaacctcgacaactaatctttcgaagtatctaatgattgcagagcaggggggttcatgtccttggaaaatttaatatattttgctagaaatgacccagtatgtttctattaatcatgaacatttactccgcattagtctgctgttattgggtgattcgattaggcacaatgctcaatgtctgctttaacatgcaggattcctttcacagtttattacacaaggcggatggtaagagatctgaatgggaatatccctttgcagtagctggcgtgaacatatcttatatgttagtgcaaatgttggatctgcaatcaggaaaaatgggcacaaaagtcagttctcaatttgttcaactacttagagaagacgagatggcttttgataaccttttctgtatggcctttcagatgcttgacgctcagtggctcacaagacaagctagttatatggaattcaatgaggttctaaagtccatgcgtattcagttagaacaagaacttactatcggaagcatttcttgtgttcaggagatgccatcatttaggttgctaaaaaggtagccatgtttgttgtttacagaaaggagtgtatcttacttgtcagtaggatcttgtgcatactaccgattctttcattggttgtacaacatgacacactgtaagattatttatcatagaataataaacccaggtatatatctggtactttggt

SEQ ID NO: 85346 - DNA, 2449 bp, Oryza sativa
  Clone ID: PAT_MRT4530_84494C.1
gcacgaatgactgagatattgtctcctacaaaaaccatcctacttgcagattgcagcagtaaaaaggcccacgcttttaacccaagaaagggtggtggatgtaaagatgcaaaggggatcagcttaccttgccaaccctgtgattctaaagtgttttcacatcctcttgcaaacagaaacagaaatggtctagtaataaattgtgttctacggcagctgcagcagcagcagcagcaactgcacaaaataaagtcagcagcaaggcagcaattcattgttttttttttttttttggcttgcaaagcttttgctttgttttaggtgcttcttttccactcctttactgttcccccacttttccttgctttgtcacgcacacgaaaagctcctgcctttaccttatctccgctcgccttccctcacccccgtcgtagtgggatttggtggctgctcgcctctcgcgtttcttttgctggattggggcgttcttgggagctcgggaattcgggtggtttggttgggtttcgtggagaattgcggcagatctttgagatgaactgcgggccgcccgaccagttgccgccggcgacggcgccgtcgtgcttcctcaacctcaactgggaccagtccatggacgcggcggcgggagggcacctcgacccggcgctcagctccatggtgtcctcgccggcgtccaactcgacgggcgctctccacgggatctcgccgcagccgcactacggtggcgggacgccgctcagctcgccccccaagctcaacctgtccatgatggggcagttccaccactacgccgcgccgccgcaggtgggcggcggcggaggcggaggcgggggcctgccaatcctcgagaacctgatgcccatgggccacctcgaccagttcctcgccgaccctggcttcgccgagcgcgccgcgaggctctccggcttcgacgcccgcggcggcggcggaggaggaggctacggcggcgccggcccggcgcaattcggcctccctgacgccggcgcggccggcgcatcgaaggagatggagctcgggaacacccgggacgagtcgtcggtgtctgatccggcgcccggcggcgccgagattccgcccaagggggcttccgacggcaatgcacggaagcggaaggcctccgggaagggcaaaggcaaggacagccccatgtccacctccgccgccaaggaggattccagcggcaagcgttgcaaatcgacggaggagagcaatgcggccgccgaggagaattccggcaaggggaaggccgcgcagagcaacagcgagaatggcggcggcaagaagcaagggaaggacagctcgtcgaagccccccgagccgcccaaggactacatccatgtccgcgcccggcgcggcgaggcgacggacagccacagcctcgccgagagggtgagaagagagaagataagccagaggatgaagctgctgcaggatctcgtgccgggttgtaacaaggtggttggaaaggctgtcatgctcgatgaaatcataaactatgtgcagtcgttgcaacggcaagtcgagtttttgtccatgaagttggccactgtgaatccccagctggacttcaacaatttgcctaacctccttgctaaagatatgcaccagtcatgcagcccgttacagagctcacattttccactagagacctcaggtgcgccgctgccctacattaaccagcctcagcaagggaaccctctcggttgtggcctgacgaacggcatggacaaccagggttctatgcacccattggacccggcattttgccggccaatgggctcgcaccatcctttcctcaatggggttagcgatgcggcttctcaggttggtgctttctggcaagatgatctccaaagtgttgttcagatggatatggggcaaagtcaggagatcgccacctcttccaatagctacaatggatcgttgcaaacagtccacatgaaaatggagctttgacatgaccaaataaaggttcgatccaaagctctgacgcccattgtacatacagagaagtcagcttgccgcggcagcactctgagattcaaccctaacaatgttgggccctagcagtgttttagcttctaatttcccatcttggtgtaatgattctttgaacaaaaatgaaacgcaccatgtacggtagtcgggtgtagtatatatatgtatgctacaagatcgtacataagtcgggtgcagtatatgatgcttcattcagacccttttaccctctcaagcagagagggacgacgtgtaatatcattatttgtattctcattatatttgtagctgatatatatctttaagatccttcttcctgtccatggatcgatctccttaagctgaaactatcccctttttttccccaaaaaaaaaaggggggctcgtgccgaattcctcagcccgggga

SEQ ID NO: 85347 - DNA, 1494 bp, Oryza sativa
  Clone ID: PAT_MRT4530_84495C.1
acagggggtcatgcttgaaatttataatttgcaaaataccatatgttcattatcagacattactcgcattagtcgtgtattgggtattgataggtacatgctcatgtctgtttaacatgcaggttcctttcacagtttattacacaaggcggatggtaagagatttgaatgggaatatccctttgcagtagctggcgtgaacatatcttatatgttagtgcaaatgttcggcctgcagatctcctcttctccgactcaatcattcgccctgcgctgcacaaggggaggggaaggaaaggaaaaccaattggatctctcaattaatcgggtcaggagcaagcggcctccacgcaacgcgggaggtaatcaggcatgattcatgcaatacactgactgaaaaaataatatggcttcaaaagccattaaaaggaagccttacactgctgatattgatagaagcgaaaaacagatggagacgatcataccagattctgtaagagaacctcttctaggaaacagaactcatgaaagcaaatccgagagacatgagcctaatatgcagccaaatttatgggatggaaaaggacaagagcgccttggttggatgcatgttatatcgacttttattgctcaatctgtaagaaagataggaaatgcgctctctcagtttggaccattgctagcaaagttctttagtaggtcttgtgcttcccatggttcacatgatgaacaggcagttctacttgatctcagtccactacaggaagagagactgaggttcttgagacagagattaaatgtgccatttgacagttcctctgtcaagcatcaggatgctctgaaagaactttggagattagcttatcccagccgacaacttcctcctctgaaatcagatctatggaaggagatgggctggcagaattctgatccagcaactgattttaggattcctttcacagtttattacacaaggcggatgctctatgcagagctacagcttatctctttcacttcttttgtaggaaaaatgggcacaaaagtcagttctcaatttgttcaactacttagagaagacgagatggcttttgataaccttttctgtatggcctttcagatgcttgacgctcagtggctcacaagacaagctagttatatggaattcaatgaggttctaaagtccatgcgtattcagttagaacaagaacttactatcggaagcatttcttgtgttcaggagatgccatcatttaggttgctaaaaaggtagccatgtttgttgtttacagaaaggagtgtatcttacttgtcagtaggatcttgtgcatactaccgattctttcattggttgtacaacatgacacactgtaagattatttatcatagaataataaacccagtatatatctggtactttggtaagtgttcaatgttttctggggtaacaatttaagtatttctctaatgaaaattacctgcaacaggtttgcttct

SEQ ID NO: 85348 - DNA, 198 bp, Oryza sativa
  unsure (1)..(198): unsure at all n locations
  Clone ID: PAT_MRT4530_84496C.1
aagcaaattgttcccagttctccgacgttttcagtgattctaagttgcacatcatttgccggcagtcacattcagcgcccctcacacagcattgtgttgtcatcagngtccctctggttaatccttgtgcacccaacactcattttcagtcaacgcctatccctatcaggttgttatccatcctcattgtgatcctag

SEQ ID NO: 85349 - DNA, 254 bp, Oryza sativa
  Clone ID: PAT_MRT4530_84497C.1
ccctgcgcctcaccaactgccacgcacatgcatgctccctgaggatcaccaccacttgcccctgcagccctaacaccagcactctacatccggagatgcccccaagctggcaaagacaagcacaacgacaagatcatcctcgcacaaggcaattcgatgctccacactacccacacttgccgataatccaagacagcttgtccctcctccatggatcacctgccgagcctaaacccgctgctacccaagactgc

SEQ ID NO: 85350 - DNA, 1933 bp, Oryza sativa
  Clone ID: PAT_MRT4530_84498C.1
gtgacaaacaaacgattgattgattataggccgtgcgatctacacaaaagaatttcatggatagtacaaaagaattgtagggatgagtagtgaggactgaacaagaatgtaacaggcaaagaggaactatgaacagcacgcagccacgcagggtagcaaaagctgaatcaatgaattctgtggttcaaaactgaagagcgatcaggtaaacgcgagaaggaagtcatgtgatccggattctcgtaagaatgctttgcaacttgttagcacagagtttcttcacgatcttcttggcaggaaggtcaccggagtctgcgagtcctttcaagctgacaaaatgttgagacgatatgatcttcttccttccagcactggtctctgccaacgacacgaggcaagaaatggccaaatccttcgccatcgtcttgccgtcaccgtgctcaagcgactgcagcagccggttcagattatcaccatcttggatgaaaactacacggttagagtgaagcaacagtaggttgcagagtacttgtgctgccatctccctgacctgacaagatttggctccaagtgagcttaccagggcagtcatgaaccctgccctgccaaccatcttgctgtattcctcggagatcctcgttagccgtaccagaatgttgagggtgcattccaggacagcatagtcaacattgttgagataggtttgaagccagctaagaaaattggagctgatgagatcatctgtcagagctttggaagggaggcagaagaatgcaatggctgagagagcaacctccctggctttggatgagtatggaagatcagggttcatcagctgagtgagtgattggatcatccccatgctgattgctgcttgtctgacattggcatcagccaaggccatgtaatggagcagctcaactgatccaactttgcgttcttcctccttttgtcgggacagcttcaccaactccataactgcaccttgttccaccatgaacatcttcacctcctccaccctgctcaggttcttcagcaccgcgaaagcggagctgaccagcttgcccctgctatcgacattggcgcagacgatcaggagcacggtgacaccgccttgtgcgcagacggcccagacgttgtcggagttgctcgtcagctccctcaatgcatgagctgctctctcccttgatgaaacagtagtgctggtgcagcttggactatccagtaactggacaagtggagcaaccacacctgctttcacaagcattcctctgtaagaatcatagcctgcaataagggagacaattcttgcagcctgttcttgaatgcatgcatcccctgattcaagaaagctgatcaggagagtgatgctattatcaatgtcaagagctacaatcttgacatactcgatatcttcagataggagctctccaatggtgaccagggcttgttttctttgagccaaatccccaatcctcaccctcaagaagagatcattgatgtagaacctcttgttgcttaggcttgcaccaatggcaggcctcgttgcgatgacagcttgagaacgcacagaaattctggaggaaaccatctccttgaggtccttcaggtggatatcaagcttggagctgatgctgtccaaatcactcctcagacgaagccttccaccattgtaagattcatcgctgcattgagaagcaatagcttgaatatgacttactgttgctgtagccgtctgaagaaactgaacaagaatcacattttcgttgcagctgccgtcgtctcctggcgcattcaggttggaacagagttgctgaagcttgtacttgatggattgccacttgactgggaactgaacaatcgaataagccattgatgctgaagccgatgcctttaaaatttgcagcttctcactgcattctgctacctccat

SEQ ID NO: 85351 - DNA, 1014 bp, Oryza sativa
  Clone ID: PAT_MRT4530_84499C.1
atgggtgaactaaccaagaaggtcaccatggagaaggaggaggagcatggaggtggtatggctgctgggaaggaggagaagcagcagccaactctgaaaaagcagcagcaggtgggaaaggtgaagaagaagttcctggattttgcacaggagttgacatgggaggagaaggtggtgagcgttcttgacatcgttcgccgctatcagttagctgaatacgaccccaagttaaaagaatttacccctacccgggtcagtttctgtttctgcaacatggcattctttgaccacgacaaagagtcaaaaattagtcctgggtctccgattcgcactatcccttcctccaagtttgtgatgttggaaggctctgttaatgtcattgcaatcaaggaggatacactaactcttacaggcccaaagagagggcttgctaccaaaggatccatgtattttgagttcaatttgaagattaagggggatggggctactgacaaagatttcagcaaaggtttcatagaacatgatgccgtcgcttatgaaaagccactcaagactttagaactagaaagtttcatgagtagagtggcgtttatctatacacctgttccttatgctgtgcaagctacccttgctgtcaatttcttggaggggctgtcaaatttcaccggtacagtaagtgcttggactactgggaatgttgaaaatgagatcatcttatatgacagtagagtggaagggacagagacaactgttaggaatgatggacgtgttacattaactcgtaatatagtagctgtcgtgtgtaaacacaagctggtgctcaaagtttgtgtgtttgagggtggcagtgaagttgcatgttttaagtttgttctagggcatcgtaatgaagaatgtactcggaagaaaggcccttatgtgctgcaagtgaaggttaggtggattggaatcatagaacactacaatcggaaaatgtgggagcgtattgggagatttggaaatattttatggtga

SEQ ID NO: 85352 - DNA, 583 bp, Oryza sativa
  Clone ID: PAT_MRT4530_8449C.1
agtggatccccgggctgcaggtcgaaacatgatatatgccatttaaaccttagtgccctttcagttttaagagtagaagccatgtcttctggaggctgtcttttgattttctgtcaaatggatcgtctcctttctagagatctaaaatagacttgcacaaaagcatgctgtgtatgctccccaattcttctccttcaactacacaaaaacacagaagataagcttattaatgaagagcggagggtgcctgtttaaattttacctggaactaatatgaaatgaaataagcagcaataaaacgtgacagggatttatcatggcattgaaatgctacctcacagtgttacatgattatgatgtttctttcttctttcttttccttttggcatgataaaatgaaaacatgataaaagttggtttaattatgaaaaggccatggattttctacagcattatctgtgatgacttatttgctactcttcatgcactcaatgctaaccaaatgcatgaatagaatgagaaaatagtcccaggtattgggaaactatatcagacacatgcccattcattctaacaacatttc

SEQ ID NO: 85353 - DNA, 1298 bp, Oryza sativa
  Clone ID: PAT_MRT4530_844C.1
cgatttaatgtaaagatagtgttacttttagcatccagacaacacgcggcgggacgaccatggcggcgtccccgtcctcgccgccgacggatgactgcgccgccgcccacctccccctcctccccgccgccgccgcggcctccgagggtatcctcacgggcgccgacctcgccgcgcccgccgtcgggtcccgacggacctagccggcgtggtcctcctccgtctgccctcccacgccgaccgcgtccgcttcggctccgtctgccgccaatggtgccacgcggcgacgacggcgccgcctccgctgcccccggctctcccgtggctcaacttccacgacggtaccctccagagcttccccggcggcgagcgacgccgcttcagccgcctcaaccggcacacgatctgcgccggctccaccgccgccggctggctcctcttcaggcggccggggcacggccctcgccgccgccactacctcaagaaccctctcaccggcgaggtcgtgcgcctcccgggccactgccactgcggcgacccggcccgcctccgccgccaacacccgccgggatcccccaccgcctacttctacatccgcaagtccgccgccatcgccgccgcatcctcggccgcagccaccaccgccaggctcgtcggaccttccgacggacgtcgccatccttccgtcgccgccgcatcctcggccaccgccaccgccatgctggtcggacctcccgacggacctcgccggccagtggcgcctcggcgcgctccggcaacacccgctgccgccgccgccgccgtggctgctcatcctgcgtagcccctgcgtctaccagagcctccccgacggcgagctccgccccgtccccggcgcgaattcgagccgcgcgatcccctacttctcctcctacgatgatggctggctcctggagtaccaatgcttcggccgccgagacaggatccgagacggcggccgtcgccgaggagtcctccgcggtgcaagctggaaaccacctcgacggagcttgacctcgccatcgccaacatgggcacggccctccacctccttcgccgccgccgctgcagctggagccaccgccaggctggtcggacctcccggcggacctcgccggccagatcgtctcctcgctgccgttccaccacgaccgcctcagcttcgccgccgtctgcagccagtggcgcctcggcgcgctccagcagcgccagctgctgccgcctgaaacccccattgtgactggccttatatgagtgtggtgaagggaggaacgcgtgag

SEQ ID NO: 85354 - DNA, 1232 bp, Oryza sativa
  unsure (1)..(1232): unsure at all n locations
  Clone ID: PAT_MRT4530_84500C.1
ggccgcaaacattgatcctcatggtctcggataaaactgaaattcacagcagagttggaagcagagttacggtcacaaatacacaaaacggtgtagacacagtgaaaactggacaataattgttgtaaatcggcaaattaggtttttgtagcgatgattggggagtgtatccgaggctctgagcagggtggacgtttaacttaggttccagccttccgacgaccaacttgggcaacgaatccagccttgataggagcaacagatcttgaagaaccacactgttcgcaacgaaggaagaacaacctattctccttagaaaggatggtatcaggactcttgcacccattgcatatgacatactcattgatatatctcctaagtatggcttcaaagtttttaggagcaaatcttccttttataaccaatctttgttgcccatcaagggatccacttgttcccatctcagcaagtaaaaacatcatcacatgttcaggttgcctatgcattgttttgcacaaatccatgaagttcacaaaaactgtcttctttgtgccttccctaagaacttgaggaggcctcataacagttcttcgtctatcaccagcaagatcaggattattctcacgcaggatattaaatactctgccaagcagctcttcatatttataatctctgtcagttccttcccaagggtatcgagttgcacctccaagcacaatcccttctccttcttcatcctctccgatttgatcatctatagcatcttcaccatctccagcttcagtaagagatgtatcatgctccacatgcttcttcttcttctttttcatgcctgtaaaacttggctcaccagtctcagcgactgtcaagctctcagttttctctgccaacttatccacctcatcagatggatcttggatcacaaccttcttcttcttctttttcttggttgggtcaaaaggagtaagctcggagacctcctccttcctctccacctgctcctcgtccgccatggtgacgctggccttcttcacacggcgactcgatccgcggcgcggcgggctggggacctgaaagggcgagagggaggatgacgacggcgggcggcggcggcggcggcggcgctcctgctagggtttctgatgggcgctttgctaggctttactgaagctatcctttttcttcgactcctctgtttttctttctataccgagcacncagntacacgctcc

SEQ ID NO: 85355 - DNA, 419 bp, Oryza sativa
  Clone ID: PAT_MRT4530_84501C.1
gcacatgtccgacaggaataagctatccgtcattcttactcccgcaaggtcgaacattggtgaggcgccaatgcgtacgccgtggcgcggtcagctccgctgacgagcaagtctgacaagactgctgccggcagctcgtcgccgtctgctaccagatggtgcacgtgcgcgtgcgctcgatcacatgctgttaggcatctacagggagctaggcgccaccagagtgccaacaccccatggcctaaagcgtccccgcctgacggagaggagacttgaaacaccctaggtagagcctcccggacttatgtaacgaggacatctctaatgggcctggtggagtctgctactgacttgcgtattctaagaccccaagaaccagacactatgctactataacaagctgtgagtgtgttactatc

SEQ ID NO: 85356 - DNA, 861 bp, Oryza sativa
  Clone ID: PAT_MRT4530_84502C.1
atggcggacgaggagcaggtggagaggaaggaggaggtctccgagcttactccttttgacccaaccaagaaaaagaagaagaagaaggttgtgatccaagatccatctgatgaggtggataagttggcagagaaaactgagagcttgacagtcgctgagactggtgagccaagttttacaggcatgaaaaagaagaagaagaagcatgtggagcatgatacatctcttactgaagctggagatggtgaagatgctatagatgatcaaatcggagaggatgaagaaggagaagggattgtgcttggaggtgcaactcgatacccttgggaaggaactgacagagattataaatatgaagagctgcttggcagagtatttaatatcctgcgtgagaataatcctgatcttgctggtgatagacgaagaactgttatgaggcctcctcaagttcttagggaaggcacaaagaagacagtttttgtgaacttcatggatttgtgcaaaacgtatgatctcacttttttaccactccataccatatgctctaggcctgcttttatttcagagaagataaattaccatgagctaactgaaatcatcgtttacacttccagaatgcataggcaacctgaacatgtgatgatgtttttacttgctgagatgggaacaagtggatcccttgatgggcaacaaagattggttataaaaggaagatttgctcctaaaaactttgaagccatacttaggagatatatcaatgagtatgtcatatgcaatgggtgcaagagtcctgataccatcctttctaaggagaataggttgttcttccttcgttgcgaacagctttacatggttctctag

SEQ ID NO: 85357 - DNA, 285 bp, Oryza sativa
  Clone ID: PAT_MRT4530_84503C.1
acgtccacgcgtccgatcaaagtgatactggccaatctgaacggataggaggacattttcgacttctgataccacgtgatgagcagcccatggcgatcgctcaacaccgtattgtagcggtccacccggatctctctgaacaagatgccgccgcattactggacttacttcaaccggatcaaaaaaccatcgacagcctacacttgtgtgaaacgctagtgggtggaagacaacaactgctaccagacgctgctggcgagggcgatcatctggataaccggctct

SEQ ID NO: 85358 - DNA, 567 bp, Oryza sativa
  unsure (1)..(567): unsure at all n locations
  Clone ID: PAT_MRT4530_84504C.1
taagctgatccagccagggggttttaggatggtcttaagaaggcatgcttaactttcctgaactctcctgcaaatcttaggcagtcatggctaatggcaccttcgaccatctgaaaaggagctgcccctctgctgtgttggagttggctgcgatgaactcggcagcttagggaggcatctatgtcgttcaagtaactgctgaaggaaagaggactactggaggatatggtgattgttgaagcataacctgtggagaagcattcctgcggtaaaagttttgcgcatggacctgtctctctttttgattccttcaggccttgtctgttgttttgtcagctactagtcgttcaatttgtctgtaaccgtggaccctcaactggtaagtagattttctctacttagtagatgttctggcgatcaccccaaaggaaggtgggatgcatggtatcatcttatcttggatatgtgatctgcctgcctttctagctttactatgggttccagtagtggaaagaggaggagcaagnctcttctgtccaaaagagaaagaccaaaaaaaaaaaaaaa

SEQ ID NO: 85359 - DNA, 506 bp, Oryza sativa
  Clone ID: PAT_MRT4530_84505C.1
agaagtaggctcgtcgttgccgtcaaggatgcatatagagtgagagtggagtcgtcacgttgcgagcgtcaagaaagtttctttcttgtccgagaaggactagtatctacccatgggtataaatatgtacacctggggtcattgtaaactattcacagatcaatacaactactctcagcgcatctccaccctctttaccgaggtttttacttatcgcggcggaacttggcaccagatgcggggttgcatcggttttcgatctccggcaaaggggtaagtcctacgttccgccagcccctgccaattatattggctacattggcggtcgttcaaggttgcatcaccacattcaacctcttggattgctctggtttagttgatatattttcctacctatttatcatatatcttagttaatctagttaagcatctttatttgatcatatcagctgagatccgtttagggttaatgttgatatcggctaaattatcttgctagattagat

SEQ ID NO: 85360 - DNA, 6851 bp, Oryza sativa
  Clone ID: PAT_MRT4530_84506C.1
gaaaaaccccaagaaaccccccatcgatccccttccatcatcaacctccggcgattcgcctgccatggcctcgccgtcgccgtcgccgtcgccatcgagcgccagcaatcagcgccgctccctgccgccctcaccagcggcggcctcctcggtgggatcctcgcccgcattcccaccccgcaagaggcgccggtcggggcgcccgcctcccttcctcgggttggcctgctacgacggcttctacccggccacggagccccacccttccgccgagcgcgccatcgccctcgctcgcaaggccgatttcgagtacggcttcgtgccgtgggtgccggaggaggaggcctggggctggttccccctcgacgcccgcgacggccgcgtcctcatccagtccaagtacttccccgatgaccccgacggcggcgacttcccccgcccccgcttcatgaactacgccgtgtgcgatcccctgttcaagagatacgtgatgctcccacccgtacccgacgacctaaccgccaatgaggggagccttgttgatttcgggctctgccttgccccctcccaagaggatgaggcggatacatcgttcagggtgatatgcgtggcacggtacaacaccaatctggtcgcgttcgtcttctcttccgtcactaggcaatggggaatcggttcgtcttccacctggagttctttgggcacagaagagccccctaaccgccatggcctgagttgcttcgactgtgttgatggctgcttctactggacagtgccttcggcggacaagattcttgtgcttgatgccatcaagatggagttctctgttatcaactatgctcatcgtgtggaggacggctttcgggcttgcattgcagttgatacagaaggaacccctgggatgctgactgttggtgaatacttggggaatagagagtttcgcttctctcgcatcgcgaaacaaagtgaccgtgaatctcccaatgaacgcctgtcggagaatattatacaattgcccagcaactgcaataagtacttcaccttaggtgcagctgagggatttattttccttagaggcattccagaagaagagaaagtagaagactcttcatcagaggatctttacatggatcctgaagaaatagaatattattcgctcaatgtcaagactgttgaatttgagatggtctgcgcgatggacatggacaagggcgaggggcacgcgaggagacccggccggtccagcagctttggcggcggccaccgcggaggcggaggagtcggcggcgcgggcaagggcggcgggggctcctccgagtcgatcaaagtagaaaagggggattcattcttgaatgaggccaaggcaagctccaacctcaagttggaggattttagaccacagcatctcaagagatcgaagttggatgccttcatgaaagcataaagaagctttgttactagcttaccgattcatgggtgttggcaccatggagtttttggcatcagaccagccttttttttattgacaactggaaaggcccatcagatgctgcccctacttggcatgcacccattaattcttccaggagctcatgctgtgtgaattttcttcatcctgttcagagttggttctgatggtaaattatggaattgtcctcgatgtttgttgccaatagttagtcccatttcgagtcggccgtagcgagtatcagggttatttttttgtgatcacaggggggagaagtctttctaaccaatgtttgttgggagtagggagaattctaggttcacagcttgatgcctcccgtggcttctgaccaatatttcattgtgataagactttgtagttgcttataacttatcggcattttcctgatagccaaatgtttcacatgactcacaaatgtctatgggttgcataaagccaacgcaacccaggttgacagcaaatgtacatccctaccattcagcaccatcatcaactgcaaccgccaacaatgatgcatcaagcagcaggcccaactcggaagaccacagtcaaaattactcatccagatactcatgaagaattgaagctcgataagaggatggactcttctgggcaaaggggtttacctagtgtacaacaacaatcccagccgggtcctaggtttgtatccacacaaacagtttcatacatcagcccatcgatgaacacaggtcctggcagtaacaaggacaacctagcagggtctacaacatctggacactcccaagtcacaggcaaaccacacccagctggtttgcacatggagaaatccggggtacaaacggtcacgataagtgcgccgcctggtaaatcagatgtgaacaagttaaaaccagctgaagatgttgtatcacatcgacaaaaggataatgaagctgtttctggggtccgtaaatcaggtgaaaatgagagcaaagcttcaccgatcacggagaagcatcccacaccagtgagccaacccttacaagctctagctgcaaatccagaaactacagcagctgcatcttttgttgtgaattctgttcctggagatgatggaaaaagcaaagaatctattcaaagaactggatcatttaaggatagcaataagaacgccactaaggacaccaggaatttatcacaagaaccacagtcagcttcatctgctgaagatttaaaggtgcatacttctgtaaaggatgtatgttgtggtgttagtctcatggaatccaaggctgctgatgcttctagcattgataggagctctgcaagatcgacctctgagagcactgagaatgttcaagaagtaggaaaatctgatgttgctattggtgattctgagaaaagtggaataactaacaaagtttcaccagatcttacaaaggatgatatttcttctggttcaactgggaatgaatcacatgaagtttgcacgctagatttggcggagcaattacctgtgggagcttctaatcctgataatttagatactgcaacttctgtaactgaccagggacagcttctcaaagaacccagctcatcagtatctgatgagaatgttattatggacagatcgcatcagagtgctgaaaaaatgtcagatttggttgatgacactgttgcttctgttgccagttctgaaactttgccagaatctataattcaaaatgccaatgctaaaggtaacacaagtggtaatcaggaaacagggtctgctacatctagcaatattcttaatgtgttgccggtacctcattcagtggcatcagaggatccactgaaaccagaaactgtgaaaaagaagaaaagaagagaaatgctttcaaaagctgatgctgccgggagctcagatctttataatgcatacaagggacctgaggaaaaagtagatttcattggtgcctcagagagtcttgatagttcttcaattgctgatcatgagctaccagacgagtcctccgaaaaggaggttaatatgggtgaggacgagggaaagaaaaaggttgagcttgatgattgggaagacgctgcagaaatgtctactccaaagttggagaggtctgattccagcaatcaaacaaccgaagctaatgggaggaagagatattcacgcgattttttgctaactttagcacagagttgtactaatcttcctgttggtttccagatgattgagtacgccagcgttctgttccctaatttggccggaaagtcttatgttgttgatcacccaagtcctggaaggggagctgacaggccagcatctcgtggtgatcgccgtggtgttgtcattgaggatgatagatggggaaagtcgggccatctttttggttctggtcgtgatatgtccatggacaatggccctccaactatgaatcaccgtggtgctccaggagttatgaggaatccacgaggtgggcttattaatgtaggaccggttgcacctcaaatgtctcgaagtggctctgatgcagatagatggcagcagaagggtatattcccatctcctgttacacccatgcaagtaatgcacaaagcagagaaaaaatatgtcgttggcaaagtttctgacgaggaagaagctaagcagaggcaactgaaggcaatacttaacaaattgacgccacagaattttgaaaagctttttgaaaaagttaaagaggtgaacattgacaatgtggcaactcttactggggtcatttcacagatatttgacaaagctttgatggaaccaacattctgtgaaatgaggaatttgagaggggtgaaagagaagaagctgaagcagacaaaactgaggaggaagaaccctgatgaagagaacattgaagcactgtgcaaattgatgagcacaattggagagatgatagaccatgcaaaggctaaggagcatatggatgcgtactttgatataatgctgaagctttcaacaagtcagcaattatcttcccgtgttaggttcatgctgagagattcaattgatctcaggaaaaataaatggcagcaaaggcgtaaggtggaaggcccaaagaaaattgatgaggtgcacagggatgcagctcaggaacgacatgctcagtcgagtaggttagctcgtggctcagttgttggttctggtccaaggcgaggagctgcacctatggattatggtcctcgtggctcagcagcagcattggcttctccaagttctcagcaagttggccatagaggaatgccttcgcattcccgagggtttggtacccaagatatccggtttgaagaaaggagtcctttggaccatagaacaactgtccttcctccgcgtaaggatgaagccatcactcttgggccacaaggtggcctagcaaggggtatgtctataagagggcagccactgatatcaaatgctgagctttcttctgctgatagtcgcaggatggtatctggtcccaacgggcctgccagccaagagggccgttcagggaataaattatactctgaggatgatttaagagagaaatctatttccgccatccgggaatattacagacttgcgactgtccttggttcattggaagatgctctaagtgatgctccaagagctgcagagtatcttggacggcttcttgcaaggtttgtggtagaaagcatattgtccttgcaggaggtgggtacattgattgaaaaaggtggagaagaacctggagagcttgtacatcatggcattggagctgatgtccttggtgcagttctagagtcgatcaaagtagaaaagggggattcattcttgaatgaggccaaggcaagctccaacctcaatccccctactgctctcgccgccccgaccaccggcggccgccgacacgatgtcctcgccggagcaggagccgatctacgacctacctcaactcgccgacgagctcctcgaggagatcttcctccgcatcgcctcgcccgccgacctcgcacgggcctccgccgcctcgtcaccggccgctccttcctccgccgctaccgctccctccacaagccggctcccctcctgggactactcggccacgacggcttccaccccgccgagccgccccacccctccgccgccgccgccgcccgagccctcgctcaggccgccgacttcaccttctcgttcctcccgtccccctgccgctggattcaacaggattgccgggatggccgcgtcctcctcgaacgcagcctatccgacaacgacgacgccggtgaaggggaactcgtcccgttcgacaccaggaacatggcggatctcgccgtctgtgaccccgtatccaggcgttacgtcatcctccccccaatccccgacgacctgatcacctccggtgagcaggagggcctcctcgttttcgagaccttcctcgctcccgccgccaaggaggaggaggagatggtgggcacgacgtcattcagagtggtggcgagggcgaactacgaaagcaaggtggtcatcttcgtcttctcttcactcaccgaggaatggcacagctccagatctgtcagttggtctctcttgaccgccgatccctggttgtcgtcgacagctcaggcgcatctatggtttttcccgcgttactacgcgcacttcgtctactgggtgatgcatctggtggatatgttgctcgtgcttgacacatccaagatggcgttcttcaccatcaacttccagcttgtttggttcaatgagaaggagtgctcaggagccaggaaggaatatcttggtagacatgaagctacaactgacgtcaggcagatcgtggcttttggagcttttcagccggtcgaccctacctcgctctatacggagaatattttgccacccgacgagctcctggaggagatcctcctccgcgtcggctcgcccgccgacctcgcgcgggtctccaccgcctgcgccgccttccgccgcatcgtcaccagccgctccttccatgtttgcccgtacttccgcttttcaccaccatcggcaaaaccatgtgtttgaagtgggatgaaaccgtgcttttgagcccatactcgtgccattcatccgtactgcttggaagtgcaggaggttcaaaatggtgctgccattctgttgacccggatgttcttgagccttgggttatatttatcacaaagtagtcactaatgtagtttaatagaccgtattaagttaatgtaagcaagacttgctgctggcaaccttattctcgaacagtaatctgttagtggcttagtgccgtactgttattctgtgctggacttcatcaatgtgcaagactgtgcaacgctctgagatgggaatgtgctggagaattggaatgcgaaaaaaaaaaaaaaaaaaggggcggcc

SEQ ID NO: 85361 - DNA, 261 bp, Oryza sativa
  Clone ID: PAT_MRT4530_84507C.1
atgcagatcttcgtgaggacgctggacgagtgcatcacgctggaggtcgagggcagcgacaccatcggcgacgtcaaggtcaagatccacgacaagaacggcatcccggcggacgaccagcggctgatgcacgccgggaggcagctggatgatcgacggacgctggccgactacggcatccagacggagcacacgcttcgcctcgccattcgtctccgccgccgcggccaacctcctcacactcgcgctcaagcacaatga

SEQ ID NO: 85362 - DNA, 461 bp, Oryza sativa
  Clone ID: PAT_MRT4530_84508C.1
tcgcgatctagagggaattgtacaaaaagaggatgttgacagaacgcatcatgcatgaatgcattaaaaaattgctgggaaattatcagaaccctgatgaagagaacattgaagcactgtgcaaattgatgagcacaattggagagatgatagaccatgcaaaggctaaggagcatatggatgcgtactttgatataatgctgaagctttcaacaagtcagcaattatcttcccgtgttaggttcatgctgagagattcaattgatctcaggaaaaataaatggcagcaaaggcgtaaggtggaaggcccaaagaaaattgatgaggtgcacagggatgcagctcaggaacgacatgctcagtcgagtaggttagctcgtggctcagttgttggttctggtccaaggcgaggagctgcacctatggattatggtcctcgtggctcagcagcagcattggct

SEQ ID NO: 85363 - DNA, 744 bp, Oryza sativa
  unsure (1)..(744): unsure at all n locations
  Clone ID: PAT_MRT4530_84509C.1
cttatatcaaatgctgagctttcttctgctgatagtcgcaggatggtatctggtcccaacgggtataattctgcttcaactgcaagagaggaacctggctcgagaattcctgatcgctctggaagaatagcaccaaatacacagtttgctggaccatcgaacaggcctgccagccaagagggccgttcagggaataaattatactctgaggatgatttaagagagaaatctatttccgccatccgggaatattacagtgcaaaagatgagaaagaggttgctttgtgtattgaggagttgaatgctccaagtttctatccctctgtcgtatcactgtgggtaaatgattcttttgagaggaaagatatggaaagagagttgttgacaaagcttttcgttagtctttgcaacagtcgaaataatttattgagcaagtctcatctcactgcaggacttgcgactgtccttggttcattggaagatgctctaagtgatgctccaagagctgcagagtatcttggacggcttcttgcaaggtttgtggtagaaagcatattgtccttgcaggaggtgggtacattgattgaaaaagggggagagagagagagagaactgcagcagagtggcattggagctgatgtccttgntgcagttctagagtcgatcaaagtagaaaagggggattcattcttgaatgaggccaaggcaagctccaacctcaagttggagatttagaccacacat

SEQ ID NO: 85364 - DNA, 160 bp, Oryza sativa
  Clone ID: PAT_MRT4530_8450C.1
ctctgctcgtagcccacgccctcacctcgtgccactggacattggcccgcttcgcgggacagcggggaggcggaggcgaccattggcggctcagacacaacctagtgccccgcaacacccaccgtgtaccgccaggttttgaccggcacgacggggcaac

SEQ ID NO: 85365 - DNA, 7192 bp, Oryza sativa
  Clone ID: PAT_MRT4530_84510C.1
gtttgagcctgtatacatgatatcagcttccagaaggtgattgcagaggggggaggatggaagaggaggaacaccgcggggttgttcttgtttgcagcatctgcggtttcctcttcgctgtccttggccctctcagcttttggatcctatgggctgtgaactggaggccgtggaggctattcagttggatatatgcaaggaaatggccagcatatgtgcaaggacctcaactaagcacactgtgcagctttttcactctttttgcatggcttgtcgtcgtttctccaataacagttttgttagtatggggaggcatccttattgctcttttggaaaggaacataattgggctagctgttataatggtcggtgttgctttgcttctgtcattctactctataatgttgtggtggagaacgcaatggcaaagctccaaggctgttgcttatcttctactcctggcagtcggtctactgtgcgcttatgagttttgtgctgtttatgttacaaccggtgctagtgcttctgagctcaattccccatctggcttcttctttggggtatctgcaatttcattggccataaatatgctttttataagtaaaatactgttcaatggaagtggattcgatgttgatgagtatgtccgaaggttgtacaaatttgcatattctgattgtgttgaagtggcccctgtttcatgctcgcctgacccaccagatcctagtgagttatacatgacaaaatccagcagggtcttgcatctagggcttctttacctttgctcattgatggttcttgttgtctattccatcttatatggtctgacatcaaaagaagcacgctggctgggtgctttaacttcagttgcagtagtgattctcgactggaatttgggcctgtgttcatttaggtttgagcttcttaaaagtcggatgatagcgctatttgtagctggaacatcaagggttttccttatatgctttggggtgcactactggtaccttggacattgcatcagttatgcttttgtagcatctgtgcttttagctgcagctgtctcttgctggctttctatttcaaacccctcagttgcaaggatagatgcattaagaagcacagtgataaaactccgagaaggttttcgaaggaaggggcaaactagttcttcaaactcatcagatggctgtggatctagtgtgaagcgtagtagtggcagtgttgaagctggtcctcatggcaatgctactgattctatgtacagaagcaactcacaaagcgattgtgtcaattggaacaatgttccttttgatcgatcgaatagttgtcaagaaggacagagctctgacaagaacatagatagtggacgtgccagtttagcccatcgcagtaattcgtgcctttctgctgtagctgtacaagaccctgaaactgctgtagtttcagcggacaggcatggggacccaactgcttcactcgttgtttgctctagtagtggtttggaaagtcaaggctgcgagtctagtggatcagctactgcctcgggtaatcagcagctattggatttgaacttggctgcaatttttcaggacagactgaatgatccaagaatcacatctatgctaaaaaggaatggtggactaggagatgtagaattggctaatcttcttcaggataaaggccttgatccaaatttttcctatatgatgaaagacaaggttatggacccacgaattttagctttgctgcagagaagcagcttagatgcagacagagagcatcaagatgatgtagatgtcactggtactgattcagataggttagatacaactattgcaaaccagatctcgctatcagaggaacttaggagaagtgggctagaaaattggctaaatctttcaaggctgatgtttcatcaagtagcaggttcaccaatacgtgcttttgttgtttttaccctaatattcatcatagaaacagttactgtggctgtccatcgaccgaagcccatcaaggttataaatgcaactcatgaacagtttgagtttggtttctcgatactgcttctatcaccagttgtctgctccattatggcattcatttggtccctgtgtgcagaagagatgacgatgacatccaaacctcggaagtatggtttcattgcatggctactgagcacatgtgttggtttgtttctctctttcttaagcaagtcatcagttattttgggtttgtcactcacggtcccacttatggtggcttgtctctcatttgctattcccatatggatgcgtaacggttaccgtttctggattccgggaggggagcttgatagccgtgaaaatatccgccaagctccaggaaagaaagagcgcgctctgtttgccatcagcataactgttttcactgcatcagtaattggccttggtgcaatagtatcagcaaaacctctagatgcattgggctacaagggatgggatgctgataaaaagagtttctattctccctatgcaacatcgatgtatcttggatgggcattatcatcaacgattgctgtacttgccactggggtgatacctattgtcgcttggtttgctacttatcgattttcaccttcatcagctatatgtgttggcctttttgcaactgtccttgtatccttttgtggtgtgtcctactggggagtggtaaattcacgacaggatggagttcctctgaaggctgatttcctggcagctttacttccatgactttgcattcctgctgtgttctcgttgtttactgggatgtataaatggaaggatgatgattggaagatttcccgtggagtttacctatttgttggcatgggagtgctgttattgcttggtgcaatatctgcagtaattgttacaattagaccttggactgttggagttgcatgcctccttgtcatcttgttccttgtatttgctattggtgtcattcactactggacatctaacaatttctatttaacaaggacacaaatgttacttgtttgctcccttgcttttctccttgccttggctgctttcctgatgggcttatttcaggagaaacctttcgttggggcatctataggttatttctcgtttctatttcttctcacaggaagagcattgactgtccttctatcaccaccaattgtcgtgtattcaccgagggtattacctgtttatgtttatgatctcaattttgcaggtaagagaagttgatggccataagctcgtgcaaattagaaatccatgggcaaatgaagttgaatggaatggtccgtggtcagactcatcacaagagtggactgagcgaatgaagcacaaacttaagcatgttccacagtcaaagaatggggtatcctggatgtcttggcaagattttcagatcggacgctgttcactttctcagtaaggatacagttgtacaagcaatgtcacgttctgctaacaaaacgagaaatgctatttctgggacttactcggcgcctcagagatccgcaagttctgctgctcttttggttggagatcctgctattacgttggacagggctgggaattttgtgcttcctagggctgatgtcatgaagctgagagatcgtttaagaaatgaagaaattacggcaggatcgttcttttgtggagtgaagaattgtttaatgattggatcccctgtagatgtagattatcggaggaatatgtgtgcccatgcacgtatattggctttggaagaagcaattgatactgaatgggtttacatgtgggacaagtttggtggttatttacttcttctgcttggcttgactgccaaagctgagcaaatacaggatgaagttcgtcttagactttttctggacagcataggtctttctgacttaagtgccaaagaaatcaagaaatggatgcctgaagatcgaagacattctaaacttatagaagaaagctacataatggaaaaggaaatataagagggggtcttgatacaaatgcgcgaggaagaagggaatatgaagcagcagctctgctcttgaacctgaatattctgggcttcatcagacgctacatgcaaccgcataagcttgattgcttcctaacgtgacaggaaaggccatctttctttgtcagcaggcatggtgttgatacatctgattctgctctggaagattcttttgcaagggacagggtctcgtcaatagctcgtcacataagaaaggcacaattggctagacctggtagccccatcccgtgtataggtatcccatgtcaccgtgtacatactatagaattagatgagttaaccttgtggtgtcgtttcctgttagcgaaatagagctcttgtgcagctgggaaataccattttagcatgctgcagttttgctgatcaaggcgagcagtcgtcggccatagcgttttcattgattgcctgtatgtaatcgaaatcttcagaacagggaatggaagctggccaagttggtcttcgattggtgactaagggtgaaaggatgacaaccgttgcaaaagagtggaatattggtgcatcaagtattgctgatggcaggtggcatcttgtcactgtgactatagatgctgatctaggtgaagcaacttctttcatagacggagtctacgatggatatcagaatgcgttgccattgcctagaaataatggcatctgggaacctgggacagatatttgggttggtgctaggccacccacggacttagatgcctttggtaggtcagacagcgagggatcagactcaaagatgcagatcatggatgcttttctatggggaagatgtctgactgaagatgaggttgctatgttgcatacagccatctgttctgctgaatatggcctttttgatcttgctgctgaggatgcttggcatggaagttattctgcaagggtggatgactgggaaagtgaagaagcaaattttgaactatatgatcaagaggacgttgaatgggatggacagtactccagtggtaggaaacgtcatgcgcgtgattctgtagctattgacattgactcctttgctagaagaccaaggaaaccaagatttgagacacgagaggaagtcaatcagcgcatgctttctgtcgaaagggctgttagagaggctcttattgcgaagggagagagaaattttactgatcaagagttccctccggatgatcgatctctgtttgtagatccgatgaacccatctctaaaattgcaggttgtctctgagtggatgaggccttctgatattgcgaaggaggtatctatcagttcacaaccgtgcttattttctggttctgtgaattcgtcagatgtgtgtcagggtcggttgggcgactgttggttcttgagcgctgttgcagttttgacagagatggcccgtatatctgaagttataatcactcctgagtataatgaagaagggatttacactgtcagattctgtatccagggtgaatgggtggcagtggtggttgatgattggatcccctgtgagtctccggggaaaccggcatttgctactagtagaaagcaaaatgagctgtgggtatccattcttgaaaaagcttatgcaaagcttcatggctcttatgaggcattggagggtgggcttgtgcaagatgctctagtggatctcacaggaggagctggtgaagagattgacatgcggagcccccaagcgcagattgatcttgctagtggaagattgtggtctcagttgttgcattttaaacaagagggctttcttcttggtgctggaagtccttctggctcggatgctcatatttcatcaagtggcattgttcagggacatgcttactcaattttgcaggtaagagaagttgatggccataagctcgtgcaaattagaaatccgtgggcaaatgaagttgaatggaatggtccgtggtcagactcatcacaagagtggactgagcgaatgaagcacaaacttaagcatgttccacagtcaaagaatggggtattctggatgtcttggcaagattttcagatccactttcggtcaatatatgtctgtcgtgtttatccacccgagatgcgttactctgtccatggccaatggcgtggttatagtgcaggtggttgccaagattatgactcatggcatcaaaatcctcagtaccggcttagagtaacaggacgggatgcactgtatcctgtacatgtatttattacccttacgcagggtgttggtttttctagaaagacaaatggtttccggaactatcaatctagccatgactcttctatgttttacattggaatgaggatactcaagacacggggctgccgtgctgcttacaatatctacatgcatgaatcagtgggtggaacagattatgttaactcaagggagatatcatgtgaattagtgttggagccttatccaaaaggatacacaattgtgcccacaaccatccatcctggagaggaagcaccttttgttttatcagtttttacaaaagcaccaatcaagctagaagctgtttaatgcaagattcatactagatgtgttcgctgctggtagctgtgccttgctgttgctggcccaggctcctttggggttcaagtgatgcagattccagctgtgggttcaagaggatcagataatggtgtttgctgcagcaatatgccggtacctgggagatatgaagcagcagctctgctcttgaacctgaacattctgggcttcatcagacgctacatgcaaccgcataagcttgattgcttcctaacgtgacaggaaaggcaatctttctgtcagcaggcatggtgttgatacatcagaatcatttgatcgccgtgcatgactctggatgttttctagtcgatgcttgtagatagtggtggcaactaacatttagacctggtagccccatcccgtgtataggtatcccatgtcaccgtgtacatactatagaattagatgagttaaccttgtggtgtcgtttcctgttagcgaaatagagctcttgtgcagctgggaaataccattttagcatgctgcagttttgctgatcaaggcgagcagtcgtcggccatagcgttttcattgattgcctgtatgtaatcgaaatctgatctcattcaatggaagctattttttggtaccctttgaaaaaaaaaaaaaaaaaaaaaaaaaaaa

SEQ ID NO: 85366 - DNA, 309 bp, Oryza sativa
  Clone ID: PAT_MRT4530_84511C.1
ttgtcgatccggtcgccccgcttggccagggtgaccggcgacgggctcggtcaatgccggcgccactccacggacctggcaggggggtggctggcggcggcgatggtgacggatgtggcggcgaaaaagttggcgacgacggcagcggactgcggcgcgtgccgtgacgccttcctctatgacgccggcgacccgcactgcgcgctgcacctccaggtccgcgccaccctggccggatctggacggctggcggctggcgacggtggcggctgacggtggcgactggacgtggtgactgacggtggcggc

SEQ ID NO: 85367 - DNA, 6285 bp, Oryza sativa
  Clone ID: PAT_MRT4530_84512C.1
atggaagaggaggaacaccgcggggttgttcttgtttgcagcatctgcggtttcctcttcgctgtccttggccctctcagcttttggatcctatgggctgtgaactggaggccgtggaggctatatagttggatatatgcaaggaaatggccagcatatgtgcaaggacctcaactaagcacactgtgcagctttttcactctttttgcatggcttgtcgtcgtttctccaataacagttttgttagtatggggaggcatccttattgctcttttggaaaggaacataattgggctagctgttataatggtcggtgttgctttgcttctgtcattctactctataatgttgtggtggagaacgcaatggcaaagctccaaggctgttgcttatcttctactcctggcagtcggtctactgtgcgcttatgagttttgtgctgtttatgttacaaccggtgctagtgcttctgagctcaattccccatctggcttcttctttggggtatctgcaatttcattggccataaatatgctttttataagtaaaatactgttcaatggaagtggattcgatgttgatgagtatgtccgaaggttgtacaaatttgcatattctgattgtgttgaagtggcccctgtttcatgctcgcctgacccaccagatcctaactggaatttgggcctgtgttcatttaggtttgagcttcttaaaagtcggatgatagcgctatttgtagctggaacatcaagggttttccttatatgctttggggtgcactactggtaccttggacattgcatcagttatgcttttgtagcatctgtgcttttagctgcagctgtctcttgctggctttctatttcaaacccctcagttgcaaggatagatgcattaagaagcacagtgataaaactccgagaaggttttcgaaggaaggggcaaactagttcttcaaactcatcagatggctgtggatctagtgtgaagcgtagtagtggcagtgttgaagctggtcctcatggcaatgctactgattctatgtacagaagcaactcacaaagcgattgtgtcaattggaacaatgttccttttgatcgatcgaatagttgtcaagaaggacagagctctgacaagaacatagatagtggacgtgccagtttagcccatcgcagtaattcgtgcctttctgctgtagctgtacaagaccctgaaactgctgtagtttcagcggacaggcatggggacccaactgcttcactcgttgtttgctctagtagtggtttggaaagtcaaggctgcgagtctagtggatcagctactgcctcgggtaatcagcagctattggatttgaacttggctgcaatttttcaggacagactgaatgatccaagaatcacatctatgctaaaaaggaatggtggactaggagatgtagaattggctaatcttcttcaggataaaggccttgatccaaatttttcctatatgatgaaagacaaggttatggacccacgaattttagctttgctgcagagaagcagcttagatgcagacagagagcatcaagatgatgtagatgtcactggtactgattcagataggttagatacaactattgcaaaccagatctcgctatcagaggaacttaggagaagtgggctagaaaattggctaaatctttcaaggctgatgtttcatcaagtagcaggttcaccaatacgtgcttttgttgtttttaccctaatattcatcatagaaacagttactgtggctgtccatcgaccgaagcccatcaaggttataaatgcaactcatgaacagtttgagtttggtttctcgatactgcttctatcaccagttgtctgctccattatggcattcatttggtccctgtgtgcagaagagatgacgatgacatccaaacctcggaagtatggcttcatcgcatggttgctgagtacttgtgttggtctacttctgtctttcttgagcaagtcatcagttattttgggtttgtcactcacggtcccacttatggtggcttgtctctcatttgctattcccatatggatgcgtaacggttaccgtttctggattccgggaggggagcttgatagccgtgaaaatatccgccaagctccaggaaagaaagagcgcgctctgtttgccatcagcataactgttttcactgcatcagtaattggccttggtgcaatagtatcagcaaaacctctagatgcattgggctacaagggatgggatgctgataaaaagagtttctattctccctatgcaacatcgatgtatcttggatgggcattatcatcaacgattgctgtacttgccactggggtgatacctattgtcgcttggtttgctacttatcgattttcaccttcatcagctatatgtgttggcctttttgcaactgtccttgtatccttttgtggtgtgtcctactggggagtggtaaattcacgacaggatggagttcctctgaaggctgatttcctggcagctttacttccattactttgcattcctgctgtgttctcgttgtttactgggatgtataaatggaaggatgatgattggaagatttcccgtggagtttacctatttgttggcatgggagtgctgttattgcttggtgcaatatctgcagtaattgttacaattagaccttggactgttggagttgcatgcctccttgtcatcttgttccttgtatttgctattggtgtcattcactactggacatctaacaatttctatttaacaaggacacaaatgttacttgtttgctcccttgcttttctccttgccttggctgctttcctgatgggcttatttcaggagaaacctttcgttggggcatctataggttatttctcgtttctatttcttctcacaggaagagcattgactgtccttctatcaccaccaattgtcgtgtattcaccgagggtattacctgtttatgtttatgatgcccatgcagactctgctaaaaatgttagttatgccttccttatcttgtatgggattgcattggctactgaagtttggggtgtcattgccagtctaatattgaatccaccatttattggggctgctatttctgctatcactcttgtaattgccttcagttttgctgtttctcgaccatgcctgactctcaagatgctggaggacgctgttcactttctcagtaaggatacagttgtacaagcaatgtcacgttctgctaacaaaatattcaacatatccctgcgtaacatagtatgctttgtgtgcaatcagacgagaaatgctatttctgggacttactcggcgcctcagagatccgcaagttctgctgctcttttggttggagatcctgctattacgttggacagggctgggaattttgtgcttcctagggctgatgtcatgaagctgagagatcgtttaagaaatgaagaaattacggcaggatcgttcttttgtggagtgaagaattgtttaatgattggatcccctgtagatgtagattatcggaggaatatgtgtgcccatgcacgtattttggctttggaagaagcaattgatactgaatgggtttacatgtgggacaagtttggtggttatttacttcttctgcttggcttgactgccaaagctgagcaaatacaggatgaagttcgtcttagactttttctggacagcataggtctttctgacttaagtgccaaagaaatcaagaaatggatgcctgaagatcgaagacattttgaacttattcaagaaagctacataagggaaaaagaaatggaagaggaggtcttgatgcaaaggcgcgaggaagaagggaagggaagggaaaggaggaaggcattgttggagagagaggaacgaaaatggaaggagcttgaaatatcactgctatcttctattcctaatgctggaagcagggatgctgcagccatggcagcagctgtcagagctgtgggtggtgattctgctctggaagattcttttgcaagggacagggtctcgtcaatagctcgtcacataagaaaggcacaattggctcggcgagcagagcagactggcattccagacactgtttgcatacttgatgatgaaccaaggagtactgggcgtcattgtggagagattgatttgtgtctttgtgaaagtaaaaaagttagcttctccattgcagtaatggtgcagccggtgtcaggtccagtctgtctttttggaacagaattccagaaaaaagtgtgctgggaaatcttggtggcagggtcagaacagggaatggaagctggccaagttggtcttcgattggtgactaagggtgaaaggatgacaaccgttgcaaaagagtggaatattggtgcatcaagtattgctgatggcaggtggcatcttgtcactgtgactatagatgctgatctaggtgaagcaacttctttcatagacggagtctacgatggatatcagaatgcgttgccattgcctagaaataatggcatctgggaacctgggacagatatttgggttggtgctaggccacccacggacttagatgcctttggtaggtcagacagcgagggatcagactcaaagatgcagatcatggatgcttttctatggggaagatgtctgactgaagatgaggtggatgactgggaaagtgaagaagcaaattttgaactatatgatcaagaggacgttgaatgggatggacagtactccagtggtaggaaacgtcatgcgcgtgattctgtagctattgacattgactcctttgctagaagaccaaggaaaccaagatttgagacacgagaggaagtcaatcagcgcatgctttctgtcgaaagggctgttagagaggctcttattgcgaagggagagagaaattttactgatcaagagttccctccggatgatcgatctctgtttgtagatccgatgaacccatctctaaaattgcaggttgtctctgagtggatgaggccttctgatattgcgaaggaggtatctatcagttcacaaccgtgcttattttctggttctgtgaattcgtcagatgtgtgtcagggtcggttgggcgactgttggttcttgagcgctgttgcagttttgacagagatggcccgtatatctgaagttataatcactcctgagtataatgaagaagggatttacactgtcagattctgtatccagggtgaatgggtggcagtggtggttgatgattggatcccctgtgagtctccggggaaaccggcatttgctactagtagaaagcaaaatgagctgtgggtatccattcttgaaaaagcttatgcaaagcttcatggctcttatgaggcattggagggtgggcttgtgcaagatgctctagtggatctcacaggaggagctggtgaagagattgacatgcggagcccccaagcgcagattgatcttgctagtggaagattgtggtctcagttgttgcattttaaacaagagggctttcttcttggtgctggaagtccttctggctcggatgctcatatttcatcaagtggcattgttcagggacatgcttactcaattttgcaggtaagagaagttgatggccataagctcgtgcaaattagaaatccgtgggcaaatgaagttgaatggaatggtccgtggtcagactcatcacaagagtggactgagcgaatgaagcacaaacttaagcatgttccacagtcaaagaatggggtattctggatgtcttggcaagattttcagatccactttcggtcaatatatgtctgtcgtgtttatccacccgagatgcgttactctgtccatggccaatggcgtggttatagtgcaggtggttgccaagattatgactcatggcatcaaaatcctcagtaccggcttagagtaacaggacgggatgcactgtatcctgtacatgtatttattacccttacgcagggtgttggtttttctagaaagacaaatggtttccggaactatcaatctagccatgactcttctatgttttacattggaatgaggatactcaagacacggggctgccgtgctgcttacaatatctacatgcatgaatcagtgggtggaacagattatgttaactcaagggagatatcatgtgaattagtgttggagccttatccaaaaggatacacaattgtgcccacaaccatccatcctggagaggaagcaccttttgttttatcagtttttacaaaagcaccaatcaagctagaagctgtttaa

SEQ ID NO: 85368 - DNA, 1206 bp, Oryza sativa
  Clone ID: PAT_MRT4530_84513C.1
atgagtgaacaagtcactaatgcacaacttacatatgcagtatatgcttgtaaattttacgatgaaactcaaagacgcggattttatcagaatacaattaatgcagcatgggagaatgtgtgcatgctaggtgtaattggcatgggtgaatgggtggcagtggtggttgatgattggatcccctgtgagtctccggggaaaccggcatttgctactagtagaaagcaaaatgagctgtgggtatccattcttgaaaaagcttatgcaaagcttcatggctcttatgaggcattggagggtgggcttgtgcaagatgctctagtggatctcacaggaggagctggtgaagagattgacatgcggagcccccaagcgcagattgatcttgctagtggaagattgtggtctcagttgttgcattttaaacaagagggctttcttcttggtgctggaagtccttctggctcggatgctcatatttcatcaagtggcattgttcagggacatgcttactcaattttgcaggtaagagaagttgatggccataagctcgtgcaaattagaaatccgtgggcaaatgaagttgaatggaatggtccgtggtcagactcatcacaagagtggactgagcgaatgaagcacaaacttaagcatgttccacagtcaaagaatggggtattctggatgtcttggcaagattttcagatccactttcggtcaatatatgtctgtcgtgtttatccacccgagatgcgttactctgtccatggccaatggcgtggttatagtgcaggtggttgccaagattatgactcatggcatcaaaatcctcagtaccggcttagagtaacaggacgggatgcactgtatcctgtacatgtatttattacccttacgcagggtgttggtttttctagaaagacaaatggtttccggaactatcaatctagccatgactcttctatgttttacattggaatgaggatactcaagacacggggctgccgtgctgcttacaatatctacatgcatgaatcagtgggtggaacagattatgttaactcaagggagatatcatgtgaattagtgttggagccttatccaaaaggatacacaattgtgcccacaaccatccatcctggagaggaagcaccttttgttttatcagtttttacaaaagcaccaatcaagctagaagctgtttaa

SEQ ID NO: 85369 - DNA, 1122 bp, Oryza sativa
  Clone ID: PAT_MRT4530_84514C.1
atggcgtcgacgatcctcccggacgatctcatgcctgagatcgccgtacgctcagacattgtgtccatagttcgttgcgccgccacctgcaagtcgctccgcggccgcatcctggaggaggaattctgccgccggcacaacaacgccgcgaccagtctcctccgcggcgtctcctacaggttccgctgtgatcttaacacctttgtgggcgtaacacaggccgcgtcgtcaccatcgtcctcgcctctcccccgcttcgacgccggtatcctcaacactttcgagcccatggtgtcgcgcgacggcctcgtcgtcgtcctcgaggactacgtctacgccggccccgaccgtttcaacatgtgcgtctgcaacaccatcaccggcgacgtcacctctctccctgccatggatcctgccatgaaagtcaagagaaggttgatctacccgccggcgttgctcgacgtcggcgacgccggccgctcgttcgagctgctcgtcgcggacaacgagctgcacacacagacattcacattctcgtccaaggacggcggcggcggatggggcgccgcccgtacgatccgcatggacgccggccaccggaagccctccatcccgatgccgtttcaccacgttcccggccgtcgtcgggcgcgccgtgcactggctcgccggcacggagcggtactgggagctccaagcccacggcgtggtcatcttctccctgcgcgtcgacgcggcgtgcgccgcgacgatggagctaccgccgggctccgccgacaagatgctgggctgcaggaaggacagccatcagctcatgctcgccgcgtcgcggggcggcacggcgttgagcctggtcgtggcggagcgcgagctgatctcggtgtggacgttggaggaagaatcatcggcggcggcgacgacaacggcggcgaggtggagccggcaggtggtgatcacgaggctggcgatcgaccggagcgcggaagccgcgagaatgtacagcaacgtcttcttcgaggggttcggggagaggagcggtgtcgtgctcttgcgcttgcatcgttttgggctcgtgcagctcaacctggcgacgaaagaggcgctcgttgtgcgccgcgttag

SEQ ID NO: 85370 - DNA, 239 bp, Oryza sativa
  Clone ID: PAT_MRT4530_84515C.1
taggggtgaaaacggtacggaaactttccggattccggacctattttcgaaaacggaatctgtcggtcggaatttttttcggaatttttcggaaacggaaacgaattcagaaatattttctcggaaacggaatcgaaaatgataagggcagtttccgtcggaactcgaaatcggtcggaaactttccggaaattttctcggaatttccggaaattttctcggaattaccagaaattttg

SEQ ID NO: 85371 - DNA, 260 bp, Oryza sativa
  Clone ID: PAT_MRT4530_84516C.1
ttgtttggagaggtagagatgagagcacccgctggccgccgtgctcatcatggtgctgcgacgttcgcacgggagctcacaagcgggaggctaggccagaatatggcacccggagcatatggcgacactgcacgcggtggacagagcacgaaaaagaggagctggcgacgcacagtgcgagggagaccaacgcaggcgccgtggccctgaaagttctttagtgcctgcactgcggaggagccaacagccatgatttgtac

SEQ ID NO: 85372 - DNA, 233 bp, Oryza sativa
  Clone ID: PAT_MRT4530_84517C.1
ccgatgtaacacccaaaaattttcatttcaccaattaaacaggccctaaatgcattcacattccgtttggcaagtgtagtgtggtgtggacatagcctgcctcaatgttaccatccacagaatgttcataggatgtagacacaactgcaacccacgattatttctacgcacaactgcctaataatgcaagtgttttcttccagcagtacagtacacgccggacgcgtgggcga

SEQ ID NO: 85373 - DNA, 617 bp, Oryza sativa
  Clone ID: PAT_MRT4530_84518C.1
tctgcttggtatggccagacacgcagctgagagaagagcttaggatatcaatagcagagaaacttcttccagcatatcgatccttccttggtcggttccggcatcacatagagaatggaaggcacccagagttgtacatcaaatactcagttgaggaccttgagacgtccgtcacaaatttctttgagggttgtccaccttcgctacataacaggagaagatcccatggatgagaggtggcttgaagactcaaaagatctctattgttgactgatgagtgtggttgcctagtattctacaatgcttcgggaaaagcaagacttaagggtatagttggtgatgatttcttctactagaggtaatctgaaacaggatcaggatcttattgaaactgtcaaattccttagtggttcttccttttaaagccaaccttgttcgtttgttaccctatcatcatatcttttatgattagattgttcatataggtctgttctttcagaatgtttcgcagttgtaagttgtaacatcatggtgtttgtttgacacttaactgagtgtcttgtcccctttttggttgttcagatatatattaagattgcacttcatagattagatgt

SEQ ID NO: 85374 - DNA, 567 bp, Oryza sativa
  Clone ID: PAT_MRT4530_84519C.1
gatgggtttatggggtacaactgggaacacaacggtgagatgagggcattttgctcgatgcattcgacagtccaagaaactatctcaatacagtaatgacaagaatatgtgactgtagaggatacctgacaaattgagcttgaagatgcaagccttgccactcagaagatacaacttctgacattgacactcattacctggtcttttttccaaacctgattgctacctgttgttccactaacctcaaacagacagcactacttaacctctattctcatctacatgatacgagtgcggaaagtcaagaaacccaaatatcacataaggctgttgatcgacctatatgatataggtgtcttgtgagcaactggtgtgatgactgtacagctattagaaagctaattgtccaaggaatgggtaatgaatggtgatatagaatgcacaattgcgtgaggcttcagaatctttgtaagctgctctcgagcctgagacatctaccttctccgctggtctgaagttgactatattcaagttactgtgaaacaccattcgtgtaccttctgttca

SEQ ID NO: 85375 - DNA, 333 bp, Oryza sativa
  Clone ID: PAT_MRT4530_8451C.1
cccaagaacaaagctggtaacaccaaatttcacaaatacatttcaaacagattaacagatcaacaatgacatagcttccaaaaggaaataaggcaaaaaaaaattaactctcacaagttaaaaatgaaatagagaacacatgttacgcaaggagggagcacatgcacaaatgaagaatagacttggacgactcccatccacagtgtcctgatttacaaggtactccagcaacgattagaatccaatctttacattagggattttctttactctctgggcgcccgtgttcctgcaccaactctccagatccggacattcacttaatgtcagata

SEQ ID NO: 85376 - DNA, 749 bp, Oryza sativa
  unsure (1)..(749): unsure at all n locations
  Clone ID: PAT_MRT4530_84520C.1
cccgggtacgacccacgccgtccgaaaacttatgtcatcatgcatggatcttttaacggcagtatctagtttcttcccttcacttttgtctggacttgaagaagatatcattgagctcctgaaggaggataatgaactacttaaagagggtattgctcatgttctgtcgaaggctggtggcaacattcgtgaacaactagcttcatcaagttccattactcttctactagagcggctatgtttggaaggaacacggaagcaggcaaaatactctgttcatgctttggctgctataacaaaagatgatggcctgatgtctctatctgttctttacaagaggcttgtggacttgttggaggaaaagaaagtgcatttgccatccatcttacaantccttggggtgtatagctcagatagcaatgccaatttttgaaacaaggggagaagagataataaattttataactaaaaaaattcttgactgcaatgatgattcaggccgacgtttctgctcataaatctgaatggagtgatagactcaanagttgtttattggaagatttatggcattaaaactttggtgaagagctgtcaaccttgcaaagatgctcaagcacatccgggaattgaaaaattaatgggcatccttaagaatatccttacatatggtgatatttctgncaatatgatttcaagcactattgataaggcccatttgaggctggcggcacaaaaagctgntctccgct

SEQ ID NO: 85377 - DNA, 1420 bp, Oryza sativa
  unsure (1)..(1420): unsure at all n locations
  Clone ID: PAT_MRT4530_84521C.1
atgacagacaatatggtggggagaggcgggtacggcgaggtgtaccgcggcgtgctggaggacgggagcgccgtcgcggtgaagcggctgtcgccggcggcggcggcggacgagaagaaggagaaggacttcttgacggagctcggcacggtggggcatgtccggcaccccaacgtcacggcgctgctcggctgctgcgtcgaccggggactccacctcatcttcgagttctccgcccgcggctccgtctccgccaacctccacgacgagaggctgccggtgatgccgtggcggcggcgccacgggatcgccgtcggcaccgcgagggggctccggtacctccacaagggttgcgcgcgccggatcatacaccgcgacatcaaggcgtccaacgtcctcctcaccgccgactacgagccccagatttcggacttcggcctcgcccggtggctgccgtcggagtggacgcaccacgccatcgcgcccatcgagggcaccttcgggtgcttggcgccggagtacttcacgcacggcatcgtggacgagaagacggacgtgttcgccttcggcgtcttcctcctcgagctcatctccgggaggaagccggtggacggctcccacaagagcctcctcgcctgggcgaagccgtacctgaacgactgcgtggcgcaggggctcgtggacccgcgcctcggcgacggcggctacgacggcgcgcagctcaggcggctcatgttcgtcgcgtcgctctgcgtccggcccgccgcggcgtggcggcctaccatgacacaggtactccactctagtactagtactacaagaaatggaccattcatcattgtgaagggtttctttgctgacatcagctccgaaatggcatggttcaacagctctatcaaaccatacaacgacatgaaaaatctcaacagaaatcaggagaaccgaagggacattggatgctctgtagcctcctaccttctccattatccttttcttccccccattgattcacgagaagcccagagccaggtcctggagttattggagtccggcgagatatctcaagatcaatggctgatgcccgaggaggaggaggaagacgagttttgggatttcgacgatctcgacgacttcgaggacgacgacgacgacgatgatgacaactatgataacgacgatgaatcggattctccctcgatatcgtcgtcagcgtgcagcatccacgccaatgattagccccaaaatatttgagtctgtcangtcttgacagagtgcccctaattggttttggtttttaggggatactatgatcgatgggattatattagtgtacataaaccacctagacaatagtaaattcagaaaagaaaaaaaaactgttcaggcccatggttttgatcaaaaaaaaaaaaaaaaaaaa

SEQ ID NO: 85378 - DNA, 897 bp, Oryza sativa
  Clone ID: PAT_MRT4530_84522C.1
tcagccatggcgcgccaccagctatgtctcttgacgacgacgatgctagtagccgtcgtcgtcttcctcccgtgcctcgccaccgccaccggaaagaccggccagatcgccgtcttctggggccgcaacaagacggagggctcactgaaggaggcctgcgacaccggcctctacaccaccgtcatcatctccttcttcagcgtcttcggccacggccgctactggaccgacctctccggccacgatgtctcccgagtcggcgccgacgtcaagcactgccagtccaagaacatccccgtcctcctctccgtcggcggcgacggctaccagtactcgctccccaccgccaattcggccaaggacgtcgcggaccacctctggcacgcctacctcggcggcggccgcaggggcgtgttccgccccttcggcgacgccgtgctcgacggcgtcgacctctacatcgaccacggcgggccggcgaactacgacgtgctggtccggcgcctcgccggctaccgcggcaagccggtgctgctgacggcgacgccgaggtgcgtgtacccggacgcgaacgcggcggcggcgctggggacggggctggtgcggcgcatccacccgcggttctacgacgacaggaggtgctcgtacgactcgtcggagcggcggccgttctacggggcgtggctggggtggacggcgaggtacgcgaacgcgagcgtccacgtcgggctgccggcggcgtgggacgcggcgagcgacgggtggatcaacccggcggcgctggtgttcgacgcgctgcctctggtgcgggggacgcccaactacggcggcgtcgtgctctggaaccgacacttcgacaggaggagccgctacggtcagaccatcaaaggcatgctc

SEQ ID NO: 85379 - DNA, 3936 bp, Oryza sativa
  Clone ID: PAT_MRT4530_84523C.1
atggtgaacactaggaccggaggacatggttcagagcatgagaacactgatgcccgcactactagtcagcaaccgcctcaagcaccccaggtgaaccaacagaactttgaagtcttcatgcaagcccagattgagctcatgaggatgatgatgcaacaacttcggaaccagcagcaacagcagccgcagcaacaaccccaaggcggtccacctccacaaagcaagatgtttgagtttctacgtaccaagccaccaaccttcaagggaatggaggatgttactagagatgcagatcgccagaggcatttcctgaaaggtctcaactctggtctcaaggtgggacttgtggcacatgattttagtagtttccagagcctggtgaacaagacccttttgttagaagaggaacgcaggaagcttggtgaagaccgcaagcgcaagatgaaccagcaagcaagtggtccgagccagaggccacgtggagcattccagcagaacaataactgtcagctagctgctccacagttcaggactattccacagacactagtcctagcagctcagacccctcgtcaggctactccaactcaatctgtgcgagaagtaggccatgtcaccaaaaattgtcctcatcccaagaacattattactccagtgaagttcaacttgggaaataccccagccaaggcgccagcaccaggagtagcacaacaaactgcaccagccactcagcagactatcgtcaggggtcgtgtgaatcatgtcactgctgaggaagctcagacctctacggatgttgttctaggtaagttcctagtaaactcagtacctgcaacagttttattggattctggagcttcgcattcgtttgtttctcggtcttgtgcttctcaacatcagtttcctactatccctcttaagtgttccttacttattcaaacaccggggtcagagatgagaactcaaactggatgtcctagagtaaagattgaaatagagggtgtagagttctttgccaatctgattatgttagatactcctcagcttgatgtcatcctagggatggattggttgcacagcagtaaagcagtgttagattgtggaagtaggtctatcaccttggaaaactctaaaggagaaagagtaaatttcaaagccatagttaatccaccttggaaaggagccctagtgcacaacatggaagtttctgagctacagaaagtacctattgttagagaatatccagatgtcttcccagaagagttgccaggcatgccaccacatagagatattgagttcgtcattgatctagttcctggaatatcacctatattcaagcgaccttaccgcatggcagcaaatgaaagcttaaatgatgtgaccatcaagaacaagtatcctttaccgcggattgatgatctatttgaccagatgaaaggagcaggagttttctccaagattgatcttaggtctgggtatcatcagctcagaatcagaacagaggatatcccgaagactgcattttctactagatatgggctctatgagtttacagttatgtcttttggattgacaaatgcccctgcttatttcatgaacatgatgaataaggtattcatggagtatttggataagtttgttgttgttttcattgacaacatactcatctactccaaggatgaaaaagagcatgagaatcatttaaggcttgtgctagaaaagctaagggagcatcagttatatgctaagttcagtaagtgtgagttttggatgaaagaagttgaattccttggacatgttgtgaccgccgctaaagttgtagtcgatccaaagaaagtaagtacagttatcaactggcagccgcccaagaccgtgacacaagttcgtagtttcctaggtatggcaggatattacagaaggttcatagaaggtttctccaaagttgctcgtcctttgacacagttgttgaaaaaagagaagaagtttatgtggacatcagagtgccagcgtagttttgaagccttgaagaagagtttgacgtcagcaccagtgttggttttgccagatatccacaaagggtttgatatctattgtgacgcctctcgtacaggacttggatgtgttctgatgcaagaaggcaaggttgttgcttatgctttgagacaactacgtccacatgaggagaattatccaactcatgatttggagcttgccgcagtagtacacgcattgaaaatatggagacattacctgataggcaatcgatgcgaggtctacactgatcacaagagtctgaaatatattttcactcaacatgatttgaacttgagacaaagaagatggttagaggtgaccaaggattatgacatggggatccactaccatccaggcaaggctaacattgtcgccgacgccttgggcaggaaagcatactgcaacaatgtggagatcaaggagagccagttgtcactctaccgggagtttgaaaggctgaatttagagatagtacctaaagggtttgtggctaatcttgaagtcaaacccacattggaagatcaaatcaaagaagctcaaaaagatgatgctaatgtcaaagaaatcaagctcaacatgaagaaaggaaaagccataggattcactgaggatgagaatggtgttatatggttacatgagaagttggttgtaccagatcagccagaactcaagaagctcatattgtcagaggcacatgaatctcgttattctattcatccgggaactacaaagatgtaccaggatctcaggaacagactatggtggcctagtatgaggcgtgagatcgcagaatatgtggtactttgtgatgtttgccagcgagtcaaggcagagcaccaacaacttgccggacttctacaaccattgaaggtaccagaatggaagtggtatgagattggtatggatttcatcaccggtttgcccaagactcagttagggtatgattccatttgggttatagttgatcatctcaccaaggtagctcactttattccagtcaagataacttattcaggtgacaagcttgccgaattttatgtgaaccggatagctcttcatgaggcaatgggaactcatcttaatttcagtacagcatatcatccacagacggatggtcagaccaaaaaagttgatcaaattttggaggatatgcttcgagcttgtgctttagcttatacttctaattgggacaagaatttaccctatgtcgagttctcctacaacaatagttaccaagcaagtttgcagatgtcgccgttcgaagctttgtatggacgaccttctagaacaccgttgaattggaatgagactggtgaaagaatggtttttggaccagatgtaattcgtgaagccgaagaaagagttgctctaatcagggatagattaaaggtagctcaatctcgtcagaagagttatgcagataatcgccgaagggatttaacttttgagaaggaagattatgtgtatttaaaggtaaccccaatgagaggaaccaagaggtttcaggtgaaaggaaagctagcccccagatatgttggtccattccggatcattgctcgtcgaggagaagtcgcatatcagttggagttgccgtcttcaatgtccggtattcatgatgtgttccacatatctcaattgaagaaatgtcttcgtgtgccagaagaggaaacaccgctgcagtcagtggagttgcaaccagacttgacctatcgagaggttccaatcaaaattcttgagacagcagagcggactacaaggagtaagaccattcgtttatgcaaagttcagtggagtcatcacaccgaagctgaagccacatgggagcatgaggatgatttgaaggcagagttcccagagttgtttccaagccagtccgaatctcggggtcgagattctgtttaa

SEQ ID NO: 85380 - DNA, 452 bp, Oryza sativa
  Clone ID: PAT_MRT4530_84524C.1
atgttgggttctctctctttctcctcggtttctcttcatgggagtgagtgttgcatcgtcggcagcagcggcttacgtgtgccgaagcagcggcggccggcgcctcctccaacctcatcccagctgacgttcacccgacgccgcccgtcgcagggccggatatcgatagatcgacaagtgctcgaacggtggcggcagcaagaggggtccgccctctgcggcgctggcaagcactgtcaactgcgccgccgggagtcgccctcgccgccctcctcctcgctcgctcatctccttcggcgtctctccctcccggtctccgcccccaacgcctccaccaccggggctaccgatgacaacgatccactgtcatttgaagaaggaagaaacaggggagaaagagaaataagaaagagagagagggaggaggaagaaggaaggaaagaggatgccat

SEQ ID NO: 85381 - DNA, 493 bp, Oryza sativa
  Clone ID: PAT_MRT4530_84525C.1
gcacgagggctaacttgtgtgtctttggttctgaaggctcaaccacaaatgttgtcgacagggcgattcaagccgttctccaactagtgaagagctcgaacatagctgtacagatacaagcatatcgggtggtggccaccttatcaatgcgacagcagcacaggtctgccatcgtgtcagcctgcaccatcccgcttctcgttcagctgtggagcagcgtgaaccgccctttgcagaaacttgctacccagacggtggcgaacctggccgacacgaaagattaccaagatgctatcgtttctgcgggcgccatcccctcccttgtgcagctactggatgaccctgacatgtagacacaaaatgcggacttagtggcactgcaaaatcttgccgtccacagtgtcgcccacaaggctgctatcgtgtcagcggacgccatcccacggcttgtgcggctgctggagagcacaactcaagacttgcaggcacgtgc

SEQ ID NO: 85382 - DNA, 171 bp, Oryza sativa
  Clone ID: PAT_MRT4530_84526C.1
atggaggtgcggctgcaggcctccagatcggctgtggcagccacaggcgtgagggacccggggaatggcaacaatgacaagtggggcctaggtggagccgccgagtcgcggaacagtgggttggagaagggcaaggccaatggtaggctgctagatccgaatatgtcatga

SEQ ID NO: 85383 - DNA, 324 bp, Oryza sativa
  Clone ID: PAT_MRT4530_84527C.1
atggccgcctcctcgtcaccaccatcaccaaccaccaactacagcaagcttgagctcaccggcggccgtggcgatcaagaagggcggcgcggcggggctgagcagatactgaagcggtgctcgagcctggggcggcggcagcaggagcagaagcaggtcagcgagtgggaagaggaagaagaaggcgtccggcttgccgtccgacgtgccgaggggccacttcccggttttgtagccactagcaaaggacggaaggacctcatgttacttaacgtactgcgtcaatttgatgccagtaattgctctgttcgtattaaaatatag

SEQ ID NO: 85384 - DNA, 419 bp, Oryza sativa
  Clone ID: PAT_MRT4530_84528C.1
atgcgcggcggcgggttcagcgggtgcaggagtattggagggaggaggtgagggagcggaaggctacctcctcgcaggggaggacgaggaggccgccggcgccggcgccggcgaagccgaactcctcctcggcgcggcggagcagggagcggaactccggccggtcgagaagcgcgaggggcaccacgaaccgccgccgccgctcgccgacgtacaccgggaagtggcccctcggcacgtcggacggcaagccggacgccttcttcttcctcttcccactcgctgacctgcttctgctcctgctgccgccgccccaggctcgagcaccgcttcagtatctgctcagccccgccgcgccgcccttcttgatcgccacggccgccggtgagctcaagcttgctgtagttggtggttggtga

SEQ ID NO: 85385 - DNA, 396 bp, Oryza sativa
  Clone ID: PAT_MRT4530_84529C.1
aaccggacctaattttaaacccccaaccccctatccggtaaaaacccattccaaaacccccccaaggggggaaagggcccggggccccccaaaacccctagggaaaaccccataccaaaagggcccgtaaaaacccaacaaaccttgacctggacccaaatccccaccaaaggaaaaacccccaacccccgggaggtgaacctgctgccctatgcccaaaacaatgtaaagcccccaaaaggaaaattgttgccccgaacccggggccgacccctggggcccccccgaaaatcccgaaccggcccctgaaggcgaaccattttccccaaaaggaagcccaataaaagctgggggaaaccagggccaaacctgttccctggggaaaatgactacccc

SEQ ID NO: 85386 - DNA, 417 bp, Oryza sativa
  Clone ID: PAT_MRT4530_8452C.1
atgcaaaacgacggagtgaaacgggcatatacagcccgccacgttggacgcagccgcggcacgggagcgacgttgtattcgctaccgtttgggctccagcacgcgcgggaccaactggtcaggagccgaggtagtatcgacgagccgtctcgcgcgtgcgccgtcgtgtgtatcttgcattcttgtctttgcttcgagcgaaaggcgggcggacgcttggccgtttaccgggcgaggacgaggtctcgcctccgagcacgcgactacgcgaggcggcgtggccggcctcttaccgaaactgcccctcgtggagatcggcaaggcggcaaccgcggtttggcccgctcttttcctcgtagcgaacgtggggcggcgctggacttccgtcagggggggcacggggtggcgttttggtaa

SEQ ID NO: 85387 - DNA, 585 bp, Oryza sativa
  Clone ID: PAT_MRT4530_84530C.1
gaaattattatctttcatctagaactgttatatactgcatcgttgattacatgcaaaataaatcttagagaaaaaaggaaaataggcggagaacaacagtgtccccaagacccaaacatcccacaggacctggaaacatacaattggcgtaccatgtaactgatgctattctgttcttccttcaaatagcttcatcaattgtgccttcagcagctcaggggtataccactcatgctttctcttagccttcatatacttgtcaaggtgtgcttggtaagccaagattaccttgtcacagacagctcgccgcactttctcccgaagctgaggatcttccaccttccagcactcttggttataataagttgaatcgaactggaggctaaaccttacggtactggaaggctgactgaagcagccaccaagcatgcctgtcctggcactgaggcatgatattgcaggcccccatgacaagtccacataagtcttcaaatactgctcgatgaattctctgtgcacttgaacccatgactgccctaggagtgagatcagctctgaaccctccacttgcttgacaacaaaatg

SEQ ID NO: 85388 - DNA, 754 bp, Oryza sativa
  unsure (1)..(754): unsure at all n locations
  Clone ID: PAT_MRT4530_84531C.1
ccagaaaaaaaaaatcagcaacgtggctgtaattattggcacagcaaaaggagccccaggtaaaaatctgtacacagattacagcttcaaggagggattttgactagggcttacaatacagcaagtgatattacattcctctgtgatgttccacaccatatgttgcagcttgcaacaaggcgtctctacatggctaacttataacagaactgcctataaggatgtctaggtaatgtgagaaagtttacacaaaacagcagaaaccaatgatgttacagtagtcaagcagaggagaagaagaccaaacagcaggctcataaagcccttccacccgtattcttggcaaatgatggaggatgaacaaatgaaagggcagcaaagtaatcgctctgaatacttaacaatgctgatagtcgataaattaccatgcacgaagttgtccacagaaacaattttcccttgttatcatctgagggctctcactcagatcaatgggtataaatacttgtgttagttctgacctcctgaattctgataacatgcagtcttcaaagaactaatgtcttgggcaaaatcacaacatttgcanaccttggagtttctctgcattggtcttttgatggtctgatctgtacaattcctgtatacatcatggtngctgatctaatttggcaatcaactcctttanatcccctggcctcatttatttggcggtgctaggccttgcgccttcatatgcaatggtatttggggg

SEQ ID NO: 85389 - DNA, 321 bp, Oryza sativa
  Clone ID: PAT_MRT4530_84532C.1
atgagcgtggtgatcctggacgggtcgacagtgcgtggcttcgtggcggacgacgacgccttcgcccgcagtgtcgacgcgcgcttcgaggcgctgaacaccaacggtgatggcgtgctgtcctgcgccaagctccgccgcgcgcttgagtccttcctactcctctacggcgccggcttcggctccgcccagctggccccggtccccgccgaggtctccgccctctacgactccatcttcgagcagttcgacgccgaccacagcagcgccgtagaccgagccgagtttcgcgaccggatgcgctgcatcctcggctcgtag

SEQ ID NO: 85390 - DNA, 397 bp, Oryza sativa
  Clone ID: PAT_MRT4530_84533C.1
gtaccgaaaaagcgtttgctcaaaaaaatcacccacgggcttttaatgggtataaagcgacgccgtttccttaacttaatatatatcccgttcctttcatacctttcaaacattatttgccattccaaaactacattttctatcatccaggttggggtgcaaccaaaaggggctggagttgcttgacaactgggtatgaacaaaaggcaatatattcattataaacaacaggtttctgccatctgaaccatgccccaccttgatgagagaatcgtgccaatttacacattggtgcttgacgcttacattataccatttcggatttgctcggtgatatccttgacatggcctgggccttgagggctgaacacccgttttttttgggagccatccccaa

SEQ ID NO: 85391 - DNA, 826 bp, Oryza sativa
  Clone ID: PAT_MRT4530_84534C.1
ggcggcacgcgcggcagaagcagcgtgaacgcgatggagctcaacgcgatcatcttcggcggcaacatgatggccgacgacgacggcggcggcttcaccttcgccgaggtcccgccgctagccggcggccgctgcgtgggcccgccgctgtacccggtcttcggccggccgaggtcgccgccgccgacgccgccgccgcatcggcaggcgccggagaaggcctcgcgtctgccgctatggcggtttctgatggtggaccacggcccgccgccgccgccaccaccgacgacgcagccggcggcggacgacgacctcgacctcgacctcgacggggagccggcggagtcgacgttcctgtactgcccgctgtgtcccgcgttgcctgtggctggcggcggcctccccggcgcggtgccggaagagcggctccactgggtcgtctctcctccggtggcgccagcgctccatcggccggagccacagcgacggcaaggagaagttcgtgttcttgaacgcgagctcctcctcctccggctccgagcacaagggcggcagaggcggcgaggtgggccatgacggtgccctgagctactacgccaacggcggcagcaggggcggcggcggcggcggcggtcgccggaggtcgttccttccctaccggcaggacatcgtcggacttttcgccaacgccaccgcgttccggcggagctatcacccgttctgacgtcgcgaacgtcttcgataccaatggtgctcgatcgattttattctcttctctctgcagggtaagtatgtacttaattacttggcacaataaattcgtgag

SEQ ID NO: 85392 - DNA, 783 bp, Oryza sativa
  Clone ID: PAT_MRT4530_84535C.1
ttacacggcgcaatgaacctgcggctggtcctcaaaattagtactgtcagcggtatatggggctgcggatgcggcactgtgcgactggatgcggctgcaggcggcggcctgtatgcgacgggaggcgcggccggctcgatgcgacagcggacgccgccggctcgggacggcggcaggcacagcgccctcgatgagacgagggccgcggctgtctcgatgaggctggatgcggcagcgcccacggcggggcggcgggctggatgtggcggcgcccgcggtggcctcgatgccacggtggccacggcggccttgttgcggcggcagccgcgccggggtcgatgcgatggcgccgtggcgggaaaacaggctcgatgcggcggcgccggggaagccaagcttctctatcttgaagtattcttgtcccgaggccttgggctcgagcaaagctatgtgcacctttccagcctccagcatctcaccttctatctttgctgtaccaatgccactataacggacgtgaaagcagtggaagctaccatcaggaacgtgatcagcatccacacccgccgtcccactctcgtattgcggagatacttgcaagatcgaatggtaaaggaagatgaagaggagcagggtaggctctaacgcttgttcatgtgggagcgcgtcggagttagtatgcgtcgtgtggacatgtgctttcagctgtgggatggcgtggctcagtcggaaagcaaatcctttcattggatcatggatgccgttctcggcctccctcgccat

SEQ ID NO: 85393 - DNA, 2305 bp, Oryza sativa
  Clone ID: PAT_MRT4530_84536C.1
atggcgacggatcgggagaaggagcgggaatcggagctggagagcgccacgtacactatctaccaccttttcggggcatgatgatcctaacactgtcacaagcatgcttgatccagtaagtggtctgggacatcagtcatttataactgatgatgctcttgatcaagtattctccccaccactgttgttggagacttctttatttcaggatgcatacgaggacttgcttgctccattatctgaaaccgatacagctttaatggaacactagagctcacatgtacattgtgtaatactttgaccactgccgtaagcttcagtgcttgatcacagcctggaggttcttatggtttggttctgactgctgctgggacatttttggtgaatttcttgctggttgtgttgcttgccagttgccaccagcttgtgagggatgtctgcgtcagaagaaggggtattattagggaaagttggggtatttggttttggggagaggaaaagagtgttttagtggtgatatagatgtctgtaatgttccagccgttgtgtgcacagtaagataagattcaaaatcgtgtgtatttagcgtacattgtatgtatttcatgtaataatttgcttcgcttaaaaaaaaaaaaacatcgacgttccaaagcaaacaaccttgtcaaatttagcccatgaaatgacagctgaattccgaagtctttgtgctgaagaggcctacctacagcaggagttagagaagctgcaagacatgcgaaacaaatccaaactggaaggggaactttgggatgaacgtatctcaagttcatctggacagaattcccatttggtgtctaaggcaactcgtttgtgggaaacaatattggctcgcaaagatcaaacaccagattccgaatcagactctgactctcctatcgagtcctggtaccgtatatcaggatctcaattgctagcagcaatggatttgagttcaagcgttccacattctgagttactatcagctcgagctagtgaagcgtctccatttttggacaaacaagaacagatgtctgctctattccaaggaaaggaagaagccctctcaaggttagatgataggaatggacgtgctcaacaacagactgttgatgtggctgaaattcttcgccgttggactcatgctttacagcgtattcataaacagtctcttcatttggccaaagcaaatgatggagatggaccagaactactccgaagtgcatctgatggtgaaactagtacccatgctgactcattaacggcaacattggctgaacatcgtcagcacttagtcagtatacagggcctaattaatcaactcaaggaagctatcccggcaatgcagcagtcaatagcagatctgtcagaggaagtaaatagcgtatctagtaatccaatggataaaatcatctccagattgtctccgtcagtgcaaaattcagggtttggaagagcagaagaaagcagcagtgaactttcagagatgacttccaagctttcttctacacaccttgacaaggctgggagcagtcctgctctaaagctaccacctttatttagtctgactccaagttcttctggaaaaggaacacaggcacaaaaaaggaatgcgttaggacggcaacctagccaagaaatcctgtctgaagagaaaactcttccccttccctcaactaaagatgaaacaaatggctcaatacatgaaaatgagggttattttgctcataacatcagacgttctgttcgtgaagctgctctatcaaagccattaagaaacccagagaggccacatgaccagagtagtgatgatggttcagagcacttctttattcccctatcaacaggtgcttcaaagatggagattgatgccgtcgataataatagaagaatgcaaaaactgggtttttcatcaccacaaatgaagttcagtgatcttcacttcaatgttgacagcccaatgcatgcaactcctgttctgtcaagtaaacttaatgggcatgatgatcctaacactgtcacaagcatgcttgatccagtaagtggtctgggacatcagtcatttataactgatgatgctcttgatcaagtattctccccaccactgttgttggagacttctttatttcaggatgcatacgaggacttgcttgcctggaggttcttatggtttggttctgactgctgctgggacatttttggtgaatttcttgctggttgtgttgcttgccagttgccaccagcttgtgagggatgtctgcgtcagaagaaggggtattattag

SEQ ID NO: 85394 - DNA, 991 bp, Oryza sativa
  Clone ID: PAT_MRT4530_84537C.1
ctgcaggaatcggcacgagggagagagagagaactagtctcgagttttttttttttttttttttttttttttttttgtttttttttttttttttttttttttttgagcgtttctcctaagctaacggaacgtttattcacacaatggtgttcttatctgataaggggaccaaactgtcatgacagtgcggtaacttcagttatcttaacacaaacagcagacagcatgagagcaacacaacatcataaagttcttatcagacatgtgtcatagtaacccaacataatcacacaatggacaacctttcagctcaccacaccataatgatacattatgggagtagcattttatatgtacatgtctagaagttcatcctacaaaggggggcagcagaagaagaaatagacaagatgaaaatgagaaatggtgttcgccattggacgtgatgagatgaaccaagtcggcgtatgatacacctctttctttagatcggcgggatgttcgaaaacgagaagcccttgtaccctttgtaagcatagtaggcaattcttgtgtagtagaacccagggatgaacatcacaatacccagaatcatgaagaagattccgtgcgcgcggtcgccgccgacgttgttggcggccatgaggacgccaccgatggcgccgagcgcgccgaacgcgaggagcgcggccgcgaaggcgatctccttgacgggcgcgccgcgggggccccccacggcgccgccgacgaggtcgtcctcgtcggagatggagaaggcgtggtccacgtacgccatagctcccccccaccaccacacctccgctccgccccccggatccgatccgcccgcacctggcgcttgccaccgcggcggctgctacgcctcctcctcgcctcctcgccgccgccgccgccgcgccgagcgtcttggtcgcgtgggtgtgggtagggttggatgatgtggagagagagagattatgcctccagcccg

SEQ ID NO: 85395 - DNA, 378 bp, Oryza sativa
  Clone ID: PAT_MRT4530_84538C.1
atgttcggtgcaattagtggcttaagtccgagagaagtttttatgtgcgtgcttaatttgttggagagggtactggatgggcacagcagaactcaacccggtgcaattcacctgcaaaatgtcttgcagaggaagcgaggccatgatctgagcacggaaaacgctttggctgcacacaaaggctgcccctttttagctgttctgttcactggcctgcaggccatgacacaagcctcggctccagcacccacttcttccagggaggcacaagccctgaagcaccgaataccagatactgagtgtgtcggacagggaacagagcagaggaccgatgcgaaactcctgaaggcatcccggcgatgtgatgcaacaaggacc

SEQ ID NO: 85396 - DNA, 269 bp, Oryza sativa
  Clone ID: PAT_MRT4530_84539C.1
ttgtacgcgagcgcccatggtaggaggtacacgatcacccacaccatggtaacgcgctgtaacttcattagggcgagagcctattaagccccaatgcgcggggagcaatagcgatatgactgaaaatactgtgacagtacaacctggggaagtcgtgtatgacatacagagcaatgcagcttccaaagtgaacagcaggatctctaggcctgcccttacaaggacttggccgcactggggtacgagagagactcatggatgttatggct

SEQ ID NO: 85397 - DNA, 146 bp, Oryza sativa
  Clone ID: PAT_MRT4530_8453C.1
aattggtatcctttgggagaagaacactactacttgactaaacacgaagaagaaaaactgcaacaaaggataccaattaaaccaaagaattaacttgctcgcctcttcttgctctcgccgatgctggccaaattggccctcgtgcc

SEQ ID NO: 85398 - DNA, 493 bp, Oryza sativa
  Clone ID: PAT_MRT4530_84540C.1
ggcgaaaccaccacacctcaccgccgccaccgccgccgcactctgcaaccgcgccgcgtggagggagggaaggacgaaggaggaaggagatggagcgggtcggcggcggggagaagcagctggaggactgcaccgtgtccaagtcagtcactggattctcgcggctttgcaatcgcgatctgcctaactgtgtcgtggcttaggtttaggtggctcgcgaatctcttgtggttattgctagatttcaacaaatcgtgggactctcttgtctcttgcatcctgtgaggttttggttcgagatttccttgtgattatcctcccttgcgttgatggttaagagcccccttttggggctaaatacaatgattgacagaaaaggttgcatttggaggaataagtagaaggatttcaattcttcagtgagccattctttctatggggagtgcatacttaagatcataattttggatgtcaattatatgttaaaaaaaaa

SEQ ID NO: 85399 - DNA, 227 bp, Oryza sativa
  Clone ID: PAT_MRT4530_84541C.1
aatcccaaaaatcacatggggcaaatgttccatgatttcacaatcttgaatagtaaaccacactagtcagctctgccagagaaaatgattgccttttggtagggacaaaaaatgggaactggcttcccatgcattcattcatacttattattggctagcccaaccaaggctatggtaaggaatccactggcttataatactggttaacaaaaaaaaaaggactacca

SEQ ID NO: 85400 - DNA, 2994 bp, Oryza sativa
  Clone ID: PAT_MRT4530_84542C.1
atgcagccgcgcggtcgtcgtcttccatctccacgacgaggatttgggccaaagagaagcttccaagtttcaaacatatgggcatggaagctgctgtatggattatttaagattgtgggagacaagttagcaccacttgtaataagagagtatagttctcttatgggtgttacgaaagatctccaggagcttcaagatttagttgaggagatcaaaagcgggctacagtctgagaaacatgacacagataatgatcgtgacaagtatgctgtgctcaaatacatgcgcacaaaaccaaaactagccatgtttcaactcaaaatggccaacaagataaagacaatcaaaaacagatttgctgcaattgtcgagcaaagaggcgatgtcaatactatattgaatgctataccaatcgatcataatgttcataaaaacaagattatcagtgagccatccttattgggcaatgttgatgactcaaaaatacatatggttgaagcaatttcaaacgagttgaatgggaataagtttctacttgtcttggatgatgcttggcacaagaatcaatatgactgggaacgattcatgctatatcttaagagtggatcacctggaagccggattttgctcacaactcgtgatcagggagttgcggaggcagtggaatctacatgtacatataagttggctttcttgtcagatgaggacagctggaatttatttcaacaaagtttaaggttagctgcaaaaggtctgccctctgaatttgtagaaattggaagagagattattaaaaaatgtggtggggtgccactggcaattaaaattcttgcaggtgtcctccgtaacaagaaaacagtagatgcatggtgtgccttacgtgatagtaacatgtggaatgttgatgatatagaagatagagtgtttgcgtcattaaggctgagctattttcatctgcctgatcatctgaagcaatgttttgtatattgctctatatttcctaaaggctacaagatctacaaacaccagttgatcggagagtggatagcaaatggcttcatcaatccaatgaatgagattgaacaagtagaggatgttgcaaatgactgctttgattctcttctgaaagtgcactttctccaagatctagaggtagatgagtatgatgaaatggaaatatgcaagatgcatgacctggttcttgaccttactcggcaaattttacagggtgaaatggtgtctcattctcagaatgcaactattggtaattcccaaaaatgcagatatttatctttggcttcgtgcaatgagaatattgaagtgaagttatttagcaaggtccatgctatctatatttctggtgacaacttcgcactcaacaagccaatcaagaaaaggtgccatgttcgttctattattttggagagtatgggcgctactaatttgttgcttccattgataccaaagttcgaatatcttagctattttcgtatctcacacgctagctgtcgagcctttccagaagaaatctcacattgctggaacttgcaggcccttcatgttacatattgcagggcacttaccacattacctgagtctattggtaagcttaagaagctgagaaccctagagttgtcatgtcttttggatcttgaaagtttgcctcagtccattggtgactgtcataatcttcaaagctttctcctgcgtggcagtggtatcagggagataccaaactccatatgtaaaattaaaaaactaagagtgcttaacattatgcattgtcgctctttgaggcaacaatggtcagaattctttgggacgctttgcaacttacagtccatcaacttagcacagattgagggtatccacaacttgttcagttcatttgcttgtcataaactacgcactttgacacttagtggaaccgaaattaccagactaccgcaatgcctcacattggtgagcaccctggaatacatagaccttcaaaactgctgggggctgctagagttatcggagggcatagggaacctagagaggcttgaagttttgaacctaaaaggatgctcgaatttgggtggcctgccagtagggattggacagctaactcatcttcaaaggctgcatttgtttgttataggtggcagtagcgagcatgcaacaatatcagggcttcgaaacctcaacttgttaaccgacaatgatctggaaataaaaattattaaatatgtagaggatccagatgatgcagaaaaagcctccctgaaggaaaagagtggtatactcaatttgacattggattggtcttcaaatggtgcagaagggtgctcggatagtctggaagaagagccattattagatatggaaaaggagctgcgtgtgctcaatggtcttgatccaccatcacaaattaagaagctgaatatctataattacaaagatagcttgttagagcaaattgatccacctcatttcactcaactgactaaacttgtattggaacaatttccaaacttggagaatctgcaaggacttgcacggttgccttcattgaatacttttgtattgaaaggaatgcctaatttggtggagttgtggacaagctcacctgcattagaatcctcatccatctgctttagtgtggattcccctcacctcaagaaattagaactaggaggaatggctggatcatcgtcaggttgggaagtgctgcagaacctcaccgggctcgaatccttgtcaatttattccagtgacctaaggcaattaggggagatcatccggagcctcacctccctccagtatctttgtatctcgggttgcccagttcttgccatgctgccagagtggctggggggattccgctctctgcaaactctagttctgaaagaaatcccactattggctagcctccccaagtcgatcatgctccttacatccctggagaagttggctattgttgaatgcgacaatctaaggggagttgcctga

SEQ ID NO: 85401 - DNA, 1824 bp, Oryza sativa
  Clone ID: PAT_MRT4530_84543C.1
atggccagcaagactcttcacgagttcgctgctcccactgctgacaatgtggctgtcgggccgcaagtcaacataggagatgtggatttcaacttgaagtccagcctcgtcacgttggcccaggctagcccgttctgtggcaagcctaatgaggatgccaacgctcatctgcaacaattcctggagatatgtagcatgtacaccattaagggagtcagtcctgacgccgtcaggctgcggctgtttccgttctcccttctcgggagagcgaagcagtggttctatgccaaccgtgctgctatcaacacctgggataaatgctctacggcattcctctcgaagttcttcccgatgggcaaaaccaacaccctttgtggacgaatttccagcttccagcagacaagggacgagtccattccggaagcatgggaacgactgcaggagtacgtggccgcctgtcctcatcatgggatggacgactggatgatcctgcagaacttttacaatggggtcaccccgatgtcccgcgatcacctggacgcggcagctggaggagccttcttctctaaaacgatggtctccaatatgggttggagcgtggaacgactccagacccgtcagcgaggcatgcacaccgtcaaggagacggaattactcgctaccaagctggacctcctcatgaaacgcttggacgaccacgagaaaaggccacaaggcaccgtcaaggccttggactcacacgtcacgtgtgaggtctgcggcggcacgggtcattctgggaacgactgccggaaacacatgaggaggcgatgtacatgggcaacaacaacgggtcccatccacaaggaggttaggggtggaaccaaccacgcccatattttcaaggaggaaataacaaagtccctgcaaatgaaactgggaggattttggggcaacccgaggggaggtaagtccacctgtgatccgttgtaccctaaccctgcaggaactaatgggatgtcaaaaggaacgccatctaatgactcggctgacaaggagattcagccagaaaagacagtgccgcaaggatactgcgacacatggttgctgccatttcctcaacggagtaggaaaccgtcagtggacgagcagttcgctcattttgttgcagtgatccagaagattcacattaacgtgccattgttagacgcaatgcaagtgccaacatatgcctgttgtctcaaggacatactcaacaacaagagaccgctcccaacagcggaggtggtcaagctgacggaacactgcagcaacgtcatactccacaagctcccggagaagaagaaagatccggggtgtcccacgatcacctgctcgatcggggcacaacaattcgaccaggccttttgtgatcttggagctagcgttagcgtcatgccaaaagacgtctttgacaagctcaacttcacggtgttggcaccaacaccgatgcgcctccaagcggctgattcatcagttcgttatccggcagggatagtggaggatgtgccagtcaagatacgggatttctttatcccggttgattttgtggtgctagacatggacacggggaaggagacgccgctcatcctggggcgtccgttccttagcaccacaggagccaacattgacgtgggaacggggagcatccgtttccatatcaacaggaaggaggaaaactttgagtttcaaccaaggacggaacaatgctccatggtcagaatcaagtacgggccgaatccgcagaatattcaagtggtcgaagtggagccacccaagacggatagcctggtaaggtttatgtag

SEQ ID NO: 85402 - DNA, 826 bp, Oryza sativa
  Clone ID: PAT_MRT4530_84544C.1
cgtatcgggaagcaaccttacctcccgaacatagcctaagggtccccgcccaagtcgctggccggcacgccccgggccgccgcctgcgccgcggggtctggggttagggatcggacttcctcgattgggacgtcgtcgaggagggtgttcgatctcagggacctcgccgccgccgaggtgcccgcggaggtgccgcacttcgagctcgatgaggaccctgcgttctggaaggatcgcaatgtgcaggtgttgatacggataaggcccatcaatgcagccgagagcaccgcgaacggtcagagaagatgcctggtacaggatagctcaaagacattgagctggacagggcatccggatacaatgttcacgtttgaccatgttgcatgtgaaacaatatcacaggagaagttattcggggttgttggtcttccaatggtggagaactgcatgtctggatacaatggctgtttgtttgcctatggacagacaggaagtgggaaaacatacacgatgatgggagagcttagtaagctggacaatgaactcagcaaagactctggtttgacacctcgcatttttgagtatctttttgctcggataaaagaggaagaggagagacggagagaggacaaactgaaatatatctgcaaatgctcctttctggagatatataatgaacagataaccgatctacttgaaccatcatcaaccaatcttcaggtagtttgcctactagtttccatttgaggattgcttcatactgtactacctaatggggaaactaacatagatattgcctctgtagaatccgggaaaaataaagaag

SEQ ID NO: 85403 - DNA, 1076 bp, Oryza sativa
  Clone ID: PAT_MRT4530_84545C.1
ggccggccggcccaaggcggcccaagacgtgcgcgcgcgggaggggaggagagatagcgccggtggaccgggctcaccacgcgcggtcccgagtgggacccgcttgtcagcggctcggctcaccgtgcggagggagcacgcggcgcacgcgccggatgcggcgggcccacgcgcagcctcacggctcgcggtggaacgcgcgcacgggagggggctgaccggggtcggcccgacccgatctcggccgagctggcgccgacgtggcacctacgtggctgccacgcgggctggcgggaggaagacgaaggcgccggccgcgaatggacggcgtgcggcggcggtttctccggggcgtcttgcgacgatgaggggcgacggggcgtacaccgggatgacgagggagaaagagagggagcgagccaacggcttggattcgccggagggagtccgtcggcggcggattgcggcggcggcgcccggcggagaggaaagggggaaacggcgatgaggtcacgaggggccaattcccggcggtgagagcatctacgcggccacgggaatccgttgctagcgtcggattgggcggagctacgccgagcgaggccggcgacgagtgggtgctacggagcacgggcggcgacggcggcgagcacaaggcgagcggcggcaacggtcggggcggcgccacgggaggtggtggcaatggcgggaggatgacgccggcgggaggaaaaggggaaaaggagggagagaaagggggcttgcctccttgccgctttggggaaaaggaggagggggagagagatcgacgcggcagagggaggagggctctgcctccgtcccttggcggcttgcgcgaggagtggcggggccgaggcgatgacggcagggcggtgtggagcggagcggcgacatgggcgacaggcgcgggcaggcgctgacgacggcggcgaccaggcggtcggccaccacggcacgcgcgcgcggcttgcaacgggaggcgcggctgattgagtggcgcggctcgggcacgtgcgctggctgcggggccgagcggctgcgctgtcgcaagccct

SEQ ID NO: 85404 - DNA, 1485 bp, Oryza sativa
  unsure (1)..(1485): unsure at all n locations
  Clone ID: PAT_MRT4530_84546C.1
atgggccggccggcccaagacgcgcgctcgcacgggagggaggagagagagagccggtggaccgggctcaccgcgcgtggtcccgggtgggacccgcttgccgattactcggttcaccgtgcggagcgagcacgcggcgcgcgcgcgcgggcggggctaggacgcggtgcacgcgcgcggttcgcggtggacgcgggtgcggcgggcccacgcgcagcctcgcggctcgcggtggaacgcgcgcacgggaggggctgaccgggatcggcccgacccgatctcggccgagctggcgccgacgtggctgccacgcgggctggcgggaggaagacgaaggcgccggccgcgaatggacggcgggcggcggcggtttctccggggcgccttgcgacgatgaggggcgacggggcgtacaccgggatgacgaggaagaaagagagggagcgagccaacggcttggattcgccggagggagtccgtcggcggcggatttcggcggcggcaaccggcggagagcaaagggggaaacggcgacgaggtcacgaggggccaattcccggcggtgagagcatctacgcggctacgagaatccgttgctagcgtcggattgggcggagctacgccgagcgaggccggcgacgagcgggtgctacggagcacgggcggcgacggcggcgagcacacggcgagcgatggcaacggtcggggcagcggagcgcccggagtccccttccgcgtccacgaacgcaccggctctcccggcgcttggcgatgaacggcggaggcgagacagagctcggaaggcggcggcaacaatggcgatgggcgcgagctggcgctcggcgctcgcgtccaatcggcgacagggcggagggaggatgacgccggcgggaggaaaaggggaaaaggagggagagaaaggggggcttgcccctttcttctttgggaaaaggaggaggggagcgggggcgtcgcggcagagggaggagggctctgcctccgtcccttggcggcttgcgcgcggagtggcggggccgaggcgatgacgacggcgatgacggcggggcggtgtggagcggagcggcgacacgggcgacaggcgcgggcaggcactgacgacggcggcgaccaggcggtcggccactcggcacgcgcgcgcggcttgcaacgggaggcgtggcggatggagtggcgcggctcgggcacgcgcgctggctgcggggccgagtggctgcaggcgcggcagggcagcggggccgggcggcgcagacgcgacgcgggcgacgaccacgcaggcgcgcgcgcgcgaacgacgcgcggggagcggcagcgagggagcgaagaggagggctcggctcggcgcgggcggctcacgcgcacgcgcgcgggcagagtggagagggaggggcgctcggcgcgggcggctcacgcgcacgcgcgcgcagcgggggattctttagagtcgannccgcaggnccagccaag

SEQ ID NO: 85405 - DNA, 1519 bp, Oryza sativa
  Clone ID: PAT_MRT4530_84547C.1
atgggccggccggcccaaggcggcccaaactcgcgcgcgcgcgggagggaggagagagagagccggtggaccgggttcaccacgcgcggtcccgggtgggacccgcttgtcagcggcttggctcaccgtgcggagggagcatgcggcgcacgcgcgcgggcgggggagggacgcggtgcacgcgcgcggtttgcggtggacgcgggtgcggcgggcccacgcgcagcctctcggctcgcggtggaacgcgcgcacggggaggggctgaccggggtcggttcgacccggtctggctgagctgtcgccgacgtggcgcctacgtggctgccacgcgggccggcgggaggtagacggcgacccggccgcgaatggacggcgggcggcggcggcgagcggcggagcgaaccacggcgatacgggcaacagcgagcacaccgggcggttgcacgtgacaaggggaggcgagccaacggctcggattcaccggagtttgctcgacggcagcgggttgcggcggcggcaaccggtggcgggagaagagggaaacggcgacgaggtcacgagaggtcgattcccggcggtgagagcatctacgcggcttcgggaactcgacgctagcgtcggattgggcggaattacgccgagcgaggccggcgacgagcgggtgctacggagctcgggcggcgacggcggcgagcacacggcgagcgacggcaacgaggaagaagagggcgcgcccggagtccccttccgcgtccacgaacgcaccggctctcccggcgcttggcgatggacggcggaggcgaggcagagcacgggagcggcggcaacgggcggtcaagccggcgagctggcgctccggctagcgtctaaagcggcgacaggaggtgacgccggcgagaggggaaaaaggggagaaaaagaggaaaaggggggggagagaaagggggctcgcccctttgccgattcgggaaaaggaggagggagcggggcgactcggtagagggagaggggctctctgcctccgccccttggaggctaacgcgtggagtggcgggggccgggcgatgacgacggcgatgacggtggggtggtttggagcggcgcgacgacacgggcgacaggcgcgggctggcgcggcagagggtgacggcggcggcgaggcaggcggtcggccactcggcacgcgcgcgggaagcaacgggcggcgcggctgggcagcgggaccgggcgacgcggacggcgcagacgacgcggctcgggcaggaaaccacgcgggcgcgcgcgcgagcaacggcgcgcggggccggctttgcgagcggggagctcgtgcgagaggagggggcgctcggcgcggctctcgcacgcgcgagcagcgagggggggggaaacgcgccggggtgaggagggagcgagagagagagagagagagagagagagagagggaggggggagcgcccgagagagagggggccggggaagagatgggccgagcggaattcggcccatcgaacccggg

SEQ ID NO: 85406 - DNA, 226 bp, Oryza sativa
  unsure (1)..(226): unsure at all n locations
  Clone ID: PAT_MRT4530_84548C.1
ctacttcgtnctcccgggcgaggtgcggaggcgcgggatgccgcngnaggaggtcgcggnttcgccgtcaagcatccgccgcgctcgctgccgccagcagcagcagnaccacatccggatgcggcggcggcggnggcggcgcggntccntggcgccgctcgttttcgctccnccggaggaggagtacgattacnacgcgtctaattactgcaagancaatgcttcg

SEQ ID NO: 85407 - DNA, 525 bp, Oryza sativa
  Clone ID: PAT_MRT4530_84549C.1
ccccccgtcgccgctttggccgcgaccgccgagcgctagctccctcccttgaccgccctaggtcggttcccaaatcgacgttgccaccctataaagcccaggcgccctctctcccttctcctcttgttttgtcccatcgcctctactccattatcgccgcctcccgtgctccgttcatcgtcgcgcgtgtcggaggagccggcacgagcgaggacgcggaaggggactccgggcgcgccctcccgaccgttgccgccgctcgctgtatgctcgccgccgtcgccgcccgtgctccgtagcgcctgctcgtcgccggcctcgcttggcatagctccgcccaatccgacgctagcaatgggttcccgtagccgtgtagatgctctcaccgctgggaatcggcccctcgtgacctcgtcgccgtttcccccttttctctccgccggttgccgccgccgcaatccgcccccgacggactccctccggcgaatccaagccgttggctcgctccctctcgttctccatcat

SEQ ID NO: 85408 - DNA, 1218 bp, Oryza sativa
  Clone ID: PAT_MRT4530_8454C.1
atggacactgactttcgtgctatttggaaagctgttggatggcattgatttgttgtagtggataagcctggttctcatttgcttactttgcaattcctgtgcactttgaaagaaatacaagatggaatttcctttcgcttttttcataatgaatacacacttacatggaaaggattaagtacacttcttggttttcacgattcctataaaatcaatcttcgaaatggaatttcctggtttgagaaaaaacatattttgggaagatatttacatccataatcctacatttaggcttatgcacaaatggattgctatgaatctttttcctagaggtgatcttagacctataagagaggatgaattgattatcatgtttgccacggttagtaagattaaagtttctcctgtgaaatgcatgataaggcaatggttagagagtataagatttactgctcctgttgagtgcacttctctgattacttgcatagcaagaggactaggggttattactaatgatcaaattgcttatatttcaacccctcgtccctgtgttgatgagaattatctagcaagggcatattcttaaacatggagtagatggatctttgatatactttttcccggttgtacaaatgaaattccgttactaacgcgggatataatttgtacaactgtcatgagctaaccattcccctgtagaccatagaagaatctcgtgtaggtggaacatacagggaggcatgcaacatggcaagaaatgaacgcgacggttcaacatcctcaacacccgtgcagaagtatgaggccggttgagagccaactggggatgcgcccggatgtacccaagctccacgccatagcattggaggttcgggctgggaatgtgccagtgagagccgatggcgagcgcctcatgacatacaatggggaggcttgaacaatcagtcccccagatcaagcggtatgcctccatctcccggtgaatggcactcaagttcctctcgttgggacttgggtgaaatcaccaagagaatggatacccttgatatgcagacgggagagatccaatacaacctcgaggaacacatagcacagacgcaagaatgacaacaaaatgctgatgctcagttcaccaacatcaacaatttgatgcagcaacagcacgatgaccttcaagcgtacttctgcttctagggattcaatccttatcaaggatct

SEQ ID NO: 85409 - DNA, 1547 bp, Oryza sativa
  Clone ID: PAT_MRT4530_84550C.1
atgacctctaagcggcgcggccgaagagaattggggcggtccggccgagctaaatgggccggccggcccaagacggtcgcgcgcgcgggagggaggagagagagccggtggaccgggctcaccgcgcgcggtcccgggtgggacccgcttgtcagcggctcggctcaccgtgcggagggagtatgcggcgcacgcgcgcaggcgggggagggacgcggtgcacgcgcacggtctgcggaggaacggatgcggcgggcccacgcgcagcctcacggctcgcggtggaacgcgcgcacgggaggggctgaccggggtcggcccgtcccgacctcggctgagctggcgccgacgtggcgcctatgtggctgccacgtgggctggcgggaggtagacgacgacgccgaccggaacggatggcggacaacagcggcgagcggcggagcgaaccacggcgataccggcgaaaacgagcacaccgggtggttgcacgagacgaggggagacgagccaacggctcggattcgccggaggaagcttgacggcggcgaatcgcggcggcggcaactggcggggagggaagagggaatcggcgatgaggtcacgagaggccgattcccggcggtgagagcatctacgcggctacgggaatccgatgttagcgtcggattgggcgaagctacgccgagcgaggctggcgacgagcgggtgctacggagctcgagcggcgacggcggcgagcacacggcgagcgacggcaacggagagggctagcgctcggcggtcgcggccaaagcggcgacagggaggagggaggaggatgacgccggcgggagggaaaagggggaaaagagggagagaaaagggggcttgtccccttgcctcttcgggaaaaggaggagggagcgggggcgtcgcggcagagggaggagggaggctctgcctccgtcccttggaggctagcgcgcgggctggcgcggcagagggtgacggcggcggcgaccaggcggtcggccactcagcacgcgcgcgcgggaaacaacgggcggcgcggctgggcacgcgcgctggctcgcggggccgagcggctgcaggcgcggcagagcagcggggccgggcgacgtggacggcgcagacgacgcggctcgggcggggaaccacgcgggcgcgcgcgcgcgaacgacgcgcgcgggggccgtcttcgcgagcggggagcttgctagggagaggagaaggagagcgaggggaaggggcgctcggcgcggcgcttgcgcacgcgcgggcagagcgaggggaaagggagggggcgctcggcgcggcgctcgcgcactcgcgcgcgcggcgcgcgggcggggcggagcggagcggagcgagagggggagagggagcgcgccgggggaggggagggggcgagagagagagagagagagagagggagagcgggagcgcgccgggggagaggagagggccgggggagaggggaagatgggccgagagaaattcggcccatcgaccccgggggaggcaaaatagacttttgcggaggaatt

SEQ ID NO: 85410 - DNA, 756 bp, Oryza sativa
  Clone ID: PAT_MRT4530_84551C.1
atggcggcccccagttggcctaccgtatccaagaaccttccgctgctgggccatggacgttctcatcatccgatgtatgcaagtcaagacgagattaaaatgtcaagtagaagatggtgccatggttctcctgacaatcaagccgaggagcttgacgaggtaggcggaaccggcggacaacggcgctgtgagttgcgccgcggcggaggagtcgagcccgagccctcgagcggtggcaccgcaccaggcagagaaagatcgtctgagccgcgccgtcgtcgggatgtcgtcgtctacggctgcgatcggcgatccagatctgcttctcctattatttcagagctggcaaagaagatttgtgttccatgcaattctaaggatatacatgccatgccagaagattctgctaagaagatgctagaacaggttttattcttgtatgattttgtagtcaagagtctgattaaggtgggtggttgggaattagcaaccgaaggtgacattctgaaattgcacagagcatggaaggtgaagaattttgtaaaagggcttgaattccttcagcttgttgctgctgttgctgaggaagaaggccaccaccctgatcttcatcttgtcggttggaacaatgtgaaaattgatgtttggactcactctgtcagaggcttaactgacaatgatttcatccttgctgcgaagatcaataacctcaacttagaaggcctcttaagcaagaaagctacagtccaaaagtag

SEQ ID NO: 85411 - DNA, 1334 bp, Oryza sativa
  Clone ID: PAT_MRT4530_84552C.1
aacctctgcagagggggttcactttacccacacgacattactaacccgaatcacccagcccgcatttcgagagcagacacagggttgccatatgccgacgagaggggtcccagaccaacaacaggttaggtcccagaccatactgtgccaggaagcccgggggttctccccgacaccaccccgttgaatctacatgtctctcggcatcaaggctcccccgcttagcaatttactcagccaggggtgtcccattccacctatgtggtcgcacttgtcttatgttcggatgaaattccaaggaaacggtccttaagtgcaagagcgggaaaccatactcccggtacgttccccggtccgcgattttaagtttgaaggcgaccgtcgatactcgtgcagagtgcacgatttccgaggcgcaactgggtggttacaagggaacatggtggcttgccttgctcgagatctggagcttgatcctcgaaatcctcgcactgcgggtcttcgggctccgaaactacacgcgaaacgggacaactcaacaaacgggtgcggcccgagagaattggggcggtccggccgagctaaatgggccggccggcccaaggcggctcaaggtggcccaaggcgcgcgctcgcgcgggagggaggagagagagagccggtggaccgggctcaccacgcgtggtcccgggtgggacccgcttgtcggtgattcggttcaccgtgcggatcaagcacgcggcacgcgcgcgcgggcggggctgggacgcggtgcacgcgcgcggttcgcggaggaacggatgcggccggcccacgcgcagcctcacggctcgcggtggaacgcgcgcacgggagggactgaccggggtcggcccgacccgatctcggccgagctggcgccgacgtggcgcctacgtggctgccacgcgggccggcgtgaggtagacgacgacgccggccggaacggacggcggacgacagcggcgagcggcggagcgaaccacggcgatacaggagaaagcgagcacactgggtggttgcacgagacgaggggagacgagccaacggctcggattcgccggaggatgcccgacggcggtgaattgcggcggcggcaaccggcggcgggagaagggggaaacggcgacgaggtcacgaggggccgattctcggcggcgagagcatctacgcggctatgggaatccgatgctagcgtcggattgggcggagctacgccgagcgaggccggcgacgagcgggtgctacggagctcgggcggcgacggcggcgagcacacggcgagcgacggcaacggtcggggttgcgccggctag

SEQ ID NO: 85412 - DNA, 5515 bp, Oryza sativa
  Clone ID: PAT_MRT4530_84553C.1
atggacggggggacggggccgggggcggagctgctctcgccgggggaagccgagtggccgcccgagctccgcctcccgcctccgccgccgccgcatcctcctcctcctcccccgctcgagccggctccgccatccactccccagctccgcggcgaggcgtccccgcccccgcctccgcctccgcccgtgggaccacccggcgcggcggtggtggccgccgccgcgaggaaggaggcgtccgcgtccgccgaggggtttgatgactcgcacttcctcggatcgatcatgggggcgcccgcgcaccagcaccagcaccagcaccagcagccgcctgccgtggggccgccggtggtggtgaagaggaagagagggaggccgccgaagaacagggatggagcggcgccgcctccgccgcccaagccggtgaagaagagggaggacgacgaggacgtggtgtgcttcatctgcttcgacgggggcaatctcgtggtctgcgataaaaagggttgcacaaaagtctatcatcctgcttgcatcaagcgcgacgaatcattctttcgatctcgggcgaaatggacatgtggttggcacctatgcagcacctgtgaaaaggcagtacagtacatgtgctatacttgtacatactccctctgcaaaggttgcatcaaacaaaagccagtcaaattctttggtgtcagagggaataagggcttctgtgatacctgctatagcactatactgttgatagaatccaaagatgatcgtgccaaggctaaggtggacttcgatgataaaaataattgggaatatctcttcaagttgtattggttggatcttaaagggaaacactctctaacattggaagaacttgtcaatgccaaaagctgttggactgttcgtagcacttccgctaggagagaaaaggaagattcatccaatgacctctatgatgcaaattttgaccttgatgccagttctgatggcgcctcaagaaaacgaagacggaatagtttttcagggaaaaggggacggaaacgccaaaacaatggtgctgaaagcttacctaagagagtgcaaaatgaaggaatgacttttataggtgacacacaatgggcatcatcagagctcttggaattcattgggcacatgagaaatggtgatatttcttatatttcccaatttgatgttcagattcttctgcttgagtatgtaaagcaaaaaaatcttcgtgatcctcgcagaaaaagtcaaattatttgtgatgcgaggcttgccaatttgtttaggaaaccacatgttggccactttgagatgttaaagcttttggaaatgcattttcatgcgaaggagacggtaaatggtgatggccaaaaaggcattgactcagattcagctcaaatagacagtggaggatatagtgatatgccaagtaaattatgctctgataagaggaggaagattcataagaagattgagagagaatcaccagctaatctagaggattatgcagcgattgacatgcacaatatcaatttgatttacttgcgccgcagcttgctagaggatcttattgatgataatggcacgttctctgacaaaattactggtgctttcgtgaggataaggactccttgtgttggccaaaagcaagatatttaccgcctggtgaaagttcttggtacacataaagtagcagaacggtacagcgtcggtaagaagacaactgatcatgcgcttgagatattaaatttagataaaaaggaggttatcacgatggatacaatctcaaatcaagatttcacagaggaggaatgcaaacgcttacgccagagcatgaagtgtggtttgattacccgactaaaagtggtactgttgatcaagattcattatacgggagacatccatgagaaagccaaaatattccaactgctgcgagttaatgattggttagaaaatgaaaagcagagactgagccatctacgtgatcgtgctagtgaaactgggcgcagaaaacaatatccttttaacttaatcaaagatttgcatgcctatggtcatcatagattaatctatgaagcgttcaattcataccatcattgcgaaattattatttgcatgaggatacatttcttcatgcatactttactaatggagtatgtggagtgtgtagagaagttgcaacttctgggcactcctgaagaaagagcacgcatcattaatgaagatccagaagtacatgttgacccatgtatgtctcctgattatgaatctgctgaagaattggatgttaagaaagctgttgattcgacaagtaggaatggatcagacctgttatttcttggaagaaaaggaatcgaaacaaactctctgcagaatcatagacaaaattgttctgccactagtcatcacacgactacaagtccacctactgagggtatgactcatggacaaggagaagaagcatcgtttgcatcgtcagaaattgtatcaggtgacatggaaccagaaaaagtatggcactacaaggatccttcaggaagtgttcagggcccattcacacttttacagctgtccaagtgggcagcttatttcccacgtgacctgagaatatggctaacatttgagagtgaacaaaactcactgcttttgactgaagttctctcgaaacaacaaaaagatttcattcagccttctcccaaagttgacaataataggtcaacatgggaaggcgttgggcaagatagagttgactcaagtttgactggaaataactcttcctctcctattggttataatgtgatctactcttctcggttgcctagcccatctgctgactattgtgcatcagctagagaaggcccaaaccttccgagtggaaccttgccattcatgacaagccagaaaacacaaaaggatcctcagatgttgcatggccaggcacagcatcagggtgattattcatgtaccatcccgtcatctgtggtttcatatagaccagctggttctcatgatgagtggccccctcgaggcaacattggtgaatggaacaatagtcaggatagtggtggtatgtggagcccaaccacacctcacatgagtcggagcaatttggagcatcagcctgacaggtgtattacgaagaagcaattgcagaatgattccaaacgtaatacgctagcaggatctgcagaaaatctaaattcccaaatggattttggttcacagaaagtacacattcctactccacaacaacctgagagagatcttgccacttctgttggtacttcaaggcaatttgagtttaaaacttgtcatcaggaaggctctcactggagttcaacagcagactccattactcatgatgggcttcaattatctcttgcttcagcaaagcctgagagctgctctgcagtaaatcctattagagatggagattccagttcagcttctcgtgtgcctaatcaatcaggagctcatgtctatagcccaccacacccagctacaactaatttaagcaagagtgaggagactatgaatcagtgtaaatcgtgtgagcctgaagcatcaaataaatcacgcaagcctgatgcatcacatgctccagttaatcaacatcctaagcctgaaagtgatccattgttacctgatactcaagattttgagcgcacgcatcctagcccaagtactgaacatgacacaaaggagccattgaaggatcaatcgaggtcaacatcagtagcacctgaagggtcgggtacaatggcacatggacagtcttccatagcttttatatcagaagcatctggcccactttctagtaaaattgttggcttgcaaccacccaaggatacatcatttcttgtcgaaaaagatataaaagatggaggttccattacacaaacagagcaacaaaaagaagagagtacagcatttaagaaagagaacgtagctgttgatcctatctctgacagtgaagcaatagtatctggtgtgttggaatctttgacagagacatataatctgcatgaagaaaccgctttggaaaatttcacgccaacatctgccgaggaagaacaaccgcaatgctctacccctattgcattatctccttgggatgaaacaagtgactatcaaggtgaagctgttgattctgctctatggggtgtccaagatgaccaaaacaatgaaatgtggtcattgtcttcaccaacacctactctccaaccttcaggtattggagctgataccaaaggtgcttcctgtgctatagaagaggtgatagtagcccaaggaaatagtggtgttgttgaaccgtcaccagcactggagaagaaaaggattgaaaaagtaccaagtgcttccatagatcgtggagtaccagagcaggtaaaaccaaaatcagatgctgcattatctccagaagagagcagaaaaccttcaggtttgcaactatcaagcacatatctacaagggagcacaaaatcttcaggtttgccaccgtcaggcacatctctagatgggggcatagaaccttcaggtttgctaccttcaggaacttctttggagtggggtacaaaaatttcaggtgtgcaatcctcggcctcatctctagaggggagcaaaaaggcttttgttaggcaaccatcaggctcttcactagagggaaacacaaaagcgtcagaaaagcttcagcatggcaatcatcaggttcttcgcctgttgcagggagctcaaaagcatcaggttggcagccatcacctcgcgagagctcgaaatctaagcctaattccacatggggtgccggccaaagccgcaactcgtcttcgcaccaatcaacaacaccaacagctaaatactcatcagaaaccccaaggagacaaggaaacaacaacacaaattctgctggctggggagactctctcggaaacaagagctggcattcaccctcaggcaatgcgagcagccgaggcagccattctagccaccaccatgaccggcacaatcagagcagcgaaccatggcgtggtggctcaaatcattccaggagatcagatcatcgtcaagaacatggcaacggtggctcgtcgagatcatcgtcgtcgagggggcaatctcaaagggggatctgtagatactacgagaatggctactgcaggaagggcacttcctgccagttcctccaccgttgaaaacgccctcacatttttgtacagccctaaatgatttctcactcactccgtagtcagcacagaagtgacctttatttaaccttctcggcaccactcagctgttagtaagtatatacatatccatcagcacaggagtatgattaagttagcattttatgcttggaaaaacagccactgatgtacggccacgactgtagatccttctctttaggtgaatgatgcattttgattgatcctgttaggtttagtggaattatgagttcacccgctttaaaaaagaaaaatctttaataataatattttaaatttattctactaaaccaatg

SEQ ID NO: 85413 - DNA, 907 bp, Oryza sativa
  Clone ID: PAT_MRT4530_84554C.1
gggccccacgatcatcggccccgcgcaggaagcgcaagaagaagcaaccggagagcctcctccggcggccatggccagggccctcctcctccggcgcggccaccccttcctccgccgcctcctgcggcctcccccgcctcccacctcctctgtactggaatcctgcaatagaaatgtgtcaccaagagttcagttgtggagattctctgcagaagggaaagaccagacaaattcaagtgaagatggttacagtgaggcaaacattaagaagaaggactttgcgctacaacaagctttggaccaaattaagtctgcatttggtgaggagtcaattatgtggctaaatcactcttacggtcctaaagaagttcctgtcatatctactggatcctttgcattggacatggctttaggaattggtgggctcccgaagggaagggttgttgaaatttatggtccagaggcatcaggaaaaaccactttagcacttcatatcatagctgaagcacagaagaatggaggatattgtgcttttattgatgccgagcatgccctggatccaacattagcagaatctataggtgttaaggcagaacacctgttattatctcaaccagactgtggtgaacaggcccttggtcttgctgatatcttaatccgaagtggctctattgatgttgtggttgtggacagtgtagcagctcttgttccaaaaactgaactggatggtgagatgggagatgcccatgttgcacttcaagcaaggcttatgagtcaagcacttcgcaagttgagccattctctttctcgctccaggacaatgttggtgtttattaatcaggtttgccttttgtataattcattgggtaatgctgggcatcccacaatatttgtagtgaaattttaa

SEQ ID NO: 85414 - DNA, 1538 bp, Oryza sativa
  Clone ID: PAT_MRT4530_84555C.1
acgggccggccggcccaagaaggtggcccagagcggcccaagacgcgcgcgcgcgggagggaggagagagagagccggtggaccgggctcaccatgcgcggtcccgggtgggacccgcttgtcagcggctcggctcaccgtgcggagggagtacgcggctcatgcgcgcgggcggcggagggacgcggtgcacgcgcgcggttcgcggtggacgcggatgcagcgggcccacgcgcagcctcacggctcgcggtggaacgcgcgcacggggagggactgaccggggtcggctcgacccggtctaggctgagctggcgccgacgtggcgcctacgtggctgccacgcgggccggcgggaggtagacgacgacccggccgcgaatggacggcgggcggcggcggcgagcggcggagcgaaccacggcgacacgggcaaaagctagcacaccgggcggttgttcgtgatgaggggagacgagccaacggctcggattcgccagagggagttcgacggcggcgaatcgcggcggcgacaaccggcggggagggaagagggaaacgccgacgaggtcacgagggaccgattcccggcggtgagagcatctacgcggtttcgggaactcgatgctagcgtcggattggacggagctacgccgagcgaggctggcgacgtgtgggtgctacggagctcgagcggcgacggcggcgagcacacggcgagcgacggcaacggtcggggcggcggagcgcccggagtccccttccgcgtcctagtgcgcaccagctcctccggcacacacgcgacggctgcggtcggcgagagggacggcaatggcgcgggcgagaaacagggaagatcgctccggctagcggccaaaacggcgacaggagggagggaggatgacgccggcgggaggaaaaggggaaaaaggagggagagaaaagggggctcgcccctttcttctttgggaaaagggggaggggagcgggggcgtcgaggcagagggaggagggctcggcctccgtcccttggcggcttgcgcgcggagtggcggggccgaggcgatgacgacggcgatgacggcggagaggtttggagcggcgcgacgacacgggcgacagacgcgggctggcgcggcagagggtgacggcggcggcgaccagatggtcggccactcggcacgcgcgcgcggcttgcaatgggaggggaccacgcgggcgcgcgcgcgaacaacagcgcgcgggggccggctttgcgagcggggagctcgccagggagaggagaagggaagcgaggggaggaggcgctcggcgcggtgactcacgcgcacgcgcgcggacagagcggaggaggaggagcgctcggcgcggctcccgcgcgcgcggcgcgcgggcggagcggagcggagctaagggagaggggagagggagtgcgccgggaaggggagggggcgagagagagcgagagagagggagagagagagcgggagcgcgccgggggagagggggagatgggccgggggagagggggagatggg

SEQ ID NO: 85415 - DNA, 1434 bp, Oryza sativa
  Clone ID: PAT_MRT4530_84556C.1
gctggccggcccaagaaggcggcccacagcggcccaagacgcgcgcgcgggggagggaggagagagagccggtggaccgggctcaccatgcgcggtcccgggtgggacccgcttgtcagcggctcggctcaccgtgcggagggagtacgcggctcatgcgcgcgggcgggggagggacgcggtgcacgcgcgcggttcgcggtggacgcggatgcagcgggcccacgcgcagcctcacggctcgcggtggaacgcgcgcacggggagggactgaccggggttggctcgacccggtctaggctgagctggcgccgacgtggcgcctacgtggctgccacgcgggccggcgggaggtagacgaagacccggccacgaatggacggcgggcggcaacggcgagcggcggagcgaaccacggcgatacgggcaaaagctagcacaccgggcggttgctcgtgatgaggggagacgagccaacggctcggatttgccggaggaagcttgacggcggcgaatcacggcggcgacaaccggcggggagggaagagggaaacggcggcgaggccacgaggggtcgattcccggcggtgagagcatctacgcggtttcgggaactcgatgctagcgtcggattggacggagctacaccgagcgaggctggcgacgtgcgggtgctacggagctcgagcggtgacggcggcgagcacgcggcgagcgacggcaacgaggaaggagagggcgcggccgaagtcctcttccgcgtccttgctcgtgccggctcctccgacacgcgcaacaacgaacggcgacggcgaacagagcacgggggcggcggcaatgggcggtcaagggcgcgagctagcgctcggcggtcgcggccaaagcggcgacaggtaggatgacgccggcgggggaaaaggggaaaaaggagagggagaaaggggcttgcccttttgccgattcgggaaaaaggaggaggggagcgggggcgacgcggcagagggaggagggacgctgcctccgtcccttggcggcttgcgcgcggagtggcgggggccgggcggtgacgacggcgatgacggcgggcggtttggagctgcgcgacgacacgggcgacagacgcggcagggcagcggggccggacggcaaccacgcggacggcgcagacgaccacgcgggcgcgcgcgcgaaccacggcgcgcgggggctggctttgcgagcgggaagctcgccagggatggggagaaggggagcgaggggagggggcgctcggcgcgggcgattcccgtgcacccgcgcccggcgcgcgggcggaacggtagggagagggggaaagggagcgcaccggggaggggagagggcgagagagagagaaagagatagagagagagagagagagagagagagagagagagagagagagagagagagcgc

SEQ ID NO: 85416 - DNA, 678 bp, Oryza sativa
  Clone ID: PAT_MRT4530_84557C.1
atggcgatgggaggagaagagagggagggcgccagggctttaagggcggcaatgtcggtttggaaccgacttgggcggtcaaggcgcgagctggcacttggcgctcgcgtccaatcgacgacagggcggagggaggatgacgccggcgggaggaaaaggggaaaaggagggagagaaagggggctcgcccctttcttctttgggaaaaaagaggaggggagcggggacgtcgcggcagagggaggagggctctgcctccgtcgcttggcggcttgcgcgcggagtggcggggccgaggcgatgacgatggcgatgacggcggggcggtgtggagcggtgcggcggcacgggcgacaggcgcgggcaggcgctgacgacggcggcgaccaggcggtcggccaccacggcacgcgcgtgcggcttgcaacgggaggcgcggcggatggagcggcgcggctcggcacgcgcgctggctgcggggccgagcggctgcaggcgcggcagggcagcggggccgggcggcgcagacgcgacgcgggcgaggaccacgcgggcgtgcgcgcgatcaacgcgcggggagcggcagcgagggagcggaaaggagggcttggctcggcgcgggcggcgcggctcacgcgctcgcgcgcgcggcacgcgggcgaggcggagcggagctga

SEQ ID NO: 85417 - DNA, 185 bp, Oryza sativa
  Clone ID: PAT_MRT4530_84558C.1
caaattactaaatcaatgctatgtgggtgaatgattcaacgggttgagatatcactctatctataaactactcgtactgaactttggtgcatgcttgagggtcaatatactgttttacactggtggttcagtatttccatggtacaatcttgtggaccagagttttaacgggaggtatgtaactg

SEQ ID NO: 85418 - DNA, 483 bp, Oryza sativa
  unsure (1)..(483): unsure at all n locations
  Clone ID: PAT_MRT4530_84559C.1
ntntngngcacccgggntaaaaattntngttcggtttgaatgtgggggggatggggggggtaaaatttnnanacgggaanggtngngcccngganaacnccaggttggaaataaaccttcantaaagggaacaaaagggggagntcccaccgcggggggcggccgttttagaaatagtgaatcccccgggctgcaggaattcggcaggagggggcncnnttgtgctcaccncntagggtttggtcccgncccnnccttttgttntgnttctnggtttngganatctattaatcggaagtagtagtcgtttnttntntcaagctatttgcgttaagaagantngattagttttttttactgnanttnttgcatgttaagacagnacgttatgagaatttttgcactaagngatgccagttcatgtcaaaaaaaaaaaaaaaaaaaaaaaaaaaaaaaaaaaaaaaaaaaaaaaaaaaaaaaaaa

SEQ ID NO: 85419 - DNA, 546 bp, Oryza sativa
  Clone ID: PAT_MRT4530_8455C.1
atggaggaggacgatgacaccgtggcggttaacggcggtggccggtggcggttgaggcgaaggcgctgcttcgggccttgtcgccggacgtcggacatcaccttaaccagcaaggaggtgttcatctgggtcaagagaaacaaccggcggctactccacgtcgccatcgccgggatgtttcgcactgtagccggcgtgcgtgggctcatcgccgccgatgacccctttggcgtggagctaacagacgtgttgattgacgacactgacgccgacgacaatcatctcgagctccacggcctcctccttcttgtcatccttgtcgctgtcgtcttcctcgtcttccggcacaacggcgcagatggtagagaaggcagcggcacgcgcgtgcgtcgactgtcgccaccggcggcggcgtgcgttggcggcctgcgtgggtgtggcagcgggcggcacagagcgggctcgcctttctccccctctccccagcgcactcaccgcgccggccgccgcacggaggaggtggtggcggtgctctggctggtgtga

SEQ ID NO: 85420 - DNA, 421 bp, Oryza sativa
  Clone ID: PAT_MRT4530_84560C.1
atggtcgaggtacgactacggcaacaacgtagcagtcctcgcaccacgacttcagatggtcgaggcacgactacgactggtcttcgaccaacagtatagtggtcctcgcacctcgacatcaatcggccgagagatgaggctactcctggttctcggaccattttcgaccagcggtgtagcgatacacccactagctttacttctcatggttgagttaaggctacacctggttttcgaccagcggtgtagcgatactcccactagctttacttctcgtggtcgagttaaggctacacctggttctcgactagaggagagacatagcgctgtctctgatctcgccggacacggattcaaggaggaagattactctgttgtcgactacgggatggtttatggccccaagtcgatgacaaataga

SEQ ID NO: 85421 - DNA, 467 bp, Oryza sativa
  Clone ID: PAT_MRT4530_84561C.1
acttcgtgaagaaaatggctcattgaggagaatttttacgagttcgggggcagctgcagccacttctactggggctccggacagatccgctcgtggagtgcgcagaaacacacctcaagataacgcattgaatgtctcattccacaatggatctggtgggggcacctgacagggcatgcacccaaatgcgttggactcaatgacagaggatccaaggcaaacatgtaggcaggggaccggtctttctttgctgtctaaacatggctccctgccaacgggatccgcatggaaaggaagttactgataattctgagaaagaaactgaaacaaaaaggaggttagaggatgtacacatgcggaatgaattgcttcagcatcagcttattgaactaaatgtcagcatagagaggatttcaactaacatgggaaagctccacaatgaggtgagtgtgatggaggccaagttg

SEQ ID NO: 85422 - DNA, 133 bp, Oryza sativa
  Clone ID: PAT_MRT4530_84562C.1
tggcactgaggaacaaccccatccccaatgaaactaaacctcatccccgcccccacccatgtcctgaccaccaccacctcaccgtgcgaccaccaccccttcccctggcgatgctgcctgccaccacctgctc

SEQ ID NO: 85423 - DNA, 1971 bp, Oryza sativa
  Clone ID: PAT_MRT4530_84563C.1
atggcccaccacgtcgctcccctcctcctcctcctcacgctcgccgccgtcgccgccgccgcgtcggaggaggcggcggcggcggatacggaggcggctgcggccgtggaggccggcctgctggtgcggcgcgaggcgcagctcgcgcggctcgaggagctcaccgagtcgctcgccaagtccgtccaggcgctggagtccgcgctcgccagatccgtggagcccgatccgccgccgccggcagccgccgcggcggcgcccggcgaccggagggcgccgcagggggtggccgtgacgaagcggaggccctactggtccgagcggttccacttcgccgcggccgcgcggctcggggacggggcctacgccgccgcggcgaccgcgctgccctacgaggacgcggatgggctcaccaagtacttcgccgtcggcgactcccgcggccgcgtcttcgtgttctccgccgccggggacgcgctgctcgagctggagcccggggtgtccggcgagccgccggtcaccgccctgctcgcgtacctctcgccgcgccgcaccgattgcttcctcttcgccggccacgccgacggctccatcgccgcccaccgcctcatcgagtcgtccccgcacggcgatgactggctcaccctcgccgccgcgtcgtcccgcctcctcgtccgcggcctcgacgccgcccccgtgctccacctcgaggcccaccacgccggccgcgcgcgctacgtgctgtcctgcgactccggcggccgcatccgcgtcttcaccgagaacggcacgctctacggcaccgccatcgcctcgtcgacgcctctcgcctttgtgaagcagcgactcctcttcctcaccgaggccggcgccgcgtcgctcgacctccgatcaatgtctgtccgcgagacaccatgcgagggcctcgctgaagctctcaatggctccctcccaaaggcctactccttcgatccttccgagcgcttcaaggcctatggtttcactgatgccggcgatctcgtgcacgtcctgctgctcggtgacattgccagcctgaaatgcagggtccgggcaatcaagaaggctgagatcgacaaccccgtggcgatacagacgatcaaaggctacctcttggtagccagccaagataagatccttgtgtacaacacatcaactcagtactatgggagggttggggctccccgcctgctattcgccacatcaatcaaggatatcaagtctgtgtttgcgggttctggtggcgtgatgcctgcttcaccagctgggaagccgcttgttgccgcggacagggagaagctcgtgatcttgggactcggagatggttacattgctatatacaggtccaacttcccggtgtacaaaccggagagcaatgctgtggtgtggagtggtccagcgctgctcttcctcctgttcttgattggcatttggcaagtctatgtaaagaagaaggattcgttgggctggactccggaggagacatttaacacctcagtcacagctcctacagggagcattttgaatcattcgaccagtgaccgtgccttcgctgatagctcaacaagaactggtgagcgaggctatgttgatggcacaacaagagccagtgatagaagctatgtggatgccaccacaagagcgacagaccgagcctatgctgaggctaccaggggtgtggacctacggggtggggcgttgagaggtgctccaagaaggtatgtgtcccctactagatatacaggggccgcaggaattccatatcgacctgtttcaacagagcctgtgcttcgaaccacaccggagctgaagtatcgaggcccagatggtgaaataactttgaaatttatgggttacattatagctatgaaagaagggattgttgagctgttttcgtatgacttccatcttcaacgatgtaggaaaattggacaagtttacaataatttttaa

SEQ ID NO: 85424 - DNA, 149 bp, Oryza sativa
  Clone ID: PAT_MRT4530_84564C.1
ttttgggtgtttttaaatcaaacacttatcatttcgatgatacataagggcgaaccaaaacgaacattcacaatacacacacttgcatcaagatcaagatggaactccaaacacggtacacggaacgcacacgttacacacggggtccc

SEQ ID NO: 85425 - DNA, 1092 bp, Oryza sativa
  Clone ID: PAT_MRT4530_84565C.1
atgaattcgttggaaaccgtaatccggctgtgggagaacttcacggcgctgcaggaggaccccgcgctctcgccttgctacgccgaccagctgcgcctcgtgtacgaccccgtcgccggcgactaccgcaacgtgcccggcgtcgacacccgcgtcgtctccttcggctccacccgcggcttccgctccgacgatcctgctcgaaaggacgtgtgcatggagaggctcgtggaggcgctggaagaggagggatacgcggagggagagaacctgttcggcgcgccgtacgacttcaggtacgcgccggccgctcccggcttgccgtccggggtgttctccgacttcacgtcgaggttaaggcgcctcgtggagcgcgcgagcgagaggaacggaggcaagccggtcatcctcgtgacgcacagcctcggcggcctcttcgccatggtgttcctcgaccggaccccgctgccgtggagaaggaggtacatcaagcacttcgtcatgctctgcctcggcgtcggcggctcgccgctgaacatgtggcccctcgccgcctcctccatcccgtcgtcgtcgtcgttggtgggcagcgtgctgacgtacgggaacaggagcttcgcgagcatgttctccctcctgccgtcgccggcggtgtacggcgacacgccactggtgatcacgcgagccaagaactactccgccgacgacatgccggagtttctctcggcggctggtttctccgacgacgaggtggcgctctaccgggcgagggcgctgccggtgaccctggatttccgggcgccgctcgtgccgctgacgtccatcaacggcgtcggtgtgccgacggtagataagctggtgttctgggacggcaacttcagcgcgaagcctcaggtggtgaacggcgacggcgatgggcagatcaacttggacaccgtgttggcattagaaaggttgatcggtgatgacccggatcagggttacttcaagtcaattttgatccccaacacgacgcacaagggtgtcatctccgatgaattagcgctcaagcgtgtggtcagcgaaattcttggagcaaattcaattaactaa

SEQ ID NO: 85426 - DNA, 544 bp, Oryza sativa
  Clone ID: PAT_MRT4530_84566C.1
ggtaggggtaatgtggctggcatgagaaagcaagaacaaaatcgttccctgggaaatgtttccctgtctttctgcaaagttattaggaagttaatgtcaacagtgttaaccgtggtcccttacatagttatccttacaattgattctcatggtgtttgtgattatccagaaaataaaaatactgtggtcggaggactcttgggggaatcattgttaaggaaacataaaaacaaactcaactttaggttgtatagttagtgtgtctttacttaatacttagtagtgctgctgccatctcttttagggcaagctgaggaagaaaagtaatgttgttgataactggcattcttccacaaatgtgctatatgctttggatattttctttaactctgagtgagattatattttcccttttcaggtgagggaataggatcttaataagtatacacaattgggaatcggtggaactataacttgaaattaaaatgtttaattttcaaaccagtactccttcttcacaactttattagcaaaatagtatcta

SEQ ID NO: 85427 - DNA, 882 bp, Oryza sativa
  Clone ID: PAT_MRT4530_84567C.1
acggcgagcacggtgaacaccgggccgaacgagcccctggacgtggtggccggctgcgcgtgcatgatggagttggaggaaatggcttgtgtgatggaatggaagtgtctccttgagctcagaggcaggggtggtccttttatgatggaggagatctttgaacgcattggggcgcgagaaaggcgagtgctttgggatctctttggagcagttcaatgcgagcttggaataacgtctcgattgtgggggcaacgaggaatgagcgccagggccactagactggtcgcctttcttgggcatgccgatggatggcagcagcagcttgccgtcgccattggcatgttgctgcctcctcctcctcctccaggcccctccttcaaattccctgagggcgaccggagcggcagtggcatgatgcgcggtgctgtagctgggcacgattcggtcgcgagaggaaagcggcagagggagggctgcgagtttggacgctatacaggtgatgagcaccccggcgacaagcgttctggagtactacgagggcagtaccgactacgggcgcatagtggtacagtacactactgtaccacatatcgtatcggaggctcagagcacaacctgcagtgcaggattgcagcagccagcaggagctcggacagtcagccggaccacgtcctccgatgattcaccgttcacgaaccgtttgagaaaaactggatcggtggtccgccgccgccgcccctcgccggtcgtccgccgccgcccctcgtccgcccggccgccgcggcgcccctcgcccgcctggccgccgccgagcccctcacccgcccggccgccgccgcccctcgccttcccggccgcacagccaccgccgcccatcgccat

SEQ ID NO: 85428 - DNA, 677 bp, Oryza sativa
  Clone ID: PAT_MRT4530_84568C.1
ctttgtgttgggcggtttggctttgtagaaatgatgtagtctttaatggctccaaaactaactcctttgtgcaggttcaaggacttcctgttgttgcatcaaaagcctctaaattgactgatttggatgcacctatttcaactagtcaaaccaagtatcttgagctgctagccagtttttgtccttgctttcataaggtccatgtgtcatatggaatgagacctactttttttgcatccaggtatcaatatctgagcagtgctgcggttcagggcaaaagtgaagggattactgcagattcctcgaggaaccctattgatagcagcgcagtagatcgacttgaaggcaaacttgcagttcttcagttccaaatgcaaatcaaatgtcccatggacaaggctaaagagctttcactgaatctcaagagtattactcaacttttcaacaattatgctgttccttttaatctttgggagatgctgacagtaaaattatttgagaaatttgggccaggctccttggccagtacaagaggtggtgttgcagaagcatgttctgtggtgagaagagtaggttcaaaacttgatcctgcagatggctcttgtttaccattggatataatatgccttcatctcgagaaggctgcactggatagattaagctcggagaaggattag

SEQ ID NO: 85429 - DNA, 1577 bp, Oryza sativa
  Clone ID: PAT_MRT4530_84569C.1
gccccttcttcttcttcttcttgccgaggaagccaaagcagcgggagcaaagcggagcgcaatggcggggtcgtcggagccgacgcgggtgatggtcgcggtgaacgagtcctcgatcaagggctacccgcacccctccatcagctgccgcgccgccttcgactggatgctctccaagctcgtccgctccaacgtcctcggcttccacctcctcttcctccacgtccaggtccccgacgaggacggatttgatgatatggatagcatctatgcatctccaccagactttcagagaatgaaacagagagacaagataagagggcttcacttgctcgagcactttgtgaatcaatgccatcaactggagataaaatgtgaagcatggattaaacaaggggatccaaaggaagtcatctgcagcgaggtgaagagagttcaaccagatcttctagttgtgggaagtaggggccttggaccatttcagagggttttcgtgggcacagtgagcgagttctgtgttaagcatgccgactgtccagtcatcaccatcaaacggaaggccgatgaagcaccgcaggaccctgttgatgattgatcccttcaatgtcatacttgagaatgagatattcttcactgctcaatgggtttaatgtacaaaatacaatatggtagtagtgcttggaactagtacaaatctttgcccagtccaccccaaaactagagtgaagatgaagaacactattgcgacaagaggttgtatcctatatgagatacatccaagtttgttatgaacctaagctaccttgatgatgaatcacgtactgggcttcgcagaaatgaatgttccacctcttatctgcccttgcctgaccacatttgcagggtacctgaaacctgggggcatgggcatgccgtgctgcggatggtgttggggcatgccatgctgctgtggatggtgttggtgttggtgttgttgatgttgctgctgatgccctttgccgtctcccttgctgtcgttcttccatgctgcaggtttccctggggtgaacttgatctcgaagccgtcgtcgatgtcgtggatcatggcgcgggagctcgccatcggcttcatcaccgggtacttgatctcgaaccccttctccaggtcgccgccgacggcattgatgccgtagaactggtcctcggcggaggccgccctcttcttggagagccgccggccgcagagccggccgacgacgcaggcggcgacggcgaggaaggtgatcacggcgagcacggtgaacaccgggccgaacgagcccctggacgtggtggccggctgcgcgtgcatgatggagttggaggttgggtagtaacccatgggctgaggtaaagacgccatcttccacttctcttgtgtcactcttctgctggtttttagctcttgttgcaaagctactgctcactgctcttcactcttctctgcctcttcttgactaggaaatggcttgtgtgatggaatggaagtgtctccttgagctcagaggcaggggtggtccttttatgatggaggaaggtaagaggacccggcctcgtgc

SEQ ID NO: 85430 - DNA, 334 bp, Oryza sativa
  Clone ID: PAT_MRT4530_8456C.1
cgagtaggtatcaggtgtgatacctatcaggtatcaaacaattctacacacgtttcaggtgatacctacaagtatcatgtgatacttatcaggtatcatgcgattttctaccacgtatcgcgtgatactcgcaaaggtatcatgtgaaacctgtcaggtatcaaatgattccacccacgtatcgtgtgatacttacgagggtatcatgcgatgtctgtcatgtatcagacgattttctaccacgtatcgtgtgatactcgcgaggtatcaacgattttctaccatgtatcacgtgatacttgtgaggtatcggatgatacctaccaggtattag

SEQ ID NO: 85431 - DNA, 2330 bp, Oryza sativa
  unsure (1)..(2330): unsure at all n locations
  Clone ID: PAT_MRT4530_84570C.1
atggcttggacggaggacgaggcgattggccccgatgtggcctccacggggctccacgtctcggagcggatcggccgcgacgccgccgctcagcctgacctggaggaaggccctcgaggcctcacgccacgcggccacgcctcccacccctactcctcatatcccaatgagttcttgagaggttgggcaaaaagcacaagtggaacatatagaaaagagaaggttgaattaagtgcaaaggcagatgagttagataaaaaagcagaggtgcagatattgattaggcatgagttagatctcaagaactacttgaaaaatagactagctcatctgttaagggaggaggaaattaaatggtaccaaagagttttatcaagtgttctgggaggtttaaagatcaattttcataaaagtgaattgttttgttatggcaagtcaaaatttgcagagaatgagtatgtcatgctttttgggtgtagatctgggacttacccatttagatacctaggaattcctatgcaccacaagaagctctctaataaggattggcaaattatcgaggagaggttccagaggaagttgagtagttggaaagggaaatgtctctcagtaggaggaaggcttgtgttgattaattcggtgttgagtagcctagccatgtttatgttgtccttctttgaggtacctaaaggtatcctcaagaagctagactactacaggtctagattcttttggcaaagtgatggacataaaagaaaatataggttggcgagatggagtgtgatttgtacacctaaggattgtgggggtcttggaatacagaatctaaatgtgcagaataaatgtttgctgagtaaatggttgtataagcttatcaatgaggatggggtttggcaaaaactacttaggaaaaaatacttggctaagaaaacaattacacttgtagaaaaacaaccaggggattctcatttttgggcagggctgatggaggtaatcttcaaggggacgtattgggcacgtcaatggtctttgctacttaaggaggataatagggaccttggggcggggaatctccaagggacgttattgggcagttgtaagatcacccttgtgaggactgagaggctaagttctcttgtgttggttcaaggacttcctgttgttgcatcaaaagcctctaaattgactgatttggatgcacctatttcaactagtcaaaccaagtatcttgagctgctagccaggtatcaatatctgagcagtgctgcggttcagggcaaaagtgaagggattactgcagattcctcgaggaaccctattgatagcagcgcagtagatcgacttgaaggcaaacttgcagttcttcagttccaaatgcaaatcaaatgtcccatggacaaggctaaagagctttcactgaatctcaagagtattactcaacttttcaacaattatgctgttccttttaatctttgggaggtatggctatctttgtttcttggagattttttccttgatcctgctttcttctctcttatgctgacagtaaaattatttgagaaatttgggccaggctccttggccagtacaagaggtggtgttgcagaagcatgttctgtggtgagaagagtaggttcaaaacttgatcctgcagatggctcttgtttaccattggatataatatgccttcatctcgagaaggctgcactggatagattaagctcggagaaggattagttggtgacgaggatgttgcaagagcccttctcggagcctgtaaaggtctacctgaacctgtgcttgccgtgtatgatcaactgttatcaaatggcgctattgttccctccctaaacctgaagctgcggcttctgagatcagttcttgttttttttcgtgaatggggcatgactgtcattgcacataaactaggcaccacaactgctggggcttcattctttcttgatggaacattttcgctgaatcaaacatggtctttaaatcaaggcgttcgagataaaataagtagtttggcaaaccggtatatggctgaggtgaggcggttaagccttccaaagaaccaaacagagaatgtctatcgaggtttccaagagctagaggagaaattattaactaattagacatttcaatttgtattctcggcactgtaaaacataggttcgtgcatttgttgtacccaagtagagagatanaagctaagcatccgntgttcaattgacatgatcntcgaagactctgatnagctcttttctgtgttgacgtcattgtgagatcccaangctacaanggggctgcatatcaatcaaatatta

SEQ ID NO: 85432 - DNA, 592 bp, Oryza sativa
  Clone ID: PAT_MRT4530_84571C.1
cgaggaatcctattgatagcagcacgatagatctacttgaaggcaaacttgcagttcttcggttccaaatgcaaatcaagcaagaactagagttcatggcttcacagcttgaaaatctgtcaggcagttctgaatcaccaaatgatccctttcctcgtgataacattctagctgatgcggatactgctagatttgccatggacaaggctaaagagctttcactgaatctaaagagtattactcaactttacaacgattatgctgttccatttaatctttgggaggtttgcctggaaatgctcaactttgcaaattattctggagatgctgacagtaaaattgttcgagaaatttgggccaggcttcttgaccaggcacttacaagaggtggtgttgcagaagcatgttctgtggtgagaagagtaggttcaaaacttgatcctgcagatggcgcttgtttaccattggatataatatgccttcatctcgagaaggctgcattggatagattaagctcaggagaagaattagttggtgacgaggatgttgcaagagcccttctccgagcctgtaaggtctacctgaacctgtg

SEQ ID NO: 85433 - DNA, 769 bp, Oryza sativa
  Clone ID: PAT_MRT4530_84572C.1
ccggccggatccctcccattcccgaacacgtccccaaggtaagccggcggcggcggcgatgacgacgagcctgaggaagaaccgcaagaagcgcggccacgtgtccgccggccacggccgcatcgggaagcaccggaagcacccgggaggccggggcaacgccggaggcatgcaccaccaccgcatcctcttcgacaagtaccacccgggctacttcggcaaggtcggcatgcgctacttccacaggctccgcaacaagttctactccccggcggtgaacgtggagcggctctggtcgatggtgcccgccgagcaggcggcggaggccggcgccggcaaggcgcccctgctggacgtgacgcagttcggctacttcaaggtgctcgggaagggtctgctgccggagaagcccatcgtcgtcaaggccaagctcatctccaaggtcgccgagaagaagatcaaggccgccggcggcgccgtcgtgctcaccgcctagggtttggtcctggccctgccttttgttctgcttcttggtttttgagatctattaatctgaagtagtagtcgtttcttgtctcaagctatttgcgttaagaagacttgattagtttgttttctactgtacttcttgcatgttaagacagtacgttatgagaatttttgcactaagcgatgccagttcatgtcagatgcttcagatatatcaatgctattttgtgctgccaattatgattcggtcgatctgacttggcatgcccccggttatatt

SEQ ID NO: 85434 - DNA, 556 bp, Oryza sativa
  Clone ID: PAT_MRT4530_84573C.1
cccattcgtccgatttctacggaacagaggtggtggctgattgaaccaaccaacacgaatttttctgctcaaaaaaaaaaaaaaaaaaaaaaaaaaaaaaaaaaaaaaaaaaaaaaaaaaaaaaaaaaaaaaaaaaaaaaaaaaaaaaaaaaaaaaaaaaaaaaaaatttttaaaagggggggggggtttaaaagaatcaaagttaagggacgcgaaaatgcaacttaaaatttttttaatagggcaaccaaaataaaattaacgggccggggtttaaaaacgtgggaatgggaaaaaccttggggtaaccaaattaaatcgctttgaaaaaaatccccttttcgcaagttggggaaaaaaaaaaaaggcccgaaccaatcgcctttccaaaaatttgccaaccctaaatggaaaagggaaccccccctgaagcggcaaataaagcggggggggggggggggtaacccgaaggggaaccgttaaatttgcaagggcccaagcgcccgttcttttggtttttttcctttcttttctggcaacgttcgcgggttttcc

SEQ ID NO: 85435 - DNA, 285 bp, Oryza sativa
  Clone ID: PAT_MRT4530_84574C.1
atggcgaggacggaggtgtcagtgctgaggtctagtacaacatgcccagccagcggtggtgacaatgagcaagggcgtgagacaggggcagagagatctatgctggtggttctggcgaaaactatgactgaaggcaaagaatactgtgaaaggaaaattaatttgctgaagtctaattttgatgaactagttgagatggctacgaagaagaaaaacatagccgacgaaatgggtcggcttctacaagccaagctgaggcagtcatcgccgagcccgagttcatga

SEQ ID NO: 85436 - DNA, 522 bp, Oryza sativa
  Clone ID: PAT_MRT4530_84575C.1
gagccttttaataggtgtaagtggaagtgcagtgatgtatgcatctgaggcatcctaccgaacgaacgatgtcgaaagaattatagggaaatacaataaaaataccagcaaaaaatcaaaatgaaaaattataaatttaaaataagtattgttaaaaaaagttaaattttagtaaaactaactaataaaaaaaagacgtaaagataaaaataaaattgaaagagaatattctaaaaaaaaagactaaaactatactgcattagactaaaaaaaaacttcaaactgaatataccaaaattgtacttaccgcgaatgaagaggagattgactggagtctacctacttatccaaaatcttgagtttataataataatctatgtagaaaaaacacttcaacttttaaacatgtcaaataacaggtgacttagaaatttgtgaaacagagccttgaccttttgaagaagcttgcctacaactgcactggtatacaaggcttaacttgtgttcttcacagatggaaga

SEQ ID NO: 85437 - DNA, 204 bp, Oryza sativa
  Clone ID: PAT_MRT4530_84576C.1
atggcgtggtggtggggctccccgcggcgatggcagcgcggcggtagggctctgcgcggctccgttgagggcgtcgccagatctggtagccccgccagatctggccggggtgaaaaccgggttcctttcggaacgggcgttgacagcatccttgatgttgtttccttgttgaaggcttcgctcagaaggtttctgctccactag

SEQ ID NO: 85438 - DNA, 667 bp, Oryza sativa
  Clone ID: PAT_MRT4530_84577C.1
atggagcgaggagggagaacggggagatgctctaccgtgctggcgggcgcagtgacgagaggccgacggcgcgggagtaatctctccggcctcgggctggggaagaggaaggagagggcgcgcccggagtccccttttgcgtctttgctcgtgccggctcctctgacacgcgcaacgacgaacggtgacgacgaacagagcacgggggcggcggcaatggcgcggaggcgaatgggagaggaagggaaagggggaggcttgggtttaaaggatggcaatgtcggtttgggaaccgacttagggcggtcaaggcgcgagctggcgctccggctggcggccaaaacggcgacaggaggtgacgccggcgagagggaaaaaggaggagaaagggggagagaaagggggctcgccccttgcttctttgggaaaaggagaaggggagcgggggcgtcgcggcagagggaggagggctctgcctccgtcccttggcggcttgcgcgcggagtggcggggccgaggctatgacgacggcgatgacggcggggcggtgtggagcggagcggcgacacaagcgacaggcgcgacagaggctgacggcggcagcgaccaggcggtcggccaccacggcacgcgcgcgcgggaagcaatgggcggcgcggcgatttga

SEQ ID NO: 85439 - DNA, 378 bp, Oryza sativa
  Clone ID: PAT_MRT4530_84578C.1
atgaggatggagaggccagcacgggcgacggcgttccggcgaaacaaaggagcagctggaggagaggacaacgcggcgacgtcgatcggtgtaccggcgacgtacaggagccggccggaggcggggagatactggacgccgacgaggaggccactccggcaagcttcgggcgaggaggagtggcaccaatgccactggttgccggcgggggcaccgttccggcgagtttccggcgaggagacggctagccataggaggcctgatctagccaggatagggtacggtctgaccggctatggtgggcacggtctgaccggcatagtacatggtctgaccggccatgttggacatggtctgaccgacatagggtgcggttag

SEQ ID NO: 85440 - DNA, 2207 bp, Oryza sativa
  unsure (1)..(2207): unsure at all n locations
  Clone ID: PAT_MRT4530_84579C.1
ttttttttttttaaaatnttgctgatatggccgggcttaaccaatacgaagttcagaatagcagaccagataagacactaaagacaaattcaaccatgaatattgatccctgcatgtttcttgacattcgacatcagtcacctgcagctcgtcgaaatcttcaaatctcccactcatccttcctgttagatcagaaggtatcatcacaccaagtattgccctttcaatgatttcagctatgccgccgcatttcggcctttcttcgacttactcttgttttcttgtgtcttctttttcttctcttctggtgtcgtccacacataatcagcagggatgacaaatgggtcctggatgtcctctacacggctgctggggcctggagctgttgagaagttctgatggtaaggagccttgatccattgaatccaagaacttgaggaagactgcgccactgggctcttgctattgtcagggctggatggcggtgtggtgaactcctctaatggctgtagctcttcaaactttgtgaatgtcacaagtaccctgattgtgggtacaactgggatggcaaccttgactggaaaagttcctggtggcagttttgttgtaaggagatctctcaagcgacggatcgccttcaccttgttcgcaagaatatcaagcagtggcaagagctcctcagtccgaagagggaagttaggagaaagccagagaacaggccttagacctttcttgtactcgctttctttgctaccttctttgcgcctatgtccacactccgacgaagcagcaggtctccgataatccctttccttgccccttctgctctcatcccctcttactacatctaccgaatgccttcctggcctagtttgtacattcgatggagattcaataaggatatcgctcaccttctcatctacacagagcgaactccttggaggtgccatcttcttcgtcccctctagcttgctactctgaaccctctttccccaatgaccaaaccaacctttcttatcatgtttactatccccatttccggagatgctcaaatcctcaattggtatctctctctccctcggctcaacacagctatgtcgaggaccaacaaacgtgtcggactggccttcaccaccagcaccatcaggagagtccatcttaagcgcggcttccaactgcttcttctcctcttcagtcaaaacatcgtcgaagccctcgctctcggtatcgttctcgttgcaagccgagaagaattcctcgtccgtcatcgcgccggggaccctccttgatttgacactgaccatcacatggtgcatgtcatacaccttggccttccatggcccaaccgactcggtcctctcctggcgccgccatgtgagctgcgggagcagcacggcctgcgtgacgtctattccggggcggaagatgttggtctgcgacatggcggtgacctcctgctgcacctcggcctcggaggcgggcgcgccagagccttccagggcgttcatcacctccttgtccttgtggttgatcatgcagagggagcccgggggcaccttgccgtcgtcggagccctcgccgaggaagagtatggtctggtcggagcgctggatcttgaagccgtcgaagccggcgagggtcatgtcggcgcggaggttggcgccgcgcttccagacccggtaggtgtcggagggggcgatgcgggagatgaaggggatgacggagctctcgaagtggaaggtgatctccatgtagaagtcgcgcatgcggcgcatggcggcgacgacgcgggggaggcggcggcaccacttggcccaggcgagcggctggtagtggcggacgatgacgcgggcgagcgcctcctcgcgggcgcagatggcctcctggagcgcgctccacccttgctcgttttgcaggctccagtccgcgcccgccgccatcagcatctccgccgccgccgcgtcgcccaggcggacggcgaggtggagcggcgtctcccgcccggggacgtcgcgccggtcgatgaccgccgacgccgcctccgcgcgcgcctcctccgccacggagtcggcctccgtccggatctcctccggcctccgcgccctcggcagcgcgtccagcacccgccgcagcgccgcgtggtccctcgtcgccaccgcgtggtgcgcctcgctgtgcgcgtacctcgccgcgtccacaccggccat

SEQ ID NO: 85441 - DNA, 350 bp, Oryza sativa
  Clone ID: PAT_MRT4530_8457C.1
aagcacatagggtccgagaccatctctcgctttgcccccaacgaatccctcccccataccaaactccaccggcgccgccgtcgcccgtcgacgacgagaccgacctgaccacaatgggcctatgggacgcgctctaccgtgtggtgatgcgcctgacgacgcatacatcatcttcgacatagtcgagtcttcccggagacaggccgtggactacgtgtgcacaccgactggagatgacacctctggaaaacgtccatatttgtccagtctggggaattgcggccgctttaaagtaacccgagctaacacttccggctttggggaggggacgtttttaacccaaggggggt

SEQ ID NO: 85442 - DNA, 2587 bp, Oryza sativa
  Clone ID: PAT_MRT4530_84580C.1
atgcctgcacacatgcaaatgcggctgtgccaagtggagctagcactggaccttgcgtggcatgccggcactgtacattacaaacgacgatgtgtcccagccacgctctccgcacgacttgggccgcagattcgaagtgaaaacgagggctccatgtgtttggaggacgtgtctcccaaagggaagcgcgcgtcatactcgtttgtctttttcctcttaagagcagcgcagcgctgcctctgctgctcctccaaccggcgggggcgagcgggagatggcgccagccggggcgcggcggactccccgacggagccgaccggcgggggcgagcgggagacggcgccagccggaacggcggcgcggcggactcttcgacgaagccgagtagaccggcggcggcgcggcgctacctctgctgctcctccgaccggcgggggtgagcgggagacggcgccagcaggggcgtggcggactcctcgacggagccgagcggaccagcggcggcgcggcgctgcctctgctgctccttcgatcggcggcccgagcgacaccggcgaacgacgcggcgaagctcggcggctgcgcggcgccgcctctcctccaccgaccgggtagagtggcccacgcagcgacggacgagtcggcggcgcggctcaggaggcgtcggccggcaagggcgccgccgcttcaccgctgtcgaccaaatccacaccggcgctccccttcccgtccctctccggggcccctcatctcccagccgacgatgagcatcgagggctcggagggccggcggcggcgcaggagctcggtcggcacggcatcctcccgagcggcgagcggcatccggcctccgcgccgcccccttcctccttcagccttcgtgcgctcaaggaaatcggcgcgaccttggcgcgcggagagcagctgcacgaggaggcccatggccatggtccagaggaggagccagagcagcgcatcgcgagcggccgcgccggcctggaggtcgcccttgaggttgcccgtgtccagaaacgcgatgctcatcaggaccccgggccccgtgaacagccacagcctgcgccacaagaagggcggcacacggccaccgccggagaaggggtggtcgtcgtcgaagtgggagtcatcattgccgctgccgcgccacggtcacgcacgagccatcgccgccgcggggagccgtcgccatctgcatcgtcgctgccgcgcggggaagccgttgtcgtcgccgtcgactcgcgcctcgcgcgcgcggggtgccgctgctgccggctgccgcctccccgcctcgtgccttgtgtccggggggagccgcctgccgccacctcgcgcctcgcgttctaggagccgtcgtcgcggtcatcgcctcccgcctcgcgcgcacggggagacgtcgccgccgccacctcgcgtgcgcggggagacgtcgtcgccgccgcctcccgcctcgtgcgctgggagccgtcaccaccgcgagcgcgcgcccggtggggaaccgactcgtcgagggcgctatcaaccccagtgcaagtgcaatactggtgttctgaggacaccatgccgtggcgatcgatcagttggggtcgtcatcgtcgttgaagaaacgtgttgggctgttagccttctagtcggtgttacgggaagagccaccgaagaggagatcggcgtctggttttttcatactgttttttccgccgccgtctttttcgttgcggttctttttccacacggggccgaaaccctaaaactcatcgtagccgacttgctcctggaagaactcctcgtcagcaggatccacttcatcttcttcagcaactggggggggattatttatatagagcaaggtttgttaacctctgcagagggggtacactttacccacacgacattactaacccggatcacccagcccgtggggatcagccacgtcgggagacctccaagctttcatgacaaggcatttcgaaagccgatacaggtttaccatatgccgacgagaggggtcccagaccaacaacagttttacccaagttgttactcagattttaagtttgaaggcgaccgtcgatactcgcacagagtgcacgaatatcgaggcgcaactgggtggttacaaggggatatggctgagctggcgccgacgtggcgcctacgtggctgccacgcgggccggcgggaggtagacgacgacctggccgcgaatggacggcgggcggcggcggcgagcggcggagcgaaccacggtgatacgggcaaaagcgtgcacaccgggcggttgcacgtgacaaggggagacgagccaacggctcggattcgccgaaggttgctcgacggcggcggattgcggcggcggcaaccggcggcgggagaagagggaaacggcgacgaggtcacgagaggtcgattcccggcggtgagagcatctacgcggcgtcgggaactcgacgctagcgtcggattggacggaactacgccgagcgaggccggcgacgagcgggtgctacggagcttgggcggcgacggcggcgagcacacggcgagcgacggcaacggtcggggcggcgccggc

SEQ ID NO: 85443 - DNA, 446 bp, Oryza sativa
  Clone ID: PAT_MRT4530_84581C.1
caaagaacaacaggtcgagcaagcggcgaagggaaaagaagcggagatcgtcccctccccgccgccgactggacgcatatgcgccacggctgccggtgagcttccccgccggcgacgagtggacctcgccccacgcccggctagatccggtgccacccccgccaccacgaggtacatcttcccccttgcctctcgccccgttctcccccacgcccccacgcaccacaggctcaccaacaccttcgccgccaccaccaccaccatgcccacctccatctcctcctctccctctccccctcatgtcttcctcacggccggggccctctcctcctcccccaaccgacgcctctcctatcctctcctctccacccccaaaccctagcccccaacccagaaaaccctagccacccccaccgccgccaccaaaaatacattgccgcacggtg

SEQ ID NO: 85444 - DNA, 1171 bp, Oryza sativa
  Clone ID: PAT_MRT4530_84582C.1
atggcggcgacaccaattttggctctcggtggggtggcgattgtggctgtcggcggtaggggcgctgccgatagaagccagtggcggttacaggatgctccacctatgtcggtgatatgggaccgggagtattgcgcccggaggcttgaggcagatggaatcgcccacgtggcctggcaccttcggggacgtcgggcccgagggtgaggtgtccgccctcctcctgatttccccgagggggggtcgggttgctcctgccccgaccccgagggccgaggctgagctggcgccgacgtggcgcctacgtggcggccacgtgggctggcgggaggtagacgacgacccggccgcgaatggacggcgggcggcggcggcgagcggcagagcgaaccacggtgatacgggcaaaagcgtgcacaccgggcggttgcacgtgacaagggaaggcgagccatcggctcggattcgccggaggttgctcgacggcggcggattgcggcggcggcaaccggcggcggaagaagagggaaacggcgacgaggtcacgagaggtcgattcccggcggtgagagcatctatgcggcttcgggagctcgacgctagcgtcggattgggcggaactacgccgagcgaggccggcgacgagcgggtgctacggagctcgggcggcgacggcggcgagcacacggcgagcgacggcaacgaggcgagacagagcacgggggcggcggcaacgggcggtcaagggcgcgagctggcgctcggcggtcgcggccaaagcggcgacagggaggatgacgccggcgaggaggaaaaaggggaaaaggaggggaagaaagggggcttgcccctttgccgattcgggaaaaaggtggaggggaacgggagcatcgcggcagagggaggaggggcgcggctccgtcccttggcggcttgcgcgcggaggggcgggggccgggcgatgacgacggcgatgacggcggggcggtttggagcggagcggcgacactggcgacaggcgcgtgcagaggctgacggcggcggcgaccgggcgcaccgccgtctgcgcagccgcagcgcctccttcgccggcgggcactgcgcctccagccccaccgtcccgcggtgcaaccggcgcatatcctcctccgccgccgacgtcaggggctag

SEQ ID NO: 85445 - DNA, 572 bp, Oryza sativa
  Clone ID: PAT_MRT4530_84583C.1
aacctctgcagagggggtacactttacccacacgacattactaacccggatcacccagcccgcatttcgaaagccgacacaggtttaccatatgccgacgagaggggtcctagaccaacaacaggttaggtcccagaccttactgtgccaggaagcccaggggtcctccccgacaccaccccggtgaatccacatgtctctcggcatcaaggctcccctgataagctagttactcagccaggggtgtcccattccacccatgtggtcgtacttgtcttatgatcggatgaaattccaaggaaacggtccttaagtacaagagcggggaaaactgtacacccgattttaagtttgaaggcgaccgtcgatactcgcacagagtgcacgaatatcgaggcgcaactgggtggttacaaggggacatggtggcttgccttgctcgagatctggagcttgatcctcgaaatcctcgcactgcgggtcttcgggctctgaaactatacgcgaaacggaacaactcaacaaacgacgaaaataaagccctattaatgacctctaagcgtgccattaga

SEQ ID NO: 85446 - DNA, 1929 bp, Oryza sativa
  Clone ID: PAT_MRT4530_84584C.1
gcgcctgggcgccttcagaactccactggttcttcttatctccctctctcttcccgttctcttccttctcaccgatcctggaatggtctcggagggttcttagctggcttttcgattggattagcagcagccgggtcagacggagcggaggccgtgccggagaagggagaaggaaagtttcaggtgaacatctaacatggatgatcacatgggaagacggacagttggtggccttctcttcaccaaggggggctcaattcttctcttcagagaagacagtgcgcgtcacaaggccaccaattgctgcacgcgacacggttgcagcagcaagcatttggccggcaaagacaagcaaacacacagggcagcaacagcagccaaggaagcatcagaaacccctcggagatcacagattttcaggaaacccagcacgaggactcctcagggaagtactgctactgataacatcagcaggaatgcagcaagctcctatagcgaaaacgacaataggccaagagaaactccagggcgtgatttaatcgctcgtctcaaagagagggtcaatgcatcaagaaaacgatcattgaacagagaaaacagtccatcatcaccaaatggattaagtgctacttcctcaagtagtagccgcacagtctcaagaccgtcgcatcgggcagcttcccgaataacggaaggcagatgaaggtgcaaatgcaggagctgtaaatgtacgcagagacagcagtggagataccaggaggaattcagatagggatgtcgatgatttcttgctagttgagcaggcagcaagagatagcactgaaggattcatatctggattcttggcaagatacagaagtaatcatcagggactactttcatctttggacgacagcatagaggatgcaaatgggtactggcgcttcaatatggaaggaagtgaagagcttgagaactacttcatattcaatgatcggtacagagggatgagaatggacattgacggcatgtcttatgaggaattgctagcattgggagatagaattggcaccgtaagcactggcctttcagaagacgcgctgtccaagtgtctagacagaagcatgtacatggccactacttcaggaactcatgaagattgtgagagaaaatgcagcatatgccaggaggaatattcagatggtgaggaggtgggcaagatggtctgcaaacattactaccacttctcctgcataaagaactggctccggcagaagaactggtgtcccatttgtaaatccgtcgctctgaataccaactagcactagcagggtgcttcttcagaaaccaaatgtacagattctccatgaatgttctacccagacacaatttgcattctttttttgatactcttttagatcgaaccattcgttcgcatcctccagaccttttgcattattggtctccttcagttcacaatttgcacttgtgcagtacgaacatggaaaggaacaggaaataactcctgaaaaatgaaaaaaaaaatatagttcctcaaaaaaaaaaaaaaaaatcccgcggtggccgttcagtagcccccccgcgcgcgccggtgacttggcggggggctcgtcgatggcggaaggaggcggtattgtgcggtggatctgctgcgcccgccatcggatgcttccgccgcggttttgggagacggttgtcgagctcggcggcgaaggagaacgtgggatcttgcagacgaggtgggatgcgacggatctgacgcaggagatgagtaccggcggggcggcgaccaagagaggcgccgccaccggaggcgacggggggaggaggggacggcgagggcgaggcgccgttgattttttgcaaaatgcccccttgttaactttggatcgtggtactggtttttgcaaaaatgcccctgcgaactag

SEQ ID NO: 85447 - DNA, 1354 bp, Oryza sativa
  Clone ID: PAT_MRT4530_84585C.1
atggcgagatgggtatttgggaggggggtacactttacccacacgacattactaacccggatcacccagcccgtggggatcagccacgtcgggagacctccaagctttcatgacaaggcatttcccaagccgacacaggcgaccgtcgatactcgcacagagtgcacgaatatcgaggcgcaactagatggttacaagggaatatgcctcacggctcgcggtggaacgcgcgcacggggaggggctgaccggggtcggctcgacccggtcttggccgagctggcgccgacgtggcgcctacgtggctgccacgcgggccggcgggaggacgaggggagacgagccaacggctcggattcgccggagggagctcgacggcggcggattgcggcggcggcaaccggcggcggaaaaagggggaaacggcgacaaggtcacgaggggccgattcccggcggcgagagcatctacgaggctatgggaatccgatgctagcgttggattgggcagagctgcgccgagcgaggccggcgacgagcggcgcttccgagctcgggcggcgacggcggcgagcacacggcgagcggcggcaacggtcggggcggcgcgcccggagtccccttccgcgtccttgctcgtgccggctcctccgacacgcgcaacgacgaacggcgacggcgaacagagcacgggaggcggcgacaatggcgtggaggcgaatgggagaggaagggaaagagggaagcttgggtttataggggcgacaatgtcggtttgggaaccgacctaaggcggtcaaaggagagggctagcgctcggcggtcgcggccaaagcggcgacagggacgagggaggaggatgacgccggcgggaggaaaaaggggaaaagagggagagaaaagggggcttgtcccttgcctctttgggaaaaggaggagggagcgggggcgacgcagcagggggaggaggagctctgcctccgtcccttggcagcttgcgcgcggagtggcgggggccgggcgatgacgacggcggtgacggcggcgcggtttggagcggggcgacgacatgggcggcaggcgcgggcagacgcggcagaggctgacggcggcggcgaccaggcggtcggccaccacggcacgcgcgcgcgggaagcagcgggcggcgcggcggtttgagcggcgcggctcgggcacgcgcgctggctcgcggggccgagcggctgcgcggcagggcagcggggccgggcggcgtagacggcgcaggcgcggcacgggcggcgaccacgcgggcgcgcgcacgcgagcaacggcgcgcgggggccgattttggggcggggagctcgctagggatg

SEQ ID NO: 85448 - DNA, 442 bp, Oryza sativa
  Clone ID: PAT_MRT4530_84586C.1
cggacgcgtgggtttgtgatgctctgcactgtaggaattgctagcattgggagatagaatgggcaccgtaagcactggcctttcagaagacgcgctgtccaagtgtctagacagaagcatgtacatggccactacttcaggaactcatgaagattgtgagagaaaatgcagcatatgccaggcaagttcatttgcatgagtagattgcgcatgacactgtttgcagagttggattgtactgactactatgtacgaaatctttctgtgtgcattcttcaggaggaatattcagatggtgaggaggtgggcaagatggtctgcaaacattactaccacttctcctgcataaagaactggctccggcagaagaactggtgtcccatttgtaaatccgtcgctctgaataccaactagcactagcagggtgcttcttcagaaacca

SEQ ID NO: 85449 - DNA, 1581 bp, Oryza sativa
  Clone ID: PAT_MRT4530_84587C.1
atgacctctaagcaaaaagaaagaagggagggagggaatatagacttttctcgggcggctagggtgcggcccaagagatttggggtggctcggccgagcttaacgggccggccggcccaagacggcccaagcgcgcgcgcgcgggagggaggagagagagtccggtggaccgggctcaccacgcgcggtcccgggtgggacccgcttgtcagcggctcggctcaccgtgcggagggagcacgcggcgcacgcgcgcgggcggggttgggacgcggtgcacgcgcgcggctcgcggtggacgcggatgcggcgggcccacgcgcagcctcacggctcgcggtggaacgcgcgcacggggaggtaccaaccggggtcggctcgacccggtctaggctgagctggcgccgacgtggcgcctacgtggctgccacgcgggccggcaggaggggagacgagccaacggctcggattcgccggaggttgctcgacggcggcggattgcggcggcggcaaccggcggcgagggaagagggaaacggcgacgaggccacgaggggccgattcccggcggtgagaccatctacgcggcttcgggaactcgacgctagcgtcggattgggcggaactacgccgagcgaggccggcgacgagcgggtgctacggagctagggcggcgacggcagcgagcacacggcgagcgacggcaatggtcggggggaggagatggagcgaggaggaagaacggagggaggcactaccgtgcgggacggggcgctgtgacgagaggccgacggcgcgggagtaatctctccggcctcgggccggggaagaggaagaagagggcgcggccgaagtcctcttccgcgtccttgctcgtgccggctcctccgacacgcgcgacgacgatcggcgactgcgaaacagagggcggcaatggcgcggaggcgaaaatgagagagtttggagggggagggcttgggcttaaatgggcagcaatgtcggtttgggagaggggaaccgacattgaacgggggaggggagcgggagcgtcgcggcagagggaggaggggcgcggctccgtcccttggcggcttgcgcgcggagtggcgggggccgggcgatgacgacggcgatgacggggggacggcttggagcggagcggcgacattggcgacaggcgcgtgcagaggctgacggcggcggcgaccgggcggtcggccactcggcacgcgcgcacggcttgcaacgggcggcgtccgcgtgggcgcgcgcgaacacggcgcgcgggaagcggcagcgagggagcggtgagggaggacttggctcggcacgggcggcttacgcgtgctggctcgcggggccgagcggaggggcgcagggcgcggctctcgcgctcgcgcgcggcgcgcgagggaggggcgctcggcgcggcgacgcgcgctcgcgcgcgcggcgcggggcggagcggagggagagagggagagagcgggggcgtgccggggaaagcgagagggagatgggccgagggaaaatcggcccatcgaccctgggggaggcagaatggacttttgcggaggaatt

SEQ ID NO: 85450 - DNA, 822 bp, Oryza sativa
  Clone ID: PAT_MRT4530_84588C.1
ctatatatctcttactcctctccattgccaatggtgggtggcgccggcgcggctggggacggggatggcggcggcggctcggctgggcatggggacggtgacagcagcaggcggttcggcaacctcttggaccacatcttggcgaccaatttcctcagtggttacctcaccgatggtgatctccagcaccttgtgcttcatgaggctaatcatgttgagcaggccgctgttcctagacggcgagaggctctgcctgatcccaagcaactcgatgaactcgacgggcaccatggcgacatcccgcgccggcgcgtcgaagaggccgagcacgagcagcgcggcgaggcccttggtgagctgcgcgtcagagtcggcctggaagctgaccctgtccggcgcgccctccttcggcgcggcgtggacccagacctgggagacgcatccccggatgcagttagcgtcggtcttgagcgcggggtccatgggcggcagccgcgcccgcgcggcgtagggacgccgtccccagccgcgccgccgagccgagcagccttccacacccacgtcggcgtcgtccccgtccccgtccccagccgcgccgccgccgtccccatccccagccgcaccaccaagccgcccaccatcccctgagccccctgagaatgtgttggctttctgtatgtgtcgccgtgttggcagctgcatgttaacttgagctgagctgatatcatctgcttgcttgcttgattgatccgcatgcaggaaaggggtgaagtgcacggtgctagagtcgtcgccggagctcagggcgtcggggttcgccat

SEQ ID NO: 85451 - DNA, 116 bp, Oryza sativa
  unsure (1)..(116): unsure at all n locations
  Clone ID: PAT_MRT4530_84589C.1
tgggtcctgtccactggcaggaggagctgtcgctgagctctaaagctgcagaggaacgacgacccccaaaagctgcttcacggtcctcgtncggtgctactgttgggatgccctag

SEQ ID NO: 85452 - DNA, 289 bp, Oryza sativa
  Clone ID: PAT_MRT4530_8458C.1
gcatgctcccctccttcagcaggttgcctcctttgtggccgcccccctttttttttttttgatgtttaaaggccagaattttatgcatcaatgccccatgatttgtataaagacgcttgcgaatgaaacaggatacaactagcaacccagacaaatcctggatatgaccaaacgcaagccttgccatctccacccaattacgccattattttttgggcataaagcagaacggctgaccattccgtacccttccaccagaactcaatactcataaacttccaacaacaaa

SEQ ID NO: 85453 - DNA, 1667 bp, Oryza sativa
  Clone ID: PAT_MRT4530_84590C.1
atgacctctaagcgaaaaaggattaaattaaatcctttttggaaaaagaaaaagaaaagaaaggagggagggaatatagacttttctcgggcggctagggcgcggcccaatagatttggggcggctcggccgagcttaacgggccggccggcccaagacggcccaagcgcgcgcgcgcgctggagggaggagagagagtccggtggaccgggctcaccacacgcggtcccgggtgggacccgcttgtcagcggctcggctcaccgtgcggagggagtatgcggcgtacgcgcacgggcggggctgggacgcggtgcacgcgcgcggttcgcggaggaacggatgcggcgggcccacgcgcagcctcacggctcaccgcggaccacgcgcacggggagaaacggagggagcggctggccgggtcggcttatccggtcgcggccgaggtggcaccgacgtggcgcctacgtggcagccacgcgggccggcgggaggtagacgacgtcccggcagcgaatggacggcgggcgacagcggcgagcggcggagcgagccacggcgataccggcgaaagcgagcacaccgggtggctgcacaggacgaggggagacgagccaacggctcggattcgccggagggagtccgtcggcggcggattgcggcggcggcaaccggcgaagaggaaagggggaaacggcgacgaggtcccgaggggctaattcccggcggcgagagcatctacgcggcttcgggaactcgacgcttgcgtcggattggacggaactacgccgagcgaggccggcgacgagcgggtgctacagagctcgggcggcgacggcggcgagcacacggcgagcaatggcaacggtcggggcggcgccagctaactacggggaggttactcgagctactaccgaaatctaaggggaggagatggagcgaggaggaagaacagagggagacactaccgtgcgggacggggcgctgtgacgagaagccgacggtgcgggagtaatctctccggcctcgggccggggaagaggaagaagagggcgcggccgaagtcctcttccgcgtccttgctcgtgccggctcctccgacatgcgcaacgacgatcggcgatggcgaaacagagggcggcaatggcgcggaggcaaaaatgagagagtttggagggggagggcttgggcttaaatgggcggcaatgtcggtttgggcgagggaaaccgacattgaacggtcaaggcgcgagctggcgctcggcgcttgcagccaaagcggcggcaggaggatgacgccggcgaggaggaaaaaggggaaaaggagggggagaaaggggcttgcccctttgccgattcgggaaaaaggggaaggggagcgggagcgtcgcggcagagggaggaggggcgcggcttccgcctcttggcggcttgcgcgcggagtggcgggggccgggggatgacgacggcgatgacggtgggatggtttggagcggcgcgacgacacgggcgacaggcgcgggctggcgcggcagagggtgacggcggcggcgaccaggcggtcgaccactcggcacgcgcgcgcgggaagcatcgggcggcgcggctgggcagcgggaccgggcgacgcggacggcgcagacgacgcggctcgggcgggaaaccacg

SEQ ID NO: 85454 - DNA, 1422 bp, Oryza sativa
  Clone ID: PAT_MRT4530_84591C.1
accgggctcgccacgcgtggtcccgggtgggacccgcttgtcggtgacacgattcaccgtgcggagcgagcacgtggcgcacgcgcgcgggcgggggagggacgcggtgcacgcgcgtggttcgcggtggaaaggatgcggcgggcccacgcgcagcctcacggctcgcggtggaacgcgcgcacgggaggggctgaccggggttggcccgacccgatctcggccgagctgacgccgacgtggcgcctacgtggcgcctacgtggctgccacgcgggctggcgggaggaagacgaaggcgccggccgcgaatggacggcgggcggcggcggtttctccggggcgccttgtgacgatgaggggcgacggggcgtacactgggatgacgaggaagaaggagagggagcgagccaacggctcggatttgccggagggagtccgtcggcggcggatttcggcggcggcaaccggcggagggcaaagggggaagcagtgacgaggtcacaaggggccaattcccggcggtgagagcatctacacggccacgggaatccgttgctagcgtcggattgggcggagctacgccgagcaaggccggcgacgagcgggtgctacggagctcgggcggcgacggcggcgagcacacggcgagcgacggcaacggcgcgaactggcgctcggcgctcgcgtccaatcggcgacagggcggagggaagatgacgccggcgggaggaaaaggggaaaaggagggagggaaagggggctcgcccctttcttctttgggaaaaggaggaggggagcgggggcgacgtggctgagggaggagggctctgcctccgtcccttggcggcttgcgcgcggagtgacggggctgaggctgacggcggcggcgaccgggcggtcggccactcggcacgcgcgcgcggcttgcaacgggaggcgcggcggatggagtggcgcggctcgggcacgcgtgctggctgcagggccgagcggctgcaggcgcggcagggcagcggggccgggcagtgcagacgcgacgcggcgatgatgacgcgggtgcgcgcgcgaacgacgcgcggggagcggcagcacgggagcggagaggagggctcggctcggcgcgggcggctcacgcgcacgcgcgcgggcagagcggagggggagggaggcgctcggcgcggcggctcacgcacgcgcgggtagagcggagggagcggaggaggggagctcggcgcactcacgcgctcgcgcgtgcagcgcggaggcggagcggagcgcagggagcgagagcgagagagatagggagagagagcgccgggagggagggggagatgggccgccggggagagggggagatgggccgagagaaattcggcccatcgaccccgggggaggcaaaatagacttttgcggaggaatt

SEQ ID NO: 85455 - DNA, 679 bp, Oryza sativa
  Clone ID: PAT_MRT4530_84592C.1
gtccgacgtaggcaagccgacgccaccagtctcgggaaaggtggccccacgtccgtcatcgggttggttgaagccctccatagctattgccacgcagggattggagtcctagtaagggcaattgtatctattaattaggacattttctagtttccttagagatattttggtaagggcccacctgaagggctcattcgtattttaaattgtgttagagataagagtcgtgtccagcaaggacccatcatgtacttcgggtataaatatggcccgaccccatgtaatcaagggacgacagttcaatacacttcagcgcatcgccaccctttttactttcattgtttcgatgagtttttgctttcgagttgggctgcatcgggttcgatctccgacgaagagcgtgtcccatcggatggattacgtaccgttggcatctacagccgatcgagtatgccgaacaatctccaagtttttatctgcctccgccgatctgacgcgagttgcatcggcgtggccccggacgatatgtcatcggcaatcctgccgatcggctatcgatcaaaccagctggcacgctcagaacccgaaggcaatttttttggacctgcactagagttaagcagatctctcaggccactgcgtgttgatttttcgcgtcatcaccttacctcatcctttt

SEQ ID NO: 85456 - DNA, 1422 bp, Oryza sativa
  Clone ID: PAT_MRT4530_84593C.1
ccgggcttaacgggccggccggcccaagaaggcggcccagagcggcccaagacgcgcgcgcgtgggagggaggagagagagagagccggtggaccgggcttaccacgcgcggtcccggggtggggggaggatgcggtgcacgcgcgtggttcgcggtggacgcagatgcggcgggcccacgcgcagcctcacggctcgcggtggaacgcgcgcacggggaggggctgaccggggtcggctcgacccggtcttggctgagctggcgccgacgtggcgcctacgtagctgccacgcgggccggcgggaggtagacgacgacgccggccggaacggacggtggacgacggcggcgagcggcggagcgaaccacggcgatacaggcaaaagcgagcacaccgggtggttgcacgtgacgaggggagacgagccaacggctcggattcgccggaggaagcttgacggcggcgaatcgcggcggcggcaaccggcggcgggagaaggggaaaacggcgacgaggtcacgaggggccaattcccggcggcgagagcatctacgcggctacgggaatccgatgctagcgtcggattgggcggaactacgccgagcgaggccggggacgagcgggtgctacggagctcgagcggcgacggcggcgagcacacggcgagtgacgacaacggaagaggaagaagagggcgcgcccggagtccccttccgcgtcctagtgtgcaccgaatcctccggcacacatgcgacgacgaacggcgacggcgaacaggggcgacagtggcggcaagagacgaaaacgagggagattggagggggaggggcttgggtttaaatgggcggcaatgtcgggttgggagaggggaaccggcattggacggtcaagccggcgagctggcgctccggctagcggccaaaacggcgacaggaggtgacgccggcgagagggaaaaaggggaaaagagggagagaaaaggggagctcgccccttgcctctttgggaaaaaggaggaggggagcgggagcgtcccggcagagggaggagggctctgcctccgtcccttggcggcttgcgcgcggggaggcggggccgaggtgatgacgacggccatgacggcggggcggtttggagcggcgcgacgacacgagcgacaggcgctgacgacggcggcgaccaggcggtcggccaccacggcacgcgcgcgcgggaaacaacgggcggcgcgggcacgctggcttgcggggccgggcggctgcgcggctgcaggcgcggcagggcagcggggccgggcggcacggacggcgcagacggcgcggctctcgtgcacgcgcgcgcggcgcgcgggcggagctgagggggaggcgctgggcgcggctctcacgcacgcgcgcgcggcgcgcgggcttatcggatc

SEQ ID NO: 85457 - DNA, 1056 bp, Oryza sativa
  unsure (1)..(1056): unsure at all n locations
  Clone ID: PAT_MRT4530_84594C.1
ttttttttttttttttttttttttttttttgatacaatagcatactactactagtatatggtaaactgcaactgaggacagatacaggagttcgcatccaattttttacaggcagagtctggtacggctattcgcaattgtagcagttctatctcacaaactgctctttggatcagcatganaagcaaggcagggttattcaaaaacggnggggaggaggngggcctctgaatctcagaagggcccgtgcggccccggctggaagaactcaaggtctgggtgagtagtcccagctggaggcctcggacgcctcacaaagcgagaaggttcaaatcctggaacatctggtggaccaattggatcataacgaccacctggtggaacactcccagggccaccaaagggcacagggaagggattagaaggaaagaagcgtggatcgtttggaccaacatgcatgctgccacccccaccaataccactatgaggatagaagcctgcgccagggccagggaaggcatcatcatgaccaagtggagctattggaggataaaccaagctgtgtattgatgagctagtctcaacctcagggttcttggcagcaccagcatccttctcatccaatttgctcaatgcatttgagttcatggtctcaattaagcctgcaaagtttttgtacatgttcccatagttctttggctgctcctcggagaagaaatccttcacattgatctggatattataagggcctttattctgtgactcaagatccaggacatcaatggcaaggacatcaccgatcaccagacattttaccaatacccgtttcttcttgcccctctcctccttgatgtacaaaaatgcataacaattatccatgctgttccaaccatcaatccccacctcctcttcacctgagggcggggggtcggtgagcgcggcggggccgacggcgcagagggagtagccggcggcgaggaacgcggcgttggcggcgaaggcgaccccgtcgtgggcgccgcggaaggccgggcgcgccgccttcacgacggccat

SEQ ID NO: 85458 - DNA, 2197 bp, Oryza sativa
  Clone ID: PAT_MRT4530_84595C.1
ttgcgccggtggtacagttaacagttgcggctaaatacggtcaagatcgccaaggatcgtgattacacgtgggacgactaattgtggtcaacaaaaacacacgtacaggtcgaatcgcgctccctctccgctctcgctgccgttcccgccgacgccgcccaaatcgccgcgccgccctcgtgcgcacgccgtggtggccgaccgcctggtcgccgcagccgtcagcctctgccgcgcctgtccgcgcctgccgcccgtgtcgccgctccgttccaaaccgccccgcctcggtttccaaaccgacattgccgccctataaaccccggcgccctcccttccttttttttccctcccaatcttccccgtttttcgcccgcgccattgccgtccctctgtctctctcgccgcccctcctcctccccttagctttgagtagccgctcgaatagtaccccagtagctagctggcgccgcccctactgctgccgccgctcgctatgtgcttgccgccgtcggcccgagctcgatagcgtctctcgtcgccggcctcgctcggcgtagctctgcctaatccggcgcaagggatggattcccgtggccgcgtagatgctctcaccaccgggaatcggcccctcgtgacctcgtcgccgtttccccttccctcgccgccggttgccgccgccgcaatccgccgccgtcgagctccctccggcgaatccaagccgttagctcgctccctctcgttctccctcgccattccggtgtacaccccgtcgccccttgtcgtcgcacggcgtcccggagaaaccgccgccgcccgccgtccattcgcggccggcgccttcgtcttcctctcgccggcccgcgtggctgccatgaaggcgtgacgtcggtgccacctcggccgcgatcgggtcgagccgaccccggtcggccgcttccttgcgcctcggtaatcgtgcactctgcacgagtatcgacggtcgccttcaaacttaaaatctgagaaacatcttgggtaaaactcgggttttacaaaagacttggaaaacccgacacctgggtcggtgcttgcgaactaaatgaatttccaaaatcgcggaccggggtacgtaccgggtgtacggtctcccgctcttgcacttaaggaccgtttccttggaatttcatccgaacataagacaagtacgaccacatgggttctgccttgcagacgggacaaagagattaagtgcgatcctatcaatgcataatatttttcaagcaacataattaaattcaaatataggctcaaggtgttcaaaggtggcttgccttgcttgagatcttgagcttgatcctcgaaatcctcgcactgcgggtcttcgggctccgaaactacacgcaaaacgggacaactcaacaaacggagaaaataaagccctattaatgacggcccaaagcgcgcgcgcgggcggggaggggagagagagccggtgggccgggtccatcccgcgtggtcccgggtgggacccgcttgtcggcgactcggctcaccgtgcggagcgagcacgcggcgcgcgctagggttcggggagggagacgcggtgcacgcgcgcggttcgcggaggatgcggtgcggcgggcccccgcgcagcctcacggctcaccgcggaccatgcgcacgggggggggaacggagggagcggctggccgggtcagccgatccggtcgcggccgaggtggcgccgacgtggcgcctacgtggcagccacgtgggccggcgggaggtagacgacaacgccggccggaacggacggcggacgacagcggcgagcggcggagcgaaccacggcgatacaaacgaaagcgagcacaccgggtggttgcacgagacgaggggagacgagccaacggctcggattcgccggagggagtgcgtcggcggcggattaccgcggcggcaaccggcggggagggaagagggaaacggggacgaggtcatgaggggccgattcccggcggcgagagcatctacgcggctacgggaatccgtcccttgcgtcggattaggaggaaacgcatcgagggaggccggcgacgagaggcgcttccgagctcgggcggcgacggcggcgagcacgcggcgagcgacggcagcagtcggggcggcaccggctagctacggggaggctactcgtgctactacccgagtctaa

SEQ ID NO: 85459 - DNA, 1085 bp, Oryza sativa
  unsure (1)..(1085): unsure at all n locations
  Clone ID: PAT_MRT4530_84596C.1
cgcagggagggttgcattttcatcagcaatccacnccaccaggtcactattagtacaggtgtgcaagggtgacaaagataggntgatacaatagcatactactactagtatatggtaaactgcaactgaggacagatacaggagttcgcatccattttttacaggcagagtctggtacggctattcgcaattgtagcagttctatctcacaaactgctctttggatcagcatgagaagcaaggcagggttatttagaaacggtggggaggaggtgggcctctgaatctcagaagggcccgtgcggccccggctggaagaactcaaggtctgggtgagtagtcccagctggaggcctcggacgcctcacaaagcgagaaggttcaaatcctggaacatctggtggaccaattggatcataacgaccacctggtggaacactcccagggccaccaaagggcacagggaagggattagaaggaaagaagcgtggatcgtttggaccaacatgcatgctgccacccccaccaataccactatgaggatagaagcctgcgccagggccagggaaggcatcatcatgaccaagtggagctattggaggataaaccaagccaggttcagtagttctcaggcctggattttcagatctgtgtattgatgagctagtctcaacctcagggttcttggcagcaccagcatccttctcatccaatttgctcaatgcatttgagttcatggtctcaattaagcctgcaaagtttttgtacatgttcccatagttctttggctgctcctcggagaagaaatccttcacattgatctggatattataagggcctttattctgtgactcaagatccaggacatcaatggcaaggacatcaccgatcaccagacattttaccaatacccgtttcttcttgcccctctcctccttgatgtacaaaaatgcataacaattatccatgctgttccaaccatcaatccccacctcctcttcacctgagggcggggggtcggtgagcgcggcggggccgacggcgcagagggagtagccggcggcgaggaacgcggcgttggccgg

SEQ ID NO: 85460 - DNA, 876 bp, Oryza sativa
  Clone ID: PAT_MRT4530_84597C.1
atggagaagaagaagcagaagagacagatcaaagatcaagatgttcagagcattgcagatcgtcctcaggggttggctgggaaggtggcggtgatcaccggcgcggcgagcggcatcggcaaggcgaccgcggcggagttcgtcaggaatggcgccaaggtcatcctcgccgacgtccaggacgacgtcggccgcgccgtcgcctcggagctcggcgcggacgcggcgtcgtacacccgctgcgacgtcaccgacgaggcgcaggtcgcggcggccgtggacctcgccgtggcgcggcacgggcagctcgacgtcatggtcaacaacgccggcatcgtgggctccctgtcgcgccccccgctcggcgccctcgacctcgccgacttcgacgccgtcatggcggtgaacacgcgcggcgtcctcgcgggcgtcaagcacgccgcgcgcgtcatggcgccgcgccgccgcggcagcatcatctgcgtggcgagcgtcgccggggtgctcggcagcgtgacgccgcacccgtacagcgtgtccaaggccgccgtgctcggcgcggtccgcgccgccgccggcgagatggcgcgctccggcgtgcgcgtgaacgccatctcccccaactacatccccacgccgctggtgatgcgcatcatggcggagtggtaccccggggcgagcgccgacgagcaccgccgcgtcgtggagcgggagatcaacgagatggagggcgcgacgctggagcccgaggacatcgcgagggcggcggtgtacctggcctccgacgaggccaagtacgtgaacggccacaacctcgtcgtcgacggcgggtacaccgtcggcaaggcgcccaacctgccggcgccgccgcaataa

SEQ ID NO: 85461 - DNA, 433 bp, Oryza sativa
  Clone ID: PAT_MRT4530_84598C.1
gacacatatttagatatgtatttgattccagaaacctactcctaataacacaaatgaatacatgaatgccatattctctataacactccaagctagttgtccaaaaggtgaactccaccttaatgctcatcaaaaaaggaacatgttggttatatgtaggtccagtcaccgctcccttgcttaaaatttgtggtcccccagggaacctatatcctaaatgctatgtacagcagctgcgaagcagtatggatggtgatagacccacacttgaaaaaatgaataaaatgaaacttaaagttgaactcatgagatgatttactgtatgccaaacaggcatttaaccaaaccatactcaacataagttcagccaccaaaagccagagtgtgttcaacgccttagaactcatcaactcaagcatctggaactgatagg

SEQ ID NO: 85462 - DNA, 366 bp, Oryza sativa
  Clone ID: PAT_MRT4530_84599C.1
ccggccgggatccgctcgacattctcgcaatatcattaacacttctgctcttccgtcggcgcctatgatgctgaagagtcgcggcgttctacttgtgggcgcagacaaacttgtcaatgtcttactccaagacctaagtgactgcagttcatcgcccgcctgctgcgcttgatgccatcgtggatggatctgaagtctgctcttcatgtactgaagataaagctaccgcatcatggaaggctcgtgcagtgtctccaggaacggtcaactgactttgaaaaacatcgccgctcacatgtttattggcatagagaggactgagatcaatacgactatgtcaagctgagcaagacactctgaggtgat

SEQ ID NO: 85463 - DNA, 666 bp, Oryza sativa
  Clone ID: PAT_MRT4530_8459C.1
atgccgtcgtctcgcgctggacctcgccacgtcgtactcgtcatgctcttcttcgccgccgccgttgccgcacgaggagccgacgcggcttcgccggtgacgacgaggccgtgcggtgcggcggcggcggcgtcgttcctctgctcgcgctgcgccaccacggtgtacccggccgtctgctacgactccctcctcccgtacgccggcgcgttccaggacagccgcgtcaggctcgcgcgcgcggcggcggacgtcgccgcggcgaggctacgggacttctcggccagcctcgacgaactcgtccacggatccggggacgtcggggcggtgacgacgccgccgcgggtggcggcggctgtgcgagactgcgtgggcacggtatcgtccgccgccgggctggcgaggcggtcgtccgccgcgctcgaccgcctggacgccggcgccgcggcggggggcggagggagcaggctggccaggtgggaggtgtccaacgcgaagacgtggctgagcgccgccatggcgaacgtcgcgacctgcgccgacgggttcgccgacgcggattcgtggtcggcggcggggatcgaggaggtggtggccggcgaggcggcgaacgtgagcaagtacaccagcaacgccctcgccctcgtcaacggcataccgttgtaa

SEQ ID NO: 85464 - DNA, 1797 bp, Oryza sativa
  Clone ID: PAT_MRT4530_845C.1
atggtgccacgcggcgacgacggcgccgcctccgctgcccccggctctcccgtggctcaacttccacgacggcggccggggcacggccctcgccgccgccactacctcaagaaccctctcaccggcgaggtcgtgcgcctcccgggccactgccactgcggcgacccggcccgcctccgccgccaacacccgccgggatcccccaccgcctacttctacatccgcaaggtgatcgtctgcggcggcggcggcctcgtcgtcgcgaggatcagctacagtcacgacaacgccgacgacgtggtggcgtgctgccggccgggaacctcgccgtcgtggtcggccggcccgtgggaaggcaagggctaccacgacatggccttccacgacggcaaggtctacaccgtcgccgggagaggcgacctcttcgcccatgaaatcaccacccacagaaagaccaaacaacccatggtttccgatctcgcgacacagatcattcaggtcggcttgttcgagagcttcttattggatggcacctacgccgccgtgagatgcaagagattacactacctcgtcatgtcgaagcaatcaaatggactgatgttcatatcgagagcttgggtgatgaggcgatcttcgttagtacaagctgctccatggcagttcgtgcgtcgagctatggaggttatgtggaagcagtttgtgtttgccgcccacagtcgtggagccatgggtctctgtttcggcatcgacacacgtagcagtccgccgccatcgccgccgcatcctcggccgcagccaccaccgccaggctcgtcggaccttccgacggacgtcgccatccttccgtcgccgccgcatcctcggccaccgccaccgccatgctggtcggacctcccgacggacctcgccggccagtggcgcctcggcgcgctccggcaacacccgctgccgccgccgccgccgtggctgctcatcctgcgtagcccctgcgtctaccagagcctccccgacggcgagctccgccccgtccccggcgcgaattcgagccgcgcgatcccctacttctcctcctacgatgatggctggctcctggagtaccaatgcttcggccgccgagacaggatcaggaatcctctctcccgcgccgccattgacatacctcgctgcttcgatcagcgcatcaggagcctcgactacttcttgggcgacaacgacggcagtcatagcattaaccccgccgagtacacgttgcctaagatcatcgtgtgctcgccgggcctcgtcgtcgccgccgtcgtccactctacctgcatcgccgctttccggccgggaattgatcattcatggtcggttatttccggtgatgaagttatgtcgacgaccggtggtgatgatgatgatgacgacgatgatgattatccgtggatgaggagaaaatacgaggacatatcgttgtatcgaggcaagctctacgctctcactagcaaggaggagcttcttgtccatgggatcatcaacgacgacgacattgacactgtcagtgcaaatgcagtactatctcgtgctgagcatgcgatcagggcagtgcatcaccatccattgacgcttctggaacggatacaaaatttcagctccgatgagagtcgctaccttgttatttcatgcagtggcaagctgctgatgattaggtgcacaactaaatattcgcctgacggtagttcttccatgggtggaactacaatcaaattcaaggtgtttgaagctgatttttggagggtggtcagtggttggaggtga

SEQ ID NO: 85465 - DNA, 2954 bp, Oryza sativa
  Clone ID: PAT_MRT4530_84600C.1
ggcaaagctaagaacaagaccaaatgaatggtatggcttgcttccctcttttcatcttctcattctgcaagtgcgatgatcagctgacacaagcaaagaaactctaccctggcgacgtgctcgtctcccagaacggggttttcgcactcggcttcttctccccagcaacttccaaccagagcttattcctcggcatatggtacaacaacatcccagagcgcacatacgtttggattgccaaccgtgacaagccgatcactgccccttcatctgcgatgctcgccatcagcaatagttctaactttgtattgtcagatttagaaggccacaccttttggacgacgatggccaacatcaacaccagaggtgaccgagcttatgcagtgctgctagactcaggaaacttggttcttcggctgccggacaatacaaccgcatggcaaagctttgatcacccaactgatacccttctccccaacaagaagtttttcctgagatacaaggcacaagtcgccatgcgacttgtcgcttggaagggaccgaatgacccatccaccggggacttctcctaccacagcgaccccagatcaaaccttcaggccttcatctggcacgggaccaagccatattaccgtttcattgcactttcacttaatagagtgttagtgtccggtgaagcatacgggagcaacattgccactttgatgtacaaatcacttgtgaacactagggatgagttgtacattatgtacacaacctctgatggctccccatacacacgaatcaagcttgactacatgggcaacatgaggttcctgagttggaacgggagctcatcgtcctggacagtcatctctcaacagccagcggccgctggtgactgcaatctctacgcctcatgtggcccattcggctactgcgacttcacattggccatccccagatgccagtgccttgatggattcgagccaagtgatttcaactcttcgagaggatgtcgaagaaagcaacagttgggatgcggaggtaggaaccatttcgtgaccatgtctggaatgaagctccctgacaagttcttgcaagtccagaacagaagcttcgaggagtgcatggccaagtgcagccacaactgctcatgcatggcctacgattatgcttatggcaacttgaccaaagccgacaccatgtccgatcagtcaaggtgcttgctctggactggggatcttgctgacatggcgagggcaagccttggtgacaacctatacctccggttagccgactctcctggacacacttctgaagataagaaaaagaacagatatctagtgatggttttagtcacaattattccatgcctgctgatgctcacatgcatataccttgtcaggaaatggcaatcaaaagcatcggtgttattaggcaaacggagaaacaacaaaaatcagaacagaatgctgctaggaaaccttagatctcaagaactaattgagcagaatttagaattttcacatgttaattttgaatacgttgtcgcggcaacaaacaatttcagcgattccaacattcttggaaaaggaggtttcggtaaggtttataaggggaaattggaaggcgggagagaagttgctgtcaaaaggctcaacacaggttgcacacaagggatagagcattttacaaatgaagttgttcttattgacaaattgcagcacaaaaatctagttaggcttcttggctgctgtattcatggagatgaaaagcttcttatttttgaatatttacgcaacaaaagcttggattactttctttttgatgattcaaaaaagcctatacttgattggcaaacaaggttcaacataatcaaaggagtagccagaggtcttgtttatctccaccaagattcaagaatgagagtaattcacagagatctcaaagccagcaatattttattggatgaggagatgagccccaaaatatcagattttggtatggcaaggatctttggtggcaaccagcatcaagcaaacactaaacatgtagtcgggacatatggttacatgtctcctgaatatgcaatggaaggcatcttctctgtcaagtctgacacatatagctttggtgttttagtcttggaacttataagtggttgtaagatcagctcaactcatcttataatggattttccaaaccttatagcctgtgcatggagcttgtggaaagatggaaaggcagcgacatttgtggactcccctattctggagtgctattcgcttaatgagtttttgctctgtatccatgtaggactgttatgcgttcaggaagacccaaatgctagaccactcatgtcatcagttgtggccatgttcgagaatgaagccacaacacttcctacttctaagcaacctgcatattttgtgccaaggaattgcatggcagaaggggcaagagaggatgccaacaagtctgtgaacagtataagtcttaccacactacaaggacgttagatgtttaaatttcagatatagctggctgtagaattcaccacttgatcaattgtgcaagaacctaggaatatgattgctttgtgggtgtatggttcatcttcaatggtttacaaaaaaaaaaaaaaaaggaaagtctcttggggtaatccctgtcgtctccttgcgtaacgcaaacgacttccttgatccttcagtagtctccatcaattgttcttgagcataaatcgttgactcctccagccttcatgttgtcgtctacagaaatagttgtagtaagttttctgttgtgcacaagcgttcaagcgtcgatatttctagttgcgaggttgtcccggtgccaccgagccagccagccagccacaaactgcacaagttagcatcccccacactgagtactgatacctgctacgcctatgctctcgtcaggccacttcgtagtctcccctcgtgccg

SEQ ID NO: 85466 - DNA, 485 bp, Oryza sativa
  Clone ID: PAT_MRT4530_84601C.1
aagcggctcaattgtatttacagcacaaaggaagagaacacatcaagttatgccaatccatggatggatcacatgaactgaaaacctgaaacattctgaactctcctacatatttacaccacattgatcaagggaaagaaaaatgcccccccccccccccccctaaatctccaacggagatggcctgaccggcccggagtagccggtaacggcgagggagggcgccccagctcgcggaaaccgatgacggcggtggcggggggcctcatctacagcatctgcagcctgtggagaagccccctggccttctcatcctcctgcttgatcctcctgacctggatgtggatcagcaccttttgctccaacctgaccactcttctgctttcaccttgctcctccagcatatccttctccattgtagcagcagcagccagcatcaacaatctggacatgtgctttgccggacgcgtgggccgactcgtggc

SEQ ID NO: 85467 - DNA, 435 bp, Oryza sativa
  Clone ID: PAT_MRT4530_84602C.1
caaaggcttgccgtgtgcatgatatgattcttgatctcatcgtatccaaggcagtagatgaaaatttttcgacttccattggtgatgaaacacatagattggcatctcaagctaagattcgccgactctctgttgactactctgggcaagaagtttctgtatcatggccatccctgatgttagctcatgttcgatcccttagcatatttggatactctgaacaaatgcctcctatttcagaattcaaagctttaagagtgttggatctagagagcagtgtgaaattgcaaaactctgatcttaacaacgtggtggatctatttcagttaaggtacttacggattgcagccagtagaatcacacatcttccagaacaaattggggagcttcagtttctcaaaacattggacctgcgtcgtacatggataagaaaat

SEQ ID NO: 85468 - DNA, 324 bp, Oryza sativa
  Clone ID: PAT_MRT4530_84603C.1
acaaaaaaaaagaaaacatgactcgcaaaagtcccattacaataaacgatcctagggagggggaacatttccaatttttttttggggcctaccattaaccaaaaacttagcaggaaaaaagggggaccatggatgccatgtttaaaacaggagcccccggaaaaaagcataccaagagttcaaaaggggcataaaattcaaccctgaaacaaatccaaaaacattttgaaaggacaccaaaaatcccaaaaagaggagtttacatgaaaagggcttgtgaaaaccgaaaaaaaactgccttgtaaaaaagcgattaaaaaacca

SEQ ID NO: 85469 - DNA, 917 bp, Oryza sativa
  Clone ID: PAT_MRT4530_84604C.1
aagccaaggagagcttcaattctccattttatgtactttttcacagggattttttttttttttctccactgacatgggaggccaacttattccacgactgcgagtgctccggcgatggccggcgccacctcgccgtggccgacgccggcgacgatggacatggtcatggtcatcgactcctcgcggtggaacctcgtttgcttggcgatgaacgcctccaccgtccgccggaactcctccgcgtcgtccgcgccccagcacacctccgcgtcgcgcgccgtcaccgacgaccgccgcctgcgcccgttgtccgactccgaccgccgcagctccggcgacaccgcccgccggaacgcgccgcgcgagcccatcttctccgacctgctccgcctcggcgcgcgtgccttgttgacgcgcaccgcctgcttgtcctcgaacgccgccgccgccgccggcgctgccggcgccaccgacggggcgcaggggaccacgggcgccggaggcgctgccaccaccggggcctcggtggcgtgaggcggcggcggtgatggctgcgggacgatgaacagagggaagctggcggcgggtggcgctgtcgtcgacgctggcgtggacccggcgccagcgctgtcgctggagacggcggcggcggcggcggtggtggtggtgccgtggttggaagagatggagaggtcgtgcctggagagcgcgaggagcaggagcacgatggcgttgccgaggacgaacacgaaccgggcgttgagcaggagcgacccggcgagccgcaccacggcggcggcggcggccggcacgcgggaagaagaccacgacaagaacaccacgagcgcgaggagctcgcccacccgcagcatccggtagaggaggcgcagccgcaacgctgctccggcggccgccat

SEQ ID NO: 85470 - DNA, 328 bp, Oryza sativa
  Clone ID: PAT_MRT4530_84605C.1
tcgatggatcaaccgctctcgccggagacggaagaggcgcatagatgtcgtcggcgttcaccgtcgatgagacgggccccttcttcggctgtctcggcgccagctacggcctgatgttctgatgcatgggtgcggcgtacgggacggcaaccagcggcatccgcttggcggccatgggcgtgatgcacccggagctcgtgatgaagtgcatcgcgcccttggtcatggctggcgggctgggcatctacggactcatcatcgccgccatgctctggacagggatcagccacctggctaagccggactacctgtgtgaccgctactcgca

SEQ ID NO: 85471 - DNA, 429 bp, Oryza sativa
  Clone ID: PAT_MRT4530_84606C.1
atggccgaagatgacccccgtgggcttatctccgccacttcacacgacgacgtcaccaccggcggcggctcgggcacgcattctcgccggcgaatgacggcgtggcggcgcgaacggagggctccgaaacgatgcgggcatcgctgcgaactcaccggttaccaaagcgacggtggacgagcaacggacgacgtcggcgacgaggaaaaggcggcagcaaccttcggcttgacgacggcgacggcgttccggcggtcaacggtgacggagaaggtgcggatggagacggcaacgagacggcgatcacgacggcggccttcccgagcggtgacgacgaccggagcgacagcggcgcacggctggagcgacggcagcgacggcggctcaaggtctcacgcggaggcggcgctacagacggcggcgggctaa

SEQ ID NO: 85472 - DNA, 1616 bp, Oryza sativa
  Clone ID: PAT_MRT4530_84607C.1
ctgcaggaatcggcacgagggacccgcccgcgccccgtctccccaaatcgccaaatctaacctctcgcctcgacccccaccccctctacgcctcgccatggcgtccgacaccaaggcagtagccgctctcttctccatgtacaacgacgacgaggaagaggatgacggcgacgagcccagacccccttcgccgcccgccgccgcaacctcctcgtcgccctcacctcagaccgaaggcgagggctcaaaccctaaccccaacgctgccgcttcttcggcgcccccatcccctcccctcgccgaggatccggccggccgcagaaccctagccagcccctacccctcgccggggctcccgccgctgccttcgcgccgctcgtcctcgcccttcgcgatttcgtccccctccccgctccgccccgccgcggccatgccgccggccgacctgccgcgcccccctcggcgtggcccgcttgctatcgtggactacgctcatgacgaaacggccatgtcgccggagcaggaggatggggagatcaatggcatagacagatcgggtttggatgctcaggttgctgaggggaattatgaagaaaagactctctcaggtattgttcacatactgaccccaaatatacgatcagaaatgtctcagcagaacgatgcacctgaacagaatcaagtaggggcagctgcagcaatgagtgtaactggagcagaaatggaagatgttcaggtggaagaagctgctgataacatgcagaatgatgatcctctgagtcgtttccttcctcctcctgtgactgcaaaatgttctgcagcactacagcaaaagatcaacaagttccttgcgtacaaaagggctggaaagagcttcaattctgaagtgcgcaatagaaaggactacaggaatccagactttttgcagcatgctgtgcggtaccaagaaattgaccagatagggacctgcttcagtaaagatgtttttgatccttatgggtacgatagaagcgattactatgatgagatcgaagctgatatgaagcgtgaagttgagagaaaggaactggagaagaaaaagagtggaaaggttgactttatcactggaggagtacaagctccaattagtgcggcaataccgaaaattgcagtgctcattgcatcttttacagctgctgtatcagcagcagctgctgctggtgcaccattggtttcgatatcgggagaaggcgtacagaaagaggctaggccaaacaagaagtcaaaatgggataaggttgatggggatattaagaaccctgtggctccaagtggacttgataatttgtcagcagccgcgcttctaacttcagcaaatgttggtgctggatacgctgcttttgcgcaacaaaagaggaaagaagctgaagaaaagaaaacaagcgatcataagtcagacagaagatcgtagtgcttctctccttttcttttgagttaaggatgtactatttggaggttttcaattacatagccttataatgtgaaaaaaaaaaccttcaagaattggccaaaaaacatgcttacacaatgtgttccctatgtgttgctatttttactataagctgctttttgggcgt

SEQ ID NO: 85473 - DNA, 498 bp, Oryza sativa
  Clone ID: PAT_MRT4530_84608C.1
atgggggaaggggagatatacctgacgaagaaggatcgatgggcctctcctgcttctcgttggcttcgtccaagccacggcagtgccggaggggaagatctcggcgccgaggatcttgtggctgcttacccctctgaacactcgctagaggaagacggttgggaagctgtggattggggagtgatgaaaggcggtggaggtggattgggaggaggagctgtgtggtggaggcggcggcgacggcgtggaactgccgagggtctgcactgctcgaagagacgattgggcaaggccaatctgccactctgcaagagcaagcctaaccaccagcccatcaaggtgttgagaccaatcttaattcatggattaatgccattatataatgccgatcacacatacacacgactgtcggccaagatgccgattattggtttgatatttggaaatttttggcgagtggctttgcagccggtcagagtgtcagaccaggtaatttga

SEQ ID NO: 85474 - DNA, 598 bp, Oryza sativa
  Clone ID: PAT_MRT4530_84609C.1
gtacctcgtggtagaagtgggttgaatgtgaatcaagctcgattaccccaacaaggcacctacatggctcttctacgccaggttccaagtcaccatcgagaagcttctggttcccatacttctgagccagttgatttcaatgacgatgaacctttgcagctgatagagtctggtgacagtcgtgatgctagatgcagtagagctgtggagatcaagacatatcctgaattctcagccattccacagtcgtcatctgaagatgattttgctgttttgatccatctaaaagccccttgtgctaacccagaacaagtcacaggcagaccattcaatgccacctcaattggataccctacatctcgcgctcctgttgatctggttactgtgcttgatgttagtggcagtatggcaggcaccaaactagcactcctaaaacgagccatgggttttgttattcaacaccttgggccttcggatcgcctttcagttattgctttctcatctactgccagaaggttgtttcatctccgacggatgtctcactctggcaggcagcaagccttgcaggctgtcaacttgcttggtgctggtggtggta

SEQ ID NO: 85475 - DNA, 374 bp, Oryza sativa
  Clone ID: PAT_MRT4530_8460C.1
cccacgcgtccgcccacgcgtccggagtttgccagtacagacattaacctttactagtagtagttgataaggaaaaaaaggaaagaaattctagaattcacaaaaaaaacaataaaaattggcacttaatcccaatgtgttatgtgccctagttagagaggtcaaaataggtcagagaaaatatttatgtattatacaagaccttctcacataaaaacaaaacatcatgccttaatctcggtcctcctaatacaaaggtctggatctgttggttaggttaaagatatactcctattattttattattttcatgctaaattcaatgaaagactttagagttgataagaaaagcaataaattcataaaaagcaaaa

SEQ ID NO: 85476 - DNA, 1413 bp, Oryza sativa
  Clone ID: PAT_MRT4530_84610C.1
ctagtcgtcgtcgtcccaatcggccggacggcgtcgctcatcgtcgtaccagcaaacgcagctgagcccgatgagcacctcgacgatgacattctctgccttgtgccggtcggcgaagtgcagcgtctgcaccatcagcacgcgcggccgcatgctgaaccgctgcgcccgctccatgctatgctcgtcgtgccaccgcaccgtgtcgtgcgccataggccccaaccaccgcagcatcctgtccaccgcgtccatcgacgccgccgccgcagcctcgtccactggctgccctctccagctctctctcagcttcgccttcacggccgtgcggatggtcacaggcagcatcttgtacagctcgtctctcttcgagagatccatcccggcgtccacctcgttgctgtggatcgttggccaaagttgcctgagcagcatctcggcgcacacgatcatgttcgcgtatcgcagctccatccccgagccgccaaccgtgctcgccgggggcttgatggactccgacgctgaaaaggcggtgtctttctgccgaaagatgggagccgagtgccggatcgccgcggccggtgacgccgcctgctgtaaggggccagacgtgcggcggagcgcccacgcgcgacctactgtcaaaagcggcaagcccggcacgtacgcaccgaatgttattgagatgcgcgcgagcacggcgagcaccgacttggccatgagcttggataccttgtgcgcggcgacactccagagcgagctctccatgagtcggcgcaccttctgccgctgcgagttgagctcgcgtatcagcttctcgccaggttcggggacctgcctcttggccgatggccccggctgcgccgggatcggcccgctatgcctcatccactgctccatccgccgctccgacgcctccagctcgctgactgcgtccatctccgcgtacagcttcgccgtcgcggccacgtgccgctccatcttcctgaactgcttcgtcgcgctcctgtagaacccaaccgtcgcgtccagccgcgcgaggccgttcccgcgcttcgcctcggcgtagacgcggtcgaaatcgtgcaggaacggcgcgcccgcgcagcaccgcgccccgaggcgcgcggcagtgccggcggcatggtcgaggtccgccacgaactcgccgcacgcgagccggagcaggagcgactggtccgtggacgtgacgcgcgcgacgccctcggcgcgcagcgcgtccgcgcggagcctcctgacctccacgtcagacagcgagcggtggagcgacacgagccgcgacatggccgccgccgcctcgaacgccaggatcccgagacccgcctcctccctggcgccgccaccgaaccgcgcgcgcaggtcggcgagccatgacctcgcccccgcgggcat

SEQ ID NO: 85477 - DNA, 276 bp, Oryza sativa
  Clone ID: PAT_MRT4530_84611C.1
acacacacaccagtccatatgggagcactgctagaaggagcgagagagcagcagaaggcagccgagcaagatgccgatccgcaatatcgccggggggagccaccaggaggtgtaccacccgggagcactcaaggcggcgatggccgagttcatctccaccctcatctgcgtcttcgccggccagggctccgggatggccctcaagaaggcgaacggccggggaacgaacaaccccggccggccgaacccggcgggggtggcccacgccttcgccct

SEQ ID NO: 85478 - DNA, 342 bp, Oryza sativa
  Clone ID: PAT_MRT4530_84612C.1
ggaccaaagtcaaaacgtattataacctgaaacggaggtagtatatatcatcacatataccagtacaaaaatgtacatgtgcacgcgtagtcgcgtacacatctattagtatatacatatcccctaatttctacctctaatatagcatgatacgtacgtcctacaaaacttaactagagcaaagaaaagatacaaacaagatccaaaacaaacaggcaggccagcatgcatgcaaaatcggtgaagaaacatccaccgtccatctccagatgatcgatccatccgacgatctcacgctcatctccatcatatcctcctccatggctgctcctgctactcgtc

SEQ ID NO: 85479 - DNA, 122 bp, Oryza sativa
  Clone ID: PAT_MRT4530_84613C.1
gtgcgtcctcagggggtctttagcgcgagaggggattctacaccgacgcattttatttgcggggtcccacccatatgcatccggctccctttccccaactgtgcccaaacctgtgttcacct

SEQ ID NO: 85480 - DNA, 1381 bp, Oryza sativa
  Clone ID: PAT_MRT4530_84614C.1
tgcttctcctcgccgccaccgtgtagcgcctagggttttcttcgcccgcgcgcgtcgatccccttttcccctggtcattttctggtcctcttcaccgccgccgtgctccaccgtatccttcggcgaccgccgcgggcagcgcgagagggggggaggagagctcgcccgccgcgggcagcgcgagaggggaggaggagagttcgcccgagggcggaagccaacgaggggatgatggccggacggcgagctcgccgaggcacggctgttggagcgaactaatccggagggggtcgggccccttggtgtcttggtgctgctccgccccggatctgcctgccccattacttcactttctccttgcaatcacgtcggcggggaaggtcgtcgtcccacgagcagacgagctcatgtcggctcgacatggtctcccgagctcagcgggcatggcggacgaggtgaggcggcagggtgcagcgcgtaaacttaagttttaagtccttcaacaatgaatcgatctgtgcaagttatgcaaatattgggttggtttgtgtgcctgctcaacctcagcttgctgtcctccggctgtggtggcaggaagggaagcacttgcctgtcttcctatagctcaaggtatcaatctttttgtcctgtaaatcttcccagacgttgtgctacatgctctaattgcacatgttttaaggcattcatggttgcacataaataattagccatgccatgagcttcgatgcaccttctactccattgcctcacgtatgcagctgtgttttgatatatatggtacagtgactttgtgagcagctcagtttaatagaaccaaggacgatagcttcaatttaacagtgcaccttcactacttgataattgcgatggagtatgctatcatgacacacaaggattttttgttgggtgctgtgtacaattatttttatcgaggcctttgaagaggccaccctgtgcagatttctcaatttcagccatagcaaaacaaggggcattttccatactcttagatatgtgatctctacttctctttatggagaaaaatccatgaaggtagattgtttctcctttatcccagaaatgaggtggcatttcaaaccggtttcttgcaggaaagaataggttgagcgaaggtaatgcagtctcattgtacagcactggcctgatgtctcgcacttgttcagttttgcatagtctccctttaaaccttatgtaatgaatatttggtacctgattgttatcgtgggtggcttccataccatacatgttcacggtaaccgtgtttatatgctattaaattagctaaaaaaaaaaaaaaaagggcggccgtatagaggatccagcttagtacgcggctgcg

SEQ ID NO: 85481 - DNA, 232 bp, Oryza sativa
  Clone ID: PAT_MRT4530_84615C.1
ccggccgggcattccttcttctccatggagctttcgtcgctccgctccgggggcctgcacggaagctggaggcagcgcggaagcaccggctatgcgcgctcctgagtgcagcacacttaggactagcgcaaattacagctcctgaggggctgcgatcccagtgcgaagaaagccacctctgtgaacagggacatgactgggggatccgaggaggagaatgaccagcctattg

SEQ ID NO: 85482 - DNA, 1758 bp, Oryza sativa
  unsure (1)..(1758): unsure at all n locations
  Clone ID: PAT_MRT4530_84616C.1
atgggccggccggcccaaggcggcccaagcgcgcgcgggagggaaggagagagagggccggtggaccgggctcaccacgcgtggtcccgagtgggacccgcttgtcagcggctcggctcaccgtgcggagggagcacgcggcgcggcgctagggtgggggagggacacggtgcacgcgcgcggttcgcggtggacgcggatgcggcgggcccacgcgcagcctcacggctcacggtggaacgcgcgcacgggaggggctgaccggggtcggcccgacccgacctcggccgagctggcaccgacgtggcgcctacgtggctgccacgcgggccggcgggaggtagacgacgacgccggccggaacagacggcggacgacagcggcgagcagcggagcgaaccacggcgataccggcgaaagcgagcacaccgggtggctacacaggacgaggggagacgagccaacggctcggattcaccgaagggagtccgtcggcggcggattgcggcggcggcaaccggcggagaggaaagggggaaacggcgacgaggtcacgaggggccaattcccggcggtgagagattctacgcggctacgggaatccgttgctagcgttggattgggcggagctacaccgagcgaggccggcgacgagcggcgcttccgagctcgggcggcgacggcggcgagcacacggcgagcggcggcaacggccgggagggcgtgcccagagtcctcttccgcatccacgaacgcaccggctctcccggcgcttggcgatgaacggcggaggcgagacagagctcggaaggcggcggcaatggcgtggaggcgaatgggagaggaaaggaaagggggaaacttgggtttataggatggcaatgtcggtttgggaaccgacctagggcggccaaggcggcgacagggagggaggaggatgacgccggcggaagggaaagggagaaaaggaagggagaaaggggcttgcctccttgccactttgggaaaaggaggagggagcgggggcgacgcggcagggggaggaggggctctgcctccgtcccttggcggcttgcgcgcggagtcgcggggccgaggcgatgactacggcgatgactgtggggcggtgtggagcggagcggcgacacaagcgacaggcgcgggcaggctgcggtagagggtgacgagggcggcgaccaggcggtcggccaccacggcactgcgagctgcggaaagcaacgggcggcgcggtggtttgagcggcgcggcttgggcacgagcgctggcttgcggggccgggcggctgcgcggctacaggcgcggcagggcagcggggccgggcggcgcggacggcgcaaacggcacggctctcgcgcatgcgcgcgcggcgcgcgggcagagtggagggaggggcgctgggcgcggctctcgcgcacgcgcgcgcggcgcgcgggcggagcggaggggtggaagagagagcgagaaagagagggcgccggggagggaggggggagatttttttcttgttgtggttccgcgccctngtccgtgttttgctcgcgcctcgttcggtgtgtttttgctgtgttggttctggtgtttctgtctctcgctgttgctctctctcggtctctgtcttggtcgtggtttcttggtgccgagttggtggttgtgcgttttctctttcgtgcttgttgtcggttgtctcgcttggtcgtacttttgtgccgtcctctcgtttttgttggtgggcttcgc

SEQ ID NO: 85483 - DNA, 1617 bp, Oryza sativa
  Clone ID: PAT_MRT4530_84617C.1
atgaccgtgggcacggctgttcgaacacccgtggggatcagccacgtcgggagacctccaagctttcatgacaaggcatttcgaaagccgatacaggattcggtccttaagtgcgagagcgggaaaccgtactcccggtacgttccccggtccgcgattttaagtttgaaggcgaccgtcgatactcgcacggagtgcacgaatatcgaggctcaagatgttcaaaggtggcttgccttgctcgagatccggagcttgatcctcgaaatcctcgcactgcgggtcttcgggctccgaaacgcgcgcggtcccgggtgggacccgcttgtcagcggctcggctcaccgtgcggagggagtacgcggcgcacgcgcgcgggcgggggagggacgcggtgcacgcgcacggtctgcggaggaacggatgcggcgggcccacgcgcagcctcacggctcgcggtggaacgcgcgcacgggaggggctgaccggggtcggcccgtcccgacctcagctgagctggcgccgacgtggcgcctacgtggctgccacgtgggctggcgggaggtagacgacgacgccggccggaacggacggcggacaacagtggcgagcggcggagcgaaccacggcgataccggcgaaaacgagcacaccgggtggttgcacgagatgaggggagacgagccaacggctcggattcgccggaggaagcttgacggcggcgaatcgcggcggcggcaaccggcggggagggaagagggaaacggcgacgaggtcacgaggggctgattcccggtggtgagagcatctacgcggctacgggaatccgatgttagcgtcggattgggcggagctacgccgagcgaggctggcgacgagcgggtgctacggagctcgagcggcgacggcggcgagcacacggcgggcgacggcaacggagagggctagcgctcggcggtcgcggccaaagcggcgacagggaggagggaggaggatgacgccggcgggagggaaaaaggggaaaagagggagagaaaagggggcttgtccccttgcctattcgggaaaaggaggagggagcgagggcgtcgcggcagagggaggagggaggctctgcctccgtcccttggaggctagcgcgcgggctggcgcggcagagggtgacggcggcggcgaccaggcggtcagccactcggcacgcgcacgcgggaaacaacgggcggcgcggctgggcacgcgcgctggctcgcggggccgagcggctgcaggcgcgacagagcagcggggccgggcgacgcggacggcgcagacgacgcggctcgggcggggaaccacgcgggcgcgcacgcgaacgacggtgcgcgggggccgtcttcgcgagcggggagctcgccagggagaggagaaggagagcgaggggaaagggagggggcgctcggcgcggtgctcgcgcacacgcgcgcgcggcgcgcgggcgggcggggcggagcggagcggagggagagggggagagggagcgcgccggggaaggggagggggcgagagagagagagagagagagagcgggagcgcgccgggggagaggagagggccgggggagaggggaagatgtccttc

SEQ ID NO: 85484 - DNA, 386 bp, Oryza sativa
  Clone ID: PAT_MRT4530_84618C.1
aactaaaaatctacctttattcccatacgggcattcaatggcacaaaatgggaatgacatcctatgaacacatgaaaagcattaccaacagcatctccaaatagttactggttccgatacaacagatggatcgaaaatcttttacgctcaaagcagctcttgcaaggagcctaattatgctatgatgaataacagatactattactactgaagacaggatgaaaataccatcaccaccatgagtcaaattaagggttcctgtcttggaaatccttaatgaacgcgacaagcttcttcacaccggcaagctacatgactttgtaaattgaggctcccacgccgtcgaccgaactgtgccccttgagttgcaccatttccttcttggt

SEQ ID NO: 85485 - DNA, 570 bp, Oryza sativa
  Clone ID: PAT_MRT4530_84619C.1
aacctctgcagagggggtacactttacccacacgacattactaacccgaatcacccagcccgcatttcgagagcagacacagggttgccatatgccgacgagaggggtcccagaccaacaacaggttaggtcccagaccatactgtgccaggaagcccgggggttctctccgacaccaccccgttgaatccacatgtctgtcagcatcaaggctcccccgcttagcaatttactcagccaggggtgtcccattccacccatgtggtcgcacttgtcttatgatcggatgaaattccaaggaaacggtccttaagtgcaagagcgggaaaccgtacacccgattttaagtttgaaggcgaccgtcgatactcgtgcagagtgcacgattaccgaggcacaactaggtggttacaagggaacatggtggcttgccttgctcgagatcttgagcttgatcctcgaattcctcgcactacgggtcttcgggctccgaaactacacgcgaaacgggacaactcaacaaacagtgaaaattaagccctattaatgacctctaagcgtgccattaga

SEQ ID NO: 85486 - DNA, 269 bp, Oryza sativa
  Clone ID: PAT_MRT4530_8461C.1
ctaacactcaatttccattacagtacttttcaaaagagttctctgtgaatcacttaaaaccactcatggacgacgcaacagtgcagattcaggtccaggcattagaaggcccttcaaccaacatgattcttcacagatcaacagaccattgttgcaacttaaagaaaggatgggcagattttgcagtgaacaataacatcaagttgcaaacagtatgcattttgcacttctacaaaacaagccatctgggagcaaccatagatatcttc

SEQ ID NO: 85487 - DNA, 1890 bp, Oryza sativa
  Clone ID: PAT_MRT4530_84620C.1
atggcaatcatccaaattgttaaaagaggtggcatgcaacaaatactgccaagccaacatcatgctgctgatgctcatgccgaaggaggtggcgccaagaatggcatcggcacggatggcatcggcggcagcgtcaccttgggcacggccggcatcgacggcatcggcggcagcgtcaccttcggcacggccggcatcggcggcaacacggcgttcggcacggcgggcacggccggcataggcggcaagctcgccgccggcacagcgggcaccgcggggactgtaggcacagccggcaccgcgggcatcggcggcagcgccaccttgggcacggccggcatgggcggcaacgcggcgttcggcacggttggcaccgccggcatcggcggcagggtcgccgccgggacggcaggaatggccggcatcggtggcaaggtgacagcgggcacggtaggcaccggcacagcagcgggaggtgttgcgtcggcgagatggcgcgccgcttggcagctgctgctgctgccggcgagcaagacggccatggcgagcaccgtggcgaggagacccgaagtggaagccatggctgagagatctcagtggctagctagcttggcaatagttagaacactgcaaaactggagctgcttggtgatgcaaagatctgaaagccattctgcaatctgcatgatgcaaaatactggacctctgtttgacaaatattataacttggttggccagcgtccttatgccgaaggaggaggtgccaagaacggcattggcacggatggcatcggcggcagcgtcaccttgggcacggccggcatcgacggcatcggcggcagcgtcaccttcggcacggccggcatgggcggcaacgcggcgttcggcacggcgggcatggctggcatcggcggcaagctcgccgccggcactgcaggcaccgcgggcatcggtggcaacgtggccgccggcacagcgggcaccgcgggcattggcggcacggtcaccgcggggacggtaggcacagccggcaccgcgggcattggcggaagtgccaccttcggcacggccggcatgggcggcaacgcggtgttcggcacgattggcaccgccggcatcggcggcagtgtcgccgccgggacggcaggaatggccggcatcggtggcaatgtgacagcgggcacggtaggcaccggcacggcggcaggaggtgttgcgtcggcgaggtggcgcgccgcttggcagctgcggctgctgccggcgagcaagacggccatggcgagcaccgtggcgaggagacccgaagctcttggcacgaacatcgtccttaattatgccgaaggaggaggtgccaagaacggcatcggcacggatggcatcggcggcagcgtcaccttgggcaccgccggaatcgacggcatcggcggcagcgtcaccttcggcacggccggaatgggcggtagcacggcgttcggcacggcgggcacggccggcatcggcggcaacgtcgccgtcggcacagcgggcaccgcgggcatcggcggcagcgccaccgcggggacggtgggcacagccggcaccgcgggcatcggcggcagtgccaccttgggcacggccggcatgggcggcaacgcggcgttcggcacggttggcaccgccggaatcggcggcagtgtcgccgccgggatggcaggaatggctggcatcggtggcaaggtgaccgccggcacggcaggcggtgttgcgtcggcgaggaggcgagccgcttggcagctgctgctgccggtgagcacgacggccatggcgagcagctggagccacatcgacgtcgtcgtcgtcgtcgtcgccgttgctgcgacggttgccgacgaggaggttgctctccagtag

SEQ ID NO: 85488 - DNA, 1119 bp, Oryza sativa
  Clone ID: PAT_MRT4530_84621C.1
cagccaacgcatcgtcttccttcttcgtcgtcgatagatcggctctcgagctcacaaccacatcgatcgtctccggcaagccgacgtacgtacgactagctagctagagaggaagcgagaaatggaagccgccgtggggtacgccgccgacagcctcatcaaggccaccgagctcaggctgggcctgcctgggacagccgacgacctgccctccacgcccaggggcaagaagcgcgccgccgcggcggaggacaacaacgccaacgccgccgccgccgacgacgacgagcacgacgccgtcgaggccgcgccgccggtagccaaggctcaagtggtcgggtggccgccggtgaggtcgtacaggaagagctgcttccagcaacagtcagcggcggcgagcaagagcaaggccgccgtgagcagctgcaacaacaaagacgagcccatcaccaagaacgcggcgccggcgccggcagcctcctcggcggcggcggccaacggcgggtcgctggtgaaggtgagcatggacggggcgccgtacctgaggaagatcgacctgaggatgtacaagggctacagggagctccgcgaggccctggaggccatgttcgtctgcttctccggcgccgccgacggtgccaacccgtcggagttcgccatcacctaccaggacaaggacggcgacctcatgctcgtcggcgacgtccctttcgacatgttcaccagcacatgcaagaagttgaggatcatgaagagatctgaagccacagggctaggatcaccaaggcaaatgaagatctaatctaagagcgacaagagatcgatcgatgcattccatcaacttttcatttctttttattttttttcctcccaagccaaaaaggagatgagcttgggggcatcaaagcaaacacatggatgtgcttctgctttgtttccatctttaaaaactagtaggttttaattttatgattttagcagcacaaaggagatgtggagatttgggttcaactctccatgtgtatgtacaaacgaaacagttattatatattgattgttggttactactaaaaaaaaaaaaaaaaaaaaaaaaaaaaaaaaggggggggagcctcgtgc

SEQ ID NO: 85489 - DNA, 228 bp, Oryza sativa
  Clone ID: PAT_MRT4530_84622C.1
attaaaaaaggaaagaaaattttttttttttttttttcccccaaggtttcacatggcacatttgggggttttggggcttttttttaacttccgacccctttttttggtaaaactttttacaagacccccccagggggggtaatggtcctgggggccccataatccctgggggggaaccccatttttagaggggccgttaaaagccaacaaagtttgggcttgggccaa

SEQ ID NO: 85490 - DNA, 1796 bp, Oryza sativa
  Clone ID: PAT_MRT4530_84623C.1
atgaccgtgagcacggctgttcgaacacccgtggggatcagccacgtcgggagacctccaagctttcatgacaaggcatttcgaaagccgatacaggaatcggtccttaagtgcgagagcgggaaaccgtacacccggtacgttccccggtccgcgattttaagtttgaaggcgaccgtcgatactcgcacagagtgcacgaatatcgaggtgcaactgggtggttacaaggggacatgggcgcggtccaaggtaaatggagcggctcggccgagcttaacgggccggccggcccaagacggcccaagcacgcgcgcgcgcgggagggaggagagagagtccggtggaccgggctcaccacgcgcggtcccgggtgggacccgcttgtcagcggctcggctcaccatgcggagggagtacgtggctcatgcgcgcgggcggggaaaggacgcggtgcacgcgcgcggtccgtggtggacgcaggtgcggcgggcccacgcgcagcctcacggctcgcggtggaacgcgcgcacggggagggactgaccggggtcggctcgatccggtctaggctgagctggcgccgacgtggcacctacgtggcggccacgtgggctggcgggaggtagacgacgacccggccgcgaatggacggcgggcggcggcggcgagcggcggagcgaaccacggcgatacgggcaaaagcgtgcacaccgggcggttgcacgtgacaaggggagacgagccaacggctcggattcgtcggaggttgctcgacggcggcggattgcggcggtggcaaccggcggcgggagaagagggaaacggcgacgaggtcacgagaggtcgattcccggcggtgagagcatctatgcggcttcaggagctcgacgctagcgtcggattgggcggaactacgccgagcgaggccggcgacgagcgggtgctacggagctcgagcggcgacggcggcgaacacacggcgagcgacggcaacgagaaaggagagggcgcggccgaagtccccttccgcgtcctcgaacgcaccggctctcccggcgcttggcgaaggacggcggaggcgagacagaacacgggggcgggcgccttgcgcggtcaagggcgagctggcgctcggcgcttgcagccaaagcggcgacaggaggatgacgccggcggagaggggaaaagaaaaaaagagagaaaggggagctcgcccctttctcctttgggaaaaaggaggaggagagcgaggcgactcggcagagggagaggggacgctgcctccgtcccttggcggcttgcgcgccgagtggcgggggccgggcggtgacgacggcgatgacggcgggcggtttggagcggagcggcgacactggcgacaggcgcggcaggcgctgacgacggcggcgaccgggcggtcggccactcggcgcgcacgcgcgggaaacaacgggcggcgtccgcgcgggcgcgcgcacgcgaacacggcgcgcgggaagcggctttgcgagcggggagctcgcgcgaggggaggggcgctcggcgcgggcgactcccgcgcacgcgcgcgcggcgcgcgggcggggcggaggggggagcggggagagaggcgctcggggcggctctcgcacgcgcgagcagcgtgcgggcgaggctgagcggggggggaaggagcgcgccggggggagagagagagagagagagagagcgcccgggagagagggagagatgggccggggaagagagagatgggccgagcgagattcggcccatcgacctcgggggaggcaaaa

SEQ ID NO: 85491 - DNA, 497 bp, Oryza sativa
  Clone ID: PAT_MRT4530_84624C.1
gaccaaaagaaacttataataaaaatgccatatatataattttacatgtgcttataaccgagccctccatatacaaaatgcccaataactagaacaaatcacaaataactcgcataaatgtacaagcatttacacacatatatagaaaacaaatcaaacatggagaaatatataaccaaaagtcccaatcaaatgacacaatttatgtagaccactgcaggtagcatgctgctgatgctcatgccgaaggaggtggcgccaagaatggcatcggcacggatggcatcggcggcagcgtcaccttgggcacggccggcatcgacggcatcggcggcagcgtcaccttcggcacggccggcatcggcggcaacacggcgttcggcacggcgggcacggccggcataggcggcaagctcgccgccggcacagcgggcaccgcggggactgtaggcacagccggcaccgcgggcatcggcggcagcgccaccttgggcacg

SEQ ID NO: 85492 - DNA, 1814 bp, Oryza sativa
  Clone ID: PAT_MRT4530_84625C.1
atgtcccattccacccatgtggtcgtacttatcttatgtttggatgaaattccaaggaaacggttcttaagtgcaagagcggaaaaccgtacacccgattttaagtttgaaggcgtccgtcgatactcgcgcagggtgcacgaatatcgagacgcaactagatggttacaaggggacatggttcaagatgttcaaaggtggcttgccttgctcgacttctggagcttgatcctcgaaatcctcgcgctgcggggcgcggcccgagagagatggggcggtccggccgagctaaatgggccggccggcccaagacggcccaagcgcgcgcgcgggggaggggaggagagagagggccggtggaccgggctcaccacgcgcggtcccgggtgggacccgcttgtcagcggctcggctcaccgtgcggagggagcacgcggcgcggcgctagggtgggggaaggacgcggtgcacgcgcgcggttcgcggtggacgcgggtgcggcaggcccacgcgcagcctcacggctcgcggtggaacgcgcacacggggagggactgaccggggtcggctcgacccggtctaggctgagctagcgccgacgtggcgcctacgtggctgccacgcgggccggcgggaggtagacgacgacgccggccggaacggacggcggtcgacagcggcgagcggcggagcgaaccacggcgatacgggcaaaagcgagcacaccgggtggttgcacgtgacgaggggagacgagccaacggctcggattcgccggagggagcttgacggcggcgaatcgcggcgacggcaaccggcggcgggagaagaggaaaacggcgacgaggtcgcgaggggccaattcccagcggcgagagcatctacgcggctacgggaatccgatgctagcgtcggattgggcggaactacgccgagcgaggccggtgacgagcggcgcttccgagctcgggcggcgacggcggcgagcacacggcgagcgacggcaacggtcggggcggcggagcgcccggagtccccttccgcgtcctcgaacgcaccggctctcccggcgcttggcgatgaacggcggaggcgagacagagctcggaaggcggcggcaatggcgcggacgggaaacggggaggaatagggggaaaggggaagggagggcggagggaggatgacgccggcgggaggaaaaggggaaaaggagggagagaaaggggagcttgccctttgcttctttgggaaaaggaggagggagcggaggcgtcgcggcagagggaggaggggggctctgcctccgtcccttggcggcttgcgcgcggagtggcggggccgaggcgatgacgacggcgatgacggcgggacggtttggagtggcgcgacgacacgggcgacaggcgcgggctggcgcggcagagagtgacggcggcggcgaccaggcggtcggccactcggcacgcgcgcgcgggaaacaacgggcggcgcggctgggcacgcgcgctggctcgcggggccgagcggctgcgtggctgcaggcgcggcagggcagcggggccgggcggcacagacgcgacgcgggcgaggaccacgcgggcgcgcgcgcgaacgacgcgcggggagcggcagcgagggagcggaaaggagggctcggctcggcgcgggcggctctcgcgctcgcgcgcggggcgtgcgggcggagcggaggggggaagcgggggagagagcgagaaagagagggagagatagcgggagcgcgccgggggagagagctagagagggagagagggcgccgtggagggacggggaga

SEQ ID NO: 85493 - DNA, 890 bp, Oryza sativa
  Clone ID: PAT_MRT4530_84626C.1
aaaccaaccaaaatgaacttatataaacaaatgccatatacaaatacttatagccgcgcactccatgtacagcttgaacaaattacaaaaaaaattaactcgcatacaagtatacaacatgcatttacacacagaaaacaaatcaagcaggggaaattaatacataaccaaaagattaatcaaatcaaatgacccactaaatatacaagcactggcagcgtccttaattatgccgaaggaggaggtgccaagaacggcatcggcacggatggcatcggcggcagcgtcaccttgggcaccgccggaatcgacggcatcggcggcagcgtcaccttcggcacggccggaatgggcggtagcacggcgttcggcacggcgggcacggccggcatcggcggcaacgtcgccgtcggcacagcgggcaccgcgggcatcggcggcagcgccaccgcggggacggtgggcacagccggcaccgcgggcatcggcggcagtgccaccttgggcacggccggcatgggcggcaacgcggcgttcggcacggttggcaccgccggaatcggcggcagtgtcgccgccgggatggcaggaatggctggcatcggtggcaaggtgaccgccggcacggcaggcggtgttgcgtcggcgaggaggcgagccgcttggcagctgctgctgccggtgagcacgacggccatggcgagtaccgtggcgaagagaaccgaattggaagccatggcaagattagcagtggctagtagcttgctaggcaatagatcgacgtcgtcgtcgtcgtcgtcgccgttgctgcgacggttgccgacgaggaggttgctctccagtagcaatgcccatgcaaggcgctcacactcgctcttcgctatcgccat

SEQ ID NO: 85494 - DNA, 1677 bp, Oryza sativa
  Clone ID: PAT_MRT4530_84627C.1
atggtgcgctgtggtggattgtgttgtgcgaggggtactgtcacagctcctttccgagctcctggtttggaatggtatattcctggtttggagatagatctgtacagccggctatggttgttcagaaaggttgggcctatacaacagggagccaacactgacgtgggaacaggaagtatccgtttccatatcaacgggaaggaggaaaagtttgagttccagccaaagactgaacaatgctccatggtcagaataaagtatgggccaaacctgcaaaacattcaaatggtcgaagtggagccacccaaaaaggacagcctggtaaagttcatgcagaatttcctggaaaaggaaacaacgatgcctaggaaccgttattggaaaacgccggtgaaatcaagcacaccggccaagaagctagaggagccggctcaaaggaagccttctcccgccccatcacctccagagacggtggaaaatccgtgcactaaacggaagggaggtacggtcttgcacgtcggacccaaaatgacgcgaccttcgccaacaggaaacccttcaaatgaattttttagagcaaccaaaataaaattttcaacgaaaattcactgtgccatgaccacactgatcattggaacccaacggccgaaagtggggccagttgggttcaccaggggttcggccgaaccccctggtttggccgaaccggccaggcaacggtcagctgcgtcccttttcgaggcaacggctagtgggccccacagaatgaggaggcgattgtctcgtctgttcaaggggtccggctcttcgtcaagttgtcatgatgagtctagtactcattcatcagctgacctcgaccatgttcaagaggatgccgaagctccacgacgtttcctgaacgacaccgacctcgaccttatcgatgatcgggaaagacaagcctactacatgctgagtgaccgggagtatgctcacatgcgagaatactctccggagctgctgaaaaagataggtatggatgttgattttcgtgctatttggaaagctgttggttggcagagatttgctgtggtagataagcctagttctcgtttgcttactttgcaatttctgtgcactttgaaagaaatagaagatggaatttcctttcactttttccataaggaatacacatttacatggaaaggattaagtaaacttcttggttttcacgattcttgtaaaatcgatctccagaaaggaatttctgggttcgagaaaaataggttttgggaagatatttctggtgctccaatttgcaagaaacctaggacgaatgatatccataatcctgatcttaggctcatgcacaaatggattgctatgactttgtttcctagaggtgatctgagacccattaggggagatgaattaattatcatgtttgccatggttagaaagatcaaaattgctcctgtgaaatgtatgataaggcaatggttagaaagtataaagttctctgctcctgttgagtgcacttctctgattactcggatagcaaaagggctaggggtcgttagcaaccaaattgcttttatctcagccgctcgtccacgtattgatgaggcttatctagtgcaagggcatattctgaaacatggagtagatggatctttgatatacttttttcccggttgt

SEQ ID NO: 85495 - DNA, 1852 bp, Oryza sativa
  Clone ID: PAT_MRT4530_84628C.1
gttatgcagttctagctagctagccactgatctctcagccatggcttccacttcgggtctcctcgccacggtgctcgccatggccgtcttgctcgccggcagcagccgcagctgccaagcggcgcgccacctcgccgacgcaacacctcctgccgccgtgccggtgcctaccgtgcccgctgtcacattgccaccgatgccagccattcctgccgtcccggcggcgacactgccgccgatgccggcggtgccaaccgtgccgaacaccgcgttgccgcccatgccggccgtgccgaaggtggcacttccgccaatgcccgcggtgccggctgtgcctaccgtccccgcggtgaccgtgccgccaatgcccgcggtgcccgctgtgccggcggccacgttgccaccgatgcccgcggtgcctgcagtgccggcggcgagcttgccgccgatgccagccatgcccgccgtgccgaacgccgcgttgccgcccatgccggccgtgccgaaggtgacgctgccgccgatgccgtcgatgccggccgtgcccaaggtgacgctgccgccgatgccatccgtgccaatgccgttcttggcacctcctccttcggcataaggacgctggccaaccaagttataatatttgtcaaacagaggtccagtattttgcatcatgcagattgcagaatggctttcagatctttgcatcaccaagcagctccagttttgcagtgttctaactattgccaagctagctagccactgagatctctcagccatggcttccacttcgggtctcctcgccacggtgctcgccatggccgtcttgctcgccggcagcagcagcagctgccaagcggcgcgccatctcgccgacgcaacacctcccgctgctgtgccggtgcctaccgtgcccgctgtcaccttgccaccgatgccggccattcctgccgtcccggcggcgaccctgccgccgatgccggcggtgccaaccgtgccgaacgccgcgttgccgcccatgccggccgtgcccaaggtggcgctgccgccgatgcccgcggtgccggctgtgcctacagtccccgcggtgcccgctgtgccggcggcgagcttgccgcctatgccggccgtgcccgccgtgccgaacgccgtgttgccgccgatgccggccgtgccgaaggtgacgctgccgccgatgccgtcgatgccggccgtgcccacgatggaaacactttcttcttcgtcttcctcgatagccaaaatacactgtgcttggagatcatcaatggcgatagcgaagagcgagtgtgagcgccttgcatgggcattgctactggagagcaacctcctcgtcggcaaccgtcgcagcaacggcgacgacgacgacgacgacgtcgatgtggctccagctgcctgatttaattacggatataatatgattattactactgatcatctagactatattatgatgagtataacgatctctacgttaataagttctgcatggtctaagagtactcatctacatgcaaatatgcagcactttcaattagtcctgtaataggtgatcactgtggtgagtgtgcagactgcagaggttttgctgtgtgctagctagttagctactcgtactaattattcgatgcatgcctttatctattaattactcctacttacttatgtgatatatatagttggcaataaagaggcatggtatatatgaatatatctggagtgctatatatataatgcgaaacttatgtatatatgcgcaataactctaatgtaacacgacgtgtaaacatatggtttgtcaggtatggtaactatatatatatattgagagagagag

SEQ ID NO: 85496 - DNA, 3308 bp, Oryza sativa
  Clone ID: PAT_MRT4530_84629C.1
ccgcgagtagggaagggaccgggcggcggctgcacgaggaccctgatgtatctgaactctgtgttggttttggcatatttttgatgtttggagttccatctcgccaattctactgaacatatgctcacccatgtggtcatacttgtcttatgtttggatgaaattccaaggaaacggtccttaagtgcgagagcgggaaaccgtacacccggtacgtcccccggtccgcggctttggaaattcatttagttcgcaagtaccgacccaggtgtcgggttttccaagtcttttgtaaaacccgagttttacccaagaagtttttcagattttaagtttgaaggcgtccgtcgatactcgcacagggtgcacgaatatcgagacgcaaggaagggctgaccggggtcggcccgacccgatcttggccgagctggcgccgacgtggcgtctacgtggcgcctacgtggctgccacgcgggctggcgggaggaagacgaaggcgccgcccgtgaatggacggcgggcggcggcggtttctccggggcgccttgcgacgatgaggggcgacggggcgtacaccgggatgacgaggaagaaagagagggagcgagccaacggcttggattcgccggagggagtccgtcggcggcggatttcggcggcggcaaccggcggagagcaaaagggggaaacggcgatgaggtcacgaggggccaattcccggcggtgagagcatctacgcggctacgggaatccgttgctagcgtcggattgggcggagctacgccgagcgaggccggcaacaaccgggtgctacggagcacggccggcgacggcggcgagcacactgcaaccggcggtaacggtcggggcggccccggctagctacggggaggctactcgagctacggctttcccggcgcttggcgatgaacggcggaggcgaaacaaaacttcgaaaggcggcaacaatggcaatggaaggaaaaaaaaaggaaggccccccgggccttttaagggcacaatgtcggtttggaaccacttgggcggtcaagcgcgagctggcgctcggcgctcgcgtccaatcggcgacagggtggagggaggataacgcccggcgggaggaaaaaggggaaaaggagggagagaaagggggctcgccccttgcctctttgggaaaaggaggaggggagcgggggcgacgagccagagggaggaggggctctgcctccgtcccttggaggctagcgcgtggagtggcggggccgaggcgatgacgacggcgatgacggcggggcggtttggagcggagcggcgacacgggcgacaggcgcgtgcagaggctgacggcggcggcgaccgggcggtcggccaccacggcacgcgcacacgggcgcggcagggcagcggggccgggcggcgcagacggcgcgaccttcgtgaagaccctgagcaaggcaagccacctttgaaaatattgagcctatatttgaacttctattccgcgcagccgctcggccccgcgagccagcgcgcgtgcccgagccgcgccactcgaaccaccgcgtcgcccgttgcttcccgcgcgcgcgtgccgtggtggccgaccgcctggtcgccgccgccgtcagcctctgccgcgcctgcccgcgcctgccgcccgtgtcgtcgcgccgctccaaaccgccccgccgtcatcgccgtcgtcatagcccggcccccgccactccgcgcgcaagccgccaagggacggaggcagagccctcctccctctgccgcgacgcccccgctcccctcctccttttcccaaagaagaaaggggcgagccccctttctctccctcctttttccctttttttttctcccaccggcgtcatcctccctccgccttgtcgccgtttggacgcgagcgccgagcaccagctcacgccttgaccgcccaagtcggttccaaaccgacattgccgcccttaaagccccgggcgccctccccctcttcgcctccacgccattgccgccgcctcccgtgctctgttcgccgtcgccgttcgtcgttgcgcgtgtcggaggagccggtgcgttcgtggacgcggaaggggactccgggcgctcgtcttcctcctcttccccggcccgaggccggagagattactcccgcgccgtcagcctctcgtcactgcgcctgcccgcacgcacccactcgtcgccggcctcgctcggcgtagctccgcccaatccgacgctagcaacggattcccgtagccacgtagatgctctcaccaccgggaattggcccctcgtgacctcgtcgccgtttcccccttctcccgccgccggttgccgccgccgcgattcgccgccgtcaagctccctccggcgaatccgagccgttggctcgtctcccctcgtctcgtgcaaccacccggtgtgctcgctttcgcctgtatcgccgtggttcgctccaccgctcgccgctgtcgtccgccgtccgttccggccggtgtcgtcgtctacctcctgccggcccgcgtggcagccacgtaggcgccacgtcggcgccagctcggccaagaccgggtcgagccgaccccgttccctgccgttgcctgtggcgtttggtgttagtccgttggttggttctgctgctgctgctgttgttggtgtttgccttgtccgtgtcgccggttgcattctcaggctgtctgagctgcaacctaagttaaggacgcggttcacgccgttttccctacgacacgctcctgtcaggtgccgttgtacggcgtgttttttacatggacttctacgacgacgacgacgacgacaatctcattaccgaatggtgggatcaagaggagttatctgacgatgatgactactacattgtagctgctcttcttacggacatagagcataagaggaccaaaagaaagcgtcgtggttcagtcccagctcgtgagataattcatagggacaggtttgctggcaatttgcgcatagtggctgattattttgcagatcctcctgtatataatgcaaaattatttaggaggaggttcagaatgtcaagggagctcttcttgcgcatcgtggctagtgtggaggctcacgatgactacttcaggcagagaccgaatgcaatgggtcttctcggtgctactgcactacagaaggtgtatggtgcaattcgcatgcttgcatatgatattccagccgatagtcttgatgaagtcgtgaggatttcagagagcaccatgatagaagcttttaagcactttgtcaaggctgtggtagatgtgttttctgatcagtaa

SEQ ID NO: 85497 - DNA, 2997 bp, Oryza sativa
  Clone ID: PAT_MRT4530_8462C.1
atgagaggacgacgacaaagaccggcggggttcggatggaggggaggtgaggccgaggacgaccttgccgctgtgatgccaaaggtggtggaggtgcggccgaccgttgcaagggcgaggaggaaggggcggccgaccgttgcaagggcgaggaggaaggggcggccgaagggactggcgagagggcggatgggttggcggcggcttgcagcggttttccgggcgaaacagaggagcagccagaggaaaggacgacgctgcgacgtcgacggaggagacggcgacgtcggtcggtgctcgggcacggcggaaggggctgctggaggtgatgcagtggcggcaacgccactgtttaccggaggtgcggctggaggtcggccggcgccggagagagagaaggagaaggcggggagaggcggggcggccacgggagagcgcgggatggggctaaaactggagaacgggccgagggggttccattttttagatgaggggagggagccggccacgggggaggtcggaaggaaggcgggaatggcggccggcggccatggaaagcggctgggccttcgccacgggtttcggcagatgtggttgaagggcctcatgccatccgccaacaagcctctcacgggcaagggtgagattggagcttcggccgagaccgtgcaaaccatgtggtatggtatgcggcgccccctttcgaccgatgctcctgccgaaacctacattattcctgcgaatgaagcgaacggtcgcccgggtgagctatatattcccaccgatctttccttttcaccgccacacttgccattttaccgcacgtgctctcttcctccgtttctttcttcctttttgggggtctctcttgtggacgacgtcgagctggcgaagctggtcagctctggggcgttggtcgaggggcaggctttcgccccagggaaagccgtggtgccgaagcctatcgacaatcggatggtggtgttcgccgtctttttggaggcagggctacggtttccctgcaacgtgctattgccggagatccttcgcctcttccaggtggagcttccacagctgagcccgttggcgcttgttcggatcgctatcttcgattgggcgtgccggacttctgggtttgagcctaacgccgagctcttcggcgccatattcttcgccaccgtgaactcaaagacagcgattaccccggctgggacgaagaaaacagtgttcgggagcgtgaactttaacgttcgtcccgagcggtccgatctctcaccggtgaacgctgccatgtcgaagtcggaccgccattggatagctcggtggttctatcacaccatccccttcgaggctggctctgacttggcgaaagcccttcagtgccggcgcaaggtgatcgcgccgaaccggaaacccaagatcgccgtggatggtgctatggagacgcggttcgtcctgctgcgcagggtctgctcccgccttagctgccgtgacttggtagaggaattctgcatacttcgtatctttcccctttcccaggcatggcaagtcacggttgatcaaggcgaagaggttgacggtttgccgaacctgatccttcctgaggggacgaacatgttgaccctcgaccaggctgaaaacgaggcccgcaggatgatcggcgacgtgtcggtcgtcgaggtccctgcttcgtcggactccgacgccgacgacgaggacgataccgaagaacgcgacggcgaggagaaaggagaggaggaagaggaggaggccgtggctgataaggccgcgaaagagacggttgaagaccgcgtcgatacccccggctacactcctaccccaagtccaggtcacaacgagaccggggtggagtcgaacagctccccccttcgtcggaaggatttggaaggggcgaaggctctagttgcgttctcctcgggcaaggtggcgaagggaggtccggtgaagaagatctctgaaaagaaaggactcgtcgacatcgcccgcgttttcagcgacgacgagtcttctgacgggactccaacttcgcccgctggccgcagcttggacctttcgactgctcccctcgctccgctaggcgctgctggggcaggcagtaacgccgccgccggggcttcagcctccgccgaacggatcgcgtcgactgcggcgagggttttcgggagccctctgcgtgagccagctatttcgccgctagtcaaggcgaagtgtgcggccgccaaaacatctgcctcggagtattcccttgcagcgccccacttcgcccctggtgatttcgagactcgagcggacctttttccctttgtggagggggccaaggacgatgaaataagccgcaagaatttggaggtggaggccctggccaacactcttaaggaggcgaaaactgaagtcaaacgccttcagtccgagctagataaggggaaagaggccagggccgaggttgatcgactcaaggccgaactggagaaggagaaggcccattcggcgcggttttcgtgggagatggcaaagaccgccgaatccgcgagaacggcttgccaaacgctccgcctcgcccttaccgacatgggcgcgaaggtgcggggggtccctgccgaggatgcctcagccttcgacttctccgagtggacccagcaggctggcggatcggtttcggactgcgccaccgcgtacggcgattgctgtgcgcgtgtatcggcggccttcaccttaggccttttgcagcagttcggctgcgagcacgtcgccgagttccctacctatgcgaagggggactgggagattagtgcgcagaacatttcgcccgctcttcgtgcgtggcgaaaacagttctggcagaaagacggccggtccgctgccaaggcgcgccttctggagcaactggcgaaggcgaaggcggcaggtcggggcgaagaagagggcgcggcgggcgaagaggttggaggcgatgcccaggatcacccagaggtgtga

SEQ ID NO: 85498 - DNA, 756 bp, Oryza sativa
  Clone ID: PAT_MRT4530_84630C.1
atgttaacgatcaaatttggtaaggccgtgggccggattcaaagccagagtcaaagccgatttgaaggaattccgtttatggaaatcaaagttcgtatcggctacgagcggcatcggctgccgtatgtatcgattgacaccaaatccaatgaagacaagccgatgcaaccagtcccgaaaagacgaccccgatcaaaccaactggcacgctcagaacccgaagacacttttggacctgcactagatataagcagacctctcaggccagtgcatgattttccacgtcaacactcaaataaagagttggaccataaatattttttaaaaaaggcttccccgtttctcaccacctccccctccccacccgaggccaaagggagcagtggtgacttgggcaatgacggcgggcggatccggcgccagcggacggggcgacgacgacgatggctcctccgtcgttcttctctctctctctctctctctccgctcctcatcctctttctctctctcactctgcaggttgacgaaggcacacgaggaggccggtggattgcagatccaatgtcggcgggtctagtgacatgcgaggaggctgccctcctcacggatcccgcaccgccgaccatctccctcatggatctggctgcagtggccctctccctcgagaggagcgaatccgctgccgccggcctcgggtgcaacggggtctcgacgacaacgatggtggtggcagactgcatcgcctatgatggtggc

SEQ ID NO: 85499 - DNA, 1019 bp, Oryza sativa
  Clone ID: PAT_MRT4530_84631C.1
atgggccggccggcccaaggcggcccaagcgcgcgcgcgggaggggaggagagagagggccgatggaccgggctcaccacgcgtggtcccgggtgggacccgcttgtcagcggctcggcgcaccgtgcggagggagcacgcggtgcggcgctagggtctgggagggacgcggtgcatgcgcgcggttcgcggtggacgcggatgcggcgggcccacgcgcagcctctcggctcgctgtggaccgcgcgcacggggaggggctgactggggtcggctcgacccggtcttggccgagctggcgccgacgtggcgcctacgtggctgccacgcgggtcggcgggaggacgaggggagacgagccaacggctcggattcgccggagggagcttgacggcggcgaattgtggcggcggcaaccggcggcgggagaagggggaaacggcgacgaggtcacgaggggccgattcccggcggcgagagcatctacgcggctatgggaatccgatgctagcgttggattgtgcggagctgcgccgagcgaggccggcgacgagcggcgcttccgagctcgggcggcgacggcggcgagcacacggcgagcggcggcaacggggcggcaatgtcggtttgggagaggggaaccgacattggacggtcaagccgacgagctggcgctccggctagcggccaaaacggcgacaggaggtgacgccggcgagagggtaaaagggagaaaagggggaagagaaagggggcttgtcccttgcctctttgggaaaaggaggaggggagcgggggcgacgcggcagagggaggaggagctctgcctccgtcccttggaggctagcgcgtggagtggcgggggccgggtgatgacgacggcgatgacggcgggggcgatgtggagcggagcggcgacacgggcgacaggcgcggcagaggctaacggcggcagcgaccaagcggtcggccaccacggcacgcgcgcgcgggaagcaacgggcggcgcggcgatttga

SEQ ID NO: 85500 - DNA, 721 bp, Oryza sativa
  Clone ID: PAT_MRT4530_84632C.1
ttaaaaaaatcttcttgtgctccatcctcccctctcctcccttatcctgtcctctcccccttctccagcttccccgtttctcaccacctccccctccccacccgaggccaaagggagcagtggtgacttgggcaatgacggcgggcggatccggcgccagcggacggggcgacgacgacgatggctcctccgtcgttcttctctctctctctctctctctccgctcctcatcctctttctctctctcactctgcaggttgacgaaggcacacgaggaggccggtggattgcagatccaatgtcggcgggtctagtgacatgcgaggaggctggtagagaaggcccacgaagacagcggcagcggcatcgcgtccttggggcgtctctactgcgtcggtaacggctagccctcctcacggatcccgcaccgccgaccatctccctcatggatctggctgcagtggccctctccctcgagaggagcgaatccgctgccgccggcctcgggtgcaacggggtctcgacgacaacgatggtggtggcagactgcatcgcctatgatggtggctaggatggatttgagttagcgtttcgacttttttgaacttatttttgttatttttatttttgcaagcggacggcttaactgactatgtgcggaaatcactttttacatgcggttgtgcatccataccaaaaaatattgatttttatagacttc

SEQ ID NO: 85501 - DNA, 2236 bp, Oryza sativa
  unsure (1)..(2236): unsure at all n locations
  Clone ID: PAT_MRT4530_84633C.1
atggccgtgtgggacggggagctcaacggaaggccgttggcatcgaagaggtcgggatggggctcctctaactttaagttagaggagctccttcccgacctcttcgatgccaacggccttccgttgagcaccccgtcccacacggccatcaccgacaccgtcatcgtcaccatcctgttccactgctcctacgtcaccggtgccaaccggctagagagccagcccttacacatcattcaaccaaatgacaacatgacttctatcaccgtgcagtttgataacttggtgacctaccaggagatcgccgccgtgagcaacatctccaaccctgacctcgtgaaaatcgggcaggagctatggatcccgttgtgccgagggggtacactttaccctcacgacattactaacccggatcaccagcccgtggggatcagccacgtcgggagacctccaagctttcatgacaaggcatttcgaaagccgacacaggtttaccatatgccgacgagaggggtcccagaccaacaacaggaaacggtccttaagtgcaagagcgggaaactgtacacccggtacattccccggtccgcggttttggaaattcatttagttcgcaagcaccgacccaggtgtcgggttttccaagtcttttgtaaaacccaagttttacccaagatgtttatcatattttaagtttgaaggcgaccgtcgatactcgcacagagtgcacgaataccgaggcgcaactgggtggttacaagggaacatgggcgcggcccgagagaaacggagcggtccggctgagctaaatgggccggccggcctaaggcggcccaagcgcgcgcgcgggaggggaggagagagagggccggtggaccgggctcaccacgcgtggtcccgggtgggacccgcttgtcagcggctcggctcaccgtgcggagggagcacgcggcgcggcgctagggtgggggagggacgcggtgcacgcgcgcggttcgcggtggatgcggatgcggcgggcccacgcgcagcctcacggctcgcggtggaacgcgcgcacggggaggggctgaccgggggtcggctcgacccggccttggccgagctggcgctgacgtggtgcctacgtggcgcctacgtggctgccacgcgggccggcgggaggtagacgacgacgccggccggaacggacggcggacgacagcggcgagcgacggagcaaaccacggcgatacaggcgagagcgagcacaccaggtggttgcacaggacaaggggagacgagccaacggctcggattcgccggagggagtgcgtcggcggcggattgcggcggtggcaaccggcggcgagggaagggggaaacggcgacgaggtcacgaggggccaattcccggcggcgagagcatctacgtggctataggaatccattgctagcgtcggattgggcggagctatgccgagcaaggccggcgacgagcggtgcttccgagctcgggcggcgacggcggcgagcacacggcgagcgacggcaacggccagggcggcgccggctagctacggggaggctactcgtgctactacccgagcgggcgcagtgacgagaggccgacggcgcgggagtaatctctccggcctcgggctggggaagaggaaggagagggcgcgcccggagtccccttctgcgtctttgctcgtgccggctcctctgacacgcgcaacgacgaacggtgacgacgaacagggaaaaggaggaggggagcgggggcgtcgcggcagagggaggagggctctgcactccgtcccttggcaggcttgcgcgcggagtggcggggccgaggcgatgacgacggcgggacagggcgcggcggtttgagcggcgcggctcgggcacgcagcgctggctgcggggccgnncggcgtcggggtgggcgagcatggcggcgcgcacggcggggatcttggcccagtaggcgagcatcctgggctggagcagcgcgttgttgtagaggagctcgacgccgtggaggcggcagtagtcgaccttcctcgagtcgtcgtagaacgtcctccccgccgcgcccggcccgccgcgtacgccgacatcggcgtcgatcgccgcggaggcggcggacgtggaggccaccgacaccgggaggggagcggaacgcgacgaggttcgtgacgggcatgggcgacaggaacgacgccgtggccagcaagcacgagcaccgccg

SEQ ID NO: 85502 - DNA, 4112 bp, Oryza sativa
  Clone ID: PAT_MRT4530_84634C.1
atgactggtttcaacctgccggaaaacttcaaagaaaatccagaagctttcttccgaagggtcaggccgcgagtcgttgctccgcagaaaactctaccaacagagaaaccagtcgtactagcgccaccgaccttcaagataatggctagcaggactcttcgtgagttcgctgctccctctactgacaatgtggccgtcgggccgcaagtcaacataggagaggtggatttcgactttaagtctagcctcatcacgatggcgcaggctagcccgttctgtggcaagcctaatgaggatgccaatgctcatctgcagcaattcctggagacatgcagcatgtacaccatcaagggtgtcagtcccgacgccgtcaggctgcggctatttctgttctctcttctcgggagagcgaaacagtggttctatgccaaccgtgctgctatcaacacctgggataaatgctctatggcattcctctcgaagttcttcccaatgggcaaaaccaacgcccttcgtggacgaattttcagtttccagcagacaagggacgagtccattcctgaagcatgggaacgactgcaggagtacgtggccgcctgtcctcatcatgggatggacgactggctgatcctgcagaacttttacaatgggctcaccccaatgtcccgcgatcacctggacgcggcagctggaggagcgttcttctctaaaatggttcaaggagccgttgatctcatagagaagatggacacggaactacttgctgccaagctggacctcctcatgaaacgcttggacgaccacgagaaaaggccacaaggcaccgtcaaggccttggacacacacgtcacgtgtgaggtctgcggcagcacgggtcattctgggaatgattgcccagagacccatgaggaggcgatgtacattggcaacaaaaacaacgggtatagtccacaaggaggtcaggggtggaaccaaccacgcccacattatcaaggagaaacccagttagctcagttggcatccctagtccctgcaaatgaaattgggaggattccggggcaactcgactcctccattgagaatgttaaggcgatcacaacgaggggaggaactagtgggatgtcaaaagaaacgccatctaataactcagctgacaaggagattcagccagagaagaacgtgccgcaggagtacggagacacgcggtggctgccattccctcaacggagtaggaaaccgtcagtggacgagcagttcgctcgttttgttgaagtgatccaaaagatctacatcaatgtgccattgttggacgctatgcaagtgccaacatacgcccgttatctcaaggacatactcaacaacaagagaccgctcccaacaacggaggccttgtgcgaccttggagccagcatcagcgtcatgcccaaagacgtctttgacaagctcaacttcacggtgttggcaccaacaccgatgcgcctccaactggctgactcatcagtccgttacccgacagggatagcgggaggacgtgccagtcaagaatcaagtacgggccaaacccgcagaatattcaagaggttgaagtggagccacccaagacggatagcctgtatgaggaggcgactgtctcgtccgttcaagggattgggctcttcattaagtcatcatgatgaggctagtactcatttagctgatgtttcgatggaagacgccaacactccacgacaactcttgaacaacgctgacctcgaccttgtcagtgatcgggagagacaagcctactacatgctgagcgaccagaagtatgctcacatgcgagaatactcaccggagttgctgaaaaaaataggtatggatgttgaatttcgttctatttggaaagctattggttggcagagatttgctgtggtagatgagcctggttctcgtttgcttactttgcaatttctatgcactttgaaagaaatagaagatggtatttcttttcactttttccgtaaggagttcacgctcacatggaaaggtttgagtacacttcttggttttcacgattcctgtaaaaccgatctccaaaaaggaatttctgggttcgagaaaaataggttttgggaagatatttctggtgctccaatttgcaagaaaactagaacaaatgatattcataatcctacacttaggctcatgcacaaatggattgctatgactttgtttcctagaagtgatctgagatccattaggggagatgaattaattatcatgtttgccatgaccatagaagaatctcttgcaggtggaacatacagggagacgcgcaacatgacaaggaacgaacaaggaagttcatcatcctcgacacctgtgcagatgtatgaggcaggttgggcaccaactggggatgcacctggatggacccaagctgcacgccatagcatcagagtctcaacctgggcaagcgctagtgaggaccggtggcatgcgcctcatgacatccactggggggacaaccaaccctccaaatcaagtggtgtgcctccatccccaagtgaatggcgctcaagttcctctcgttgggacttgggtgaaatcactaggagaatggacacccttgatgtgcagatgggggagattcagtacaacctcacggaacacatagctcagacgcaagaatggcaacaatctgctgatgctcagttcgccaacatcaacaacatgatgcagcaacagcacgatgaccttcaagcgtactttcgctttcagggattaaatcctatcaaggaccctgtgcaaaagccaagcttggggggagacttggcccccccccctgagttgctctgttttatatctctgatatatgggttcttggcaaggagaagcagtgtctcgtgggaatcaggggtaaggagtagtatctggttctgcaccgcactccccgatcaccttcgtctccggctccacaccggcccacctgagcggtccgcgggctggcaggcgatcgcggagctaggggagaagtatgatgcggttttggaccacctcaggggcctgcggagcagaggccagacggcagtgatggtgtttgctgactacttccgccgccgcatcgcgccccttcaagagcggtccgcgctgcgtgggcatacaccgggtacaatgacccgatgcgcacccacgtgggccagcgttgggattagggcgattaggacatcagggcggtgcgaccacgaccgggatagcatcctggctgttatgatggcggtcggcgcggctagaggtcgaggccgcagggctgccaccgggggagaccatggcgacggcgctggaagcagcagcgcgggcgcgggcggcggtcaggccgccggttctggcaatagcgacggcagctccagggtgcccggtcctagccacggggccggcaggggtccggtcaccgactttttatcgcgtggcgtggttcgaagtgtaggtcaaactcggtgaggtcgatggcccacttcacgatccatctggtaccctctcggttgtgtagaatctacccgaggacgttaccacggaaacccgatgcgcctgaaagtaatggcgcagcttcttgaggccgtcagtattgcataaagaattttctaggcttgagggtatcgggttttggcatccctgagcacctcactgacgaagtaaacgggccgctgcaccttcaagtggggcccgtcttcatcgcgttccaccacgagggcgatgctcacagcctggggggtcgcggccaagtagagcaacaggggttcctcgggccctagggctactaggactggggggaggtgaggtaatccttcaactgattgagggcttgctcggcctcctctgtccatacaaatggcccggagcgcttgaggagttataataggggtagcgccctctctcccagcctcgatatgaatcgactgagggcggccatgcatccagtgacgcattgcacatccctaagcttgtagggggcacatcctctctatcgcgtgtatcttctcgggattagcttctatgcctcgtgatgatgctagaaaactgagaagcttgcccgccggcacatcgaacacacacttttcggggttcagtttcat

SEQ ID NO: 85503 - DNA, 516 bp, Oryza sativa
  Clone ID: PAT_MRT4530_84635C.1
atggcggtcctgtgcggcactgccgcagagaatttttttccatataaatggctgggattgggatgggttgccaggggtggagccgtggaggcctgcagggtggggtggccggggatcctaatatttcggatcggcaatgtcaccgatgagaggagcggcaccggcgaggtcgacacggatggtgatgtggttcctcctgtgcggtttgcttgtcagggcgatggcgtggagatggagatccgagtggtggcgaggaggtccgtcgccatggcgacgggtaattggcatttgcgagacgagatgccgacaatggtgccctgcatccagcggcaacctcgacgacggcgtgcacggccaagcagcagaagcagcatccacgaggaggccgattcacagcggcgcgagcaaactgtcatccatgtcgatgctgacaacgagatggtcggtgatgaggttccaccgtacaaggaggtcaggcgtgagggaggactgcatccactgggatctacactgtga

SEQ ID NO: 85504 - DNA, 510 bp, Oryza sativa
  Clone ID: PAT_MRT4530_84636C.1
aggggagggtcgaatcttagcgacaaagggctgaatctcagtggatcgtggcagcaaggccactctgccacttacaataccccgtcgcgtatttaagtcgtctgcaaaggattctacccgccgctcggtgttttttataattcaaggcggtccgaacgacgcttccgccgaacggacttagccaacgacacgtgcctttgggagcctaagctcctactgagggtcggcaatcgggcggcgggcgcatgcgtcgcttctagcccggattctgacttaaaggcgttcagtcataatccagcgcacggtagcttcgcgccactggcttttcaaccaagcgcgatgaccaattgtgcgaatcaacggttcctctcgtactaagttgaattactatcgcgacgcgggcatcagtagggtaaaactaacctgtctcacgacggtctaaacccagctcacgttccctattggtgggtgaacaatccaacacttggtgaattctgcttcacaatgata

SEQ ID NO: 85505 - DNA, 1218 bp, Oryza sativa
  Clone ID: PAT_MRT4530_84637C.1
atggcgcgggaggttttgtctgctctcttcgtgcggcggccgcgccgcctccacgcggcgccgaggcggcggcggagtgatggtggcctcggcctcgtactccgcggcctcggtcatcgtggtggtgatgggcaagggcagggggcggggcggcagagccgccccctccggcgcgaacacggtttctgagcgacggcctactaggataacttcgaatgtcaggcagagcttgaggattctaaaaaaggggaactaattcctcctcacctcagaacatttaccttggtctattctccgttaaataaaacatatattagaatatcaacaaattgaagatgacgtatacgaccaatgggtaacagcacaaatcagggtttggaaattgcttccccggttattcttgtggacggttataatgtatgtggctactggggaaagcttaagaaggacttcatgaatggaaggcaagagattgcaagacaaatgctcattgatgagctagtatctttcagtgcagtaagagagataaaggttgtagtagtatttgatgctgcagcctctgggctttctacacacaaagaaacctataaaggggttgatgtggtatattctggtgacttgtctgctgattcttggattgagaaggaggttgaagctttggtggcagatggatgcccgaaagtctgggttgtaacatctgatgcattggagcaacaattggcacatggagaaggtgctcttatttggagctctaaaagattggtcaaagagataaaagaatcagaaaaggagcttgatgaagagctgaaggaaaccagatcaacatcgttgcaagggaagctttttcagcacaagctgaaacctaaagtagtgcatgcattgaaagatctccggaataagcttgaagaagaagagcggagaaagaggtgactacagtgtgactgtatgacctagaggcatgaacaaatggcttacaaccgcacctgggcatgaacaagtttgtaaaatggctgacaacctcacttgctgccttgcattggatccgtagggcattgacatgatgtaagataggatctggttttttgtaaagaccccgtttggacttcgtagagagaggcttcaagaggttaggcatgcttttgcatcagaacaattttgcaagctgcagagaagaaaggcatgaactgtacaacaatgtaaatatcagcagattcctct

SEQ ID NO: 85506 - DNA, 880 bp, Oryza sativa
  Clone ID: PAT_MRT4530_84638C.1
cgccgcgattcggcacgaggggtcccgagcccggatgaaaaaatgtggagggaactgcaagtagcttgttaatatgacttgtgttgtaacattctggatttgagtttctgacggaaccgcagtggaatcaatgactgcaaaaccacaaactgacttttgtcatcaaagtagaagtaatcaccctttgttggtgatgggatttcgatcttgcaatggtgttgcattatcagagcatttttttgcaggttacactgttgtttccggagccaggcctaagtgttggcagcggcagtgcagagtaagacaggtatggtttatgacaagaaagccagtattttcagttaaaagtgtggcctccaatattattgccgcgggactatgtttttttttaaccctttttttgggggtaaaaaattcgctcccttcagttgttccacgattgactacatttcagggacaaagcgtcagctgacaaatctgaagacactggcaatggaaaactctcctgtctgttgagcagctagactgcactctaattttcctactcgttcagaattcagatgcagtgttggcgcggctagcaggcaacggtgatcctgtgcggcaagggacgagcaaagtttgtgggcagcaggatgaaacaatagtggccttgtgcactgatagtatttttgaagggactgcactgatatgatagtattgatattgtgatacgacgccagtacgccacgagatagattaaaatccagatatctgcatcttaaaatccagatatctgcatcgtgggtgttgccgtgcaccctctgattctttgattctgtcatctaaattgtaaaaagcggctacatatccctccatttctttcctctctgtacacttg

SEQ ID NO: 85507 - DNA, 244 bp, Oryza sativa
  Clone ID: PAT_MRT4530_84639C.1
acacaactatcacggacagtagcgcagagagcgtagctagtacatcagagtgacaaccgtaatgtgtaggaggtacagcgtattgctatttttctataggacaagttagatcaaactctggaaacatttgattgtagaaaaattaatgcgacttgaaatatgaaagggatggagtacttaccgggtgtgtgtatctctggcacgacgcggacaccgcggttcatggcgaagtccagaattgagc

SEQ ID NO: 85508 - DNA, 1933 bp, Oryza sativa
  unsure (1)..(1933): unsure at all n locations
  Clone ID: PAT_MRT4530_8463C.1
ctttcggttttttcttttcaaagttaggctttttttttttttgttaaaaaaattgcagtcgcactaataaatcaaaattagatggctgcagagaatacctctgaagtttacttacagcattggatttttctcagacttcattaaatacaatagtatctctagaactaaataacctagcagagggggaaaacatggggaaagaaaagaaatgcgaaaagcagaacaacacatactacacatttttaacactgatttgatctttttttttttttttttgcctacacaccaccatttaagtcttaaaatgtgtcctttcatctcaaaatccaaaaagtgaagactgcacaaaacaatgagcaaaattcttctacacagaatccaagtctaaacctttcctttccttttagcatctaatgccttactcaggaaagtctctggaaagttctcaagaccaatacgataagatcacgtcacctaacatcgctatcctcgttatttggttctgatattccctgtgtgttaaatggtatatttacacctccagaactaactaaaacaaattgagtagtgcgtccattcggaatttttgtctgtagatttgatgaatatttctcttcggttagaacttcatccttgaccttaatatggtacccagttcgtttaagcgtcaagatggctagttcccactcatcagaagaatatcccagcacaagaagattaaagtgagctctcccattcgatatatgcatatcaatagtgttctgcatctccggatcgcaagttatcttgctcccgttgttagcatactctgtaaccaattcaccctgacgggtattatcatccataggcgtgcagtctacagccagaagagtgtcaacatcatcagcagtaacaacgtagtcatacatcgtagcaccttcaatagactgcctggtgccattatcaagatatctaacccactggaaattacaaagggtggtaccattggtagggaaaccacatgctgttaatgtaaatcctggtctaggctccccaacaatttgaaacccctcaataccaggcaaaggatcatcatcagctgaatactcttgattatcctgcctataaaactgtgagtcgtctaatcttacttctctaggaccattattttcttcaaaataattagagggggtagcagctactatttcctgatgataattggatccatggtacatctgtccagtatttcggtcatttggatcttgagcatactgatgaaaattgttcctagttgcatcatttaaatatttgatcttccattgcatttggtggtacaaacgctttgtaccagctgtaatggctgaagcatttatttgaggtgggcgaacattgtattctgctaacatactaagcaatgaagaagtgaagaagtatagctcttcttcctcacctttcagatcatttgctagtctcatattttcctcgacatggccttttttctggcttagttgcttcaaagcaccagatatagcatcttcctgcttctcatcaacagcttttacagaagcatctgcaatttgcttgcgaagcaataagatctcttcctcttgtgaccgtgatctgaagtataaccccttagtttctggatccatcaaacgagtaatagaatcttctgcagtcaagtcattctggagggatgcaccctggagttgatgcctcactagagtgtcggtgtttacagcaaaggttgtagcgtcaccattttgcaaaccatagtccccaacagacaacggcatgttagtcctggtaagctcatttccagcacggtgattctcgttattgaaatcgactggggcactgaatggatcacgcatgttcttcctcggaggcggaagcagcagggcgacggggtagacgcgcncgggacnggantncnncgccgntncacangncc

SEQ ID NO: 85509 - DNA, 603 bp, Oryza sativa
  unsure (1)..(603): unsure at all n locations
  Clone ID: PAT_MRT4530_84640C.1
gaagtgggggagggctgggangataggggaggctctcacaggtntctcgttcaatgagattcngngttgattgtcttgnggnattgggtgtatatgantgatttcccanctcnncatgtcccacttgggtttgtgttgtgatgancccttgtctgctggatgtgaccctncctntttggtgcgtgtttggccgcgttgcgggacatctngagggcacacgacgcggtggctggttggncgtcagtcacagaacgtgggagaatgaaggacccacnaccggtggccaaggtggacacacaggcttgccaggcacaangaagataatgagcctgcggtgtgcaaaagtggggtggctttgccaataatgctggcaatttgaagataatctgagctgcttttgagtgactgccgtntgaagtgtgttggtgcgaccggtgcatgttgcagtgtggtgtgcanttgacccgttaatnatctgctgcggctgtntggtggcacctgatggtgcagtgcgtgttgaaaacctgctattttgctgtntcggtttgaaatgttgggatggttaagacttattattgcccttaaaaaaaaaaaaaaaaaaaa

SEQ ID NO: 85510 - DNA, 2049 bp, Oryza sativa
  Clone ID: PAT_MRT4530_84641C.1
aggggggaataaccgtaggatataattcagttagccaaggtatcaagtatcaacaatgcaaacctcatcagacactttctcttctgacggaaacactcttgacttaacaaaatacctctaagtgatataaacatagggtggctgcaatctgcaaacttaatcttagcaagcactaacttctccagaagaaatatatatgtacacgagactacaagagtaagataggtacagtagtaagaatattacaaggaccaacaaaagttcaaccaaatgaactaacattaccagagtcatggatggaaggaggggtcctccttgttctgatatattgaaaacaactgttttgagtaacgtgcggcgagcttgtgacagaattcaagagcataacgatcgtactgctccaaatcatggacagtcttcttaagcgggccaaaagtatcaccatcaagaagaaactccgctatggaagatccccttgcggcatcaatctggttaaatccttgcttgttatgcaaaatggtggcctttacttcctgttcatccttagtttgctttcgatagagagcacaaacagctttcaagcaaagttcagggtgtgcagcaaatgcagatagcatctctgcctcatacttccattccttggcattccttttacggcctatgcaagccataacgtctttatagtctatctcattgtcagactcttcaagttctgaagaggatccttcactgggggcagaagcatcagattcttctggttcagcagaattcgcagaattttctgaacaatccgaatcatttattataaagtcatccaaatcatcatcttcatctgagtcactcgcactctcttcacaatccttgggttcaacaaagttgagcacccgacgcgcagactgtgctctctttggctgacctttagctaaccgagccgaacgcctggttgcaggtgtggaagacccattagtctcaccgaatccaccaccacccttgctcgccctctcttttctcatcttcttgaccacttcacgaatgggaatcatatcatcatcactactctcgatctctgtcacgactacatgagcaccatcgacaccatcctcatcctcatcttcgtcctcattgtcactgattccacgcagagcacgcttcctactccgcgtgacgcccttgtcctcattcccattgtctcggacgccacgcaaagcacgcttcctactaccatccttgcccctcctcccatggccaccctggctctcaacctcatcttcactatcgctggtgacaaccagcgcggcggcgcgcttcctatcgggcagcgcggttgtaacatcatcatcctcgagacccacattgtcgccacagctaacgctcccatggtcgcctccatcaccatcaccatcccccttggcgtcatcaatctcgtattcatccccgctctcgccgatcaccacccgcaaagcagcacgcttccgaggagtcgcaacaggcatccatcactcctccgcgcctctccccttcctgacgtcaacagccatcccctccctcctcgccatcactaacctcaatgacatcacgcgccacacgccctcccgccatctcctccgatcgacggagatttgggcctcccttacctgtactacgatccgccatggccctcctcaagcgcgcgttctcggcttcgaggaaggagaccctggcctcgagggaggcgatacgggacgacttggcggcgagcactacctcgagcgcggcggccttcgccgcggcgctcatctccggcggtcgcggcggcggcggcggcggtggctgaaccctagcgacagcgtcagccggagactgatgccgctgcaagcccctcttcttcctgtcctcttcccccatctcccatctcttcaactctctctcccatctcttctcctcccggaagtcagagacgtcgtcgtcggggtcaggtacctcgtggaattcgtcctcgttgccggagtagtcgaccacggtgtcggaggcggagtcctgcgtggagacgaagctctgggcggcgaccat

SEQ ID NO: 85511 - DNA, 284 bp, Oryza sativa
  unsure (1)..(284): unsure at all n locations
  Clone ID: PAT_MRT4530_84642C.1
ctgtcaagatgccaatccngggcaagntgtttntgatgggcgcggctntttcccgctgcctgctttgttagtaattnttgtggngtcgacgttcctnttnaagtttgttgtnntactgtttttntntgaacncaganttgtaatttcagtactcagttgtgtntccctnttttnctntgtgcaaattangntntcctcctcctnaaaaaaaaaaaaaaaaaaaaaaaaaaaaaaaaaaaaaaaaaaaaaaaaaaaaaaaaaaaaaaaaaaaaaaaaaaaaaaaa

SEQ ID NO: 85512 - DNA, 972 bp, Oryza sativa
  Clone ID: PAT_MRT4530_84643C.1
atgcgcgctgacgaggatcgtcatggtgggcgacgtcggggagacaacgagtacggcggcggcggcggcggcgggcaggaggagggcggcgcaggcggctgctgctcgtgcctgccaccgttctgcggcgtgtggggctccaggacgaagccgcggcggcgccggcgaaggttcaggttcaggttaaggctcatcaggctatcgtggttcttctcctggccatggcggaagaacagcggcaataagaagaagaagacgacggcgacggcgacgaaggaagcgaaggggatgaagaagcggatgctactcctcctctcctcgtcatcgtcgtcggcggcgtcgccgccgtcgccggccaagaaagcgctcgccgccgccgcgtccgtctcggcggcggcagccggcagcttactactccccaaggtgggcagcttcgccgccgacggcggcaagaagcagaggaaaagcggaagcaagtcgctgccgcagcagacggtcaccggcggcggcggcggcggcggcggcggcgacgctgcagcaccggccaaagagacggcgccgcctgcctggcaaccgtgcccgaggccggcgcccggcgagctggccggcgtgaagagagctccgtcgagaaggcacggctcgttccggcgcgagccgggcggcggcggcggcggcgggggcgggctgtggacgatggcgaccacgctgggagtgatcgtgttcttcggccgcgtcaccgcggtggccttcctctgctcgtgcctgtacgccgcgcggttcgtccgggcgcaggccgccgccgccgccgctgccaagggcaaaggcagcggcgggagtgggaggttcggcgagccggcggcggaggagaggccggcggtggtggaggtgtgcacggaggagcacaagaagaaggtggtgatggaaggtttgctggacagaggcggcaagaggctctcctcccggtttttgtaa

SEQ ID NO: 85513 - DNA, 278 bp, Oryza sativa
  Clone ID: PAT_MRT4530_84644C.1
gataagggggatatgtggtgaattttacagcgacagaaatacgcggatcaccaaactttctgtaccaactcttcccagggggcaaaacaaaaccggctctccccacgaaagctgggaaaaacaaaaagaaaaaactagcatttagctgctccaagcggatgcgggagtaaagaaactactacgaaccacgaatgcaaagtcccccggcagaaagagcttgaaggggaggatgaaggaaggaccataacaccctgcaaagcttgggcgggggcaaagag

SEQ ID NO: 85514 - DNA, 225 bp, Oryza sativa
  Clone ID: PAT_MRT4530_84645C.1
atggcggtagtctcctcctacttccctgacatcgccatctccacctccagctcgtaccttcgcctccctctccccgactccccaaccgcccgtgttggctccccgtcttcacctggccaccgccgccgggcatgcaacaccaaactgatggcgatggcgatcactcaggttggagttggatcgcaccagactgtggacgtcatctgcaagagcgtccagatctag

SEQ ID NO: 85515 - DNA, 185 bp, Oryza sativa
  Clone ID: PAT_MRT4530_84646C.1
tgttgcgttcgctctagggacacagagattgcgccacgaccacaccacatagaggcctcttggacatcttggccgagcttcgattcgcctgctacgccgctagatacggttctgtaccacgttgttcgttgtaaatcccttgtccaactttgagacaacctcgccaaaaaaataataaaaaaaaa

SEQ ID NO: 85516 - DNA, 1206 bp, Oryza sativa
  Clone ID: PAT_MRT4530_84647C.1
atgaggagctcctcctcgtccgtccagagccgctggaacagccgcctcgagtcctccgcccccgccccaggctgcggctgcggcggcggcggaggcggaatcgcggcggtgggctccggaggggcgtggggggcggcggcgtggtcggggttggagccgtcgctgtcggtgccctcttcgtcgtcctcgtcggcgggggaggaggaggagtgggaggcggcggcgagctcgtcggcggccatggtggtggtggtggtggtggtggtggtggggatgggattagctaggggtttgggtgggaatcaggtttcggataggactgaccagctgggtgcgtggcaacgtggcatcatcgcgtggttttcttctgttgggtcactcactgctctgtgcgcgatcacaacaccccacgtcatcgacggcatctcgtactccagcggcggcgcagccgccttcgaggagagcggcgcttccgtcgaccacgctcccatatcaagtccctccgcggcctcgacgtcgaccgccaagacctcccccgcaccgagctgtcgggcgtcgacggggaggcgcagacgtcaatggggcgaggcgggagaagaggaggacggcgtcgcgacggccggcggtggggaagcacggcggcagcccggcggaggtggggagaggcgaaggagggagatggcagaaggggaaggggaagggtggagggagttcgtcgttgtcgtcgccggcgaggtgggggtgatggtgtcgtggtggaaaaaggggcgtgacgatgaccatcccgtggttcagccgctccccgccgtcgggaggaaggcgaatgcagacttggttgctgccgccgctcttccttacgcgttgacgcttggtcgagatcgagcgcgaaaacgttacaataaaacaaacaatactagtgttggatccatgtctgacaatactagtgtgttggatccatatctggagtcttatgagacaataccagtgttggattcatatttggagtcttatgacaaatctaggcaacatgataataaaaatcataaaagagaaattgaaatattatgctcgaacaccatatgcgacactctgaataatacccgatgtgatacgtcaaaactttacacccctgaatcatttttttatagtgctcgaacaccccatacgacacgtcaaaactttacacccctagatctaaacaatccg

SEQ ID NO: 85517 - DNA, 325 bp, Oryza sativa
  unsure (1)..(325): unsure at all n locations
  Clone ID: PAT_MRT4530_84648C.1
cggacgtgcnngngacgtgtgggtttaaaantnataattgantgaaatgctcaaccaccgaaagtacacataaccantatgaccaaatagccatgcatgccagccaacgtcacaagtagatgcatgatctctgangcgaccaaaattaaagcatttctatccaacatatgaaagattgacaagatcatcttgtaatatatttnccaaaactttttggtacctgatgtgacaacgggtttttgggtgaagccgatgtcaaaacttccaggggatttgcttcattgcttgtcacattcacaggcacaagataccatcctcacatcct

SEQ ID NO: 85518 - DNA, 741 bp, Oryza sativa
  Clone ID: PAT_MRT4530_84649C.1
ctgcaggaattcggcacgaggctcctccgttcagttcagaggcgcctagcaatagcagctcattgcctcatctctgcctcccctgtccttctgggggcagagaatctctccactgctggaaaaatggtacagccaaagaagaagtttcgtggagtcaggcagcggcactggggctcctgggtctctgagatcagacaccccctccttaaaaggagggtgtggctgggcacctttgagacggccgaggaggctgcgcgagcctacgatgaggctgctgtgctgatgagtggccgcaacgccaagaccaacttccccgtgcagaggaactccaccggtgatctcgccacggccgcagaccaggacgcccgtagcaatggcggtagcaggaactcctccgcgggcaacctgtcacagattctcagtgctaagctccgcaagtgctgcaaggcgccatctccgtccttaacctgcctccgcctcgaccccgagaagtcccacattggcgtgtggcaaaagcgcgcaggggcccgtgctgactccaactgggtgatgacggtggagctcaacaaagaggtagaaccaactgaacctgcagctcagcccacatcaacagcaacagcttcgcaagtgacaatggatgatgaggaaaagattgcgctgcaaatgatcgaggagttgctgagcaggagcagtccagcttcaccctcacatggagagggagagggtagctttgtcatctga

SEQ ID NO: 85519 - DNA, 1910 bp, Oryza sativa
  Clone ID: PAT_MRT4530_8464C.1
atgacagagcagatcaatccaggatgattttcctttttttttttcattgctcatggccatggcgagaggtcgtcgccggcaagcttctttggcactgggaggagaaagaagaagaggcaagggcaatattgtccaggatggtattccagcaaaaccatccttgttgggcatggtattttatcgaagcccacttgagcgatggcattcactactagaaaatgcattttcgatgacgttggggttttattttcgcaggcgggcatagatatgggcaggcggcaatggatgtatcattcgccgaggtttttggctccatatagagatgaagtgtctaaatttattagtattgcgaaggcacacgctgaacagaacaatatgtgggagatactttgtccatgtgttgattgtaagaatgaaatagcctggaacaatgtgtctaaagtgatggagcacttagtaactcatggatttatggaaaagtatgaaatatggacacgtcatggtgaagaacaagtggacatgcctgaaaatgtagttccaacataagttgaagacatggtgtacgacgatggttctagtgaggacaaaattgatctaggggaaatgttacgtcatgcagaacccgaggtgctgactgggtcagctagaggtttaaataacattgaagctttacagaaggcagctaaggaagttttgtatgataagtcaaagggctgtgacagtgagttcacaacactacgaaaagagtacgcttctttggatgaatgtccaacatgcggtgctagccagtacaaatcgaatagcaataatggaatagaactgtctgacacagccgagggaactaagagaaaaatcccgcagcttgtgatgcgatatcttcatgtcaaagatcgcattaaacggatatactcaaatccgcgagatgcagaactaatgcgttggcatcaagaagggcgcaagaaagacgtgattattcgacacccggcagatgctcgttagtacaaagagtttgctaaagacccacggaatattaggtttgccttgagtactcatggagttaatccttttggagacatgagcagctcacatagtacttggccagtgcttctcaccatgtataatcttcctgcctagctttgtcaaaagcgaaaatatgtatttctctttatcctgatacagggacccgtcagcctggtattgatattgacgtatttcttgaaccattgtcagaagatatggatgatttatggaaagaggggttgaaagtgtatctcccgggttccaacaagcttgtgtacatacggcaccggcggttcctacacacaaattacaagtaccgtaagatgaaggcggaattcgatggcactgaagagagtgatcctccacgaaacctacatccggggaagaagtgtgtgcaatgacagagaaaattgtttgcgaatttggaaaagtaactaagaaaccttcaaaggggacagagcgcaagaaacccgacaagactaagaaaccaaaagatagtaagaagccagatgataaactccctcccctctttcaagaagcattccattttctttaagtatctcccgtactggaaatatctagagatacggcatgccatagacgtcatgcatctagaaaagaatatgtttgacaatatagttggaacattgttggacatgccaaggaagactaaagatggtatgcaattacggattgacctagtcgagataggaattagggaagagttacaccctcaaggagagaagaatgataaattatatcttccaccagcttgtttcacacttacacataaggagaagaagtcattttgtaaatcactccgtgactgatgggcagtcattttggaaagcatgttggactgttgggccttcggaccggcccggcatgac

SEQ ID NO: 85520 - DNA, 836 bp, Oryza sativa
  Clone ID: PAT_MRT4530_84650C.1
gccgaaaccctaaaactcatcgtagccggcttgctcctggaagaacttctcatcagcaggatccgcttcatcttcttcagcaactggggggggttatttatatagagcaaggtttgttaacctctgaagaggaggtacactttacccacacgacattactaacccggatcacccagcccgtggggatcagccacgtcgggagacctccaagctttcatgacaaggcatttctaaagccgacacaggtttaccatatgccgacgagaggggtcccagaccaacaacagttttacccaagttgttattcagattttaagtttgaaggcgtccgtcgatattcgcacagggtgcacgaatatcgagacgcaactagatggttacaaggggacatgactgaggtggcgccgacgtggcgcctacgtggcagccacgcgggccggcgggaggttgaagaagacgccggccggaacggacggcggacggcggtggcaagcggcgaagcgaaacacggcgatctaggcgaaagcgagcacaccgggaagttgcgcgggacgaggggagtcgagccaactactcggatttgccgggggatgctcgacggcggcggattgcggcggcggcacccggcggagagaaaagggggaaacggcgacgaggtcacgaggggccaattcccggcggtgagagcatctacgcggttacgggaatccgttgctagcgtcggattgggcggagctacgccgagcgaggtcggcgacgagcgggtgctacggagcacgggcggcgacggcggcgagcacatggcgagcggcggcaacggttggggcggcgccggc

SEQ ID NO: 85521 - DNA, 1287 bp, Oryza sativa
  Clone ID: PAT_MRT4530_84651C.1
atgacattactaacccggatcacccagcccgtggggatcagccacgtcgggagacctccaagctttcatgacaaggcatttccaaagccgacacaggctgagctggcaccaacgtggcacctacgtggctgccacgcgggccggcgggaggtagacgacgacccggccgcgaatggacggcgggcggcggcggcgagcgggggagcgaaccatggtgatacgggcgaaagcgagcacaccgggcggttgctcgagacgaggggagacgaaccaacggctcggatttgccgggggttgctcgacggcggcggattgcggcggcggcaaccggcggcgggagaagaggaaaacggcgacgaagctacgaggggtcgattcccggcggtgagagcatctacgcggcttcgggaactcaacgctagcgtcggattgggcggaactacgccgagcgaggccggcgacgagcgggtgctacggagctcgggcggcgacggcggcgagcacacggcgagcgacggcaacgaggaagaggaagaagagggcgcgcccggagtccccttccgcgtccacgaacgcaccggctctcccggcgcttggcgatggacggcggaggcgaggcagagcacgggagcggtggcaagggcgcggaggcgaatgggagaggaggggaaaggggaggctggggtttataggggggcggcaatgtcggtttgggaaccgacttgcgcggtcaagggcgcgagctggcgctccggctagcggccaaaacggcgacaagaggatgacgccggcgagaagggaaaaaggggagaaaaagaagaaaaggagggagagaaagggggctcgcccctttgccgattcgggaaaaggaggagggggcggggcgacgcggcagagggaagggagagctcggcctccgcctcttggcggcttgcgcgcggagtggcggggccgggggatgacgacggcgatgacggtgagatggtttggagcggcgcgacgacacgggcgacaggcgcggcaggcgctgacgacggcggcgactgggcggtcggccactcggcgcgcgcgcgcgggaaacaacgggcggcgtccgcgcgggcgcgcgcccgcgaacacggcgcgcgggaagcggctttgcgagcggggagctcgcgcgaggggaggggcgctcagcgcgggcgactcccgcgcacgcgcgcgcggcgcgcgggcaggacggaggggaagcggggagagaggcgctcggggcgactctcgcacgcgcgagcagcgtggggctgcagg

SEQ ID NO: 85522 - DNA, 164 bp, Oryza sativa
  unsure (1)..(164): unsure at all n locations
  Clone ID: PAT_MRT4530_84652C.1
ctgaagcaagggatgacctgagtgtttttttttttctgcttaaaaaattaggcagttatgtgacctagactctattccagctcacgtatgtctctgtggttnctgatctttggacccaatttaaacaatgggaatgtgggatggtcaaaagtnnacttctattt

SEQ ID NO: 85523 - DNA, 3019 bp, Oryza sativa
  Clone ID: PAT_MRT4530_84653C.1
atggccagcaagactcttcgcgagtttgctgctccctctgctgccaatgtggccgtcgggccgcaagtcaacataggagatgtggatttcgacttgaagtccagcctcatcacgatggcgcaggctagcccgttttgtggcaagcctaatgaggatgccaacgctcatctacaacaattcctggagatatgtagcacgtacaccatcaagggcgtcagtcctgacgccgtcaggctgcggctgtttccgttctccctcctcgggagagcgaagcagtggttctatgccaaccgtgctgctatcaacacctgggataaatgctctatggcattcctctcgaagttcttcccgatgggcaaaaccaacgcccttcgtggacgaatttccagtttccagcagacaagggacgagtccattccgaaagcatgggaacgaccgcaggagcacgtggccgcctgtcctcatcatgggatggacgactggctgatcctgcaaaacttttacaatgggctcaccccaatgtcccgcgatcacctggacgcggcagctggaggagccttcttctctaaaacagttcaaggagccgttgaactcagagagaagatggtctccaatatgggttggagcgaggaacgactccagacccgtcagcgaggcatgcacaccgtcaaggagacggagttacttgctgccaagctggacctcctcatgaaacgcttggacgaccacgagaaacggccacaaggcacagtcaaggccttggactcacacgtcacgtgtgaagtctgcggcggcacgggtcattctgggaacgactgcccggaaacccgtgaggaggtgatgtacatgggcaacaacaaccggtatcgtccacaaggaggtcaggggtggaaccaaccacgcccatattatcaaggagtccctgcaaatgaatccgggaggattccggggcaacccgactcttccattgaaaatgttaaggcgatcacaacgaggggagtaatccaaaagatccacatcaacgtgccgttgttggacgctatgcaagtaccaacatacgctcgttatctcaaggacatactcaacaacaagagaccgctcccaacaatggaggtggtcaagctgacggaacactgcaacaacctgaaactccacaagctcccggagaagaagaaagatccggggtgtcccacaatcacctgctcgatcggggcacaacaattcgaccaggccttatgcgaccttggagccagcgtcagcgtcatgcccaaagacgtctttgacaagctcaacttcacggtgttggcaccaacaccatggtgttggcaccaacacggatgcgcctacaactgctgactcgtcagtccgttacccagcggagatagcggaggatgtgccagtcaagatatgggatttcttcatcctggttgactttgtggtgctggatatggacacgggaaaagagacgccgctcatcctggggcgttcgttccttagcaccgcaggagctaacattgacgtgggaacgggaagtatccgtttccatatcaacgagaaggaggaaaagtttgagtttcagccaaggactgaacaatgctccacggtcagaataaagtacgggccaaacccgcagaatattcaagtggtcgaagtggagccacccaatacggatagcctaaaaaagagagagagagagaaagatgggaacgagaacaccgaggaccacatattagcagccaagaaagccaactgtgatagagatagacaacagcttgagccggccgctgggggtgcaaggcggaggcgaggctcgccggctcagtcgcgtatgcggcttctgctggggacgccggcccaacaactagcagcacgcagcaaccaagcacagcatccatctggcgcgcaggtcgactctagaggatccccaggctcttctcagatgaccatgacaaatcaacgcaatttgtccgatcgacgagcccagcaacctctatcacaggtttatgttgatgttgacagtgagcatgggactgcagagcgtcaagaaatagggacgacaaagagagccagatggagtcaccagatgaagatgttccttattgagctcctaacagatcatgacgtgccaggttttcgaacacaaaatgcttggagtaaggaagcatggacaaatattgtttgccgcctgaatacaaaattcggtacatcatttacgaccaaccaagtcaagcaaaaggagcaggatttgaagaaagattatcgcagtgttaaagatttgttggatcaaagtggttttgggtgggatagtgacagaatgatggtgagtgcaccacaaagtgtttgggacacttttgctgatcgcaagaacaaagatgcaattcattggcgagataagtcgttcccatattttgatgatttagctccactttatgatggtcgttatgctgaagggagaactcgccatggtatggaccattatgcaaggaagacaaagaatgcaccagctcattcaacacaagaagcaaatgtggttgatacatatcagtcaccatcccctaattcaaatgctccaggtgaatcaggtttgcaatttccttttggtgaagaggttgagacagccaatttggacttttcacagcattcacctacccctgtccatctcacaaaagtcccacctagctcggcacaaacaccttcagaggttcctgaatctcgacctgggaagaaacaaaagatcaaatctgttagtcctgatgatggatttcatgagagatacctaaaacttaaaaaagaagaaatagatcgatttgctgcaattgaggagaagaaattggaggatccttacagcatcaacaagtgtatcacagtgcttgaaggtttacatggtctacaaataggagatatattggtggcagctgatatcttcaaaggtaaggataatagggaagttttcttgtccttttcaagtgatgcattacgcctggcttggattagaaaggaaatcgcagcattagagtga

SEQ ID NO: 85524 - DNA, 1328 bp, Oryza sativa
  Clone ID: PAT_MRT4530_84654C.1
aagaaggcggcccagagcggcccaagatgcgcgcgcgcggaggaaggagagagagagccggtggacagggctcacctcgcgcggtcccgggtgggacccgcttgtcagcggctcggctcaccgtgcggagggagcacgcggcgcggcgctagggtgcggcgggtccacgcgcagcctcacggctcgcggtggaacgcgcgcacggggagggactgaccggggtcggctcgacccggtctaggctgagctggcgccgacgtggcgcctacgtggctgccacgcgggccggcgggaggtagacgacgacgccggccggaacagacggcggtcgacagcggcgagcgacggagcgaaccacggcgatacgggcaaaagcgagcacaccgggcggttgcacgtgacgaggggagacgaaccaacggctcggatttgccgggggttgctcgacggcggcggattgcggcggcggcaaccggcggcgggagaagggggaaacggcgacgaggtcactaggggctaattcccggcggcgagagcatctacgcgattacgggaatccgatgctagcatcggattgggcggaactacgccgagcgaggccggcgacgagcggcgcttccgagctcaggcggcgacggcggcgagcacacggcgagcgacggcaacggccggcgagctggcgctccggctagcggccaaaacgacgacaggaggtgacgccggcgagaggggaaaaagggggaaaaaggggaaaatgagggagagaaagggggctcgccccttgcctctttgggaaaaggcggagggagcgggggcgacgcggcagggggaggaggggcgctgcctccgtcccttggcggcttgcgcgcggagtggcgggggccgggcgatgacgacggcgatgacggcgggcagattggagcggagcggcgacacgggcgacaggcgcggcaggcgctgacgacggcggcgatcaggcggtcggccaccacggcacgcgcgcgcggcctgcaacgggcggcgtccgcgcgggcgcgctcatgcgaacacggcgcgcgggaagcggcaacgagggaccggagagggaggacttggctcggcgcgggcggcttacgcgcacgcgcgcgggcagagcggaggggcgcagggcgcggctctcgcgctcgcgcgcggcgcgcgagggtggggcgctcggcgcggcgacgcgcgctcgcgcgcgcggcgcggggcggagcggagggagagagggggggagcgggggagatgggccgagagggattcggcccatcgaacccgggggaggcaaactagacttttgcggagggatt

SEQ ID NO: 85525 - DNA, 571 bp, Oryza sativa
  Clone ID: PAT_MRT4530_84655C.1
aacctctgcaaagggggtacactttacccacacgacattactaacccggatcatccagcccgcatttcgaaagccgacacaggttcaccatatgccaacgagaggggtcccagaccaacaccagattaggtcccagaccatactgtgccaggaaacctgggggttctccccggcaccaccccgttgaatccacatgtctcttggcatcatggctcccccgattagctagttactcagccaggggtgtcccattccacccatgtggtcgcacttgtcttatgttcggatgaaattccaaggaaacagtccttaagtgcaagagcgggaaactgtactcccggtacgttccccggtccccgattttttggaaattcatttagttcgcaagcaccgacccaggtgtcgggttttccaaggatcaaaggtgacttgccttgctcgagatcttgaacttgatcttcgaaatcctcgcactgcgggtcttcgggctccgaaactacacgcgaaatgggacaactcaacaaacggcgaaaataaagccatattattgacctctaggcgtgtcattaga

SEQ ID NO: 85526 - DNA, 640 bp, Oryza sativa
  Clone ID: PAT_MRT4530_84656C.1
ccggccgggctgcagcctgcagcccgttcagctcggcggcggcggcggcggtcgccggagaggaggaggtggtgccgggatggtgagcttggccgcctactccccttgctccaccgtggctggcgtgcccaagaacaagggcaacggcgccgcctccagcacacacaaggtcagctcaatcctcttactcctccctgcaatcgaatccaaacccacgcacgggagagggagcgccgcctgctattgttcccatcccgacgcagttcgagcatcctacccaccgtcgcatccctccccgaggcgcagggcctccgctagccgccggcggcgccaccatcgccaaccaagggtcgcagcgtcgctgccgctgagcatagggactccgccagtcgccggttgtttcatctcctccaccgggcgcaacgtcttcaggaatcaccggccgcgaggcccaacgccattagtacgccatatctggttcttccccatttaagtcttgattgattttcttgtgggttttcccttctcatcttagtacaagtgttatctcttctcctagatccgatgggcgatgagttagttctgaaattgaatgcttaagtggcagtgcatctctagcacatacatactactggatact

SEQ ID NO: 85527 - DNA, 514 bp, Oryza sativa
  Clone ID: PAT_MRT4530_84657C.1
atgaggtggggcgctgtgacgagaggccgatggcgcgggagtaatctctccggcctcgggccggggaagaggaaggagagggcgcgcccggagttcccttccgcgtcctcgctcgtgccggctcctccgacacgcgcaacgacgaacggcgacggcgaaacagaggggcggcaacaatggagtggaggcgatggaaggagaagagagggagggcgcctgggctttaaagggcggcaatgtcggtttggaaaccgactttgggcggtcaaggcgcgagctggcgctccggctagcggccaaatcggcgacagggcggagggaggatgacgccggcgggaggaaaaaggggaaaaggagtgagaaaaagggggctcgccccttgcttctttgggaaaaggaggaggggagcaggggcgacgcggcagagggaggaggggcgctgcctccgtcccttggcggcttgcgcgcggagtggcggggccgaggcgatgacgacggcgatgacggcgggccg

SEQ ID NO: 85528 - DNA, 1340 bp, Oryza sativa
  Clone ID: PAT_MRT4530_84658C.1
accgggctcaccacgcgcggtctcaggtgggacccgcttgtcagcggcttggctcaccgtgcggagggagcacgcggcgcggcgctagggtggggggaaggacgcggtgcacgcgcgcggttcgcggtggacgcgggtgcggcgggcccacgcgtagcctcacggctcgtggtggagcgcgcgcacgggaagggactgaccggggtcggctcgacccggtctaggctgagctggcgccgacgtggcgcctacgtggctgccacgcgggccggcgggaggtagacgacgacgccggccggaacggacggcggtcgacagcggcgagcggcggagcgaaccacggcgataccggcgaaagcgagcacaccgggtggttgcacgagacgaggggagacgagccaacggctcggattcgccggaggaagcttgacggcggcgaatcgcggcggcggcaaccggcggggagggaagaggggaaaacggcgacgaggtcacgaggggccaattcccggcggcgagagcatctatgcggctacgggaatccgatgctagcgtcggattgggcggagctacgccgagcgaggctggcgacgagcgggtgctacggagctcgggcggcgacggcggcgggcacacggcgagcgacggcaacggcgcgggctggcgctccggctagcggccaaaacggcgacaggagggagggaggatgacgccggcgggaggaaaaagggaaaaaggagggggagaaagggggcttgcccccttgccgatttgggaaaaaggaggagggaggcggaggcgtcccggcagagggaggagggctcggcctccgtcccttggcggcttgcgcgcgggctggcgcggcagagggtgacggcggcggcgaccaaacggtcggccactcggcacgcgcgcgcggcttgcagcgggagggcgcggcggatggagaggcgcggctcgagcacgcacgctggctgcggggccgagcggctgctggcgcggcagggtagcggggccgggcggcgcatacgcgacgcgggcgaggaccacgcgggcgcgcgcgcgcgaacgacgcgcggggagcggaaaggaggggcggaaaggaggactcggctcggcgcgggcggctcacgcacgcgcggacagagcggagggagcggaggaggggcgctcggcgcggcttgcgcgctcgcgcacgcagcgcgcgcggcgcacgggcggggtggagcggagggagagagagagagagagagggcgccggggagggagggggagatgggccgagagggattcggcccatcgaacccgggggaggcaaacttgacttttgtggaggaatt

SEQ ID NO: 85529 - DNA, 1333 bp, Oryza sativa
  unsure (1)..(1333): unsure at all n locations
  Clone ID: PAT_MRT4530_84659C.1
tttgtttttttttttttttttggttttttttttttttttttttttttttttttctcactgtagctttggtcgattagtacttaatcaaggatgagcctcacgagtcgttaaacgatgaaatttttacacgagaacgaaggagttgcttaccaagtgaacatccgatgccgatataattaaattctcaacaggcagtaacaccatttacaaagaatttgaatatgcaaatgcaggggagccagcatcagaacgataaatatcataaagatcatctgtcccacaaaaaaaatgttcctccttcccttccctggcaccatctattcaatcagccatatcagcagccccatcaggttctcccatttctgaatcggcagcagttcgttttttggaccgttgagacctgataaactcttcgatgcgcgacttgagctctgtatccggtatcaacatgtcttgcgtaaggtgagaacggttgaacggatcagtactgtcacttagcaagtgcctaacaataacgggacgatctattgtcacccgtgatgatggtagtattacaggatccttcatcagagtatactgaattggatcaagaaattcatctggtatgtcaccaagcatagcctcagcatccattgcctcagaagcagcagtttttgacttactggcaagttgcataaactcctgtattttttttttgtctcccccaatcttccacaaaatatttgctgcacttgcaaacaactgctcattgtatgatcttccatcttttgagatggctgctgggaatataccttctttatcaccccttgtgatatggacatagatggtggcaatctgtttcaagagctgcttcggcttgaactcatacttttcaggatcttttacagtcaatgatttcctctgaggaccagcaagttgcaagaggaagtaatttagcatgcttgccaccctttccaccatttcaggaaggaggaaaggtgctggaatctgctctgacgtgaaagcaagcatcccaacatcctcatttgctagcttcatgtcaaatcgaacaacattctcccactgatgaaatacacgcaatctctcctctctttcttgaggtggcctgctttcccactctacaacattagccatttcagcctctatttctttcagttcgaggattttgttcaaactctcatcaagaagatagatgctatcattgataaggaangtcaaaaaatttaaatatacgcccttctcctnctctttagctattcgtctccatgcattccgatgactggggacatcccatagatactctagaagctcagcaatattatgtcgaatgtta

SEQ ID NO: 85530 - DNA, 992 bp, Oryza sativa
  Clone ID: PAT_MRT4530_8465C.1
gtcacaaggagaccggggtggagtcaaacagctccccccttcgacgaaaggatttggaaggggcgaaggccctagttgcattttcgtcgggcaaggcggtgaaaggaggcggtagcgccgccgccggagcttcagcctccgccaaacggatcgtgacggctgcagcgagggtctttgggagccctctgcgtgaaccagctgtttcgccgttggtcaagacgaaggggaagggtgtggccgccgaagcatctgcctcggaatattcccttgcggcgccccacttcgcccctggtgatttcgagacccgggcggaccttattccctttgtggagggagtaagcaatcttgtcctacccgccggtacctcgagcctgttcaccgaactgaatgagttcgatgaggggtgttctgctattaaaagcttggctgttcagatccttgcggctcactgttcgacagagcgaaccgtgcgggcccgtcttgacggatttaagaaccgtcttcgggccaaggacgacgaaataagccgcaagaacttggaggtggaggccctcgcgaacactctcaaagaggtgaaagttgaagtcaagcgccttcaatccgagttggagaaagggaaagaggccagggccgaggtcgatcgcctcaaggccgaactggagaaggggagagaagccatagcggaggttgatcgtctgcagaccgaattgaaggaggagaaggcccattccgccgtgctgactgattactataacctcactgagccgaagatggaggctcttcgcctgaaggttagcaaggccgaagcgagtgctgtggaggagtcgcagtggtgtgaggggtccctgctggctggtgattctgtttcggactgcgccaccgcgtacggcgattgctgcgtgcgtgtatcggcggccttcaccttgggccttttgcaacagttcggctgcgagcacgtcgccgagttccctaactatgcgaagggggactag

SEQ ID NO: 85531 - DNA, 1556 bp, Oryza sativa
  Clone ID: PAT_MRT4530_84660C.1
atgggccggccggcccaaaaggcggcccagagcgcgcgcgggaggggaggagagaggggaccggtggaccgggctcaccgcgcgcggtcccgggtgggacccgcttgtcagcggctcggctcaccgcgcagagggagcacgcggtgcacgcgcgcgggcggggaagggacgcggtgcatgcgcgcggtccgcggtggacgcaggtgcggcgggcccacgcgcagcctcacggctcgcggtggatcgcgcgcacgcggagggaccgaccggggtcggcccgacccggtctggctgagctggcgccgacgtggcgcctacgtggctgccacgtgggctggcgggaggtagacgacgatccgaccgcgaaaggacggcgggcggcggcggcgagcggcggagcgaaccacggtgatacgggcaaaagcgagcacatcgggcggttgttcgtgacgaggggagacgaaccaacggctcggattcgccggaggttgctcgacggcggcggattgtggcggcggcaaccggcggcgggagaaggggaaaacggcgacgaagctacgaggggtcgattcccggcggtgagagcatctacgcggcgtcgggaactcgacgctagcgtcggattggacggaactacgccgagcgaggccggcgacgagcgggtgctacggagctcgggcggcgacggcggcgagcacacggcgagcgacggcaacgaggaagaagggggcgcgcccggagtccccttccacgtccacgaacgcaccggctctcccggcgcttggcgaaggatggcggaggcgagacagagcacgggagcggcgacaacgggcggtcaagccggcgagctggcgctccggctagcgtccaaagcggcgacaggaggtgacgccggcgagaggggaaaaaggggagaaaaagaggaaaaggagggagagaaaggggctcgcccctttgccgattcgggaaaaggaggagggagcggggcgactcggcagagggagaggggctctctgcctccgccccttggaggctagcgcgcggagtggcgggggccgggcgatgacgacggcgatgacggcggggcggtttggagcggcgcgacgacacgggcgacaggcgcgggctggcgcggcagagggtgacggcggcggcgaccgggcggtcggccactacggcacgcgcgcgcgggaaacaacgggcggcccggctgggcagcgggcccgggcgacgcggacggcgcagacgacgcggctcgggcgggaaaccacgcgggcgcgcgcgcgagcgacggcgcgcggggccggctttgcgagcggggagctcgcgcgagaggagggggcgctcggcgcggctctcgcacgcgcgagcagcgagcgggggggggagtgagagcaaagcgcgccggggaggggagagggccgggggagagggggggagagagagagagagagagagagagcgcccgggagagagagggccggggaagagatgggccgagcggaattcgccccatcgaacccgggggaggcaaactagacttttggggagggatt

SEQ ID NO: 85532 - DNA, 235 bp, Oryza sativa
  Clone ID: PAT_MRT4530_84661C.1
agcaaacaagggattggttcgtcgttggggggttacttagagccagcggactgtacctagcatttctggatgattggacagatgcgaccccctattggcgctggttactgaagccatctgtgttaccgggaccggtgatgacgattggccggcgagcttctcatattgctgttcctcgtgcggggttgaccgtatcaactaaggggtgggagggaacaaatcgagggctaacttg

SEQ ID NO: 85533 - DNA, 2448 bp, Oryza sativa
  Clone ID: PAT_MRT4530_84662C.1
atggtctccaatatgggttggagcgaggaacgactccagacccgtcagcgaggcatgcacactgtcaaagagacggaattacttgctgccaagctgggcctcctcatgaaacgcttggacgaccacgagaaacggccacaaggcaccgtcaaggccttggactcacatgttacatgtgaggtctacggcggcataggttattctgggaatgactgcccggaaacgcataaggaggcgatgtacatgggcaacaacaatgggtaccgtccacaaggaggtcaggggtggaaccaaccacgctcatattatcaaggaggtaacaataacggtaacttctctaaccagccctccttaaaggatcttgtttttgcacacgccaaaactactgattcgctaagtaaaaagcttgcagccaacgaaaagatcctagagaacaaaaatgtcaaattagatggcttcgcttccacatttcaaaaccagccgagcttcaataaaatgatagaaacccagttagctcagttggcatctttagtccttgcaaatcaatctgggaggattccagggcaacccgactcttccattgaaaatgtcaaggcgatcacgacgaggagaggtaagtccactcgtgatccaccgtatcctaaccctgtaggaactaatggggtgacaaaagaagtgccatctaatgactcggctgacaaggagattcagccagaaaagaccgtgccggaggattactgcgacacgcggctgctgccattccctcaacggataatccagaagattcacattaatgtgccgttgttggatggaatgcaagtgccaacatacgcccgttatctcaaggacatactcaacaacaagagaccgctcccaacaacgaaggtggttaagctgacggaacactgcagcaacatcatactccacaagctcccggaaaagaagaaagatctggggtgtcccacgatcacctgctcgatcggggcacaacaattcgaccaggccttatgtgattttggagctagcgtcagcgtcatgccaaaatatgtcttggacaaactcaacttcacggtgttggcaccaacaccaatgcgcctccaactggctgactcattagtccgttacccggctgggatagcggaggatgtgccagtcaagatacgtgatttcttcatcccgattgactttgtggtgctggacatggacacggggaaggagacgccgctcatcctagggcgtccgttccttagcaccgcaagagccaacattgatgtgggaacaaggagcatccatttccatatcaacgggaaggaggaaaagtttgagtttcaaccgaggacggaacaatgctccatggtcagaatcaagtacgggccgaacccgcagaatattcaagaggtcgaagtgaagccacccaagatggacagtctagtgaaatttatgcagaacttcctggaaaaggaaacaacaatgcccaggaaccgttattggaggacgccggtaaaatcacctgtactggccaagaaattagagcagccggctcagaagagaccgtcttccgcaccgaaatcaaagaaggtgtggaaggaaaagccaaaggcacccgctccaccacctccggagacggaaatagaagatggcatttcttttcgctttttccgtaaggagttcacgctcacatggaaaggtttgagtacacttcttggttttcacgattcctgtaaaatcgatctccagaaaggaatttctgggttcgagaaaaataggttttgggaagatatttctcgtgctctaatttgcaagaaacctagaacaaatgacatccataatcctacacttaggctcatgtacaaatggattgctatgactttgtttcctagaagtgatctgagacccattaggggagatgaattaattatcatgtttgccatgaccatagaagaatctcgtggaagtggaacatacagggagacgcgcaacatgacaaggaacgaacgagagagttcatcatccttgacacccgtgcagatgtatgaggcaggttgggcaccaactggggatgcacgcggatggacccaagctccacgccatagcatcggagtctcaacctgggcaagtgccagtgaggaccggtggcatgcgcctcatggcatccactggggggacaatcaaccctccagatcaagtggtgtgcctccatctccaagtgaatggcactcgagttcctcttgttgggacttgggtgaaatcactaggagaatggacacccttgatgtgcagacgggggagatccagtacaacctcacggaacacatagctcaaacacaagaatggctacaatctgctgatgctcagttcgtcaacatcaacaacatgatgcagcaacagcatggtgaccttcaggcgtactttcattatcaagggttcaatccttatcaaggaccctga

SEQ ID NO: 85534 - DNA, 3369 bp, Oryza sativa
  Clone ID: PAT_MRT4530_84663C.1
atggcgacctccccgagcgacgatgacgaccggaacggtggcggcgcacggctggagcggcggcgacgacaacggcacgagtatcaaatcaactggcacgcctgcgaacctaaaggcaagctttttggacctgcactggagttaagcagatctcccaggcctcgtgtttctacatcaacacgggagggcattggaaagaggtgcatgactggtttcaacctgccggaaaacttcaaagaaaatccagaagctttcttccggagcgtccgaccgcgagtcgttgctccgcagaaaactctaccgacagataaaccagccgtatcagtgccaccaatcttcaagactatggctagcaagactcaccgcgagttcactgctccctctgctgacaatgtggccattgggccgcggatcaacatgggagacgtggacttgaagtctagcctcatcacgatggcgcaggctagcccgttctgtggcaagcctaatgaggatgccaatgctcatctgcaacagttcctggagatttgtagcacgtacaccatcaagggcaatttttataatggactcaccccgacgtcccgcgaccacctggatgcggcagctggaggagcattcttctctaaaacggttcaaggagccgttgatttaatagagaagatggtctccaatatgggatggagcgaggaacgactccagacccgtcagcgaggtatgcacaccatcaaggagacggagttacttgctgccaagctggacctcctcatgaagcgattggacgaccatgagaaatggccacaaggcaccgtcaaggccttggattcacacgttacatgtgaagtctgcggcaacacgggtgattctgggaatgactgcctggaaacctatgagggggcgatgtacatgggcaacaacaacaacaacaacaacaacgggtaccgttctcaaggaggtcaggtgtggaaccaaccacgcccatattatcaaggagataacaataacggtaatttctctaaccagccctccttgaaggatcttgtttttgcaccagctaaaaccactgatgcgctaagcaaaaagcttgcggccaatgacaagctgagctttaataaaatgatagaaatccagttagctcagttggcatctttagtccccgcaaatgaaactaggaggattccggggcaacccgactcctccattgaaaatgtcaaggcgatcacgacgaagggaggaacaactgggatatcaaaagaagcgccatctaatgattcggctgacaaggaagttcagccagaaaagatagtgtcgcaggagtactgtgacacacgattgctgcattccgtcaacagaagtagaagaccgtcagtggacgagcaatttgctcattttgttgaagtaatccagaaaatccacatcaatgtgccattgttggacgctatgcaggtgccaacatacgcccgttatctaaaggatatactcaacaacaagagactgctcccaataacggaggtggtcaagctgacgaaacaatacagcaacatcatactccacaagctcccggagaagaaatattcggggtgtcccatgatcacctgctcgatcggggcacagcaattcgaccaggtcttgtgcgaccttggagccagcgttagcgtcatgccaaaggacgttttcgacaagctcaacttcatggtgttggcaccaacaccgatgcgcctacaactggctgactcgttagtccgttacccggcagggatagcggaggatgtgccagtcaagatacgggatttcttcatcccggttgatttcgtggtgctgaacatggagtcgggaaaggtgacgccgctcatcctggggcgtccgttccttagcatcgcgggagccaatattgacgtgggaacggggagtatccgattccatatcaatgggaaggagaagaagtttaagttccaaccgaggacggaacaatgctccatggtcagaataaagtacgggccgaacccgcagaatattgaagaggtcgaagtggagccacccaagacggacagcctagtgaaattcatgcagaatttcctggagaaggaaacaacgatgcctaggaaccgttactggaggctaccggtaaaaccaccaataccggctaagaagttagagcagctggctcagaagaagccgccatccccacctaagccaaagaagccgaaagtggggccggttgggcccaccaagggttcggttgaaccggccagaatgaggaggcgattgtctcgtctgttcaagggatccggctcttcatcaagtcatcatgacgagtctagtactcgttcatcagccgatatcatgatggaagaagccgaagctccacgacaactcctgaacgacgctgaccttgaccttgtcggtgatcgggagagacaagcctactacatgctggccgaccgggagtatgctcacacgcgagagtactcactggagttgctgaaaaagataggtatggatactgaatttcgttctatttggaaagctgttggttggcagaaatttgctgtggtatatgagcctggttctcatttgcttactttgcaatttctgtgcactttgaaagaaatggaagatggaatttccttttgctttttccatgaggagtttacacttacatggaaaggcctaagcacacttcttggttttcacgatacctgtaaaatcgatctccagaaaggaatttctgggttcgagaaaaataggttttgggaagatatttctggtgctccaatttgcaagaaacctaggacgaatgatatctataatcctacacttaggctcatgcacaaatggattgctatgactctatttcctagaggtgatctgagacccataaggggagatgaactaattatcatgtttgccatagttagaaaaatcaaaattgctcctgtaaaatgtatgatacggcaatggttagaaagtatcaagttcttttctcctgttgagtgcacttctctgattactcggatagcaaaagtgctaggggtcgttagcgaccaaattgcttttgtctcagccgctcgtccgcgtattgatgaagtttatctagtgcaagggcatatcttgaaacatggagtagatggatctttaatttactttttcccctgttgtacaaatgaaatcccattgccaaatgcggggtatcatttgtacaactgtcgtgaactaaccatacctctgcagaccatagaagaatctcgtgcaggtggaatatacagggagacgcgcaacatgacaagaaatgaacgagaaagttcatcatcctcaacactcgtgcagatgcatgaggcaggttgggcaccaactggggatgcacctggatag

SEQ ID NO: 85535 - DNA, 474 bp, Oryza sativa
  Clone ID: PAT_MRT4530_84664C.1
gtagtgagtagggtgattacggtgctatgaaatgattctagataagtattattatgagtaacattatgcgccaatcaccggctccgttttctccattcccaaaagccccataggtgtattggatgtcagctgcatgtataagccaaccaagtgaggacacttttgttggatcacctgctaccaattatgagagctcggcgtcaagcaaaggaggagaatttgcagatgattgttttcgttgtacatttgtagccttcaagtatgttgctcacccactttgttttaatggaccccagaacactggtcattaggacaggtttttgtagagacgagccatctcttgttatttcgcattcatgcttccatattcatttttgagagaaccttggagaatggatatgctttgatgattctaaagaaaatataaaaaccgaggaaaaggaaaccatctgagaaaaaaaaaaaaaaaaaaaa

SEQ ID NO: 85536 - DNA, 415 bp, Oryza sativa
  Clone ID: PAT_MRT4530_84665C.1
tacctaatagtagttgaccaaactcacaagccccaccatataccatacggcgcctacggaggccggcaagagggatctagcgccatctcagatctcgccgagtatagattcgaggaggaagactaccctctcatcgactacgtgttgatgaataaatgagcaacaccggcttcggccaacaggatgtagggctattatatgtcagataagggatctgaacttgtataaaaatccatgtctccatctcttttacctcaatctcgcgtataccctggtaccaatgatctccataccatccaaataccgtagtcgcggtaccacccatcgacattttggtgctttgaataaatttaaaagtggttaaataaaaaaaaagaaaaaatacgctagaaggagggcttgaacctccgacctt

SEQ ID NO: 85537 - DNA, 375 bp, Oryza sativa
  Clone ID: PAT_MRT4530_84666C.1
gagacaccaataaaatcactattgctaaatcatggggttcttcttcatctggtcagtgcacacatcaccaactcgatcatcatctcggcacactaaacccatcttccccaacccaacaacaaccaactcgctggccacacattcatccaaccacaattaaccactgataacctacggtcccccacttaacttgccggcaactaagttggtgacgtacgcccagacgtcgctattgacagtttctcccaggtgctcatcgaggttatccagggggcccctgccactgactatggcctggacgaacaagccacccatcgagatcatggcggggctgccggccttgatcttcttcaccttgagcggcgaaaacgcctc

SEQ ID NO: 85538 - DNA, 225 bp, Oryza sativa
  Clone ID: PAT_MRT4530_84667C.1
atggaaatgaggcctcgtgatctcgccgccgtcctggctatgtcctgcctattgctcctcccactactcgtctcctcggtgcccgtgtcgggaatcgtgcacttgagcagccaacaacaacacccgtcatctcgaaacatctatgcagatgtagttaatctttctcatgtccttcaatttctgaattcccggatatggtggcagcggcgacggacgtggaggtga

SEQ ID NO: 85539 - DNA, 315 bp, Oryza sativa
  Clone ID: PAT_MRT4530_84668C.1
atggacgatctggcggcggcgctggcgcgcggcgagggagcgtggacggaggagcagcacgcggcgttcctcgaccgcatggagctctccttcgtgcagcaggagctcgccgccgtcgccgtcagcgacgagcggcgggcgtcgcggaggctctgccgccggcccgcgcctccgccggcgcccgcagccgcaggtcgctgcggccagcaccagctctcgctctcgctcgaccggcccctccccgacagcgccgtcgagtccaaccgcgccgcgccttcctcccgtcctgccgcccgcggccgcggcaccggatga

SEQ ID NO: 85540 - DNA, 744 bp, Oryza sativa
  unsure (1)..(744): unsure at all n locations
  Clone ID: PAT_MRT4530_84669C.1
cccacgcgtccgctggcttgccattctcatagcttgccagtttctgatgagccaagggagctctgtgcgtcgtcagctctccagcccgggacagtgatgagggcaaggagccatgcttgtcaggttaggcgtcgttgttgtagcctccgtcgcagctttaactcttaagagagccaacagtggcaacagagatggccaagcaaggaaaggaaaagacaaaactcgctactctgaacatggggagaaagaagaagagaaggaagaggttaaaacaatcagcggcataatcaattcagctctttcagatgatgacgacatgctctccgagatcgagagcctcctatcaggggagattgacatccccctaccaagtgacaggtttgacgtcaaagaacgctcttggtacaacagtgttaactccgagctggagaggctgcgtggacttgtgcgtgagctggaggagagggaagtgaagcttgagggagagctgctggagtactatggcctcaaggaacaggagactgatgttgtagagctacacagacagctcaagatcaagatggtggagatcgacatgctcaaaatgaccatcaactcgctgcaagaggagaggaagaagcttcaggatgacgttatccatgcatcgacaccttccctccgctcaccaacttcgccccgacccgngcccttttcccgcctcgagttttctccgcccctggacccagggcaaaacccgcaaaccct

SEQ ID NO: 85541 - DNA, 414 bp, Oryza sativa
  Clone ID: PAT_MRT4530_8466C.1
gctgatccaagcagcggcggtggcatgcatgcgtccaagttgttttcctgacttgcttcgatggtttcctcaaggcaaattaaagggaaaatgaatcattcagtcagtgaccctgttagaaggcaaacaacaacagctttgtttaatgggctgaggtgatgtatgatcatatcatatcatatcaaacacttaatactattactctatagtctatagagctagcagatctttgatctagtgtgtgtggtgttgcttgacagattagctctcttttttcttggttcttttttcgttttataatcttctctttttctttatcttgttggtggtggtgagcactttgccatgtggtgtgctccatttctggacctgtttcacacatactttggatgggatggcaaaatcacacatcaa

SEQ ID NO: 85542 - DNA, 591 bp, Oryza sativa
  Clone ID: PAT_MRT4530_84670C.1
acgagcgaacggcgtgatgacgctgctcgcgcgctcaccctgctcgccctcaggagacggcggcgagctcatcgacggcggcggcgacaggctcggcagcggcggtggcgacaggctcgggcgacaacggcagactccacggcggcgatggctcgagcgacggtggaaggctccagggcggcggatccgacgatggggagggctgcgctgacggaagacggctcgggcgacggtggcgacaagctcggaagtggcggcgtcgaggggctcggcggcactggatcctgtggcggggaaggcggcggcggcggatccgacgatggggagggctgcgccgacggatccggcggcggcccggccgtccgtcgtcgtccccgaagctctcggcgtcgtcgtcgtctcgccgagccatggctgctccgcgcgaaggtcgacgccatcacccgccgcatcgcgtcccttcgcgaccgcagctcggtggcggagatagaggtgagggcagaggcagcggcggccatggttgttgcaaacggcgtcgtcagtggtggcaaacggcgtccatcccatccctccctcgtcccttcaaccaaa

SEQ ID NO: 85543 - DNA, 588 bp, Oryza sativa
  Clone ID: PAT_MRT4530_84671C.1
ttatttggttgaagggatgagggagggatttgatggacgccgtttgccaccactgaagacgccgttggcaacaactatggccgccgccgcctctgccctcacctccatctccgccaccgagctgcggtcgcgaagggacgcgatgcggcgggtgatggcgtcgaccttcgggccgacgaagggacgtgaagctatgggacgatgacgccaagagcttcggggacgatgacggacggtcgggccgccgccggatccgtcggcgcagccctccctatcgtcggatccgccgccgccgccttccccaccacaggatccggtgccgccgagcccctcaacgccgccgctgccgagcttgtctccaccgtcgccgccgagcctgccgccgtcgcccgagccgtcttccgtcggcgcagccctccccatcgttggatccgccgccgtggagccttccgccgtcgcccgagccatcttccgccgcccgagccctccccatcgttagatccagcgccgccgatttccccaccacaagatccggtgttaccgagcctgtggcttaccgccgccgtggagcctgccgctgtcacctga

SEQ ID NO: 85544 - DNA, 225 bp, Oryza sativa
  Clone ID: PAT_MRT4530_84672C.1
atggagggggatctggagaagatgatcgatcatagagtcatcaagttcttcatacaatctaaccttctaaggagcaacctcccgttctacaagagggatcagataaaattggatagggcaaccgaagctctcataatgcagcgcacgactaaaaaagtcgagtctttcagcaagagaaaccgcggggagaccctaactccacagcgcaacaacgatacgaactga

SEQ ID NO: 85545 - DNA, 183 bp, Oryza sativa
  Clone ID: PAT_MRT4530_84673C.1
atggacgacgctggcttcatggcctccttctccatacaagccatcagggaggacggtgtctggtgtgagtcttccttcaaggctggtgccaagtctgatactcgtggtatcatggctggtatgcacagatatcaggcatggtacctcgggcaccgataccatcttataaccattggtgcctga

SEQ ID NO: 85546 - DNA, 179 bp, Oryza sativa
  unsure (1)..(179): unsure at all n locations
  Clone ID: PAT_MRT4530_84674C.1
gatgccattcgaacattacccgccctggaagccaatccattcgaacaacatatacccccgggcgaaanaacgaacgatttccaccattcttttccccggtggccctcctccaccncnaacacatggacatcggatttcctancgcccacacaaatgggcaaatacacttcccggccaaa

SEQ ID NO: 85547 - DNA, 444 bp, Oryza sativa
  Clone ID: PAT_MRT4530_84675C.1
atggagagagcaagggaggaagacgaagtcagcggcggcggtggcggcgtggtggcgcggtacagcctcgacgtgagcgacggctgcggcgggcggcacagcgcgctgctggacgagtacgagaggatggcgttcgaggcgcagctcaaccgcgccatcgtcctgcggcggtgctactccgagccgagcccggcaaggttccccgtcgcgccgccgcagcgtggcggcgccgagggagacggctgcacggcgccgtggaggtcctgccggctccacgtcgtcgaggcggtgttcctccggtggctcgaggcggtgaagccggtgctttgctggctcaggagcgcgtgggagcagcgccgccgacggatggagcgcgccgccgccgcgccgcgaggcccgccggccacggtgccgcgggtgcagctcatggactacttctgttaa

SEQ ID NO: 85548 - DNA, 411 bp, Oryza sativa
  unsure (1)..(411): unsure at all n locations
  Clone ID: PAT_MRT4530_84676C.1
cggaacgctggntcgggcagagcttgtcgcgtcccttctgtctccgtcttcctcactcgcagatagatagatagatagagngagagagagagagagagagagaganagaganagagagagagagagagagagagagagcagtgttgggcgatggctaaaccagctccgctgctgtcttcttctcgcggcggtgtgcctagtggccgccgcctccgnnggcggtgccgatgcggngganangaangtgacgacggtcggcgtctatgagctcaggaagggagatttctccatgcagggtacaccaattggggatcggtcatcatgtncgtacgtgtcttcctgaactccagagggaaattggacgatgtngttcttgggatatggacaccattgctgaatatgttaattact

SEQ ID NO: 85549 - DNA, 666 bp, Oryza sativa
  Clone ID: PAT_MRT4530_84677C.1
gagagggcaaaacaaagcgaaggctccattcattcactccatctcctcgcgtccctccccggctgcccccgccgcaatccgcattcgctaggggttgggttgggagatggcgtcggcggcggcgacggcgagggggccgcggtacgcgccgccagatccgacgctgcccaagccgtggagggggctcatcgacggcaacaccgggtacctctacttctggaacccggagaccaaggccgtgcagtacgaccgccccacggcgccgccgccctcctcccccccggcgcagcagcctccggagaggcctaggaacagcgatcctgctgagtcgcaggcgcaggctggagcgagccgaacgcagaatgctgctcctgctgatgatagggcaaggaatgatcatttgaatgatcatttcgagcggcgcacggaagcggcggtaagtcatgcgcagaacgtgcctttcactgagcaaaatactaggagcaaccattcttcgcagccgtgctctgcagctggagtataccctgcacagattgtattttcagaggctgccagttaagacctctccttcaccagaagtcaatttgtctaagcttgtgatcactttttgtcaaatactatgtttcttttccatctcattttttatcatttctctctttttctttc

SEQ ID NO: 85550 - DNA, 480 bp, Oryza sativa
  Clone ID: PAT_MRT4530_84678C.1
ttaaatttggaaaaagtacgaattacccctctgaactatcacggtcgtccgaattacccccctgaaccacaaaaccggacattcttcacccccaactatgcaaaccggacgaattacccccctggacccaatccacggtggttttgatctacgtcgcagtccagacagcggaggcagcggcgcggcgaaggaggcagcggcgaggcgaggcgaggcggcgcggcggcgaggcgagcgcggcggcggagaggcgagcgcggtggcggcggcggaggcagcgagcgcggcggaggaggcagcgtgaggcgaggcgaggcaaggcggcggcgacggcgaggcgaggcaaggcggaggaggcgagcggcagcggtggcgaggcggttggcgaggggacaacgtcgccgcgaggaggcgagcgcggcggcggaagaggcgaggcagcagcggcggcgaggcagttggtaggtgcgactggtggcg

SEQ ID NO: 85551 - DNA, 986 bp, Oryza sativa
  Clone ID: PAT_MRT4530_84679C.1
gcacgagggtacttggcgcgcatgtgacccgcgcgaacgcacgcgcctcgtcgtcgtcgtctcgtcccatgcaaccgcccgtgacgccggcgagctcggccgccggcgcgcccccgcccccaccaccacccaccaccacctgttccacctcctgccgcttcgtcttgcccccgacgaggaggcatctgctcgcgtcgtccgcctcctccctgctcctcgccgcccgccgccgccgccgcggcgccccgcgcggcgagcagcgaggacgacgacgccgtcaccagctacgacccggtgacagcggcggagcgcgcggcgagcgcgtcggtgtcgcggcgcgtcggggaggcggtgcggctgctggacctggggcgcgacctgcaggcgcgcggcgagttcccggcggcgctggcgtcgttcacggcggtggcgacggagtacggggacctgtcgctgtcggggtacgcccgcgtggggcgggcgctggtgctgtacgaggtgggcgaccgcgacgacgccatcgcggagatggaggacgcgtcggtggcgctgcggggttacccggagatccacgcggcgctggcggcggcgctctacgccgacaagcacgcggcgctgctcgccgagaaccagttcgccatcgccacgctgctggacccgcactacaccgacctcgcctacgtcagggacaccaagcactggccccccagcctcgtcgactcgctccgccacttcatcaccctctcctgatcattgcttgatcaattgagctttgatttgattaattaatcaagctatagctgttcgtaatccacaccacaatttgatggactcttatcgtatggttttggggttcatctaaattatgtatctatacgtgaaattgttcatgtctgaacgatttttgaacattggatagtgggtatgtataatgggcaggaaatgaattactagagaggagaatcaaagagttttggtgtttggtt

SEQ ID NO: 85552 - DNA, 2476 bp, Oryza sativa
  Clone ID: PAT_MRT4530_8467C.1
tcacacctctgggtgatcctgggcatcgcctccacccgcttcagctgccgcgtcctcttcttcgcaccggtctgccgtctctgccttcgccagttgctccaaaaggcgcgccttggcagtggaccggccgtccttctgccagaactgttttcgccacgcgcgaagagcgggcgaaatgttctgcgcactgatctcccaatcccccttcgcatagttagggaactcgtcgacgtgctcgcagtcgaactgttgcataaggcccatggtaaaggccgccgatacgcgcgcacaacaatcaccgtacgcagtggcgcagtccgaaacagaaccaccagcctgttgggtccactcggagaagtcgaaggccgaggcatcttcgacagggatccctcgcacctttgcacccatgtcagtaagggcgaggcggagagtttggcacgccgttctcgcggattcggtggttttcgccatctcccgcaaaaaccgctgcgactcctccacagcgctcgcttcagccttgctgaccttcaggcgaagagcctccatcttcggctcagtgaggttataataatcggtcagcacggcggaatgagccttttctttctccagctcggccttgaggcgatcaacctcagccctcgcctcttttcctttctccaactcggattgaaggcgcttgacttcagctttcgcctctttgagggtgttggcgagggcctccacttccaagttcttgcagctaatttcgtcatccttggcccgaagacggttcttaaatccgtcaagacgggcccgcgcggttcgctctgtcgaacagtgagccgcaagaatccgaaccgccaagcaggggcgaagtgggggcgccacaagcgaatactccgaggcagatgcttcggcggccgcacccttccccttcgtcttgaccaacggcgaaacagctggttcatgcaaagggctcccgaagaccctcgccgcagccgtcacgatacgctctgcggaggctgaagccccggcggcggcgctaccgcctgccccatcagcgccgagtgaaagaatgggggtggtcgaaaggtccaggctgcggccagcgggcgaagtcggagtctcgtcagaggactcgtcgtcgctgaaaatgcgagcggcatcgacgagtcctttctttttggagatctttttgaccggacctcccttcgctgccttgcctgccgaaaacgcaactagcagcttcgccccctccaaatcctggacttggagtaagagtatagccaggggtgtcgacgcggttttcaacagcctcatccgcggccttttcagccacggcctccacctcctcttcctcctctccttcctcctcgccgtcatgctcttcggcatcgtcctcgtcgtcggcgtcggagtctgacgaagcaagaactcttcgcttcctaggagcaagctttacttgtccgcgcattcgctttcgcgaaggtccaacatcgtcgtcggctttgtgggggttcgcccggggaggtaattcgctgttgtaaactcggttcgcccgcccagccgcttgtcgtgtcaacagatggctaaacttgacgaccgacacgtcgccgatcatcctgcgggcttcggcttcagcctggtcgagagtcaacgtgttcgttccctcaaggagaaccaagttcggcaaaccgtcaacctcttcgccttgatcaaccgtaacttgccatgactgggagaggggaaagatgcgaagcatacagaattcctccaccaagtcgcggcagctaaggcgggagcaaaccttgcgcagcagaacgaaccgcgcctccatagcgccgttcacggcgatcttgggtttccggttcgacgcaatcgccctacgccggcaccggagggctttcgccgagtcggaaccagcctctaaagggatggtgtgatagaaccacctcgccatccaatggcggtcccacttcgacatggcagcgttcaccagccagagatcggaccgctcggggcgaacattaaagttcacgcttccgaacactgtcttctttgttccagccggagtaatcaccgtcttcgagttcacggtggcgaaaaatatggcgccgaagagctcggcgctaggctcaaacctggaagtccggcacgcccaatcgaagatggaaatccgaactagcgccgacgggctcagctgtggaagctccacctggaaaaggcgaaggatttccggcaacaacacgttgcacggaaaccgtagccccgcctcaaaaaagacggcgaacactaccgtccgattgttgacaggcttcggcaccacggctttccctggggcgaaagcctgcccatcaaccaacgccccagagctgaccaacttcgccagctcgacgtcgtccacgagagaaacccccaaaaatgcggtgctgtcatcattgacccggccaggatccggccctttcgccgaagcagggtttggcttgcgaggggccat

SEQ ID NO: 85553 - DNA, 1845 bp, Oryza sativa
  Clone ID: PAT_MRT4530_84680C.1
atggagatcgccggcggcggcatggcggcggcggcggtgcagagggcggtgaggtgcctcggcagaggtgtcgacatggcgggcgacctgaggctgaagcactgcaaggatgagggaggttgtctcgttgccaggagcggcgagaaggcggcggcggtcgccgtgccgggcgtcggcgtcgtcgccggcgtgccggccgacgtgaagttcggcaagggcgaccgcatcaggttcaagtccgacgtgctcgagttcaacaagatgtcggatctgttcaaccaccggagctcgctgccggggaagatcccgtcgggcctcttcaactcgtgcttcgacttcggcagcgactcctgggccagcgacgccggcgacaccaggtgcttggccttcgacggctacttcatctccctcctcgacctccgcctcgactgccgcccgctcgccctcgctggccacgtcgtcgccgacgtgccggcggcgtgggacccatcggccattgcaagtttcatcgagaagtacgggacgcacatcatcgtcggattgagcatgggcggccaggatgtggtgtacgtgaagcaggacaagtcgtcgccgctgtcgccgtccgtgatcaaggagcacttggacaagcttggcgaccagctcttcactggcacatgcactcttcccccttcacactgcaagtccagagaccacaagttcaaggtccctgaggcattcaatgtgtttgatgcccaaatgacacggcagaggattgaaggaatgactgctccaatgtcatgcaaagagggtgtgacagtgatctactccaagaggggaggagacacggcggcgagcaaccactcggagtggctgccgacggtgccgttaatgccggacgccatcaacttcaagctcgtgcccatcacatcccttctcaagggagtagctggcgtgggcttcctttctcatgccataaacctctatttgagatacaaacctccagtagcagagttgaggtacttcctggacttccagcaccacagattgtgggccccggtgctcagtgacctacccctcggactgtgctccaaccggcaaggcactaaccctgctctacacttcagccttgtgattgttccaaaactgccaatcactgggatgagattgcaccttgaaggcaagaagaacaaccggttaggcatccacctgcagcacctgtcaacgacgccgacgttcatcgccggaggttggtcaggccggccgccggcgtggcgagggtcggaggcgatcgccgacgagcggtactacgagccggtccagcggcggatgttcgcccacgtctgcaccgtgccggtgaagcacgacccgcggtggctcgccgccggcgacggcggcggcggccggccggcggcgtacgtcgtgtccggcgcgcagctgcacgtcaaggcgcacgagtccaccagcgtcctccacctcaggctcctctacaccgagctgccggggcacagcgtggtgcagtcgagatgggcgcacggcggcggcggcggcggcgcggcgaggatgtccggcgtcaaggggagcttcctgtcgatgtcattcgcgtcgatggcggcggcggcggcggagaaagagcagcagaagcaggcggcggcgcggctcaacgtggactccggcgtgttcgccggagggccgccggcgccggtgggggcgcagcggctgctcaagttcgtggagacgtcgcaggtgaccatggggccgcaggactgtcccggctactggctggtcaccggagcaaagctcgacgtcgacaaggggaggatctcgctgcacgtcaagttctccctgcttgctccggtttcttga

SEQ ID NO: 85554 - DNA, 3424 bp, Oryza sativa
  Clone ID: PAT_MRT4530_84681C.1
agccaaactagtatctggatcatagctactcatatttactatctcatatctcgcaacaacctcaggggggggggccaagtctccccccaagcttggcttttgcacagggtccttgataggatttaatccctgaatctcccccatctgcacatcaagggtgtccattctcctagtgatttcacccaagtcccaacgagaggaacttgagcgccattcacttggggatggaggcacaccacttgatttggagggttggttgtccccccagtggatgtcatgaggcgcatgccaccggtcctcactagcgcttgcccaggttgagactctgatgctatggcgtgcagcttgggtccatccaggtgcatccccagttggtgcccaacctgcctcatacatctgcacaggtgtcgaggatgatgaacttccttgttcgttccttgtcatgttgcgcgtctccctgtatgttccacctgcaagagattcttctatggtcatggcaaacatgataattaattcatctcccctaatggatctcagatcacttctaggaaacaaagtcatagcaatccatttgtgcatgagcctaagtgtaggattatgaatatcatttgttctagttttcttgcaaattggagcaccagaaatatcttcccaaaacctatttttctcgaacccagaaattcctttttggagatcggttttacaggaatcgtgaaaaccaagaagtgtactcaaacctttccatgtgagcgtgaactccttacggaaaaagtgaaaagaaataccatcttctatttctttcaaagtgcatagaaattgcaaagtaagcaaacgagaaccaggctcatctaccacagcaaatctctgccaaccaatagctttccaaatagaacgaaattcaacatccatacctatttttttcagcaactccggtgagtattctcgcatgtgagcatacttctggtcgctcagcatgtagtaggcttgtctctcccgatcactgacaaggtcgaggtcatcgtcgctcaggagttgttgcggagcgtcggcgtcttccatcgagacatcggctgatgagcaagtactagactcgtcatgacgacttgatggagagcctgaccccttgaatagacgagacagtcgcctcctcataccgccggttagtttcaccaaagcaacttgtatgtatgcaactaaagatttgaacttgaggaaaactatcaaagcatgaatgaacttgaaagcaaactcctttcgattcagtgcgcggattttccacccgtctccggaggtgatggagcaggcgcctttggcttttccttccacacgttatttgatttcggtgcggaaaacagcttcttctgagccggctgctctaacttcttggccggtacaggtgattttaccggtgtcctccaataacggttcctgggcattgttttttccttttccaggaagtttagattctgaccatggagcattgttccgtccttggttgaaactcaaacttttcctccttcccgttgatatggaaacggatactcccagttcccacgtcaatgttggctcctgcggtgctaaggaatggacgccctaggatgagcggcgtctccttccccgtgtccatgtctagcaccacaaaatcaaccgggatgaagaaatcccgtatcttgactggcacatcctccgctatccccgccgggtaacggactaacgagtcagccagttggaggcgcatcggtgttggtgccaacaccgtgaagttgagtttgtcaaagacatcctttggcatgacgctgacgctagctccaaggtcgcacaaggcctggtcgaattgttgtgccccgatcgagcaggtgatcatgggacaccccggatctttcttcttctccgggaacttgttgagtatgacgttgctgcagtgttccgtcagcttgaccacctccgttgttgggagcggtctcttgttgttgagtatgtccttgagataacgggcgtatgttggtacttgcatagcgtccaacaacggcacgttgatgtggatcttttggattactcccctcgttgtgatcgccttaacattttcaatggaggagtcaggttgccctgaaatcctcccggattcatttgcagggactaaagatgccaactgagttaactgggtttctgtcatcttattcaagagttggttagagaagttaccgttattatttcctccttcataatacgggcgcggttggttccacccctgacctccttgtggacgatacccgttgttgttgcccatgtacatcgcctcctcatgggtttctgggcagtcattcccagaatgacccatgccgccgcagacctcacacgtgacgtgtgactccaaggccttgacgttgccttgtggccgtttctcatggtcgtccaagcgtttcatgaggaggtccagcttggcagcaagtaactccgtctccttgacggtgtgcatgcctcgctgacgggtctggagtcgttcctcgctccaacccatattggagaccatcttctctataagtttaacggctccttgaaccgttttagagaagaatgctcctccagctgccacgtccaggtgatcgcgggacatcggggtgagcccattgtaaaagttctgcaggatcagccagtcgtccatcttatgatgaggacaggcggccacgtactcctgtagtcgttcccatgcttcaggaatggactcgtcccttgtctgctggaaactggaaattcgtccacgaagagcgttggttttgcccatcgggaagaattccttgatggtgtacgtgctacatatctccaggaattgttgcagatgagcgttggcatcctcattaggcttgccacagaacgggctagtctgcgccatcgtgatgaggctggacttcaagtcgaaatccatatctcctatgttgacttgcggcccgacggccatattgtcagtagagggagcaacgaactcacgagattcttgctggccataatcttgaaagttggtggcgctggtacggctggtttctctgttggtagagttttctacggagcaacgactcgcggcctgacgctctggaagaaagcttctagattttctttggagttttccggcaggttgaaaccagtcatgcactaccctgttttcacaacaaaaagtgaaaacaaacaaggttagcccgtactgagctgtcaccataagcggcccacctatcatccgcaatatataaccccaaataatggtatcccgtaatctagacaccacgtctaaactgccagatactactctaatatcatcgtcatgacatagagtaattgcataggcaaagactatacccgcaccaaagcatctcacagataagctagcagtatattcagcataacatgaacataatgtaaagtaggtactcat

SEQ ID NO: 85555 - DNA, 2301 bp, Oryza sativa
  Clone ID: PAT_MRT4530_84682C.1
ccacgacgccgacgtcggcgacaccaggagcgcgccggaagacgacaaagacctgaagacgtctgttctccgccgccgacaacatggagatgctcaacatggcgttcctcaagggcagggaggaggccaacaagttggtgcccaccaacaacaccctcttcgccggcttcgacggcgcctcgctgctcaagacggagccggcggtggatgagcccacgttaatgttcggacgaagcggcggcagcggcaggggccggaagaacaggcacggcgaggaggacgacctggaggcggagaccggcaggagcagcaagctgatggtgccaccgcaagaggacaccgcggccgccagcgagatgttcgacgaaataatgttcaacgggtacgaggtgatcatgaaagggatggaggagctgcgcgtcgccatggacagcgaggccgagaagaaggcccggaacggcggcggggccggccggagggcggcgcgcgcaaaggcgggggtggtcgacctacacaccctgctcatccactgcgcgcaggcggtggcgacgagcgaccggcggagcgccaccgagctgctgaagcagatcaagcagaactcgtcggcgagaggggacgcgacgcagaggctggcgtgctgcttcgccgaggggctggaggcgcggctggccggcacggggagccaggtgtacaagtcgctcgttgcgaagtgcacgtcgacggtggacttcctcaaggcgtacaagctgttcgcggggctgctgcatcaagaaggtgagcttcatcttctccaacaagaccatcctggacgccgtggcggggaagcgcaagctgacatcgtggactacggcctcagctacggattccagtggccaggtctgttcaagtgtctgtcggagagggaaggcgggccgccggaggtgaggattacgggcatcgacttcccgcagccggggttccggccagccgaccagatcgaggagacaggccggcggctgagcaactgcgcgcgccaattcggcgtgccattcaggttccaagccattgctgcaaagtgggagacggtccgccgcgaggacctccacctcgaccgagaagaagaagaagaagaagaagaagaggtgctcgtggtgaactgcctccacttcttgaacgccctgcaggacgagagcgtggttgtggacagcccgagccccagagacatggtgctcaacaacatccgcgacatgaggcctcacgtgttcgtccagtgcgtcgtcaatggcgcgtacggcgcgcccttcttcctgacgcgcttcagggagacgctcttcttctactcgtcgcagttcgacatgctggacgccaccatcccgcgcgacaacgacgagcggctgctcatcgagcgagaacttcatttttttttttgctactatagtttaggcctgtgtgctcttctgtttgctgacaatctactatagtgccgaaaccctaaaactcatcgtagccggcttgctcctggaagaactcctcatcagcaggatccgcttcatcttcttcagcaactgagggggggggatatttatatagagcaaggtttgttaacctctgcagagggggtacactttacccacacgacattacaaacccgggtcacccagcccgtggggatcaaccacgtcgggagacctccaagctttcatgacaaggcatttcgaaagccgacacaggtttaccatatgccgacgagaggggtcccagaccaacaacagttttacccaagttgtttttcagattttaagtttgaaggcgtccgtcgatactcgcacagggtgcacgaatatcgagacgcaactagatggttacaaggggacatggctgagctggcgccgacgtggcgcctacgtggctgccacgtgggccggcgggaggtagacgacgacgccggccggaacggacgggcggacaacagcggcgagcggcggagcgaaccacggcgatacaggcgaaagcgagcacaccgggtggttgcacgagacgaggggagacgagccaacggctcggattcgcctgaggaagcttgacggcggcaaatcgcggcggcggcaactggcggggagggaagagggaaacggcgacgaggtcacgaggggccgattcccggcggtgagagcatctacgcggctacgggaatccgatgctagcgtcggattgggcggagctacgccgagcgaggctggcgacgagcgggtgctacggagctcgagcggcgacggcggcgagcacacggcgagcgacggcaacggtcggggcggcgccggc

SEQ ID NO: 85556 - DNA, 2603 bp, Oryza sativa
  Clone ID: PAT_MRT4530_84683C.1
atggaagccgttgtcaggttgatcgacgtcgcccatagcaagcttcaagtgctcggaactttgtttcgacggatacacttgggcatgccggcggccatcgcaatggacctcttcggcgacccggccaccgtaggagtcagccccaccgagatcctcgaggaggcccgccgcgagatctcactgagcggcgctcgccacgggaagaccatgcacgtcttcgctcgctacgtcgtcgcgcacctccacgtccagcaagatgacccgggcacccactaccaggacgccatccgcttcatcgataaaggcgctggagaagatagaagcattactgaaccaaccacgcaaccgaattcattgctttttttttcttttcccatggatttcatcacggttgagcgtgaggcgaaacttcggcggccgcgagatccatctgaccatagtaccagttgtggcggcgacgacgacagcccaatcagccatctcagcgacgatgttctcgtccacgtcctcggcttcctgcccacagccaccgatctgatgcgcgcatgcgcggtctcgcggtggtggtgccgcctcggggcgcgtgtccctctcctccgcttcctctgcatcgaccgtgcgtttgatcggcaggagacactcgatcggttcgtcgctttcatcaacaatgttcttacccggcgtgcagctggccaatctgatgccggtgtcgaggagctgaccatctccctaaaatctggcatgtcgtccgtcgacgtcgccgaagtcgatgcttggattcggtatggtatgcagcatgtgtcgaacactttcaccttggaacttaatattccattgaggtcaggcaacaacagcaaccaccgctacctcgacgacgacgaggacgacgacgacgacaacaacggcatgatcttggctgagcttcctagctcaccaagattgaagagcgtgatgttgtcgttaagcaatgctcgtctccggctccccaccgccgcagcgtttgattctctcgtggatctctcgctcgagaatgtgcggcttgaggacaacagcatccacctcctgaatcgcctcttgtcaccagcatgctgcccgcgtttgcagaggctacgcttcaataaactgacagtgggtcgacagatcaagactcccaggctccgtgttttccacatgagatacacctcgctcatagggaagttgacaatctccgcgccgaggctagaggagttcatactcccctacacggggagggtttccgtaatcaacgtcgaggatatgccgtgtgtccgggtcctcgagattgatctgtggttactaggaggatctcaatatggtggctacataaacaaagataggattcgacttctacagtgttgcagattccttcaatttctcactatacgcctggtgcatgcatgtgagatttatttgataccaaagttcgtgatgttttcaactccaggcttaacacaagctggagaggttgtgcagaaagacaacggcaatgcagaggttgagttgatgaaagatgtaccggaacttcctcacgttacatctctatcattacgagttattgaaatgaacgagatgtatgacattgctagcgtgttatgtgttattggtcggtgcaaatttctcaaacatctcgagcttgacatcaagatggcacattgtgaaggacctacagaggtcagcaatcaaaatcagaaggattaccatatcatctcgttagagcatcttcaggagataaagatcacctgctcttacatgcgaaaccatgaagttggactgatcaaattcttacatacaagcgcaccggccttgaagaagatgaggatagcgttcatatcgggctttatgtgttcccaaagcttagacatcttctttatgcgttctcgaagcttagaaatcctgaaagaactcctcatcagcaggatctgcttcatcttcttcagcaactgggggggggattatttatatagagcaaggatgagtacgggagtactcagcaagccaagggaaaatagtttgttaacctctgcagagggggtacactttacccacacgacattactaacccggatcacccagcccgcatttccaaagccgacacaggtttaccatatgccgacgagaggggtcccagaccaacaacaggttaggtcctagaccatactgtgccaggaagcctaggggtcctccccgacaccacctcggcgaatccacatgtctctcggcatcaaggctcccctgataagctagttactcagccaggggtgtcccattccacccatgtggtcgtacttgtcttatgattggatgaaattccaaggaaacggtccttaagtgcaagagcgggaaaccgtacacccgattttaagtttgaaggcgaccgtcgatactcgtgcagagtgcacgatttccgaggcgcaactgggtggttacaagggaacatggtggcttgccttgctcgagatcttgagcttgatcctcgaaatccttgcactgcgggtcttcgggctccgaaactacacgcaaaacgggacaactcaacaaacggtgaaaataaagccctattaatgacctctaagcgtgccattaga

SEQ ID NO: 85557 - DNA, 1552 bp, Oryza sativa
  Clone ID: PAT_MRT4530_84684C.1
aaggagcggaccggccgagctaaatgggccggccggcccaaggcagcccaagtgcgcgcgcgcgggaggggaggagagagagggccggtggaccgggctcaccgtgcgcggtcccggggtgggggagggacgcggtgcacgcgcgcggtctgcggaggaacggatgcggcgggcccacgcgcagcctcacggctcgcggtggaccgcgcgcgcgaggggcggagggaagcggctgaccggggtcggcccgtcccgacctcggctgggccggcgccgacgtggcgcctacgtggctgccacgcgggccggcgggaggtagacgacgacgcctgccggaacggacggcggtcgatagcggcgagcgacggagcaaaccacggcgatacaggcaaaagcgagcacaccgggtggttgcacgtgacgaggggagacgagccaacggctcggattcgccggagggagcttgaaggcggcgaatcgcggcggcggcaaccggcggcgggaaaaggggaaaacggcgacgaggtcacgaggggccaattcccggtggtgagagcatctacgcggccacgggaatccgatgctagcgtcggattgggcggagctacgccgagcgaggctggcgacgagcgggtgctacggagctcgagcggtgacggcggcgagcacacggcgagcgacgacaaaggaagaggaaggagagggcgcgcccggagtccccttccgcgtcctggctcgtgccggctcctccgacacgcgcaacgacgaacggcgacggcgaacagagcacgggggcggcggcaatggcgcggaggcgaatgagagaggaagggaaagggggaggctagggtttaaatgggcggcaatgtcggtttgggaaccgacttagggcggtcaaggcgcgagctggcgctcggcgcttgcgtccaaatcggcgacagggcggtgacgctggcgagagggaaaaaggaggataaaggggggagagaaaagggggggctcgcccctttcttctttgggaaaaggaggagggagtggaggcgtcgcggcagagggaggagggaggctctgcctccgtcccttggcggcttgcgcgcggagaggcggggccgaggcgatgacgacagcgatgacggctgggcggtttggagcggcgctgacgacggcggcgaccaggcggtcggccaccacggcacgcgcgcgcggcttgcaacgggaggcgcggcggatttgagcggcgcggcttgggcacgcacgctggcttgcggggccgggcggctgcgcggctgcagggcggcagggcagcggggccggacggcgcggacggcgcagacggcgcggctctcgcgcatgcgcgcgcgacgcgcgggcagagcggagggaggggcgctgggcgtggctctcgcacacgcgcgcgcggcgcgcgggcagagcggaggggaagggggagagagagagagcgcgccgggagggagggggagagggagatgggccgagcgagattcggcccatcgaaccctggggtggcaaaatagacttttgcggaggaatt

SEQ ID NO: 85558 - DNA, 1502 bp, Oryza sativa
  Clone ID: PAT_MRT4530_84685C.1
ttaacctctgtagagggggtacactttacccacacgacattactaactcggatcacccagcccgcattttgaaagccgacacaggtttaccatatgccaacgagaggggtcccagaccaacaacaggttaggtcccagaccatactgtgccaggaagcccaggggtcctccccgacaccaccccggcgaatccacatgtctctcggcatcaaggctcccctgataagctagttactcagccaggggtgtcccattccacccatgtggtcgtacttgtcttatgttcggatgaaattccaaggaaacggtccttaggtgcaagagcgggaaatcgtacacccgattttaagtttgaaggcgtccgtcgatactcgcgcagggtgcacgaatatcgagacgcaactagatggttacaaggggacatggtggcttgccttgctcgagatcttgagcttgatcctcgaaatcctcgcactgcgggtcttcgggctccgaaactacacgcgaaacgggacaactcaacaaacggcgaaaataaagccctattaatgacctctaagcgtgccattagatagatctcgagatttgaggaattttggaagttgaacggagtcaatcggatgtacgattgagaagatattgaatttctaagattattggattttttatctcgcgtggtcccgagtgggacccgcttgtcggtgacacggttcaccgtgcggagcgagcacgcggcgcgcgggctcgcggtggaccgcgcacgcgagcagggcagaggggagcggcggaccggggccagcttgacccggtcgcggccgaggtggcgccgacgtggcgccttcgtggcagccacgcgggccggcgggaggaggaagaaggggaggccaagatggacggcggacggcggccgtgttcaccggagcaagcacgacggatttggtcttcgaggagcacaccagagtgaagagggcatcgagaaggagcgagccaacggctcggattcgtcgtacggagttcgacggcggtggaattcgatggcggcaaccggcggcgagagaaaggggaaatcgccgaggggcgacgaggactcaattaaaggcggcgggagcatctccggtgttcaaggaactcatttccggggtcggatggggctgagcggcgccgtggaggtccggcgacgagatgcggcctccgggggtgggcggcaatggcggcggggccatgccgggtggcggcggtccttagggcggcgtctacgcgcgttcggcagggctaccaagctaccacgcaatctagagggggcgagggtgagcggggaaggggaacgggagggaggcactaccgagccaggacggcgcggtgacgagcagccaacggcgcgggagcgagctctccgacgtagggccggggaagggaagaagatgggcgcccagagtcccgcgtcacgcgtccacgcacgcaccggctcccccggtgctcggcgacggacggcgacggcgtga

SEQ ID NO: 85559 - DNA, 729 bp, Oryza sativa
  unsure (1)..(729): unsure at all n locations
  Clone ID: PAT_MRT4530_84686C.1
ccggccgggtttgcatagtcttaatttacaacactttttggttgcagccggtttggcaaatttgttgagatacaatttgatgcaaatggtagaatatctggagctgctattaggacctatcttttggaaaggtcccgtgttgtgcagattaatgatcctgaaagaaattttcattgcttttatcagttatgtgcgtctggaaaggtacctctaccaaccattgctattccatatttggctcactattatgtgcataattgtgtgagttccattactgcacggtttgattatgggctatctgtgaagtcagcattgaatgttgaagaatatgcttagagttaaattatactgataccctgttggcccgttccaatgtagacctcattcatttcgcccatttgagcagttattggttcagctgggatgtgattacgatgacacccatttctgttatataacttataagaatttgggcctgcaatttattactgaaattagttttattgtcaaaatattttgcatatcagagaagaaattgtgaaagatgtattcattgctgcaagacaataatatatccatttgaacttagttttaaagacaagcactaattgtttttaattgctgttaatgagattatcgtaatccacctcattatcaaagccttagttaagcatggagaacatagtattctagaggttgtatcatctgtttcaattcancctattctat

SEQ ID NO: 85560 - DNA, 732 bp, Oryza sativa
  Clone ID: PAT_MRT4530_84687C.1
atggcttcaaacacagcattaggacagcttaaggctattcagcttcttgatggatcaaattacgttgaatggagaaataatgtgcttattaacttagccatgttggattatgacttagccataagagaggatcctcccgaggaacctcaaccagccgaagaactcaatataattggggaagaatatgataatctcatgtgggcctacaataagaagttagccaactgggagaagtccaacagaatgtgcttaatttatgtcaaggatgccatctctccagaagttattggaggaatcattgactctaatgacattaagacgtatctggcaaacattgaagaaagttttgaatttgcacctgaggctcatgccaatacgcttaaagaggagtggaccatacaagaattgatcttacactccgtggaagaggaagagcgccagaaagctgaaaagcagaagattaaagaccggctcaacctcactaatgcctttgataaaggcaaaaaggtctatcaaggggaatcctctaataagaatagcgagccagagggtgagcagaatcaagaagggatcaaggcctccacttcagctgttccttttaagtacaagtccctactgccacttctgtgcgtcagatggacattggcagagaaattgcacacgcttcacagcgtggaaactcgcaccatccaaacggtagcaaagaggggagtgaacactcagagtaactga

SEQ ID NO: 85561 - DNA, 1083 bp, Oryza sativa
  Clone ID: PAT_MRT4530_84688C.1
atggcggttaaggaccggttcacgggaaaccctgggagacttaccgtgcttaccacaagcgggagtggctgttttactgctttcaactactgctttgaaatgcctgctttaggcaaaagaacccctagcttcctttggttatatcctgcatcatacctcctcttccggacgtggatctgtatgtcaacaattgtcgtttgtgtaccctggctggtcctggacagggatttaatgcacattcagcttagaaattctggtttgagaatttctgggcgtgacaccttggtcctttttacttccatgcaaagaagacattgtggtgctggagctggtacaggggaagcagcagaagtagcagtcgactcatgtgttgctgtagatgaacctgacaaagtcgacgacgatgacgacgacgacgacgcagacccatgcgatggcggcgactccaagacagcatccgcatggcccccctggattggagacggcgcgcgcggagtggtgggtggcgaagcagacgggccacgcggcgtcgacggagtgggagacgagtctgctatccctggtgaggcagacaaagcaggtgacaggggtgcatcccgaggcgctgatgcaggcgagtcgacgtcaggaggcgcgccagttcctgcactcccgccagcaggaggagtgcgcatgaagaagaagggaaatttccgcccggaggcgagcctcagcattaggatgaagagacatgaaaggaaaaacactctcatcaaagataacatccctggaaataaacacacattgtttggatctaaactgaagtttgcgagagttgtagggtcggagatggagccaacatgcacacccaaaggtgcggagagaggcatagtcagggttttgttgaaacagctttgtgagaggtgggattccatcattgacaggagtaggcagtcgattgatgagataagcggcagtgagaaatgcctcatcccagaatttcaatggcatgccagcatgggcaaggagagacaagccaacttcaacaatgtggcgatgttttcgttcagcggcaccgttttgttggtgggtgtgtggacatga

SEQ ID NO: 85562 - DNA, 621 bp, Oryza sativa
  Clone ID: PAT_MRT4530_84689C.1
tcaactgccgcagcacgcgtcgccggtctccgacgcgtcgagccgcttcacggcgacgacgcgcccgccgtcgaggtcggcgcggtacacagtcccgaagctccccttgccgatgcagtacgcgtcgttgaagtgctctatcgccgccaggatgttgccaaaggagaacgtcatgtccttgctccatatcgaggccggcggctggcccgagccgacgtcgtcgtagagaaggcggagacatcggcgagcggcgggagctcgacggcggcagcggccagcttcgtcatcttcccgccgccgccccgccgtggccgcccccgcctccgccccgccgtggccgagccgtcccggctcaggccacccgccgtcgcgcctctgctctgccgatggctgctggttgggaatccttgttacgatgtttgcaccatatattttgagtttcaaccgaggacggaacaatgctccatggtcagaataaagtacgggccgaaccgacagaatattcaagaggtcgaagtggagccacccaaaacggacagcctggtgaaattcatgcagaatttccgtctgcaccaaaaccaaagaaggtgtggagggagaagccaaagacacccgctccat

SEQ ID NO: 85563 - DNA, 2349 bp, Oryza sativa
  Clone ID: PAT_MRT4530_8468C.1
atggtccctcgcaagccaaaccctgctttggcgaaagggccagatcccggccgggtcgatgacaatagcaccgcctttttgggggtttctctcgtggacaacatcgagctggcgaagttggtcagctctggggtgttggttgaggggcaggctttcgccacaggaaaagccgtggtgccgaagcctgtcgacaatcggacggtggtggagcttccacagttgagcctgtcagcactaattcggatctccatctttgactgggcgtgccggacttccgggtttgagcctagcgccgagctcttcagcgccatattttttgccaccgtgaactcgaagacggtgattaccctagctggaacaaagaagacagtgttcgggagcgtgaactttaacgttcgccccgagcggtccgatctctggccggtgaacgctgccatgtcgaagtgggaccgctattggatggcgagttggttctatcacaccatccccttcgaggctggttccgacttggcgaaagccctccggtgccggcgtagggcgattgcgccaaaccggaaacccaagatcgccgtggacggcgctatggaggcgtggttcgttctgctgcgcaaggtttgctcccgccttagctgccacgacttggtggaagaattctgtatgcttcgcatctttcccctctcccagtcatggcaagtcatggttgatcaaggcgaagaggttgacggtttgccgaacgtggttctccctgagggaacgaacatgttgactctcgaccaggctgaagccgaagcccgtaggatgatcggcgacgtgtcggttgtcgagtatagccagctgctgacacgacaagcggctgggcgggcgaaccaggtttacaacggcgaattgcctccccgggcgaacccccacaaagccgacgatgatgcaggaccttcgcgaaagcgaatgcgcggacaagtgaagcttgcccctaggaagcgaagggttcctgcttcgtcggactccgacaccgacgacgaggacgatgccaaagagcatgaaggcgaggaggaaggagaggaggaagaggaggctttggaaggggcgaaggccctagtttcgttctcgtcgggcaaggcggcgaagggaggtccagtcaagaagatctctcaaaagaaaggactcatcgacatcgctcgtattttcaacgacgacgagtcttctgacgagactccgacttcacccactggccgcagtctggaccttttgaccgctccccttcttccactcggcgttgctggggaaggcggtagcgccgccgccggggcttcaacctccgccgaacggatcgtgatagctgcggcgagggtcttcgggagccctctgcgtgaaccagctgtttcgccgttggtcaagtcgaaggggaagggtgcggccgccgaagcatctgcctcggagtattcccttgcggcgccccactttgcccctggtgatttcgagacccgggcggaccttatttcctttgtggagggagtaagcaatcttgtcctacccgccggcaccccgagcctattcaccgaactgaatgagttcgatgaggggtgttctgctattaaaagcttggcggttcggatccttgcggctcactgttcgacagagcaaaccgcgcgggcctgtcttgatggatttaagaaccgtcttcgggacaaggacgacgaaataagccgcaagaacttggaggtggaggccctcgccaacaccctcagagaggcaaaagctgaagtcaagcgccttcaatccgagctggaaaaagggaaagaggccagggccgaggtcgatcgcctcaaggccgaactggataaggagagagaggccatagcggaggttgatcgcctgcagaccgaattgaaggaggagaaggcccattctgctgtgctgactgattactataacctcactgagccgaagatggaggctcttcgcctgaaggttagcaaggccgaagcgagcgctgtggaggagtcgcagcggttttcgcgggagatggcgaaaaccaccgaatccgcgagaacggcttgccaaacactccacctcgcccttactgacatgagcgcgaaggtgcgaggggtccctgccgaagatgtctcagctttcgacttctccgagtggacccagcaggatggcggttcggtttcagactgcgccaccgtgtacggcgattgctgtgcgcgcgtatcgacggccttcaccttgggccttttgcaacagttcggctgcgagcacgtcgccgagttccctaactatgtgaagggggactgggagattagtgcgcagaacatttcgcccgctcttcgcgcgtggcgaaaatag

SEQ ID NO: 85564 - DNA, 238 bp, Oryza sativa
  Clone ID: PAT_MRT4530_84690C.1
agtggaaccgattgttgaaatacctttgtcacaaaacaatttgcttgatgtttcttgaggtagttgcttgggcgaaagaaaagagaccgagcgtaactaataaatggatgattgaagaagttgattagggaccaaaccaagacctctccaagtctacttctacctcaccacgtcacttttggtccatagaagacaagagataaagttctacatattttggattcgaattcgggcctcc

SEQ ID NO: 85565 - DNA, 2193 bp, Oryza sativa
  Clone ID: PAT_MRT4530_84691C.1
atggcgtcatcttcttccactatcgctccttccccggcgctctcgcagccggtgacagagaagctggctcgcggcaacttctccctgtggcgagctcaggtccttgcaactctgcgaggggcccagatggctgggttctttgacggcaccaaggagatgccggctccaaccaagatcgtgaaaaaggatgagaaggacattgttgttcccaatcctgactacaccgaatgggttgctcaggaacagcagatgcacggcctggcagacgagatgaccgcggccggaaaaaagctcgacgatgaggaccttgtgtcttacatcctcgccgggcttgacttcgattattatccagtggtttcagcggttgcagcctgcgtggaaccgataacgatctcagagctgatcacacaactgatcagctttgagcagcgtttggaacttcgtcaaggcatggctcaagcgaacgctgccatgcgtggacgtggcggaggagtggccagcgcggacgtggtcgcggtggtggcaatcccggtggcggcggcggccgcgacgctccccaaggcggtcgcggcggcgccaacaatcaggagtggcccaagtgccagctctgtggaaaacttggtcacacgcgcattgggatatctcactacgtctcatgtctacacacccaccaacaaaacggtgccgctgaacgaaaacatcgccacattgttgaagttgacttgtctccttgcccatgctggcatgccattgaaattctgggatgtggcatttctcactgccgcttatctcatcaatcgagtgcctactcctgtcaatgatggaatcccacctctcacaaagttgtttcaacaaaaccctgactacgcctctctccgcacctttgggtcgggtttacatttcagggatgttatctttgatgagagtgtttttcctttcatgtctcttcatcctaatgctgaggctcacctccgggcggaaatttcccttcttcctgaacacatgcagaatagctcagcgccagcaccacaacgtcctggtactaggttacagcaaggtattcgcaagccaaagtgctacatggatggtacattaagatatttaaatcttgttaccacttctgaacccactagtttatatgatgcaatgactaactcaaattggaaggcaaccatggatagtgagtttaatgcattgcagaagaataaaacttggcatcttgttccctcaactagtggcaaaaatattattgattgtaagtgggtctataagataaagaaaaaggcagatggctcaattgatagatataaagcacgcttagtggcaaagggttttaaacagaggtatgggattgattatgaggacacattcagtccagtggtcaaagtggccactattcgtgtcattctgtctattgtagtctcaaaaggttggagccttcgccaattggatgtacagaacgcattccttcaaggagttctggaggaagaggtctacatgcgtcaaccaccagggtatgaagataaggcctatccacattatatatctcatctcaggaagctacaactggtttacttaaaaagtcttgaagcagattttgccttaaaggatcttggtgacttgcattacttccttggcatggaagtaaagaggaccaaggacagtcttcttataaaccaggaaagttcattgggcagcagtgaaaagaatacttcgattgggctggatgcccagatgatagaaaatctacaggagagtgctaggaaacaacctacagtttctaggtcaagtacagaggcagagtataaggcccttgcaaatgctactgcagaaataatgtgggtacagaaattgcttgatgaattgggggtcaagcatccaattgcggcatgtttatggtgtgataatcttggagccaagtatttgtctgctaatcctgtttttcatgccagaaccaaacatattgaaattgattttcactttgttcgagaacaggtatctcgaaaattgctggacatttggtttattaatacaaacaatcagttggctgatgggtttaccgaagccttaccagtgcgtaaactcaatgagtttcggcgcaatctcaacctggttcccgtgttgggattgccggggggtgttaaacagatagatagttcggataggaacatatctgttgacaagataagatag

SEQ ID NO: 85566 - DNA, 1541 bp, Oryza sativa
  Clone ID: PAT_MRT4530_84692C.1
ttggggcggctcggccgagcttaacggaccggccggcccaagacggcccaagcgcgcgcgcgcgggagggaggagagagagggagccggtggaccgggctcaccacgcgtggtcccggggtgcggagggagcgcgcggcgcacgcgcgcggctcgcggttgggacgcggatgcggcgggcccacgcgcagcctcacggctcgcggtggaacgcgcgcacggggagggaccgaccggggtcggctcgacccggtctaggctgagctggcgccgacgtggcacctacgtggctgccacgcgggccggcgggaggtagacgacgacccggccgcgaatggacggcgggtggcggcggcgagcggcggagcgaaccacggtgatacaggcaaaagcgagcacaccgggcggttgcacgggacgaggggagacgagccaacggctcggattcgccggaggttgctcgacggcggcggattacggcggcggcaaccggcggcgagggaagagggaaacggcgacgaggccacgaggggccgattcccggcggtgagagcatctacgcggcttcgggaactcgacgctagcgtcggattgggcggaactacgcggagcgaggccggcgacgagcgggtgctacggagctcgggcggcgacggcggcgagcacacggcgagcgacggcaacggaagaggaagaagagggcgcggccgaagtcctcttccgcgtccttgctcgtgccggctcctccgacacgcgcaacgacgatcggtgacggcgaaacagagggcggcaatggcgcggaggcgaaaatgagagagtttggagggggagggcttgggcttaaatgggcggcaatgtcggtttgggcgagggaaaccgacattgaacggtcaaggcgcgagctggcgctcggcgcttgcagccaaagcggcggcaggaggatgacgccggcgagaaggaaaaaggggaaaaggagggggagaaaggggcttgcccctttgccgattcgggaaaaaggggaaggggagcgggagcgtcgcggcagagggaggaggggcgcggctccgtcccttggcggcttgcgcgtggagtggcgggggccgggcgatgacgacgacgatgacggggggacggcttggagcgaggctgatggcggtggcgaccgggcggtcgaccactcagcacgcgcgcgcggcttgcaacgggcggcgtccgcgcgggcacgcgcacgcgaacacggcgcgcgggaagcggcagcgagggagcggtgagggaggacttggctcggcgcgggcggcttacgcgtgctggctcgcggggccgagcggaggggcgcagggcgcggctctcgcgctcgcgcgcggcgcgcgagggaggggcgctcggcgcggcgacgcgcgctcgcgcgcgcgtcgcggggcggagcggagggagagagggagagagcgggggcgcgccggggaaagcgagagagagagccgggagagagaggggaagatgggccgagggaaaatcggcccatcgaccctgggggaggcaaaa

SEQ ID NO: 85567 - DNA, 315 bp, Oryza sativa
  Clone ID: PAT_MRT4530_84693C.1
tcatccgccaccacgcgtgttcggggttctctgcgccatcgtcgccttcatcctcctgtttgcacgctgccgccaatctactgactctggtatgcaagtcctaaatcgatcttcttctccattgttgtcatccttgcttctatcctctgcatcgatcgatttgggtgacctatgttgtgggtctgtgattagggtttcaatacggagtggacaaagtgttccagccattgccctagtcgccttccatggggcatgagctcttctgttggggttcagtactgagtggagaaagtgtgttccggccactgccgtcat

SEQ ID NO: 85568 - DNA, 381 bp, Oryza sativa
  Clone ID: PAT_MRT4530_84694C.1
atgaccctgacgaagtcgacgacgacgacgacgacgcagacccatgcgatggcggcgactccaagacagcatctgcatgccccccctagattggagacagcgcgcgcggagtggtgggtggcgaagcagacgggccacgcggggtcgacggagtgggagatgagtctgctgtccctggtgaggcaaacacagcaggtgacaggggtgcatcccgaggcgctgatgcaggcgagtcgacgtcaggaggcgcgccagttcctacactcccgccagcaggaggagaagaagggaaatttccgcccggaggtgagcctcagcattaggatgaagagacatgaaaggaaaaacactctcatcaaagataacatccctgaaatgtaa

SEQ ID NO: 85569 - DNA, 838 bp, Oryza sativa
  Clone ID: PAT_MRT4530_84695C.1
gccgaaaccctaaaactcatcgtagccggcttgctcctggaagaactcctcatcagcaggatccgcttcatcttcttcagcaactggggggggattatttatatagagcaaggtttgttaacctctgcagagggggtacactttacccacacgacattactaacccggatcacccagcccatggggatcagccacgtcgggagacctccaagctttcatgacaaggcatttccaaagccgacacaggtttaccatatgccgacgagaggggtcccagaccaacaacagttttacccaagttgttactcaaaattttaagtttgaaggcgtccgtcgatactcgcgcagggtgcacgaatatcgagacgcaactagatggttacaaggggacatggctgagctggcgccgacgtggcgcctacgtggctgccacgcgggccggcgggaggtagacgacgacgccggccggaatggacggcggacgacagcggcgagcggcggagcgaaccacggcgatacaggcgaaagcgagcacaccgggtagttgcacgagacgaggggagacgagccaacggctcggattcgccggagggagtccgtcggcggcggattgcggcggccgcaaccggcggagagaaaaggggaaaacggcgacgaggtcacgaggggccgattcccggcggagagagcatctacgcggctacgggaatccgttgctagcgtcggattgggcggagctacgccgagcgaggccggcgacgagcgggtgctacggagctcgggcggcgacggcggcgagcacacggcgagcgacggcaacggtcggggcggcgccggc

SEQ ID NO: 85570 - DNA, 126 bp, Oryza sativa
  Clone ID: PAT_MRT4530_84696C.1
gcaggataagttgagtattgggattacaaagagagtagatgaagcaaacgacaccgacgagatcatagtcaatagattcgacggggccgacgagatcatagtcgatagattcgacgagatctcccg

SEQ ID NO: 85571 - DNA, 231 bp, Oryza sativa
  Clone ID: PAT_MRT4530_84697C.1
tcagtcgccatgcgccaccgtgctcgccctcagccctcttgagttggagggcacagaatggggtggcgccgaggagattggcttccggcggcgcgcgtgaaggcggtcgaggcgggagaagaggcggcggagatcgggggcggggcgtgcgtggaggcggtcgacgagccggagattgggtcgtagtgtgccttcatcagctgccagcctgccctcaccctcagccgccat

SEQ ID NO: 85572 - DNA, 4423 bp, Oryza sativa
  Clone ID: PAT_MRT4530_84698C.1
cttttcctcatggcgtaatcttcttccactatcgctccttccccggcgctcttgcagccggtgacagagaagctggctcgcagcaacttctccctgtgacgagctcagtccttgcgactctgcgaggggcccagatggctgggttcgttgacggcaccaaggagatgccggctccaaccaagatcgtgaaaaaggatgagaaggacattgttgttcccaatcctgactacaccgaatgggttgctcaggaatagcaggtactaagctatcttttgctttcactctcacgtgaaattctttctcaggttgttcatatgaacactgctgccggcgtctggacggccatcaaagggatgttcacgtcccagtctagagctcgggctatcaacacaaggatagctctcaccacaacatagaagggtaacctttttgtgatcaactacgtcaacaagatgcgcggcctggcggacgagatgaccgcggctggaaaaaagctcgatgatgaggaccttgtgtcttacatcctcgccgggctagacttcgattatgatccagtggtttcagcggttgcagcccgcgtggaaccgatcacgatctcagagctgatcacacaattgatcagctttgagcagcgcctggaacttcgtcaaggcatggctcaggcgaacgctgccatgcgtggacgtggcggaggaggtggccagcgcggacgtggtcgcggtggcggcaatcccggcagtggccgcggcgctccccaaggcggtcgcggcggcgccaacaatcaggagcggcccaagtgccagctctgtggaaaacttggtcacacggtgatcaaatgctacaagcgcttcgacacctccttcactggcgaggacatagctgtgaacgcggccacaacttcatatggcattgatacgaactggtacgtcgataccggcaccatcgaccacgttactggcgaactcgacaagctgacggtacgggacaaatacaccggcaacgaacaagttcacgccgcgaacggaacaggtatggagatctcacatattggtcatgctactgttccaatctctagtggtaatcttgttcttaaaaatgttctttacgttcctgaagccacaaaaaatttagtctctgcatcccgtttagcttttgataatgatgcctttgttgaacttcatccatatcatttttctataaaggatcgggacacgaggaggcttctacatcgcggcagatgtaaagggcgcctctaccctttgaagccatctaccgatccagttgtcaagcatgcctttggtgtccacaagatttcttctttccggtggcacagtcgactgggccatccctcccctgctgttatgcgtcaagtccttagtcagaataatttaccttttgttagtgattccaataaagacaccatatgtgatgcttgtcaacaagggaagagtcatcaacttccctatcctaagtcattaagtcggtctaaagctcctttggagctcattttttcagatgtatggggtccagccccaacttcagttggcagtcattcctattatgttagttttgtggatgatttcagtaaattcacatggatttatcttcttaagcgaaaatccgaagttttttaatgttttcatgattttcaacatcttgttgagcgccgttttgatagaaaaattcttgcactccaaacagattggggtggtgagtaccaacgcctaaattcttttttttcaacgcattgggatatctcactacgtctcatgtccacacacccaccaacaaaacggtgccgctgaacgaaaacatcgccacattgttgaagttggcttgtctctccttgcccatgctggcatgccattgaaattctgggatgaggcatttctcactgccgcttatctcatcaatcgactgcctactcctgtcaatgatggaatcccacctctcacaaagctgtttcaacaaaaccctgactatgcctctctccgcacctttgggtgtgcatgttggctccatctccgaccctacaactctcgcaaacttcagtttagatccaaacaatgtgtgtttcttggttatagcacaatgcacaaaggtttcaagtgtctcgatgttgcttcaggtcgggtttacatttccagggatgttatctttgatgagagtgtttttcctttcatgtctcttcatcctaatgctgaggctcgcctccgggcggaaatttcccttcttcctgaacacatggagaatagctcaggtctttctactatggaacagctagctgattaatccctgtcatgcgcactcctcctgctggcgggagtgcaggaactggcgcgcctcctgacgtcgactcgcctgcatcagcgcctcgggatgcacccctgtcacctgctttgtctgcctcaccagggatagcagactcgtctcccactccgtcgacgccgcgtggcccgtctgcttcgccacccaccactccgcgcgcgccgtctccaatccaggggggccatgcggatgctgtcttggagtcgccgccatcgcatgggtctgcgtcgtcgtcgtcgtcatcgtcgtcgactttgtcaggttcatctacagcaacacatgagtcgactgctacttctgctgcttcccctgtaccagctccagcaccacaatgtcctgtaaccaggttacagcaaggtattcgcaagccaaagtgctacacggatggtacagtaagatatttaaatcttgttaccacttctgaacccactagtttatatgatgcaatgaataactcaaattggaaggcagccatggatagtgagtttaatgcattgcagaagaataaaacttggcatcttgttccctcaactagcggcaaaaatattattgattgtaagtgggtctataagataaagaaaaaggcaaatggctcaattgatagatataaagcacgcttagtggcaaagggttttaaacagaggtatgaaattgattatgaggacacattcagtccagtgttcaaagcggccactattcgtctcattctgtctattgtagtctcaaaaggttggagccttcgccaattggatgtacagaacgcattacttcatggagttctggaggaagaggtctacatgcgtcaaccaccagggtatgaagataaggcctatccacattatatatgtaagttagacaaggctctttatgatttaaaacaggcacctcgagcatggtactcaaggctaagtcataagcttcaagaacttctttgttctatttaaacaaagggaaatatactatctttgtactagtatatgtggatgatataattgttgctagctcatctcaggaagctaagctacagttggtttacttaaaagtcttgaagcagattttgccttaaaggatcttggtgacttgcattacttctttgcatggaagtaaaaaggaccaaggacagtcttcttataaaccgggaaaggtatgctactgatttgcttaagagagtagcaatgcaaaatagtaaacctgttaatacacctctgtcatcctttgaaaagatatctgtttatgagggagagaaattgggtcctgaagatgcaacaaggtatagaagtattgtgggtgcccttcagtatcttactttaactcgaccagatatttctttctctgttaataaagtatgtcaattcttacatactccaactacagttcattgggcagcagtgaaaagaatacttcggtatgttcaaggaacagttaatcttggattaaaatttaatcaagcatcctctatgcttgtgagtggattttctgatgcagattgggctagatgcctagatgatagaaaatctacaggaggatttgctgtgtttcttgggagtaatttgatatcttagagtgctagaaaacagccttcagtttctaggtcagtacagaggcagagtataaggcccttgcaaatgctactgcagaaataacgtgggtacagaaattgcttgatgaattgggggtcaagcatccaattgcggcatgtttatggtgtgataatcttggagccaagtatttgtctgctaatcctgtttttcatgccataaccaaacatattgaaattgattttcactttgttcgagaacaggtatctcgaaaattgctggatattcggtttattaatacaaatgatcagttggctgatgggtttaccaaagccttaccagtgcgtcaactcaatgagtttcggcgcaatctcaacctggttcccgtgttgggattgccggggggtgttaaacagatagatagttcggattggaacatatgtgtggttccaatccttcctcccactcctctcccacccctccttccccttctcctcaatgttcttctcccttccgtcggtgccatttttgcccccgcgctctgccaccttcaccat

SEQ ID NO: 85573 - DNA, 1198 bp, Oryza sativa
  Clone ID: PAT_MRT4530_84699C.1
aacctctgcagagagggtacactttacccacacgacattactaacccgaatcacccagcccgcatttcgaaagccgacacaggttcaccatatgccaacgagaggggtcccagaccaacaccagggttcggagggggggcgcggtgcacgcgcgctgctcgcggaggacgcagatgcggcgggcccacgtgcagcctcacggttcgcgatggaccgcgcgcgcgagcggggcagaggggagcggcggaccggggtcagcttgacccggtcgcggctgaggtggcgccgacgtggcgccctcgtggcagccacgcgggccggcgagaggaagacgacgacgccggccggaacggacggcggcggggcgatctacggcgatgcgggtgaaggcgagcacaccgggagacggagacactacgagagaggccggcgacgtgcgggcgctatcgagcatgggcggcgacgacggcgagcacacagcgagcggtggcagcggtcgggacggcgccagctagctacgggaggggcgccgtgacgatggtcgatggcgcggggcgtgatcgctccggcctcgggccggggaagaggagggagacggtgcgcccagagtccacgtcacgcgtcctcgctcgtgccggctcctccgacacgcgcgacgacgagcggcggcggcgagcagggcagggcgacaatggcgcggcggcttggagcgaactcgggcgagcgaaggggaaccgccgggccaagagaggaaagcgggaaacggagggtggaaagggagctcgagccatgccaactcggggaggagagggatgggagcgggaggcgctgcctcagggttttggacagacgcgagcggcgcggctcgggcacgtgcgctggctcgcggggccgagcgacagcgcggccacaggcgcggcagggcagcggggctgggcggcgcaggcgcggcacgggcggcgcaggcgtggcatgggcggcgaccgcgcgagcgcgcgcgagcgcggcaacggcgcgcggggttgcgaaaacgcggcgaggagcttgccagggatggagcggggagagagagagggggagctcggctcgtcgtcggctcacgcgcacgcgcaggcgcgtgcggcgcacgggcagagcgaggggagagctgagggagagagagagagagagagagttgggccgagagggaatcggccca

SEQ ID NO: 85574 - DNA, 441 bp, Oryza sativa
  Clone ID: PAT_MRT4530_8469C.1
atgaccttggaagccgctgaagccatcatggacgagccgctgccaaagccacctctcttctgcagctgccgccgccattcgccagatctaggaaggcaggggcatcgttgttggcctcctcccctccggacagatatgggagaggggagaggaggggatggaaaggagaggaggggaagggaggacaggtgcggtgccaccgtcatcggcctcctcctctccggacagatatgggaggggatgggagagcagggacgctgcctccgcttcctctacggtggatctgtctcccgcaccgtccttgctgccgagcccggttgccgccaccacccctccccttttccattgccagagccgccgccgctgccggtggggagggaggaggagaggggcggttggccaccagcagttggtgattggaatctcttaaatgaccgctaa

SEQ ID NO: 85575 - DNA, 527 bp, Oryza sativa
  unsure (1)..(527): unsure at all n locations
  Clone ID: PAT_MRT4530_846C.1
ggacaccacaaaaagttgactttcctatgattggtgctgacccccatttatattacaaggacgatagcttaactgcgactgttacaccggtctattacctgacatgccgaacacattacgatatgacgacggagtggggggcgggccagacaatctgtgacaaattaatccacacggctcgcaaatggcttgcgcccaagcaaagagacacctggaagcatacctgacatctccttggaacttatgcggctcgttcgacgccatgcccatgtttaggtgctggagatgtcgattacctcgttgttcaagctgagctgtccctggccgtacccctgctggtgctgctacgtgttgccggcggacggagattgctgctgctgctgatgcttgtggtgtccgtcgtgcgcgactagactggctggcgctgactgctctttacacactcccacagactagcggatggtgactttgtttcaacatctgatcatgctgttgaccgcctggaacatcctgngggagcccactgc

SEQ ID NO: 85576 - DNA, 205 bp, Oryza sativa
  Clone ID: PAT_MRT4530_84700C.1
aaccaccaatagaaaaaaagcaatatacaccaacccaaagtaccatcaaaacaccaatatctcgatcacgacacgacaaccatgtatggaaaggcaaacccactacactcatcaaaccatctaagccatgaacctagacgatgcatacgaatctgacggactctaacctaagacccagacaatcatacaatttgagctacaggta

SEQ ID NO: 85577 - DNA, 659 bp, Oryza sativa
  Clone ID: PAT_MRT4530_84701C.1
ggagactggccggcgacggcgacggcgacgccatggaggaattccaagaggctgacatcctgtggcccgagcccgcggaggacaactccgacgacggcgcggtggttgtcaccacgacgccgtctccggtggctcgtcgtcctgtgggctcgccggagtcgtcgtcgttgtctgctccggtggagatcgccgcctctcgccggaagcggcggtctcggtcgtgggcttccgagtacaacatgttcgaccagaccaacgacgacgacgacgctgtgaagaagaagatgatgaataatggagttatggtcgcgccgccgcacgccattgttgatcggaggaggctccgaggaaggacggcggcgtactccatgtgcgccggcaaggggaggacgctcaaagggcgggacctccgcaacgtcaggaacctcgtcctccagatgaccggattcatcgagaaatgaacacagaattaagattattgattgattggttgattgattgattgcgaataggatatactgaaacctgaagattttcagcttgcctgaaggctgaaaatatttgcggaatgcaataactctttgtttaattaattaatcatctgtaggattgccaaaaaaaaaaaaaaaaaaaaaaaaaaaaaaaaaaaagaggggaag

SEQ ID NO: 85578 - DNA, 497 bp, Oryza sativa
  Clone ID: PAT_MRT4530_84702C.1
cgacccacgcgaccgataaaatagaacaagcaaggcaccaaaaccccgcaccatggaacaccgacaccaccacctcgaccaccaacaaaactaccaggcggtggacgaaaccaaagaacacgaaaaggagagaactataaactaccaaggagaaaacaattaaaaaaaaataaaattaaaactacatattatacaataaaaaattaataaaaaaagaaaaaaacaaaatatacaaaataaaaaataactttataaaaattataataaaaaataaaaataaaaatataaaaattatcaaataaaataaaaaatatattaaatgatatcaaaataataataaaaaaaaataaaaagaaaaaaaaaaaaaaaaaaaaactataataaaaatgaataaaaaaaaataaaaataatataataaacataaaaaaatataataaaaaaaaaaaaaaaaattaatatacaaataaaaataaaaatataaaacataaaaatataaa

SEQ ID NO: 85579 - DNA, 723 bp, Oryza sativa
  Clone ID: PAT_MRT4530_84703C.1
ccggccgggaccccgtggaccacgacaccgtctcgatccccccctcctctcctcctctcgccggcgacccctccgccgcttccttcgccggaatcgatcgatcccatcctgcccaagccgccgccgatttcacctcaccttggtcgaggtcgccatggcggggaggcccagcatcccgaccaacagctctgcgctcatcgccatcatcgccgacgaggacacggtgactgggtttttgttggctggagttggcaatgttgatctgaggaaaaagacaaattatcttattgttgataacaaaacaacagtcaaacaaattgaagatgcgtttaaggagttcactacaagggaggacattgcaattgtactcatcagtcaatatgttgcaaacatgattagatttcttgtggatagctacaacagaccggttcctgctatattggagattccatcgaaggatcatccttatgacccagcacacgattctgtcctttctcgcgtgaagtacctattttccgctgaatcagtggcgtcagataggcgatgagaactggttatgtccatgcaacatgggagagctactcggagcatttaccctttgaaattgttattcattttgtgcctattgtaaacactattttgtttcaataatgagatgtcgaccaaccagttgaattacagcaaaaataaagacgacgttcatgttgtgttttcatgtttgtg

SEQ ID NO: 85580 - DNA, 727 bp, Oryza sativa
  Clone ID: PAT_MRT4530_84704C.1
ccttcttctcccttggtttttccctcgtgacatcacggacaccagcggcgatccatcggcgatccaccgcgcgcgcttcgatcggcgaccgcctcagttagttagttaagtttccatggcggggaggcccagcatcccgaccaacagctccgctctcatcgccatcatcgccgacgaggacacggtcactgggtttttgttggctggagttggcaatgttgatctgaggaaaaagacaaattaccttattgttgataacaaaacaacagtcaaacaaatcgaagatgcatttaaggaattcactacaagggaggacattgcaattgttctcatcagccaatatgttgcgaacatgataaggttcctggtggatagctacaacaggcccgttcctgctatattggagatcccatccaaggatcatccgtatgacccagcacacgattctgttctttctcgcgtgaagtacctgttttctgctgaatcggtggcatcagataggcgataaaaactgtttgtgttatgcaacatgggcatcctactttgtgtgtaacatttaccctttgaaactgctcaatttatgcctattattgtaaactccatttttgtgtgaataatgagagggacgatcgggcagatgaactacaacaaaataaagacacgatgaattcatgtagctccttttgtgtatgactctggtgttcacaaacggacatattgtatgtcg

SEQ ID NO: 85581 - DNA, 216 bp, Oryza sativa
  Clone ID: PAT_MRT4530_84705C.1
atggcttacagctcgaagaagcagatggcaacagtagtggaagggtcggcgaggcaacggtgcacttggaacacgagtgacgcaacaatggctgtggcagcggaggatgcttctcgtgctgcctcggcggcagagacggggaagacggatggggaaagcgaggacttgggagcagcacacaggcagggcattgctgttgatatttcttaccaatga

SEQ ID NO: 85582 - DNA, 998 bp, Oryza sativa
  Clone ID: PAT_MRT4530_84706C.1
gcacgaggctcgccgaccgaagaaaccacacaagaaaacgcgcgccaaccaccgcatcttcccctccccccggcctctccggacgtcgaccatggccatgctcctcgcctccctcctctccccttcccctcttcccaccaccaccacctcttccacgtcgccgagggctgtcaggctcgcgccggcgaagccgctcgccgccactctcgcagcggtggccgcggcggggctcctggcgctgtccccggccacggcggcggcggcggcggccggggaggcggagttcaaggtgtactacggcacggcggcgagcgcggcgaactacggcgggtacggcgggaacgcgagcaagaaggacgcggcggagtacgtgtacgaggtgccggaggggtggaaggagaggctggtgtccaaggtggagaagggcaccaacggcacggacagcgagttcttcaacccgcggaagcggtcggagcgggagtacctcacgttcctcgccgggttccgggcgctggcgccggtgggcgccgtgctcgacaacctcgcgctctccgacgtcgggctccaggaccagatcgcgtcggcggacggcgtgctgtcgacggagcggagggacggcggcgggcagctctactacgagtacgagatcgccggcgccggcgcgcacagcctcatctccgtgacgtgcgcgcggaacaagctgtacgcgcacttcgtgacggcgcccaacccggagtggagccgcgacgaggccgtcctccgccggctgcaccagtcgttcaagaccgtcgaccccgccagaccgccgccggctagctcctagtcctagctagccattgttcgccgccgccggccggccggagtccacgacttgtctcgatcgagtggagagctagcagctgggcgaaacaatttctagtagctttgctgcccgagatgtaattaaagcagttttgtataaattatggatctactatacgcgtaatcgaacattgtcc

SEQ ID NO: 85583 - DNA, 334 bp, Oryza sativa
  Clone ID: PAT_MRT4530_84707C.1
atcaagcagcttttgatcgcctctttggtctcaattgccatcttggccgtctactactcggccaacgagaacaagatcgacgccttcgaagagtggaaggcccagtacggtgccaacttcgccgctgaggaggaggcctacagaagactcatcttcgagaagaacctcgtcaagatcaacaagcacaacgctgatgccagccagacctacaagatgggagtcaaccaggtcaccatctacaccactgaggagttcggcaccagattccttacccccatgccccaggtcggtttgacccagaacaccgaagtcaaccacgagatgaacatcgttg

SEQ ID NO: 85584 - DNA, 420 bp, Oryza sativa
  Clone ID: PAT_MRT4530_84708C.1
gctcgatatttttttttttttttgtaatcttatttagatatatcccatatctttatattatatgattactaacaaaaactatgcatgcccagttctggcttgtggcgccatctgatccaaaaaacaaagagaaaacattaaaaggagaaataattaatagcaagcgttaagccggcctgcttaaaaggagtaaaggcagctgccgtcttcgctcctcgccgatgggtttaatttattggaaacagggtttgtgcatcctttcggcacaggcatgttacctgcttgctgtgctacttgccctcctcatactatgcaaggccgcctacgatgcatacgatgggatgcgaatagcttgagatttgttattatactggatggctcagaaccgtataaggaaccattttttatggtttttgattt

SEQ ID NO: 85585 - DNA, 741 bp, Oryza sativa
  Clone ID: PAT_MRT4530_84709C.1
atgtacagagcgtatagccgtgctgctccttcttctccatacacccccacagtaaaatttccaccatctctctccatcgtggagccattggaaccggcatattgggggcatccccccgatcaaaatctgtccggcgagcaggaactccccgacggcatcgggatagagcggctgacgtggacgcggttcaacacctccgacagagcggggacggcggcgtccgtgcagcacaacacccacgcagatcccacagagctacccctcatcctaatcgcaatccccggccaggaacgggcaaatcccatcccccatcgtcggcacctcctccggtcagcaaacacaacggaagggaacacatccaagatcgaaggaaaaaaaagcagtcacaacagaggggaaaagagactgaaccgagtgatgaacaaatacagcaagaaagaacaaagaacaacacaaccccaatgtggactaacctcgaccgattcaggaagggaagatgggaagcagcaaggggcgccgacaaaagcaacaggacaggcgagctcgtacgaggaaaccaccggcgacggggagacgaccaatccgaagggcacaagaaagaagaaagggtcaacgagggccccatacagagacggccggcaggggaaaatcgcacctccatacccaacacaagaacaaaccacaaacacaccccaaaaacagaattttgccttcttcacattcaatttacataaaagctaa

SEQ ID NO: 85586 - DNA, 1080 bp, Oryza sativa
  Clone ID: PAT_MRT4530_8470C.1
atggggagcaacggcggcggcggaggtggcgggaagcaggtgctgtgggagttccacgcgacggggccccgcaacatctccaaccccagctggagggacctcatccgctcgagctggacagatcccaactaccgaagaattgcggtttcatgcttcgtgcaggctgcgtatctactggagctagacaggcaggagaagagaaacggtgaaagcgcccttgctcctaactggtggaagccattcaagtacaagctggtgcgtcctctaattgattctagagatggatccatatatggtgtgctgctagaatgggaccagcttgctgccctatcagacttgatagtgttgagacctaatggcgccccgaaggttgtcctcgcgataaggggaacagtacttaagcagtcgacagttgtgagagacctcgaagacgacttccggttcttcaccatggagagcttgaggggctctgtcaggttcaccggtgctctcgaggcgctcaagtcggcgatcgacaagcgtggcagcaacaatgtgtgcattgctgggcattccctgggggcaggctttgctctgcaggttggcaagactttggctcaagatgggatctttgtagaatgccatctgttcaatccaccatcagtctcacttggcatggggctgaggaaacttcaggagaaagccggcaaggtcttgaagagatatgtcagtggaagttcttcaaatgctacagaactttctcacccaacagaggatggaggagcagcttctgaaattggagaagaaaagctgatcaaggaggtaaagagatgggtgccaaacctgtacataaacagctgtgactacatttgctgcttttatgctgatcgcagcggtgtcgccactgttactgccgagaagcatgatggccattctgggactcattccaagctgtttgtgattgccaaaggaccaaagaagttccttgaagctcatgggttgcagcaatggtggtcagatgattatgaactccagttggccgttcatgatagcaagctcatgtataggcaccttaagtcgctgtatgtgaatgaatcatag

SEQ ID NO: 85587 - DNA, 450 bp, Oryza sativa
  unsure (1)..(450): unsure at all n locations
  Clone ID: PAT_MRT4530_84710C.1
tccngggctgcaggantcggcacgagnccatcgctattggnactccttatgcnatacatcatatatgcacnttgttgctntctgaatnatgatgcgtcttcggcagangttctaagtatgatcttgcgctancttgcattctcgcgtaatatntatacattgtcgctgtcgtnagatttcanttcttagctagcanccactanttggtgttaatagcttttccttttcctttcccttttcttttcatgatttacctgtcacgctatttcgcgggctgcaatttgttgcttgagatatgctctgcatggaagaacactatgcagatgcgctccngcattgattttcattatgggatactaacggggtatatgttgctgtgtgctacagatgtncagcgacgcancanaaaaggtgacagctgcagtatatgtnctgatctttccatttaat

SEQ ID NO: 85588 - DNA, 298 bp, Oryza sativa
  Clone ID: PAT_MRT4530_84711C.1
atggcgttcgcgaccagcttcccatctccgccattctgcgctctgaagctcattgtgggaaggaagccagctgaggggaagtggctctgctcatggttaccaaggaattctctgctggttgagacgctcgcgatttcagagggagaggaagctgaaggcgcgctaccgatccacgagctcgcttcatggcatggcgatgccgagattcatggaggtatggctgagaagacaggagaaatgctcaacaggcaacggcacccgggagttagctgtaccattttgctggggatgaacctgg

SEQ ID NO: 85589 - DNA, 527 bp, Oryza sativa
  Clone ID: PAT_MRT4530_84712C.1
gtacgaatacgtattttgtgggggcgccaacgaaattgtgatgagaacacatacccaatccagaggagggtggagcgccgtcgccgccgccagcgctcatgcgtgaggttgccggagccgtcgtctccgatgctgctcgtgttctccaccctcctctctcttctgtggtttcttgtgggtggctctgtcctcttgatcgctggtcctctgttgcggtcccgcctgtctcagggggcggttctctgactgttcatctccaggagaggcgtgtcttctccagctgcggcgccagggacttttggggtgttggattttctctctgttgcatcctcttattttttttctccttttatttactctcgctttttatttttggtcttttatctcgcctaggtgtcctctagttccccctcctttttttttcttttctcttctttattctcttttttttgtctgtttctttttcttcttgacctttttgttaccttttttcattattctttatttttatttttctcttctttccc

SEQ ID NO: 85590 - DNA, 259 bp, Oryza sativa
  Clone ID: PAT_MRT4530_84713C.1
atggtgggttgtgagaacatggttttgatggtcgtgctcatgacaattaaggaccggttcacgagttttggttgtgaaacattaaccgtgccaaccacaagccagcatgagcaacagctttaccttttgtatagcatggtttattgcggggcaccagactgagaagtggcggagataaccccacgggggtcaccgaggagtccatgccttattttataaggaggtgattatgatccaggaatggtgcgctgtggtggat

SEQ ID NO: 85591 - DNA, 374 bp, Oryza sativa
  Clone ID: PAT_MRT4530_84714C.1
cggttgttttgtctgattgtgtgaaggtgacttgagatcagcattagtcaatggtgaggaccgggaatatgctcagggaggagaagaggtctagtgcggtcgggataccatgtgacaaggtgactagagtcaggattcttggaggtcaacttcggtcaacggtggggatcgagactagactcagggaagagttgaggtccagatggtcaaggataccgggtgacgaagttggatacgagatggcacacggtggatagacattgtatgagagagatcttcacaacgggcttcacgaggtgtgcgtgtaagtgccggtgttcacgaaggagattggacgtggttactcaacagtattggaaatagtaaatatacta

SEQ ID NO: 85592 - DNA, 240 bp, Oryza sativa
  Clone ID: PAT_MRT4530_84715C.1
atggcgtccaatgtgctggcgaagaggaggttgattgagctgccaccgtcgatgagaacccgcacgaccttgatgttccgaatagtggaccacttcatcttgggtgcagccccctgccacgtcgagcagacttctcgctccactttcttatactctcgcttggaggagtatgctgtagagcctccgaaaatgtgtgagacatggaggtcggagtctagatatgctgggtctgactcctga

SEQ ID NO: 85593 - DNA, 1921 bp, Oryza sativa
  Clone ID: PAT_MRT4530_84716C.1
acgacattactaacccggatcacccagcccgtggggatcagccacgtcgggagacctccaaactttcatgacaaggcatttccaaagccgatacaggtttaccatatgccgacgagaggggtcccagaccaacaacaggaatcggtccttaagtgcgagagcgggaaaaaccgtacacccggtacgttccccggtccgcggttttggaaattcctttagttcgcaagcgccgacccaggtgtcgggttttccaagtcttttgtaaaactccagttttacccaagttgttactcagattttaagtttgaaggtgaccgtcgatactcgcacagagtgcacgaatatcgaggcgcaactggatggttacaaggggacatgggcgcggcccgagagagatggggcggtccggccgagctaaatgggccggccggccaaagacggcccaagcgcgcgcgcgcgggaggggaggagagagtgggccggtggaccgggctcaccgtgcgcggtcccgggtgggacccgcttgtcagcggctcggctcaccgtgcggagggagcacgcggcgcacgcgcgcgggcgggggagggacgcggtgcacgcgcgcggtctgcggaggaacggatgcggcgggcccacgcgcagcctcacggctcgcggtggaacacgcgcacggaaggggctgaccggggtcggcccgtcccgacctcggctgagctggcgctgacgtggcacctacgtggctgccacgcgggccggcgggaggtagacgacgacgccggccggaacggacggcggacaacagcggcgagcggcggagcgaaccacggcgataccggcgaaagcgagcacaccggctggttgcacgagacgaggggagacgagccaacggctcggattcgccggaggaagcttgacggcggcgaatcgcggcggcggcaaccggcggtgggaaaaggggaaaacggcgacgaggtcacgaggggccgattcccggcggtgagagcatctacgcggccacgggaatccgatgctagcgtcggattgggcggagctacgccgagcgaggctggcgacgagcgggtgctacggagctcgaacggcaacggcggcgagcacacggcaagtgatggcaacggcgcgagctggcgctcagcgcttgcgtccaaatcggcgacagggcggtgacgccggcgagagggaaaaaggaggaaaaagggggagagataggggggctcgcccctttcttctttgggaaaaggaggagggagcggaggcgtcgcggcagagggaggagggaggctctgcctccgtcccttggaggctagcgcgcgggctggcgcggcagagggtgacggcggcggcgaccaggcggtcggccactcggcacgcgcgcgcgggaaacaacgggcggcgcggctgggcacgcgcgctggctcgcggggccgagcggctgcaggcgcggcagagcagcggggccgggcgacgcggacggcgcagacgacgcggctcgggcggggaaccacgcgggcacgcgcgcgagcgacggcgcgcgggggccgtcttcgcgagcggggagctcgccagggagaggagaaggagagcgaggggaagggacactcggcgcggcgcttgcgcacgcgcgggcagagcgaggggaaagggaggggcgctcggcgcggcgctcgcgcacacgcgcgcgcggcgcgctggcggggcggaggggagcggagggagagggggagagggagcgcgccgggggaggggagagggccgggggagagagagagagagagagagagagagagggagagcgggagcgcgccgggggagaggagagggccaggggagaggggaagatgggccgagagaaattcggcccatcgaccccgggggaggcaaaatagacttttgcggaggaatt

SEQ ID NO: 85594 - DNA, 738 bp, Oryza sativa
  Clone ID: PAT_MRT4530_84717C.1
atgaggaggaggaagaagatgaggacgacgatgggtcgcttggtcccggtgaaggattacgagaacgccgaccgggttctcgagagccctgtcatcgtcctccattgttgtcccggcaccgatctctgtcatcttcgtcattatggcggtgtcctcgactggtatcgcccggcgtccttcgttcacgatcgtcgtgaatatggcggttgtggcggtgatcacggtctcggtcttcgttcgaacggcctcctcgttcttcattgtcgtgacgtcgtgaagagacgtgatgataggaacaattctcgttttcccgtgtgcgacgagcctctcggcggccgtttagggcaccaggaccctgtcgcttcggaagttattcttgtcggcttgtgtttcttgtcggaacgacaaggtttggccgcattagaatccttctcgagctcggatatcgtcgatgttctgttctccgcttcggcaggaggacctttcgacgtggagtcgtcttgggttatagccactgcgttctcgtttctggtcatcgatggctcagctgagatcggcattgtgaaccttgagcaccaagtccccctacctggcgcgccactgtcgacgggtgatacccgtagaccggatatagagagtattggggcggtctccaagcaggactcggagacatcgaaccgcacacgataccggaaatctctcgcactctcaaaagagaggtggggcgcttacgcttaa

SEQ ID NO: 85595 - DNA, 168 bp, Oryza sativa
  Clone ID: PAT_MRT4530_84718C.1
atggaggggtgcgagggtttcccaaaccgccggggccggggttaccgtgacccggcggaggttaccgcggtttttctattaccgtatccctacggtaaggccggtaactgcggtaaccgcacggttaccgacggtaatgtaaaccctgggtgcgacaacatggcctag

SEQ ID NO: 85596 - DNA, 1508 bp, Oryza sativa
  Clone ID: PAT_MRT4530_84719C.1
atgggccggccggcccaaggcggcccaaactcgcgcgcgcgcggaagggaggagagagagagccggtggaccgggctcaccacgcgcggtcccgggtaggacccgcttgtcagcggctcggctcaccgtgcggagggagtacgtggcttatgcgcgcgggcgggggagggacgcggtgcacgcgcgcggctcgcggtggacgcggatgcggcgggcccacgcgcagcctcacggctcgcggtggaacgcgcgcacggggagggactgaccggggtcggctcgacccggtctaggctgagctggcgccgacgtggcgcctacgtggcggccacgtgggctggcgggaggtagacgacgacccggccacgaatggacgacgggcggcggcggcgagcggcggagcgaaccacggcgatacgggcaaaagcgagcacaccgggtggttgcacgtgatgagggaagacgagccaacggctcggattcgccggagggagcttgacggcggcgaatcgtggcggcgacaaccggcggggagggaagagggaaacggcggcgaggccaggaggggtcgattcccggcggtgagagcatctacgcggcttcgggaactcgacgctagcgtcggattgggcggaactacgccaagcgaggccggcgacgagcgggtgctacggaggtcgggcggcgacggcggcgagcacacggcgagcgacggcaacgaggaaggagagggcgcggccgaagtccccttccgcgtcctcgaacgcaccggctctcccggcgcttggcgaaggacggcggaggcgagacagagcacgggggcagcggcaacgggcggtcaagggcgcgagctggcgctcggcggtcgcggccaaagcggcgacagggaggatgacgccggcgaggaggaaaaaggggaaaaggagggggagaaagggggcttgcccctttgccgattcgggaaaaagggggaggggagcgggggcgacgcggcagagagaggaggggcgcggcctccttcccttggcggcttgcgcgcggagtggcgggggccgggcggtgacgacggcgatgacggcgggcggtttggagcggagcggcgacactggcgacaggcgcggcagacgctgacgacggcggcgaccgggcggtcggccactcggcgcgcgcgcgcgggaaacaacgggcggcgtccgcgcgggcgcgcgcacgcgaacacggcgcgcgggaagcgtctttgcgagcggggagctcgcgcgaggggaggggcgctcggcgcgggcgactcccgcgcacgcgcgcgcggtgcgcgggcggggcggaggggggagcggggagagaggcgctcggggcggctctcgcacgcgcgagcagcgtgcgggcggggaagagagagagagagagagagagagcgggagagcgcccggggggagagggagagaggggccggggaagaggggaagatgggccgagagagattcggcccatcgacctcgggggaggcaaaa

SEQ ID NO: 85597 - DNA, 1935 bp, Oryza sativa
  Clone ID: PAT_MRT4530_8471C.1
atggtgccgaaacctatcgacaatcggacggtggtattcgccgtcttttttgaggcagggctacggtttccctgcaacgtgttgttgccggagatccttcgcctcttccaggtggaacttccacagctaagcccgtcggcgcttgttcggatcgctatcttcgactgggcgtgccggacttccgggtttgagcctaacgccgagctcttcggcgccatatttttcgccaccgtgaactcgaagacggtgattaccccggcttcaacgaagaagacagtgttcgggagcgtgaactttaacattcgtcccgagcgggcgatcgcgcctaaccggaaacccaagatcgtcgtggacggctctatggaggtgcggttcgttctgctgcggaagtcatggcaagtcagagttgatcaaggcgaagaggttgacggtttgccgaacctggttcttcctgaggggacgaacacgttgaccctcgaccaggctaaaaacgaggcccgcaggatgatcggcgatgtgtcggtcctcgagtatagccagttgctaacacgacaagcggctgggcgggcgaaccgggtttacaacggcgaattgcctcctcgggcaaacccccacaaagctgaccacggtgcagggccttcacgaaagcgaatgcgcggacaagtgaagcttgcccctaggaagcgaagggttcctgcttcatcggactccgacgccgatgacgaggacgatgtcgaagaacgcgacggcgaggaggaaggagaggaggaagaggaggaggccgtggccgataaggccgcgaacgaggcgatcgaagatcgcgtcgacacccccggctacaatgagaccggggggaaagaggccagggccgaggttgatcgcctcaaggccgaactggagaaggagaaggcccattcggcggtgctcatcgattactacaaccttactgagccaaagatggaggctctttgccagaaggctagcagggccgaagcgagcgccgcggaggagtcgcagcgtttttcgcgggagatggcgaagaccaccgaatccacgagaatggcttgcgaaacgctccgcctcgcccttaccgacatgggcgcgaaggtgcggggggtccctgccgtggatgcctcagccttcgacttctccgagtggacccagcaggctggcggatcggtttcggactgcgccaccgcgtacgacgattgctgtgcgagtgtatcggcggccttcacattaggccttttgcaacagttcggctgcgagcacatcgccgagttccttacctatgcgaagggggactgggagattagtgcgcagaacatttcgcccgctcttcgcgcatggcgaaaacagttctggcagaaagatggccggtccgctgccaaagcgcaccttctggagcaactggcgaaggcggaggcggcagatcggggcgaaggagagggcgcggcaggcgaagaggttggaggcgatgcccaggttcacccagagggggttcgccgaaagtcgtgcatccggcccccttccgggagctggcgaagtcaaaacgagaaatttgtggcaatgaagggtctgccgaaggtgcgatgtccatttcggcctatttatcgcgaaatggagataaacggtcgcagctataaggttttcaaggttgccgactggctgcgggcgcaccccgggcgaaccttagaagattacattcttgttcattcaagacgtctggaggatatggctcgcttttggcgaatccatcagaagactaaacgtcaggaaacgatctttcagcgtcgttacagtttagtctgtttttcgccccctactcctcttaaggttgtgtatgatattagtagtgatgacgaacctagttcgcctgatcatgccttagggagggatagtgattatggggacaaagatgtaatttacttgtaa

SEQ ID NO: 85598 - DNA, 2592 bp, Oryza sativa
  Clone ID: PAT_MRT4530_84720C.1
atgtcgtactacgtagacccttgtaccagcgtaccccaatactctctatatccggtctacgggtatcacccgacgacagtggcgcaccaggtagggggacttggtgctcaaggttctactactatatcatccagcctcgtcgacaacagcgccaacgccaaccttaactacgggcttcctgcctcaacgacgcttgcgtcgactcaagtcagcgagattgtctttccggtttacaccacgacgccgatctcagctgggccgtctaggaccagaaacgagaacgcagtggctgtaacccaagatgactccacgtcgaaagatcctcccgccgaagcggagaatggaacatcgacgacatccgagctcgagaagaattctaatgcggccaaaccttgtcgttccgacaagaaacacaagccgacgagaataacttccgaagcgacagggtcctggtgccctatccacaaaaccaggaaacatactttgcaagcctgctcagttttcctcaacgcccgcgccgagatccgcgcctacaaggagcgtggagttcagcgtgtttttccaactcgtggtgtctattgtcctattcacaagacaaagaatcacgacctctcaagctataaagtttttctcaacgtcacaaagatgtcatctcccaaggtccagcagccaggcaagacccttagagacgaagacaaagaacgaggaacgacgctgaccccagatcgtttcgtcggtgttatcgacatcggttcttccgaaccatcggtcctacatctactcgaggactacgactcctcatcaacaagtacgccgcgtgaggtattggctatcgacgggacaggcacatcggcacgcgctaacaccggggcggaaaatcaaacatgtacaccggctcagcacatcaggaccctcaacgcaatactgaggaaaaccccttatgaccccgtcctacacgatgacctcgcacaatggacggaacgccctccacctcgcggcaccagcgatctccgtgaccacctaaacggccgccgagaagctcgtcgcacacgggaaaacgagaaccgttcccggcatcatgtctcttcacgacatcacgacaatgaagaacgaggaggccgctcgaaccaagaccgagaccgtgatcaccgccacaaccgtcatattcgcgacgatcgtgaacgacggacgccgggcgataccagtcgaggacgccgccatcatgacgaggacgacagagaacggcgctgggataacaacggagggcgacgacaagactctcgagaacccggccggcgttctcgtaatcctacaccgaaaccaagcgacccatcgtcgtcctcatcctcttcctcctcctcatcgtcagacagacatccacgaaggacatacgatcgccgacaacccactgcccccagtgctgggtgtagggctttcagtcgttcgttgcgcaatgttcgatggcctgagaggttccgactgggagcaatagagaagtacgatgggagcactgacccagaagaatttcttcaagtctactccacagtactctatgctgccggagcggacaacaacgcgttggcgaattatttgccaactgcgttaaaaggctctgcgcgttcatggttgatgcaccttctgccctactcaatttcttcgtgggcagacctatggcagcagttcgtcgccaacttccagggaacctacaagctccacgcgatcgaagacgacttacacgcattgacacagaactcgggtgaatccttgagggaatatgttcggcgctttaatgagtgcagaaatacaatccccgaaatcaccgatgcttctgtaattcacgccttcaaactattcgagattgttgagcgatgcgcccacgttgacgatgcgcttggacgcatgaacgacaagccaaagaccgggggcgagaagaaaccaaccacggacacacctgagtcaagcaaaaagaaaaatcgcaagaacgcgaaaaggaaagctcaagcagaagtactcacagcagaatatgctaaccctcccaagcgcccagacccacaaggtagcgatgcaaggaaagcatggtgtcccatacacaagtcgaacagacattctttggaagactgccttgttttcaaaaaatcgctcgagaagcacatgacatcggaacaaggcaaacgagtacgtgtggtcgagaaggatgcggagatgactgctcaggagtcagacccagcatatctagactccgacctccatgtctcacacattttcggaggctctacagcatactcctccaagcgagagtataagaaagtggagcgagaagtctgctcgacgtggcagggggctgcacccaagatgaagtggtctgaacagaagatacaattttcggaagaagaccatctcaagactgccgttatcccaggacgctatccgatcgtggtcgaacccactattcggaacatcaaggtcgtgcgggttctcatcgacggtggcagctcaatcaacctcctcttcgccagcacattggacgccatgggaatcccacgaagcgagttgacacccaccgatcaacccttccatagaattactccctag

SEQ ID NO: 85599 - DNA, 1215 bp, Oryza sativa
  Clone ID: PAT_MRT4530_84721C.1
atggaggggaagggggtgctggaggggaggtacgagatggggcgggtgctgggccacggcaacttcggtcgtgtgcacgcggcgcgggacgtgcgcacggggcgcgccgtggcgatgaaggtggtgtccaaggacaaggtggagcgcgccgggatggcggagcagatcaagcgggagatcgccgtgatgaagatggtgtcccacccgagcgtcgtggagctccacgaggtgatggccacgcgcaccaaggtgtacctggcgctcgagctcgtccggggcggcgagctgttcgaccggatcgcccgccacggccgcgtcggggagggcgtcgcgcggaggtacttccgccagctcgtctccgccgtcgacttctgccacggccgcggggtgtaccaccgcgacctgaagcccgagaacctgctgctcgacgaggccgggaacctcaaggtcgccgacttcgggctcagcgcgctcgcctgccacgcgcgccccgacggcctcctccacaccgcctgcggcacgccggcgtacgtcgcccccgaggtgctcgccggcaacggctacgacggcgccaaggccgacctctggtcctgcggcgtcatcctctacgtgctgctcgccggcgcgctgccgttccaggacgacaacctcgtgtgcatgtaccgcaagatgcggcggggtgacttctgctgcccgccgtgggtgacgacggacgcccggaagctcatcaagtcgctgctcgaccccaacccgggcacccgcatcaccgtcgccggcctcctcgagacgccgtggttccggaagacggcgcccgtcccgcgccccatcatcgccgaccccgcggcggcgccggtggacacgcgtggcaatgccggcgacgacaaggacgagccgcccgaggtgctgaacgccttccacctgatctccctgtccgagggcttcgacctgtcgccgctgttcgagcacgaccccgccgcgtcgccggggcgggccacggcgcgcgcgggcggcacgcggttcgcgacgcgggaggcggcgagcggcgtggtcgcgcggctggaggcgctcgcgatgggcggcgcacgcgtggcgccgtcgttgctcatggtggacgtcaagaaggatggcggcgacgccatggagtaccggccgttcttcagcgaggagctccggccggcgctcaaggacatcgtctggtcgccggcggcgacctga

SEQ ID NO: 85600 - DNA, 1637 bp, Oryza sativa
  unsure (1)..(1637): unsure at all n locations
  Clone ID: PAT_MRT4530_84722C.1
gtggctctggtagtggtaagcaaggcggcgttatacgccaagttaaactttttaggcgagatctgcttatgaaagcgccaacaaacaccccgatcgaaaccaccagaccagatctcatcccgacttcccgagcaccagcaccatccgaggaagaagagtcttcttcccacgcggcttgtccgagccgagcgaatgcgattgtaaagcaccgtcgtgaacctgacgacgagctccaggcggcggcgatggggtgctccttctccgggctgaacgcgctctacgacaccgtcggcggcggcggaggcgacatctgggtcaacgactaccgcttccgcgtcgtccgcaggctcggtgacgccgggccagcggggtccttcgtcttccttgtcaaggaggttgtcgccgccgccaccgcctccgacggcactggtggggcggtgcccggcgcctctgggctcgccaagaagaagggcatcgatccatcccacatctcagctgatggaacatatgccttgaagaaagttcttattcagaatgaacagcacttagagcaagttcgacaggagatccgagtgtcctctcaattcagtcatccaaatctacttcctcttcttgaaaatgctattattgcagttaagggtgtgcaagatgggtcgcagaatcatgaggcttacttgttgttcccagttcatttggatggaaccttgcaagatatcaataaaaatatgctagaaaagaaagaatattttccaacaatcagtattctccaaatattccgccagctatgtgcaggactgaaacatatgcacagttttgacccaccttattctcataatggggttaaaccagacaatgttctcataactcagaggaaggatcaacctcatcttgccatcttgatggattttgaaagtgcccgtcctgcaagaatagccattagatcacaagcagatgctatgcagttacaggaatgggcatcagagcactgttctgcacactaccgagctcctgaattgtgggagtgtccaactcatgctgacattgatgagaggacagatatatggtctttgggatgctgtctttatgcaatgatgtacggaaaatctccatttgattatgaacttgatgaagctgctggtgagagcttacagtcagttacaaagagtgctcaaattaaatggcctactgaagctggcccctcgtatcctgattctctccgccagtttgtaacttggatgctgcagcctcatcctgcagttcgtccccacattgatgatatcatcatccacgttgataagctcattgcaaagtactcaatttgacctgactaaatggagcttcttccatagaaaatgttatgtaagtcaatagaacatctacttgattcattaaatgtgataaatataagttggtttcttgattttatttttgtgctaaagtgaagagagagagagagagagagagagagagagagagcgtttattggtagattgtattcaccaatttatgaacctactattgttcatgagtacaattccatgtagatctatgattttattttcggtgcccactgttacgtcngagtattaagtaatgtcattttgatggtttctccttgtnnaaaaaaaaaaaataaa

SEQ ID NO: 85601 - DNA, 1963 bp, Oryza sativa
  Clone ID: PAT_MRT4530_84723C.1
atgagggaattgaaggaggtcgacgacgacgcggctcgaggaggacacggacgcgacgcgacagaaactagaaagagcgagcacgccactatggatatgatggaggaggaggctgccaacgccgccactgctcaagctgctgctgctggcgacctcgccgacgtcgtggcccgtgccaatgcacgcgcattcctcgtctccacccctcaccatcacccctcacctctgcatcctcttcctcctcctcccatgcctcaggcgcctcaccaatactatcccgccccccagatcaccatcccttaccaccaccaccaccacggagagcttcggcgccctaccaccatcgcttacaccgacgcacctgtgccgttcgagacggcggggccgccatccacggtcgtcgactcataccaccacctcacacccggcgacgccggctacgggatgccgcggccgcttgctctccagatctcccagcacgccctctgtggcggcggcgacgtggtgatgggcggcggaggcgcaggcgctgccgatgatggagaagaagccatcaggatctcgccactgacgccgtctgctcatcatcaaatgatgaaaaggaagaatgaggtgaagaaagtggtgtgcatcccggcgccgccagcgacgagtagccgtggaggtggaggagaggtgatcccgtctgatctatgggcatggaggaagtacggccagaaacccatcaaaggctctccttatccacggggttactacagatgcagcagctcaaagggatgtatggcgaggaagcaggtggagcgcagccgcagcgaccccaacatgctggtgatcacctacgcggcggagcacaaccacccatggccgatgcaacgtaatgtgctcgccggatatgcccgttctcatcacagtactcatgctactgcctccagcagccgccacaagcaacagcagcagcagcagaccaaccagctgcagcctgcactgatcacaagctcatcgtcttcttcctcctccccattcaatctctacgccgacgtcgtgctcggtggccaacaggccaacatgatgatgacgacggagggcgccggcgctggacttggcatccaaccttcagcagctgatgaggtctttgcagagctggaggagttggagcctgataatcctactatgatcaatgcaaacatgcaggtgtactccaccaccagcaggccaggggcgtccgtcgatactcgcacagggtgcacgaatatcgggacgcaactagatggttacaaggggacatggctcaagatgttcaaagcttcacggctcgcggtggaacgcgcgcacggggaggggctgaccggggtcggctcgacccggccgagctggcgcctacgtggcgcctacgtggctgccacgcgggctggcgggaggaagacgaaggcgccggccgcgaatggaccgcgggcggcggcggtttctccgggacgccttgcgacgatgaggggcgacggggcgtacaccgggatgacgagggagaataagagcgagcgagccaacggcttggattcgccggagggagtccgtcggcggcggattgcggcggcggcgcccggcggagggaaaagggggaaacggcgacgaggtcacgaggggccaattcccggcggcgagagcatctacgcggctacgggaatccgatgctagcgtcggattgagcggagctacgccgagcgaggccggcgacgagcggggcggcaatgtcggtttggaaaccgactttgggcggtcaaggcgcgagctggcgctcggcgctcatgtccaatcggcgacagggcggagggaggatgacgccggcgggaggaaaaggggaaaaggagggagagaaagggggctcgcccctttcttctttgggaaaaggaggaggggagcgggggcgtcgcggcagagggaggagggctctgcctccgtcccttag

SEQ ID NO: 85602 - DNA, 555 bp, Oryza sativa
  Clone ID: PAT_MRT4530_84724C.1
atgctgctcgaccccaacccgggcacccgcatcgccgtccctagcctcctcgagacgctgtggttccggaagacggcgcccgtcccgcgccccatcatcgccgaccccgcgccggcgccggtggacacgcgtggcaatgccggcgatgacaaggacgaaccgcccgaggtgctgaacgccttccacctgatctccctgtccgagggcttcgacctgtcgccgctgttcgagcatgactccgccacgtcgccggggcgggccacggcgcgcgcgggcggcacgcggttcacggcgcgggaggcggcaagcggcgtggtcgcgcggctggaggcgctcgcgacgggcggcgccacgccacgtgtgtgacgaggagcggcgcgcgcggagtgcggctcgccgtggcggccgatgtctttagcgtggtgccgtcattgctcgtgcctcgtggtggacgtcaagaaggatggcagcgacgccatggattaccggtcgttatgcagtgaggagctccggccggcgctcaaggacatcgtctggtcgccggcagtgacctga

SEQ ID NO: 85603 - DNA, 1357 bp, Oryza sativa
  Clone ID: PAT_MRT4530_84725C.1
gcaagcggcggtggcggtgggtggagcaggcaggaggcggcaggcggagttccagcggccagaggcgagcgcagagggcgtagcaggcagggggcggcgggcgcagcacggcgtgctgggagaggacgacgacgacgcgcttggggtttcaccgggagacctcgccttcaccatcttcgtgccctcaccggagttgttccaccgcgtccttaggctgcggcgtcccaaagacagtgttgtcgataggaaggccgatgacgccacctacgccgtcatctcccacgtgctcggcttctccatcgttcccttaccgcctgcgcgctacggatgtagcagcagcgccgccgataacgggcggtggcgcttgtcctggtctcttggagtccgtgtctgggctgaggatctccgcctggagaaggccgacggcctctcacccctctcctgtcggcgtggcctgcctcctttcccccttatcctgccggcacagccggcggcctctcccctctctcccgctggtgcggcctctcccgccagcgccctcccctcccgccggctgtcccatgtttgggaagaaaagaaagatgatggtgctgatagccacgtaggcgccacgtcggcgccagctcagccgaggtcgggacgggccgacctcggtcagtccctccccgtgcgcgcgttccaccgcgagccgtggggctgcgcgtgggcccgccgcacctgcgtcctccgcgaaccgcttgctgatgaagatgaagcggatcctgctgatgaggagttcttccaggagcaagccgagggggtacactttacccacacgacattactaacccggatcacccagcccgtggggatcagccacgtcgggagacctccaagctttcatgacaaggcatttcgaaagccgatacaggctgagctggcgccgacgtggcacctacgtggctgccacgcgggccggcgggaggtagacgacgacccggccgcgaatggacggcgggtggcggcggcgagcggcggagcgaaccacggtgatacaggcaaaagcgagcacaccgggcggttgcacgggacgaggggagacgagccaacggctcggattcgccggaggttgctcgacggcggcggattacggcggcggcaaccggcggcgagggaagagggaaacggcgacgaggccacgaggggccgattcccggcggtgagagcatctacgcggcttcgggaactcgacgctagcgtcggattgggcggaactacgcggagcgaggccggcgacgagcgggtgctacggagctcgggcggcgacggcggcgagcacacggcgagcgacggcaacggtcggggcggcgccggctaa

SEQ ID NO: 85604 - DNA, 1475 bp, Oryza sativa
  Clone ID: PAT_MRT4530_84726C.1
tccacgatattcctatccacccgtgcttctgctcctccgtcgtgaatggacatccggccgaaaacctaaaactcatcgtagccggcttgctcctggaagaactcctcgtcagcgggattcgcttcatcttcttcagcaactgggggggattatttatgtagagcaaggtttgttaacctctgtagagggggcacactttacccacacgacattactaacccggatcacccagcccgtggggatcagccacgtcgggagacctccaagctttcatgacaaggcatttcgtatgccgacacaggtttaccatatgccgacgagaggggtcccagaccaacaacagttttacccaagaagtttttcagattttaagtttgaaggcgaccgtcgatactcgcacagggtgcacgaatatcgaggcgcaactagatggttacaaggggacatggccgagctggcgccgacgtggcgcctacgtggctgccacgcgggccggcgggaggtagacgaggacgccggccggaacggacggcggactacagcggcgagcggtggagtgaaccacggcgatacaggcaaaagcgagcacaccgggtggttgcacaggacgaggggagacgagccaacggctcggattcgccggaggatgcccgacggcggcgaattgcggcggcggcaaccggcggcgggagaagggggaaacggcgatgaggtcacgaggggccgattcccggcggcgagagcatctacgcggctacgggaatccgatgctagcgttggattgggcggagctgcgccgagcgaggccggcgacgagcggcgcttccgagctcgggcggcgacggcggcgagcacacggcgagcggcggcaacggtcggggcggcgccggctaacttcggggaggcgtgcgggacgggcgcggtgacaagaggccgacggcgcgggagtaatctctccggcctcgggccaaggaagaggaagaagagggcgcgcccggagtccccttccgcgtccttgctcgtgccggctccgccgacacgcgcaacgacgaacggcgatggcgaacagagcacgagaggcggcggcaatggcgtggaggcgatgggacaacgagggagaagagagggagggcgcctgggctttaaagggcggcaatgtcggtttggaaaccaactttaggcggtctaggcgcgagctggcgctccggctagcggccaaaacagcgacaggaggtgacgccggcgagagggaaaaaggggaaaagagggagagaaaaggggagctcgtcccttgcctctttggggaaaaggaggaggggagcgggggtgtcgcggcagagagtggagggactctgcctccgtcccttggcggcttgcgcgcggagaggcggggccgaggcgatgacgacaacgatgacggcagggcggtttggagcggagcggcgacacgggcgacaggcgcgggcaggcgctga

SEQ ID NO: 85605 - DNA, 584 bp, Oryza sativa
  Clone ID: PAT_MRT4530_84727C.1
aacctctgcagagggggtacactttaccccacacgacattactaacccgaatcacccagcccgcatttcgaaagccgacacaggtttaccatatgccgacgagaggggtcccagaccaacaacaggttaggtcccagaccatactgtgccaggaagcccaggggtcctccccgacaccaccccggcgaatccacatgtctctcggcatcaaggctcccccgattagcaatttactcagccaggggcgtcccattccacccgtgtggtcgcactattgtatgctccgatgtaattccaaaggaatcggtccttagatgcgaccgcacaagtattccgcccagattttaagtttgaaggcgaccgttgatactcgcacagagtgcacgaatatcgaggcgcaactagatggttacaagggaacatggtggcttgccttgctcagggtcttcacgaagcttcacgaatcttcaagatatccacgatcgacgaaaatccggtaaccgcaactatgctcaaacaaacaaaaacctaaacaagagaccaagaaaaagaccctatttagactaaataatagtgccattaaa

SEQ ID NO: 85606 - DNA, 2211 bp, Oryza sativa
  Clone ID: PAT_MRT4530_84728C.1
atgcatgcacaaaagaatgccgtcgtcgtcgccgacgacgtcgccatcgatctccacccgttcatacgcaagtacaacgacggccgcgtcgagcgtatcctgcgcagcagcttcgtgccggcgtcggaggaccccgccgccagccgcggcggggtggcggcgagggacgtcatcatcgacgaacgcaacggcgtgtccgcgaggctattcctcccgtccggtgccgccgctgccgccggcaggaggaggcttcccgtcgtcgtgtacttccacggcggctgcttctgcaccgagagcgccttctgccggacgtaccaccgctacgccgcctccctcgcctcgcgcgccggcgccctcgtcgtgtccgtcgagtaccgcctcgcgccagagcatcccgtgcccgcggcgcacgacgacgcgtgggcggcgctccggtgggcggcgtccctctcggacccctggctcgccgaccacgcggaccccggccgcacgttcgtcgccggcgacagcgccggcggccacatcgcgtaccgcacggcggtgcgcgccgccagccgcgaaggcggcgacatcggcatcgaggggctcataatcatccacccttacttctggggagctcgcatgctgccttccgaggcggcctgggacggcgagtcggtgatcaagccgcatcaggtcggcgagctctggccgttcgtgacgtccggcaaggcgggcaacgacgacccatggatcgaccctcccgtcgaggaggtcgcgtcgctaacctgccgtcgcgcgctggtggccgtggcggagaaggacttcctacgcgaccgcggccgcctcctcgccgcccgcatgcgcggctgcgcgtgggccggtggcggcgacggacgcaacgtgacgcttgtggagtcggagggcgaggaccacgggttccacctctacagccctctccgcgcgaccagcaggaggctcatggagagcatcgtgcagttcatcaaccagcctagccatagccccgcgccgctgcggtggccggccaccatcctttccgagctgcatgacactaccgactcgccacagattcttctacccatgcccactagggagtacaaagcaggagcctgcagtgtcctcgtcccttctgtggagcaccgttgtcagtgtccgcgaggctattccacccgtccggtacgtgccgccgccaccggccggaggaggcttcccatcgtggtctacttccacggcggctcgttctgcacggagagcgccttctgccgcacgtaccaccgctacgccacctccctcgcctcgcgcaccggggcgctcgtcgtgtccgtcgagtaccgcctcgcgccggagcatcccataccggcggcgtacgacgaagcgtgggccgcgctccagtgtcggcgactcggcgttccccccgtacagtacaaggtggacacgctctggccattcgtgacgcttgtggagtcggagggcgaggaccacggcttccacctctacagccctctccgcgggagcctgcagtgtcctcgtcccttctgtggagcaccgtcaggcttcaaggaaaggctgtctttagaaatgaaacaagattggcacccggccaacagcttttccaacggccacccggaccaacaacttttcaaacggccacccgggccaacaactttcaacggccacccgggcctagctgatccccccgtggggatcagccacgtcgggagacctccaagctttcatgacaaggcatttccaaagctgatacaggctgagctggcgccgacgtggcgcctacgtggctgccacgcgggccggcgggaggtagacgacgacccagccgcgaatggacggcgggcggcggtggcgagcggcggagcgaaccacggtgatacgggcaaaagcgtgcacaccgggcggttgcacgtgacaaggggagacgagccaacggctcggattcgccggaggttgctcgacggcggcggattgcggcggcggcaaccggcggcgggagaagagggaaacggcgacgaggtcacgaggggtcgattcccggcggtgagagcatccacgcggcttcgggaactcgatgctagcgtcggattgaacggaactacgccgagcgaggccggcgacgagcgggtgctacggagctcgggcggcgacggcggcgagcacacggcgagcgaaggctacggttggggcggcgccagctag

SEQ ID NO: 85607 - DNA, 268 bp, Oryza sativa
  Clone ID: PAT_MRT4530_84729C.1
atggacaatggactcaggcgcggcccgatcgctgtgtgcagcaaggggcgtgtgaaaagcaactcggccctcaactgcgctctatcgctgcaccaccgccgctgccatcaggagcaggtgtccgacaacctccatggcaatggcattgccgcgccaaatggaggtgggtgctggccgccgaatgccgcactagcccttgggctgactgtgagcagccaatttctgcaggggatggcaaggtgcagcagcggcagggtgtctggccaag

SEQ ID NO: 85608 - DNA, 462 bp, Oryza sativa
  Clone ID: PAT_MRT4530_8472C.1
cgacggaggagcttaaatagggagagagggggccggacgtggccgggagaggcgggaatcgctggccgacgtgggggagtgggggaggagagagaggcgggattcgaaaatcgaatcccggccatctcgggcgcgggcgcgggcgcgagagagaggggagtgggcgcgggagatgcggcgcacacgcggacgtggctgacgtggcccggagaaggcggaggcatgggcgcggcggcgccggctggagggaggggacgggaggttgggggaggacccgacaggtgggccccacctgtcggcgacctcgggagaggagggcggcggggcggcctggctgggcctcggcctgcggccggcccagcagggaggagggggaggaaaggagagaatgggccagcggcccattcgaaaaagggagggaaaaagaaaaagaaaaaggaaaaaaaggattttccctggaat

SEQ ID NO: 85609 - DNA, 1701 bp, Oryza sativa
  Clone ID: PAT_MRT4530_84730C.1
atgggccggccggcccaaggcggcccaaggcacgcgcgcgcgggaggggaggagagagagagccggtggaccgggctcacctcgcgtggtcccgagtgggacccgcttgtcagcggctcggctcaccgtgcggagggagcacgcggcgcggcgctaggatgggggagagacgcggtgcacgcgcgcggttcgcggaggacgcggatgcggcgggcccacgcgcagcctcacggctcgcggtggaccgcgcgcatggggagggagcggctaaccggggtcgactcgacccggttttggccgagctggcgccgacgtggcgcctacgtggctgccacgcgggccggcgggaggtagacgacgacgccggccgaaacggacggcggacgacagcggcgagcggcggagcgaaccacggcgatacaggcgaaagcgagcacaccgggtggttgcacaggacgaggggagacgagccaactgctcggattcgccggaggatgcccgacggcggcgaattgcggcggcggcaaccggcggcgggagaagggggaaacggcgacgaggtcacgaggggccgattcccggcggcgagagcatctacgcggctacgggaatccgatgctagcgttggattgggcggagctgcgccgagcgaggccggcgacgagcggcgcttccgagctcgggcggcgacggcggcgagcacacggcgagcggcggcaacggtcggggcggcgccggctagctacggggaggctactcgcactaccgtgcgggcgggcgcagtgacgagaggccgacggcgcgggagtaatctctccggcctcgggccggggaagaggaaggagtgggcgcgctcggagtccccttccgcgtccttgctcgtgccggctcctccgacacgcgcaacgacgaacggcgacggcgaacagagcacgggaggcggcggcaatggcgtggaggcgaatgggagaggaaaggaaagggggaagcttgggtttataggggcgacaatgtcggtttgggaagcgacctaaggtggtcaaaggagagggctagcgctcggcggtcgcggccaaagcggcgacagggaggagggaggaggatgacgctggcgggaggaaaaaggggaaaagagggagagaaaagggggcttgtcccttgcctctttgggaaaaggaggagggagcaggggcgacgcggcagagggaggaggagctctgcctctgtcccttggcagcttgcgcgcggagtggcgggggccgggcgatgacgacggcgatgacggcggggcggtttggagcagggcgacgacatgggcggcaggcgcgggcaggcgcggcagaggcggcgaccacgcggctctcgcgcacgcgtgggcagagcgagggaggggcgctcggcgcggctctcgcgcacgcgcgcgcggcgcgcgggcagagcggaggagggagggagagagagagagagagcgccgcggaatcgagctcgcgccgtcgtcctctctctccgccgtcgccgtcgacctccggccgggcctatccgcttgccgggaccgttccccgcctcggcgtcatctcctccggcttcgccgcaccgccgccgaccccgtccaccgtctcgccgagctcgccgaccgccggaacgccgccgttcccctgccccccgccgtatttccgccaattcctatctacccctctaccg

SEQ ID NO: 85610 - DNA, 1988 bp, Oryza sativa
  Clone ID: PAT_MRT4530_84731C.1
atggcgtccgaggtcgcagctgtggttcatcctcgttgccacccaatcgaccgccagagccacatccacgtcttccgtcatgccatatctacccatcggcgggcgacgctgtcggtcagcaagggctgtgcctcaatcgagccagcgtcggtgaagatggcttcgacggcacgacgactgatagagaggggcggaggagatcgatgcgacggcgctcgcttcaacgacagctgcgcgtggcgacggggacccggcgactgttggcgctgcgagattggtggcggccgggcggagatcgatggggcggtggcgcggcgactgatggggaggggaggggcaacgataccctcgctctcagcgccgatgaggcggcgatgaatctggcgttgcggcggcgcgatggagcgggaggggatggaggagcggcggagcgtcgatgtgcgacggttcgggaaggaatgaggaggcggcggcgtggggattgcagagtttcctttttttcgtgcgcgagatatggtgctgtttctttgggccagatgaccagcctcaagaatgctcgccatgagtctagcgaaggttgccgtggtcttggcggcagcggtggcttgcagaacggcttggcgacggcaagaacctcccgggtgaacggcgacggctcaatcggcaccaagaactatcgtgcaaatgtgtccatgagaatgaggaggcgactgtctcgtctattcaagggatccggctcttcatcaagtcatcatgacgagtctagtactcgttcatcagctgatgtttcgatggaggatgccgaagttccgcgacgactcctgaacgacaccgacctcgaccttgtcagtgatcgggagagacaagtctactatatgctgagcgaccgggaaaatagaatatggtatttcgttttgtttttccataaggagttcacacttacatggaaaggcttaagtacacttcttggttttcacgattcatgtaaaatcgatctccagaaaggaatttctaggttcgagacaaataggttttgggaagatatttctggtgctccaatttgcaagaaatctagaacaaatgatatccataatcctacaattagactcatgcacaaattgattgctatgactttgtttcttagaggtgatatgagacccattaggggagatgaattgattatcatcatggttagaaagatcaaaattgttcctgtgaaatgtatgataagacaatggttagaaagtataaagttctctgctcctgttgagtgcacttctctgattactcggatagcaaaagggctaggtgtcattagcgaccaaattatttttatctcagctgctcgtccgcgtattgatgaggcttatctagtgcaagggcatattctgaaacatggaatagatggatctttgaccatagaaaaacctcgtgcaggtggaacatacagggagacgcgcaacatgacaatgatgaaacgagaaagttcatcatccttgacacccgtgcagatgtatgaggcaggttgggcaccaaccggggatgcacccggatggacccaagctccacgccatagcattggagtctcaacctgggcaagtgccagtgaggaccggtggcatgcgcctcatgacatccaatggggggacaatcaacctcccagatcaagtggtgtgcctccatctccaagtgaatggcgctcgagttcctcttgttgggacttaggtgaaatcactaggagaatggacacccttgatatgcagacaggggagatccagtacaacttcacggaacacatagctcaaacgggttcaatccgcatcaaggaccctgagcgaaagccaagcttggggggagatatctctccccccactgagttgctctgttttatatctctgatatatgggttcttgttacttctcatgctctatgatcaagatcatacacccacatatatgcacatgctaaactcctacactgggagctaa

SEQ ID NO: 85611 - DNA, 1023 bp, Oryza sativa
  Clone ID: PAT_MRT4530_84732C.1
ctttagaaacatgaaagctgccccttgtcgatagcatgctttgggccaactgggccgcaacattctgcacatgttagcatcagcaagagccccattgccggttgacaaacgcaaccagcacaggctcctgtttgctagcagggttgccttatcatgagcattagtggtaagttctattgcattagtgtagtgttgtcctgcaagcatatattcctctctctcgaaagcctctctagcttgtaatttcagttcagcacttttccttttagacagatcattatcccttggcttcaaaccaaaagtttgcacatgagaaataactccatcgatactccaatcaggcagtgttgaaattggtgaagttaaaggaaacaacattttaacaatgtcccttctgcctcgattagcggcaacttcaattggagtcctattaaattcatctggaatatttgaattagcaccagcatctagtaagcacttcatgatgacaggagagccatgatttgctgcgaccatcacacaagtaacaccattgggatctctaaaattcacatcagcaccaacatcagcgtgatgctccaataaaatcttcatcgtgctatattggccattcatcgcagctgtcagcaatggggtcccagtgatagaatctaaatccacatcaactcctcttgaaagaaacaactctactatttcgcagtgtcctgccaagaaaaatatggcataaggaccatagggaacccgtatggtcatatggatcgagccttcaacaatacaaactttggcattgaactggttgacgctgaggtggaggtcctccacgaggtacctgaggacatccatgcttcctcgggcggccgccaggtggagagcgcggttcccgtcggccctgcccgccaccgccgccacgacggcagcctcgccctgcccggtgtccagccctcgcgccatcttcctgaggaggcggaggttgtcatcgtaggcggcctggaggagcatcttctcctgctcctgcttccccat

SEQ ID NO: 85612 - DNA, 256 bp, Oryza sativa
  Clone ID: PAT_MRT4530_84733C.1
atggagggaggtgtggggaggtggactggtggagcctcacagctgtcaatgaagaacagagccaagaatagagaaaaaaagatactacaagaactagcaacaaccctaacgaatgaactagcaagaaccccgacgaggccgtgtccgctcgtcgccgccgccgccgtgttcgccggtcgccgccgccgacgaggccgcgtccgcttgtcggcgacaatgccttgtccgctcgtcaccgctgccgccgaggccacat

SEQ ID NO: 85613 - DNA, 170 bp, Oryza sativa
  Clone ID: PAT_MRT4530_84734C.1
atctatcatcaagtgattgttgccaaggcaatacgctaagggaacatttgctgtcttatataataagaggggatgactattaagctttaggctcttttgtgctcattatctacataagtgcatgcttaagtgcttgatgtatccatgctcgttgacctaggatcaaactt

SEQ ID NO: 85614 - DNA, 309 bp, Oryza sativa
  Clone ID: PAT_MRT4530_84735C.1
atggatgctatcagagcgaggttttttttggatggtttagaaggaaagaaaaagtaccatatgattaaatgggaggctctttgtagacccaaagaggatggaggactaggttttctcaacaccaaaatcatgaatgaggctcttctttgtaatggggcggccatcagattctgggatgacatctggataggggaggttcctttaaaaatcatgttcccatacatttatagcatcagtgctgatccagggatgacggttaagcaagtgtataaagaaggcactgggaaattaatctacgaaggaccttaa

SEQ ID NO: 85615 - DNA, 144 bp, Oryza sativa
  Clone ID: PAT_MRT4530_84736C.1
atggctccaacgccgacgaggatgctgcggagtaggagaagaagtagcggcgctggagcaaaaagtttctcaaagaaaagattatcagcaacagtagaaggtaaaggtaaggcgacgctgacgctgcagatcacggatacatga

SEQ ID NO: 85616 - DNA, 337 bp, Oryza sativa
  Clone ID: PAT_MRT4530_84737C.1
ggttgaggcagaagcattaggccaaagacataccaacatccaacatgccaaccctattcatcacttagaatacctatctacccctgccaaaagggcaggggcaaaagaacattatctaaggttccagaccccactagcttagagttagaatagctttaccttggaggggaagatgggatggatgtcctgtacacactgcagtggccgacacgtgaggtcaagattatatgggggtggggagggagaaccgaaccctaatctagacttgtcatgatcatcatcaatcaacacctgtgctgttgccacaggcaaaaggaaatgctatgcacttgataca

SEQ ID NO: 85617 - DNA, 870 bp, Oryza sativa
  Clone ID: PAT_MRT4530_84738C.1
atggcggcgacgacggctaagcaccagacgatgcggtggagcgacctcgacgaggacgacgactacggcggcggcggcggcggcggcctcagcgccctgcagctcccgccccgcgtggtcatcgggccggacgagaacgggatcaagaaaaccgtcgagtaccggctcaacgaggaggggaaagcggtgcgggtgaccaccaccacccgcgtccgcgaggtcgcgcgcacgcgcgtcaccaagcgcgccgccgagcgccgcggctgggccaagttcggcgacgccgcgcacaacgacgacgccggcgcgcgcctcaccgtggtctcccccgaggagatcgttctcgagcgtccaagcgcaccagggagcaaatcggaagatccactcatccccgcactggacaagggcgccgcgctgatggtttgcaggatctgcaacgccaagggcaagcactggacatccaagtgccccaacaaggacttcgcccctctgcagctcgacgctctcgtcgacaacaatattcctcccaactctggcggcgacaatggcggcggatcccggccgggcaagtacgtgcccccgaagccgagggagtcggaaatgcggcggaggaacgacgagaactcggtccgcgtcaccaacctgtcggaggacacccgcgaggaagacctccgcgagctgttcggcagcttcggcccgctcacccgcgcgtacgtcgcgttggatcaccggaccggggagagcagggggttcggcttcctcagcttcgtctacagggaggacgccgagagggccatcgctaagctcaatggctatggctacgatagcctcatccttaatgtcgagtgggctgctccaaggcccaactag

SEQ ID NO: 85618 - DNA, 207 bp, Oryza sativa
  Clone ID: PAT_MRT4530_84739C.1
atggatgggcaggtggtgcgctgcatgcgggcggctgctggtgcgcgcaagccacttggcaagccgcacacgacgagcggttcgacgcatgctgcatgcagatgcagtggtggactggtggctggcgcggtccccaaccacgcaaatgatgtgattttgaccatgacgcacctgcaagggaaggcaacacaggccacggcgcctgca

SEQ ID NO: 85619 - DNA, 816 bp, Oryza sativa
  Clone ID: PAT_MRT4530_8473C.1
atgcggaaaccgacgccgtacgtctccctccatgacgtcgtcgccttcgatttcgtcgacggcgacgtccccttcgacgacctcgtcgacggcgaggggctgtgctgccccgacgacccgtttgaggaggtcatgagatgcctctcggcggtggacgaccctttcttggcggcgttcaagcttgattgctcgccgccgacgcccgcggccgacgccgacgtggactccaggagcgaggagcacatgcacgccgacgttggcggcgggctggacttgcagagagcagtaggcggcggcgatgagaaggcgggcacgccgagcaccgtcgacgacgttccgtggctccaagcttcggctgtggcgaggaagccgcgccgcgcacccgccgccgtacgcaagagggtctggtcactggtatccccccagctggccaccgccgccgccgccgccgtcgacaacagccgcgacgaagtttccagcggcggcggcggcggaggagaaggaggagaacactgctcgcgccccgccaagcggcggcgcaaatgcggcgaggagaagaggtgcggccactgccagacgacggagacgccgcagtggcgggtggggccggacgggccgagcacgctgtgcaacgcgtgcggcatccggtacaggattgaccacctgctgccggagtaccggccgtcgacgagccccggcttcgggagcgacgggtactccaaccgccacaggaaggtggtgaagctcagggagaagaagaggaagaaggccatgctggccgccaccgcaacggcgctaacttctgggcctgtgtga

SEQ ID NO: 85620 - DNA, 450 bp, Oryza sativa
  Clone ID: PAT_MRT4530_84740C.1
attcatatatcctttcattcaacacggtgaacgttcatacatgattgaaacagaccaacatttcaacaccttcatttattgataatacatgctgccagaacgaggggaacacattttatttagtgtccaggtcacacacatgaacaggcaagatcctgctccatacagagggggggcatcctgtccccggttgccagaaaagccgccgactacaccattggggttgtccacctggcacaacgccgggggggtcgacccaatgcgctgaaggatctctgttcggtagccatggaacacctaggtcttggggcgccaagcgtgagcggatccactctgcatgagacgaacccatacctgtgggggagcgctttgtaccttcaccatgtggtgtaaagggtggcgagatgaccaaagtaacctgctgggaactgcttgtccacagggacgggg

SEQ ID NO: 85621 - DNA, 261 bp, Oryza sativa
  unsure (1)..(261): unsure at all n locations
  Clone ID: PAT_MRT4530_84741C.1
ctcggcctactcaaacccttttttcttagggaacaaagtaacgagcggtgggcggcaangaacaaaagacagccaaacgggctcaccgtccgggagccagtgagacaaacctgtcggagacggttataaaaaaaacaaaggacctacctgcatggacaaccatttgcatgtgtgtgctgagatggtcgggaaataataatgcttgcccccgggttaaccaacgtatgcaataaccccccaattcccgaccgaaacaaacat

SEQ ID NO: 85622 - DNA, 1775 bp, Oryza sativa
  Clone ID: PAT_MRT4530_84742C.1
atggagcggggcgggccctgcgacggcctctgtcgcttccggattcacctaggcacgagaggggactgcccgttgcccgctggggacggggtcaagtcgagccttgagcttcatgcagaaaggagcaagaagatcagtccagagccgtcgttccgcaaagttagagtcagtggatcagttcaagacaacaagctaccagctgagtcagagcacctcgctctggacgcggcccaagggaaatggagcggaccggccgagctaaatgggctggccggcccaaggcggcccaagtgcgcgcgcgcgggaggaaaggagagagagggccggtggaccgggctcaccgtgcgcggtcccggggtggggaagggacgcggtgcatgcgcgcggttcgcggtggacgcggatgcggcgggcccacgcgcagcctcacggctcgcggtggaacgcgcgcacggggagggactgaccggggtcggctcgacccggtctaggctgagctggcgccgacgtggcgcctacgtggctgccacgcgggccggcgggaggtagacgacgacgccggccggaacggacggcggtcgacagcggcgagcgacggagcaaaccatggcgatacaggcaaaagcgagtacaccgggtggttgcacgtgacgaggggagacgagccaacggctcggatttgccgggggttgctcgacggcggcggattgcggcggcggtaaccggcggcgggagaaggggaaaacggcgacgaggtcacggggggctaattcctggcggcgagagcatctatgcggctacgggaatccgatgctagcgtcggattgggcggagctacgccgtgcgaggccgacgacgagcgggtgctacggagcacgggcggcgacggcggcgagcacacggcgagcgacggcaacggaagaggaaggagagggcgcgcccggagtccccttccgcgtcctcgaacgcaccggctctccgacacgcgcaacgacgaacggcgacggcgaacagagctcgggggcggcggcaatggcgcggaggcgatgggaggagaagagagggagggcgcccggggcttttaagggcggcaacgtcggtttgggaaccgactttgggcggtcaaggcgcgagctggcgctcggcgctcgcgtccaaatcggcggcagggcggagggaggaggatgacgctggcggtgacggaaaaaggggaaaagagggagagaaaagggggcttgcctccttgccgcttttggaaaaggaggaggggagcgggggcgtcgcggcagagggaggagggaggctctgcctccgtcccttggagactagcgcgcggagtggcggggccgaggcggtgacgacggcgatgacggcggggcggtgtggagcggaggtgacggcggcggcgaccaggcggtcggccaccacggcacgcgcgcgcgggttgcaacgcgcggcagggcagcggggccgggcggcgcagacggcgcaggcgcgacacgggcgacgaccacgcgggcgcgcgcgcgaacaacgacgcgcggggccgattccgcgggcggggagctcgccagggatggaggcggggagaaggagatcgagggaaagggagggcactcggcgcgggcggctcacgcgcacgcgcgcgggcagagcggaggtagagagggagagagcgggggcgcgtcggggaagagcgagagagtgagggagccgggagggagggggagatgggccgagagggattcggcccatcgaacccgggggaggcaaac

SEQ ID NO: 85623 - DNA, 1314 bp, Oryza sativa
  Clone ID: PAT_MRT4530_84743C.1
aacctctacagagggggtacactttacccacacgacgttactagccttggtaacctagcccgcatttcgaaagccgacacaggttcaccatatgccaacgagaggggtcccagaccgacatcaggttaggtcccagaccatactgtgccaggaagcccgggggttctccccggcaccaccctgttgaatccacatgtctcttggcattatggttcccccgattarctaattactcagccaggggtgtcccattccacccatgtggtcgcacttgccttatgttcggatgaaattccaaggaaacggtccttaagtgcaagaacgggaaaccgtactcccggtacgtttcccggtccgcggttttggaaaattcatttagttcgcaagtaccgacccaggtgtcgggttttccaagtcttttgtaaaacccaagttttacccaagaagtttttcagattttaagtttgaaggcgaccgtcgatactctgcatagtgcacgatttccgaggcgcaagggaggggctgaccggggtcggcccgacccgatctcgaccgagctggcgccgacgtggcacctacgtggcgcctacgtggctgccacgcgggctggccggaggaagacgaaggcgtcggccacgaatggacggcgggcggcggcggtttctccgggacgccttgcgacgatgaggggcgacggggcgtacaccgggatgacgagggagaatgagagggagcgagccaacggcttggattcgccggagggagcccatcggcggcggatttcggcggcggtaaccggcggagagaaaagggggaaacggcgacgaggtcacgaggggccaattcccggcggtgagagcatctacgcggctacgggaatccgttgctagcgtcggattgggcagagctacgccgagcgaggctggcgacgagcgggtgctacggagctcgggcggcgacggcggcgagcacacggcgagcgacagcaatggtcggggcggcgccggctagctacggggaggctactcgtgctacggctctcccggcgcttggcgatgaacggcggaggcgagacagagctcggaaggcggtggcaacaatggcgatgggaggagaagagagggagggcgcctgggctttaagggcggcaatgtcggtttggaaccgacttgggcggtcaaggcgcgagctggcgaaagggggctcgccccttgcttctttgagaaaaggaggaggggagcgggggctacgcggcataaggaggaggggctctgcctccgtcccttggcggcttgcgcgcggagtggcgaggcc

SEQ ID NO: 85624 - DNA, 135 bp, Oryza sativa
  Clone ID: PAT_MRT4530_84744C.1
atgccgccaatgcgtatattatccatccggcaagaggggcagatgaagcttgaaggttacgccatcgaactaggaatattcctcaagaagataccatggggactgctccaaccactcttgcaagctggcacctga

SEQ ID NO: 85625 - DNA, 5084 bp, Oryza sativa
  Clone ID: PAT_MRT4530_84745C.1
tcaccctctgtcgcgcctgcccgcgcctgtcgcccgtgtcgccgctccgctccacaccgccccgccgtcatcgccgtcgtcatcgcctcggccccgccactccgcgcgcaagccgccaagggacggaggcagagccccctcctctctctgccgcgtcgcccccgctcccctcctccttttcccaaagaggcaaggggcaagccccctttctctccctcctttttccccctttttcctcccgccggcgtcatcctccctccgccctgtcaccgatttggtcgctagccggagcgccagctcgcgccttgaccgcccaaagtcggtttccaaaccgacattgccgccctttaaagcccaggcgccctccctctcttctcctctcgttgtcctatcgcctccactccattgttgccgcccctctgttttgccgtcgccgttcgtcgttgcgcatgtcggaggagccggcacgagcgaggacgcggaaggggacttcgggcgcgccctctccttcctcttccccggcccgaggccggagagattactcccgcgccgtcggcctctcgtcactgcgccccgcccgcacgttccggagcccgaagacccgcagtgcgaggatttcgaggatcaagctccagatctcgagcaaggcaagccacctttgaacatcttgagcctatatttgaaatttaattatgggagccttgatgctgagagacatgtggattcgccggggtggtgtcggggaggacccctgggcttcctggcacagtatggtctgggacctaacctgttgttggtctgggacccctctcgtcggcatatggtaaacctgtgtcggctttcgaaatgccttgtcatgaaagcttggaggtctcccgacgtggctgatccccacgggctgggtgacccggccgtgcccacggtcatgggcggatgtgaggtgttagaaattagaatattgcctcagaagcatctttcaggcctcaccttctggtatacaccaattcccggtctctacaatatcgccctatgcctccgcgctgccctactccttgggggtgggaggaggatgaagattaggcttgtgcctccgctgctctcccaccgccgccgccttgtcatacctctgcttgtcttgctcctcgccgccgccgccagcgacgagcagctgctaagcctgcgtgggcaggctgctgtccttgtgtccatcaaagacgccttctccccgcctctcccgacgccattgcgcactacctggagcatcgccaacgacgcctctctctgctcctcgtggcatgccgtccgctgcgcccccgacaaccgcaccgtcgtctccctcgacctctccgcccacaacctctccggcgagctctcctctgccatcgcccacctccagggcctccgcttcctctccctcgccgccaactccctggccggcgacctaccgcccaccatcgccgccctccggcacctgcgctacctcaacctctccaacaaccagttcaacggcaccctccactactacttgtccaccatgaacagcctcgaggtcctggacgtctacgacaacgacctctccggcccgctcccgctcccggacaccaacagcaacctccgccacctcgacctcggtggcaacttcttctccggcagcatcccgaccagcttcggccgcctgcaggccatccagttcctctcggtcgccggcaacagtctcagcggccgcatcccgccggagctcggcaacctcaccgccctgcgccagctctacctgggctactacaaccagttcgacggcggcatccccgcgtcgctgggccgcctcgccagcctggtgcacctggacctggccagctgcggactgcagggggagataccgccgtcgctgggaggcctcgccaacctcgacacgctctacctgcagaccaaccagctgaacggcaccatcccgcccgcgctcgccaacctcaccgctctcaggttcctcgacgtctccaacaacgcgctcaccggcgagatcccgcccgagctcgccgcgctcacccacctccgcctcctcaacatgttcatcaaccgcttccgtggcggcatcccggagttcatcgccgacctccgctcgctccaggtcctcaagctctggcagaacaacttcaccggctccatccccggggctctcggccgcgtcgcgccgctccgtgagctggacctgtccaccaacaggctcaccggcgaggtgccgcgctggctgtgcgcgctccgcaaactcgacatcctcatcctcctcgacaacttcctcttcggcccggtgccggaggggctcggcgcgtgccggacgctcacgcgggtgcgcctggcccggaactacctcaccggcccgctcccgcgcggcttcctctacctgccggcgctcaccacgctggagctgcagggcaactacctgacggggcagctccataatgaggatgaggacgctggcagcccgctgtctttgctcaatctctccggcaacaggctcaacggctccctcccggcctccatcggcaacttctcctccctgcagacgctcctgctcagcggcaaccacttcaccggcgagatcccgcctgaggttggccagctgaggcggctgctgaagctggacctgagcggcaacaacctgagcggcgaggtccctggcgaggtcggcgagtgcgcgtcgctgacgtacctagacctgagcgcgaaccagctgtggggcgccatgccagcgcgggtggtgcagatcaggatgctcaactacctcaacgtgtcgtggaacaagctcaacggcagcatccccgcggagatgggcagcatgaagagcctcaccgacgccgatctctcccacaacgacttctccggccacgtgccccacaacgggcagttcgcctacttcaacgcgtcgtccttcgcgggcaacccgcggctggtgctgtgcggcacgcccgcccccggccccgcccccgggacgacgacgcctggcagcgggggggacgggcgggcgccggtgatgtggctggcggcggcgctggggctgctggcttgctcggtggcgttcgcggcggcggcgatgagggcgttccagaaggtgcggttcggatgcgaggacgtgatgcggtgcgtgaaggagaacagcgtggtggggcgtggcggggctggggtggtgtacgccggggagatgcccggcggggagtgggtggcggtgaagcggatcgtcgacggtgggttctcggcggaggtgcagacgctggggaggatccggcaccgccacatcgtgcggctgctggccatgtgctggagcgcggaggcgaagctgctggtgtacgagtacatggccggggggagcctgggcgacgcgctgcacggccaccaccggcaccacgacgagtacgacgacgatggcagcaatactaatattattgggtcgttgttgttgccgtgggcggcgcgtcttcgtgtggcgacggaggccgccaaggggctgtgctacctgcaccacgactgctcccctcccatcctccaccgcgacgtcaagtccaacaacatccttctcgacgcccgcctggaggcgcacgtcgccgacttcggcctcgccaagtacctgcgcgccggcgcctccgagtgcatgtccgccatcgccggctcctacggctacatcgcgccagagtatgcatacacgctgaaggtggacgaaaagagcgacgtttacagctttggggtggtgctgctggagctgataacggggcaaaaaccggtgggagagcacctgcagctgcatcaagaggaggaggaggaggaagcaaatacgacgacgacggtggtggacctggtgcagtgggtgcgggcacgctgcggcagcggcaaggacggagtgtggcgcgtcctcgatcggcggctgggcggcgacgtgccggcagcggaggccacgcacatgttcttcgtggcgatgctgtgcgtgcaggagcacagcgtcgagcgccccaccatgcgcgaggtcgtgcagatgctcgagcaggcaaagcagcagctcagccgctgccaccctcctcctcctcctccaacatccacattccaagttttcttctcctcttccgttgctctagcgctgcttcctctccggtcgctgcgtccaccgagcgtcgccgcctccctggctgccgcgcccctcttccctcaccatgtccacttcctcggctacttccgctaccaccgactccgctacggtgttgtcttccacctctaccgtcgccccggttttcgtcaacccgccgattgctgcctctgcagctggctcttcggctccgtcgccgacgacgtcctcgacctcgccatggagcatgatcaatcggcccaggacttgtggatcgccatcgacaacctctttcaagccaacaaggagcctcgcgcgatctatccgcatcacgagttccactccatgacccaaggcgatctctccgtcgccgactattgtcagcgcatgaagacggcggctgatgccctccgcgacgtcggccaccccgtcaccgagtcccagctcgtcctcaacctcctccgcggcgtcaattcgcgcttcaccagcacggccgacaacatcgcgagcgcccctatcttgtcatcctttgcctctgcgaggaacatgctggttctcaaggagcttcgcaacaccaactcggtacaagtccagtccgagactgccctcgtcgcagccaacaacgcccactccaactgcaccgggggcacttgccactcctctggcagcggtgggcagcagcagaaccgcgccggcggcagcaagaacaagggcaagaacggcggccgccctggtggacagaacaacggcagcaacagcttcggcaccagcactttctccatccctgctccacgccaagctgcaccatgggctcacattgccttcgccgggccatactcctcgccactgcctgcagggtctgtccagccggcttgggaccaagctggccttgtcgccgctctcaatggaatgatgctttacaaccccaactcgtgggttctcgacacgggtgcaacttcgcacatgtccaccgacg

SEQ ID NO: 85626 - DNA, 5281 bp, Oryza sativa
  Clone ID: PAT_MRT4530_84746C.1
agggaacagctccggaaactcggcgcggagaagatcttctcgttcccaggttgcctcatcttcagaatgattgctccattggactttgtagaacttgatggtcttccttcgagtctgatgttctgcctcttcaagaaccttgatcggtctttccttgtaggtcagattcttttccagctcgatattacccaggggaacttgctcttctggaactcgaagacatttctttaactgggatacgtggaacacgttgtgcacatctgcgagaccttcaggtagctcaagctgataagccacttcgccacgtctggccgttatgaggtaggggccgatgtagcggggtgctaacttgccggacatcccaaaccttctcataccacggaggggtgatacccgcaggtacacatgatctcctttttcgaactcaaggtcacgcctccgattgtcagcgtaattcttctaacggttctgtgctgtcttcaaacgttctcgtatcagcttaacttgttcttctgctgacttgagtatgtcaggaccgaataccagtgcttcgcccacctcattccagcacaagggggtgcggcactttcttccgaacattgcctcattcggcgacatctgaatgctggcctgataactgttgttgtatgagaactcggcatacggcaaacaacgatcccaagtgccttcgaaatccaaggcacacgcacgtagcatgtcttctaggatttggtttaccctttcggtctgaccatcggtctacggatggtaggctgtactaaaattcagatcagttccgagggcttcatgcaactgcttccagaaccttgaggtgaactgagtgcctcggtctgacacaattttcttgggacagccaaatctacatgacatgggtcatgtagagttctgctagtttctttccatcataggtggttttcactggcacgaaatgagctgatttcgtgagtcggtccacgattacccaaatggagtcgtacccgttgggggttcttggcaaaccggtgatgaaatccattccgatctcttcccatttccactcgggaatcggtaggggttgcagcataccagctggcctctgatgctctgccttgactctttggcaaatgtcacacaaggctacatattctgcgacatctcgcttcattccagcccaccaaaagtatgccttgatatcttggtacatcttcgtacttcctggatgaatggagtaagcggactcatgagcttcctttaggatgagatctcttaactccttcttggccggtacacagatgcgtggaccgcaccaaactgtgccttgatcgtctatggagaaattggtgtctttcttctcctgtattctttttattaactcttttatcccttcgtcatctttctgagcctcccggatttgcgattctagggtaggctgtactgtcaagctggcagggactcctgactgtaccacggtcagccttaacttctccaattctctgcacaaatgctcttggtcaggccgtatttgagctacattgcaataggccttgcgacttagcgcatcagcgaccacgttggctttaccaggatgatagtggattccaagatcgtaatccttgattagttccaaccatcttctctgcctcatatttaactcggtctgtgtgaagatatatttaagacttttgtgatcggtgtatacttcacatctgttcccgattaaataatgcctccagatcttaagagcatgaaccacggctgccaattcgagatcatgggtgggataattgacttcatgaggcctgagctgcctggatgcataggccacaacctttcgttcttgcattaggacacatcctaagccttgtcttgatgcgtcacagaagatctcgaaatcttttcggatatctggcaaggtgagaactggtgcagtggtcaaccttttcttcatttcttgaaagctgtcttcacaggctgcagaccattgaaatttcttttccttctttaacagttcggtcataggtctggctagcttagagaatccttcaatgaatcttcgataatatcccgctaagccaaggaagctgcggatttctgacacgttcttgggcgggttccaagcaagtacagcttcaaccttgctgggatctacttcgacaccgttggaggaaatcacgtgtccaagaaatgctactcggtccaaccagaattcgcatttcgagaatttagcgaatagttgatgatctctgagcttttccattatcagcctcaggtgttcagtatgttcttcctcgttcttggagtatatcaggatgtcatcgatgaacaccacgacaaactggtccaggtattccaagaagatttggttcattaagttcatgaagaatgctggagcattggtgagtccgaaggacataactgtgaactcatatagaccataacgcgttgagaaagcggtcttcgggatatcttcagatctgattttcagttggtggtaacctgacctcaagtcaatttttgagaaaactcttgctcctttaagttgatcgaataaatcgtcaatccgtggcaacgggtacttgttctttatagttacttcattcagggctctatagtcgattaccattctctcagagccatcctttttcttaaccagaagcactagggctccccaaggagatgagctaggtcgcacataacctttactctccaactcttcgatttgtcttttgacttctgctaactcattagctgccattcggtagggtctttttgcaattggagctgtgcctggtgccagttctatggcgaactcaatctctcggtctggtggcatactcgttaattcttctggaaatacgtcgggatattcacagactatgggcaccgactccaaggaggtgacttgtaaacaggttaggatagaccgacttgcggtaggggtgttaggggtaaagcggacttgctttcctccaggtccttgcaaagtgatggacttttcggcacaatctatctgtcctttgtgcttagccaaccaatccatccctaggatgatgtccaagctttgcgagtctaggattatcggtttggctagaaagtcaacttcctcaattctaaggttaacttccgggcatatttgagttgcccttatattcctcccaggggaatgtactatcattggtacacgcaaattttgggttttccaaccatttcttttcacaaaagcttgtgatatgaaagaatgggaagctcctgaatcaaatagaactattgcgggtacggagttgacagagaacatacccatcacaacgtctggagcatcctgagcggtttcagcttgaatgtgattcacacgtcctcgaccaaagtggttggaagcacgagaaccttatccacttgcctgagagctaggacgagactgagctgccgctggagtaggagttctggcggtgctgccattagcatgccctgagttggtgttggtaggattctgagggcactgtctagcatagtgacccatctggttgcaccggaaacactgaactgctgacggtccctgtggtgacttgaaggaggtaacactgtttggcgcagtgttgccactaggggcacgctgctgtggcggaggtgccggacggttcatctgaggacgaggggcgtagcctggctgtcggttagcctgagtgaccgactggtggtattgcatgggttgaccgtagcgagggcgaggtgcgcctcgggaagaatttccctgatggttagacttgcgacttgcgtttcttgtattcttcggtagcctcttttctggcatcctcaagcagaagtgccttgttgatcatatgttgaaaagtggggaagtcatgagcaagcaactggagtctcattccaactgcgattcccttcaagaatttcctgatcttcttcttatctgtgtctacttcctcaggggcgtaccgagccaacttgttgaactgacttaggtactcattgacactgctgttgccttgcttaagtctgttgaattcttctttcttcatgtcaatagtgctttcaggcacatgagctgcatggaaagccatagcaaactcatcccaagcaatgttagtgggttcaggatgtgcattgcagtaattctcccaccaatctgcagcaggtcctcttagctggtgagaggcgtagagcgtcttctcaacaggagtacactgcactaagttgagttttctatcaacatctttcaaccaatcgtcagcctcgacgggctcgacggtctgagagaactctggcggacgtgacctcagaaagtctgtgagcttggatctattgttgcccacgtgagggtggccatttccatgcgcattatgctgaaaaccggctatggctgtggttattccttgcaagatttgtgtctgaactgccattatgtgttgcatgttgttttccacatgaggccgaaaccctaaaactcatcgtagccggcttgctcctggaagaactcctcatcagcaggatccgcttcatcttcttcagcaactggggaggagttatttatatagagcaaggtttgttaacctctgcagagggggtacactttacccacatgacattactaacccggatcatccagcccgtggggatcagccacgtcgggagacctccaagctttcatgacaaggcatttcgaaagccgacacaggtttaccatatgccgacgagaggggtcccagaccaacaacagttttacccaagttgttactcagattttaagtttgaaggcgaccgtcgattctcgcacagagtgcacgattatcgaggcgcaactgggtggttacaaagggacatagctgagctggcgccgacgtggcgcctacgtggctgccacgcgggccggcgggaggtagacgacgacccggccgcgaatggacggcgggcggcggcggcgagcggcggagcgaaccacggcgatacgggcaacagcgagcacaccgggcggttgcacgtgacaaggggaggcgagccaacggctcggattcgccggaggttgctcgacggcggaggattgcggcggtggcaaccggtggcgggagaagagggaaacggcgacgaggtcacgagaggtcgattcccggcggtgagagcatctacgcggcttcgggaactcgacgctagcgtcggattgggcggaactacgccgagcgaggccggcgacgagcgggtgctacggagctcgggcggcgacggcggcgagcacacggcgagcgacggcaacggtcggggcggcgccggc

SEQ ID NO: 85627 - DNA, 267 bp, Oryza sativa
  Clone ID: PAT_MRT4530_84747C.1
atgggttcagtccacgtacagtccaatcttcatcaatcgtcaccactcaccatcgggaggaaagggcttcccctcctcggcggcgcttcaatcgaggaggagttggtcgtccacgacgtggtggtcggtgtcgggctgagcggcagcagcagcggcggcggtgacgggacggcggcggggaggcggcggaggcgcggcttggcctcgtcgtcgtcgtcaacaacggcgacggcggcgtggtggtgtagcggcattgggcagttctag

SEQ ID NO: 85628 - DNA, 1487 bp, Oryza sativa
  Clone ID: PAT_MRT4530_84748C.1
aagaaggcggcccagagcggcccaagacgcgcgcgcgcggaggaaggagagagagtccggtggaccgggctcaccacgcgcggtcccgggtgggacccgcttgtcagcggctcggctcaccgtgcggagggagcacgcggcgcggcgctagggtgcggcgggcccacgcgcagcctcacggctcgcggtggaacgcgcgcacggggagggactgaccggggtcggcccgtcccgacctcggctgagctggcgccgacgtggcgcctacgtggctgccacgtgggctggcgggaggtagacgacgacccggccgcgaatggacggcgggcggcggcggcgagcggcggagcgaaccacggcgatacgggcaaaagcgagcacaccgggcggttgttcgtgatgaggggagacgagccaacggctcggattcgccggagggagcttgacggcggcgaatcgcggcggcgacaaccggcggggagggaagagggaaacggcgacgaggccacgaggggtcgattcccggcggtgagagcatctacgcggtttcgggaactcgatgctagcgtcggattggacggagctacgccgagcgaggctggcgacgtgcgggtgctacggagctcgagcggcgacggcggcgagcacacggcgagcgacggcaacgggcgcgagctggcgctcggcggtcgcggccaaagcggcgacagggaggatgacgccggcgaggaggaaaaaggggaaaaggagggggagaaagggggcttgcccctttgccgattcgggaaaaaggaggaggtgagcgggggcgacgcggcagagggaggagggatgctgcctccatcccttggcggcttgcgcgcggagtggcggggccgggcgatgacgacggcgatgacggcggggcggtttggagcggagcggcgacactggcgacaggcgcgtgcagaggctgacggcggcggcgaccgggcggtcggccaccacggcacgcgcgcgcggcttgcaacgggaggcgcggcggatggagtggcgcggctcgggcacgcgcgctggctcgcggggccaagcggctgcgcggctgcaggcggcagggcagcgggaccgggcggcgcagacgcgacgcgacacgggcggcaaccacgcgggcgcgcgcgcgaacgagcgcggggagcggcagcgagggagcggagagggaagactcggctcggcgcgggcggctcacgcgcacgcgcgcgggcagagcggagaggcgcagggcccggctctcgcgcttgcgcgcggcgcgcgagggaggggcactcggcacggcgacgcgcgctcgcgcgcgcggcgtggggcggagcggagggagagagggagagagggagcgggagcgcgccgggggagagagaggaaagggccagggaagaggggaagatgggccgagagaaaatcggcccatcgaccccgggggaggcaaaatggacttttgcagaggaatttga

SEQ ID NO: 85629 - DNA, 699 bp, Oryza sativa
  Clone ID: PAT_MRT4530_84749C.1
tggtgacttttatatattataaaaggtttcagagtaatgtatatgagaagttgtgtttatgacttattagctcacgataatacctgtgaacattttgtgtctagccaatacaaagcattatattctcttttttaaaactatatatccctagatttttgtaccatcaacaaactttggagaaaggagcgtacaaaaaggtagagctaaaaacagtacgatggacagttagcatttgaaatgttgaacgcctttgttaatctagacacactaaaacgataataatatttacaccaccaaaaatcaatgattaaaaaatattttcctaatatatttatcttgggttgaattactacctttttctataaacttggtcgaatttgaaacagtttgccttttatcaaagtcaaaacgacttatggtctaaaacgaaaacggagggagtaatagttagggtctttaaaaaacaattctttcagcggcaagacacaaactaatggttacgaggtaactctaaagataatacaaagatagacatgcatcgcaggtaaaaagggttattgaaactaagagtaagacacttatgacaacattgatataatcaattagtacgagagatggtattacatgtgacaaaaaaattcaccaagggccattacatggtggaaaggagcaccacgtaataaaggtacttactatggg

SEQ ID NO: 85630 - DNA, 1698 bp, Oryza sativa
  Clone ID: PAT_MRT4530_8474C.1
atgtcgaagtgggaccgccattggatagctaggtggttctatcacaccatccccttcgaggctggttctgacccggcgaaagccctccggtgctggcgtagggcgatcgcgccgaaccggaaacccaagatcgccgtggacggtgctatggaggcgcggttcgttctgctgcgcaaggtttgctcccacattagctgccatgacttggtggaggaattctgtatgcttcgcatctttcccctctcccagtcatggcaagtcacggttgatcaaggcgaagaggtcgacggtttgccgaacctgatacttcctgagggggcgaacaggccttcacggaagcgaatgcgcggacaagtgaagcttgcccctaggaaacgaagggctcctgcttcgtcggactccgatgccgacgacgaggacgatgccgaagaacgcgacggcgaggaggaaggagaggaggaagaggaggaggttgtggccgataaggccgcgaacgaggcggtcgaagaccgcatcgacacccccggctacactcctaccccaagtccaggtcacaacgagaccggggtggagtcgaacagctcccctcttcgacggacggatttggaaggagcgaaggctctagttgcgttctcctcgggcaaggaggcgaaggaggtccgtttggacctttcaactgctccccttgttccgctcggtgttgctggggcaggcggtagcatcgcggccggggcttcagcctccgctgaacggatcgtgtcggctgtggcgagggttttcgggagccctctgcgtgagctagctatttcgccattagtcaaggcgaaagggaagtgtgcgggcgccgaagcatctgcctcggaatattcccttgcggcgccccacttcgcccctggtgatttcgagactcgggcggaccttgttccctttgtggagggagtgagcaaccttgtcttgcccgctggcaccccgagcctgttcaccgaactaaatgagttcgatgaggggtgttctgccattaaaagcttggcagttcggtccgaactggataaggggaaagaggctagggccgaggttgatcgcctcaaggccgaactggagaaggagaaagcccattcggcagtgctggttgattactataaccttactgagccgaagatggaggctcttcgcctgaaggctagcagggccgaagcgagcgccgtggaggagtcgcagcggtttttgcgggagatggcgaagaccgccgaatctgcgagaacggcttgccaaacgctccgccttgcccttaccgacatgggcacgaaggtgcggggggttccttccaaggatgcctcagccttcgacttctccgagtggacccaaaggacggccggtccgctgccaaggcgcgccttctggagcaactggcgaaggcggaggcggcagaccggggcgaaggagaggacgcagcgtgcgaagagggtggaggcaatgcccaggatcacccagaggccgtcgaccccatctggggaagggccatattggcgcaatgggctgcagatcatactggggtgcggtctggcttcagccatgacgctggcaactttcacacttcttgatttgctcaacgcagactctcaacacagtgggccaataaactccttgtctgaatactttggaggccactgttcttgcagcctggtgcgcaccacatag

SEQ ID NO: 85631 - DNA, 1848 bp, Oryza sativa
  Clone ID: PAT_MRT4530_84750C.1
atgacggtgggcacggctgttcgaacacccgtggggatcagccacgtcgggagacctccaagctttcatgacaaggcatttccaaagccgacacaggaaacggtccttaagtgcaagagcgggaaaaccgtacacccgattttaagtttgaaggcgaccgtcgatactcgcacagagtgcacgaatatcgaggcgcaactggatggttacaaggggacatggctcaagatgttcaaaggtggcttgccttgctcgagatctggagcttgatcctcgaaatcctcgcactgcgggtcttcgggctccgaaacgcgcgcggtcccgagtgggacccgcttgtcagcggctcgactcaccgtgcggagggagcacgcggcgcacgcgtgcgggcggggctgggacgcggtgcacgcggtgcacgcgcgcggttcgcggaggaacggatgcggcgggcccacgcgcagcctcacggctcgcggtggaacgcgcgcacggtgaagggctgaccggggtcggctcgacccggtcttggccgagctggcgccgatgtggcgccttcgtggcgcctacgtggcgcctacgtggctgccacgcgggccggcgggaggtagacgacgacgctggccggaacggacggcggacgacagcggcgagcggcggagcgaaccacggcgatacaggcgaaagcgagaacaccgggtggttgcacaggacaaggggagacgagccaacggctcggattcgtcggagggaacttgacggcgacgaattgcggcggcggcaagcggccgcggaagaagggggaaaaggcgacgaggtcacgaggggccaattcccggcggcgagagcatttatgcggccgcgggaatccgttgctagcgtcggattgggcggagctacgccgagcgaggccggcgacgagcgggtgctacggagcacgggcggcgacggcggcgagcactcggcgagcgatggcaacggtcgggagggcgcgcccggagtccccttccgcgtccttgctcgtgccggctcctccgacacgcgcaacgacgaacggcgacgacgaaaagagcacgggaggcggcggcaatggcgtggaggcgaatgggagaggaaaggaaagggggaggcttgggtttataggacggcaatgtcggtttgggaaccgacttagggcggtcaaaggagagggctagcgctcggcagtcgcggccaaagcggcgacagggaggagggaggaggatgacgccggcgggaggaaaaaggggaaacgagggagagaaaagggggcttgcccccttgcctcttcgggaaaaggaggaggggagcaggggcgacgcggcagagggaggaggagctctgcctccgtcccttggcagcttgcgcgcggagtggcgggggccgaggcgatgacgacggcgatgacggctgggtggtttggagcggagcggcgacacgggcgacaggcgctgacgacggcggcgaccaggcggtcggccaccacggcacgcgcgcgcgcgggaaacaacgggcgacgcggtggattgagcggcgcagctcgggcacgcgcgctggctgcggggccgagcggcgtgggcgtgatggagttgggtcggccggggtgtccggttgtccagctgccggattcaccgcggaaattctggtttgagaatttctgggcgtgacagcagggcagcggggtcgggcgacgcggacggcgcggctttcgcgcacgcgcgcgcggcgcacgggcggagcggagggagggagagagagagagagagcgccaggagggagggggagatgggccgagagaaattcggcccatcgaacccgggagaggcaaga

SEQ ID NO: 85632 - DNA, 1338 bp, Oryza sativa
  Clone ID: PAT_MRT4530_84751C.1
aggcatggtataatcacaagtaggatgttcataattgcatgcaattttatttgtaaacaaaacaatttcgcaattgggatcaacatgttcaacgaatagtaatgacttgccttgctcaaagtcttgcgggtcttggccttcgcttggatccgcaactccctcgggctcggtggcagcggcgacgacggcggcggtgttggctcaaggcgcggcgcggcggcttcaaggcggcggcgcggcggcttcaaggcagcggcgcggcggctttaagcgatggcgtggcggcgtggagacggcggcgcggcggcgtggaggagggaggggaagagataagggggagaggggagaagggagacgcgacggcggcgcggggcgcgaggtgggggcgcgcggcgcgaggcgacgcgatggctgcggcgacgcgcgatgtgacagcggtggcgacggcgcgcggcgacgggatggcgcgcggcgcggcgggggcgaggggacgggcgcgcggcgcgacgacagcggcgacgcgacggcaagcggtgcggcagcgggacggcgatgggacagcgtggcagcggcggcgcgaggcgcgaggcagcggcacggggctcgaggcggcggcacggggcgcgaggccgacggcgacaatggcgacggcggcgcggcgggcgagcggcgcgaggcggcgacgcgcgggctcggggcggctaggggcagagcggctcggctcaccgtgcggagggagcacgcggcgcacgcgcgcgggcgggggagggacgcggtgcacgcgcgcggtctgcggaggaacggatgcggcgggcccacgcgcagcctcacggctcgtggtggaacgcgcgcacgggaggggctgaccggggtcggcccgtcccgacctcggctgagctggcgccgacgtggcgcctacgtggctgccacgcaggctggcaggaggtagacgacgacgccggccggaacggacggcggacaacagcggcgagcggcggagcgaaccacggcgataccggcgaaagcgagcacaccgggtggttgcacgagacgaggggagacgagccaacggctcggattcgccggaggaagcttgacggcggcgaatcgcggcggcggcaaccggcggggagggaagagggaaacggcgacgaggtcacgaggggccgattcccggcggtgagagcatctacgcggccacgggaatccgatgctagcgtcggattgggcggagctacgccgagcgaggctggcgacgagcgggtgctacggagctcgagcggcgacggcggcgagcacacggcgagcgacggcaacggccggggcggcgccggctag

SEQ ID NO: 85633 - DNA, 4188 bp, Oryza sativa
  Clone ID: PAT_MRT4530_84752C.1
atggacatctctaggacaaatgaaggctacacgagctgcggctcggtagtcgagatgttatggcacagggctggtgtcctgctgctaggggctcaatcctgcctgcctgtcccgggggttccggccgtaggtggggttgggtcggtactcttttttatggctaggatgggttgggaactatgccacgtcttccgtccgtataccgtggtggtatgtggcacgtggttacacgtgaggaagatgtgtcttgtggtcttgctcaatctttcccccccttcagtaagagaagctttggagaagaagtcctaggtagagtcctggcttataccccagttgagcgcctgtgaagatggagccgtagacccgctagtccgatgaacacgatccaagagctacacaatattattaatcaaggccgtgaacccacacgaacctgccttaacccaaggcctacgatgattcagaccgaactggcaacccgacctgggtcccagcttgtcccaagccaacccaggccaacccacaagacacatctttactccgcattccatggccttggaacccgtcgtaaacatgtgacataacccttcacccatcctagccgtgaacaaaagtaccgacccaaccctacctatggccggtatcccgggacaggcaggccaggattgagcccgggcaccgacccgtgtagtcttcatttgcctagacatctcgattaccgagccgcagctcgcgtagccttcatttgcctcatagatatccattgtcgcaacgacttcatccatctctatccgtgtccttttgttccagagctcggcgacgaccgcaaaccacgcttcgggaacctccggaacgacagaagctacgcgaagcacacaagcaaagctacaagcgcgaacgactaccgacaccggtacatgggtaccggggtcgacagccgcacaacgggtacggggcgacaccgaaaggacgaggatgagggcgacgagggagagatccttaccaccacgcgatgaggcgtgggaatgacaaagacaaacgagcgcggcggagacgactcgcggacgacggaggcgaacggcgagggaacaacttcggcggtgatccttggacgaaggcgagacgcggccggcgcagggcttgacgacgcggaggcgaggacgaagacgacgacggggctgcagcggcatacttaacgacgaccgggaacgacgagaggacgacaacgatgacgaccggggccggcgaggagacgatgatggcagccgcggcagctgcacagaggtgaggccggcgtgggacacgccgcagcgatgcccatgacggtggcggcacaacgagacgaggagccggcgaggaggagcggccgaccgaagggacgtcggtgacgacgaggatggagaggaggcgatgccgaggacgacgtcaccagttcgccgctgcgatgcccgaggtggtggtggcgcggccgacggcgcacgggtagaggaagggccaaccggggaaattccggcgaagtggatggagaggccggcacggcacggcggtgttccggcgaaaccgaggagtggccggggaaggagacgatgccgcggtatcgaaggaggagacgaaggcgtcgatcggcgtatcggtgatgaacaggagccggccggagacggtgtagtggtggcgacgccactgaacgccggcgagaacgcgcctccggtgctctccgcgctaaacggaggacggcccgggggagaggaggcggctgcgaggctgctggtggcgacggcgcgaccggatggcgctccggcgaggtgggagaggcggctggaggcggccggcggcacaggagagagaggaggacggcggggagaggtggacgtgacaaatgtgccatttttggatgctatgcaagtaccaacatacgcccgttatctcaaggtcatactcaacaacaagagaccgctcccaacaacggaggtggtcaagctaacggaacactgcagcaacctgatactccacaagctccaggagaagaagaaagatccggggtgtcccacgatcacctgctcgatcggggcacaacaattcgtccatgccttgtgcgaccttggagctagtgtcagcgtcatgccaaaaaacgtctttgacaaactcaacttcatggtgttggcaccaacaccgatgtgcctccaactggctgattcatcagttcgttacccggcggggatagtggaggatgtgcctgttaagatacggaatttcttcatcccggttgattttgtggtgctagacatggacatggggaaggagacaccgctcatactggggcgtccgttccttagcaccgcaggagccaacagtgacgtgggaacggggagtgatacaaacattcaagaggtcgaagtggagcaacccaagacggatagcctggtaaggttcatgcagaacttcctgggaaaggaaacaacaatgcccaggaaccgttattggaggacgctagtaaaatcacctgtaccggccaagaagttagagcagccagctcagaggaagccgtcttctgcactaaaatacaaaggtgtggaaggaaaagccaaagacgcccgctccattacctccggagacgggtggaaaatccgtgaactgaatcgaaaggaggggtcgggctctctatcaagtcgtcatgacgagtctagtactcgttcatcagccgatgcctcgatggaaaacgccgacgctccgcgacaactcctgagcgacactgacctcgaccttgtcagtgatcgggagagacaagcctactacatcctgagcgaccgggagtatgctcacacgcgagaatactcaccggagttgctgaaaaagataggtttggatgttgaatttcgttctatttggaaagctgttggttggcagagatttgctgtggtagatgagtctggttctcgtttgcttactttgcaatttctgtgcactttgaaagaaatagaagatggtatttcttttcgccttttccgtaaggagttcacgctcacatggaaaggcttgagtacacttcttgtttttcacgattcctttaaaatcgatctccagaaaggaatttcttggttcaagaaaaataggttttgggaagatatttcgggtgctccaatttgcaagaaacctagaacgaatgatatccataatcctgcacttaggctcatgcacaaatggattgctatgactttgtttcctagaagtaatctgagacccattaggggagatgaattaattatcatgtttgccatggttagaaagatcaaaatttctcctgtgaaatgtatgataagacaatggttagaaagtataaagttctctactcctgttgagtgcactactctgattactcggatagcaaaagggctaggggtcgttagcgaccaaattgcttttatctcagccgctcgtccgcgtattgatgaagcctatctagtgcaagggcatattttgaaacatggagtagatggatctttggtatactttttccccggttgtacaaatgaaatcccattgccaaatgcggggtatcatttgtacaactgccttgaactaaccattcccctgcagaccatagaagaatctcgtgcaggtggaacatacagggacacgcgcaacatgacaaggaacgaacgagaaagttcatcatcctcgacacccgtgcagatgtatgaggcaggttgggcaccaactggggatgcacccggttggacccaagctccacgccatagcatcggagtctcaacctggtcaagcgccagtgaggaccggtggcatgcgcctcatgacatccactggggggacaaccaaccctctagatcaagtggtgtgcctccatctccaagtgaatggtgctcaagttcctctcgttgggacttgggtgaaatcactaggacaatggacacccttgatgtgcagacaggggagatccagtacaacctcacggaacacatagctcaaacacaagaatggcaacaatctgctaatgctcagttcgccaacatcaacaacatgatgcagggttcaatccttatcaaggaccctgagcaaaaggcaagcttggagggagacatctctccccccactaagatacttctcatgctctatgatcaagatcatacacccacatatatgcacatgctaaactcctacactgggagctaa

SEQ ID NO: 85634 - DNA, 685 bp, Oryza sativa
  Clone ID: PAT_MRT4530_84753C.1
aaactcatcgtagccggcttgctcctggaagatctcctcgtcagcaggatctgcctcatcttcttcagcaaatccgcccatgaccgtgggcacggctgttcgaacagttttgttaacctctgcagagggggtacactttacccacacgacattactaacccggatcacccagcccgcatttccaaagccgacacaggtttaccatatgccgacgagaggggtcccagaccaacaacaggttaggtcccagaccatactgtgccaggaagcccaggggtcctccccgacaccaccccggcgaatccacatgtctctcggcatcaaggctcccctgataagctagttactcagccaggggtgtcccattccacccatgtggtcgtacttgtcttatgtttggatgaaattccaaggaaacggtccttaagtgcaagagcggggaaaccgtacacccgattttaagtttgaaggcgtccgtcgatactcgcacagggtgcacgaatatcgagacgcaactagatggttacaaggggacatggtggcttgccttgctcgagatctggagcttgatcctcgaaatcctcgcactgcgggtcttcgggctccgaaactacacgcgaaacgggacaactcaacaaacggcgaaaataaagccctattaatgacctctaagcgtgccattaga

SEQ ID NO: 85635 - DNA, 2533 bp, Oryza sativa
  Clone ID: PAT_MRT4530_84754C.1
tctttcctccgtcttcgctagacgcccccctcttcagcccctgtggcgtcagcggctgccctgctgccttactgttagttcgcgcgacgccgacaccccccccgggaccctcgcctccactccttcctcctcgcgccgtcgccgccgccgcatccgtgccctccttcgccgtccgccgtcgctagcagccggagaagagaagcatggatacccaggtcaaacttgccgtcgtggtgaaggtgatgggccgcaccggctccaggggtcaggtgacccaggtcagagtgaagttcctcgacgaccagaaccgtctcatcatgaggaacgtcaagggcccggtccgtgagggcgacatcctcaccctgctcgagtctgagagggaggccaggaggctgcgctgaagctgtggcggttgtgttatttcgtggttcctgccttttgaaagtaaaatgccatattgtcgccttatttcgtgtactgcttttccggtccagttcttgaacaatggtttgtctttctgagtaggccttatatgttatgagttaagagcaatggaaatgtaatgggtacttgtctggttgcagttttggtctgttgcctataactaaagttccattgttgtgagacatggttatgctctactggctttgggcaacatgaactgattagatgaatgctatcttcaatttaccaaaaaaaaaaaaaaaaaaaaaaaaaaaaaaaagaaatgaaaacagctttgtatagttccaaatgatctggagcctcagaagacgattcccttgcagcttgttggctgaggtggatttcctgattgccggtgtgctcgccatggtttcggtggatgtcatggtgggtgcatcactgctggtcttggtttcgtcagcgccatggtgttgtgtgacttgttcctcatgttcttgcatgtcaggttcacagagttcggtcaagtcctgcctagaatggctgctcttgaggctgaattcggcatcatcttcaccttccgaagggttcaacataacatcagtcagatccacatttctctccttcaggaaattcatgaactcctgaaagttctgctctgttggccggtaatgcccactgtgaggccagactgccttcaaaattccatcctctacaatcagtctccctgcagctgatgtagctccccctgcaaggaagctggagtgctggaatgtgcccttctgtttctgaccaatatacagagtcttgcatgtgctcagcacaaagatccattttgagccctttcggcttttggtcgtgttgacgatctgacggctcagtttgtatatcagcctcgaatcctcgacgatcacttcataggattccctctctttagggccaaggtacttgatgcattgcttatgcagcttccatctagggcaatgctcttccaagttgacatctttcccttcaccaacatccaaccagtagaagaatggctggttgatctcacaatggagccaacggtggtagtagtagtgcagattgtgcccataccgatgtcgaggatcgatcgcctcaagccaatgctgtagagcaagtttctgggccttctcatctttggacagacctttgccaaccttggcagccctcattcttgcccgagaccatctcgagatggccgtttcgggcttctcaatgtcgaagaacgacaccgaattccgcttgagcagtgcgaaatcgagcaatttccaccagctctgctcgacaagaacggcgcaatctgcgagctgccttcttgtcctgaagctcttgtacaccttctgcagcctgacagccgctgcctggtgcttggggctggcaactccggcgatcaccggagaatcctccggtgtctggtctccggcaagcgcaaatctcgatgcaccagcagtagcatttggcttgctgctgcagctctccttgtcagacttgggactcctgatggatatcatggtctccatctgaaccgggtcagcctctcttctcttgaagctcagggagccctctatgatcagcttccccccggagccgaatgccggcagcaatgtcgccgacggtgatggcatcggtgatgtcgacggcgagtcatcggcggcggcctccatgtcgtcgtcgaagctgagggaccggatgaacagcctgcccatgttgtcctccattgctggcaggtagtcgtctggtgggtatgagattgacagccccatctttcttggctttggactcaaggtgatgttgcaagcctgtcttgtttgcacgttttcctcttgtctggttgatccacttcctcttgttgttaatccaaaatttaagttatccttgttgttttcctcctgatccctgcaacaagtcccaatcaccttagagaagctccttaattatgactttaattatgagacagggatgtgagacagaagggcaataggaggagattcaggagcagccaaacataaatagggccatagccatagaatagaaggaaggaaaggttgcaagagctgagggcagcttgcctcaaatctcctcaagc

SEQ ID NO: 85636 - DNA, 2258 bp, Oryza sativa
  Clone ID: PAT_MRT4530_84755C.1
atggattctccgacaacgagctactcgacgacttcagctgagggggagatccaacctaaccagatcggagccatcatcgtcatcgacaacttggtctatcgagatcatccaagcctcaagctccgcggcgtaccaaaagatgtcagatcgcatgatatcgaacgagtacgcaacaaggaacaattgagcactcgagtaggttgtggtcaagtacaccgcattatcgagaacgatctcaacaaatgcagagttgtcgcgcccaacctaccaacgaagaccgacgacctatctcatagcaccggccatggctggactactcgagaaaagtacgttcccatccctcgcaccgcaacctccattggtgctcgagagataactctacatgttcgctggtcctcgaaccagtacgtagatttctctcgcaccgcaacctccattggtgtccgagagataactctactcgctcgctggttctccaaccagcacgtagcaatctctcgcaccgcaacctccattggtgtccgagagataactctactcgctcgctggttctccaaccagcacgtagcaatctctcgcaccgcaacctccattggtgtccgagagataactctacacgttcgctggttctcgaaccagtacgtagcaatctctcgcaccgccaacctccattggtgttcgagagataattctactcgctcgctggtcctcgaaccatacgttgcaatctctcacaccgccaacctccattggtgttcgagagataattctactcgctcgctggtcctcgaacctctcgcaccgcaacctcagatggtcgagcggtgtagcgattctcccactatttctacttctagtggtagagttgcgactaccacctggtcctcgaccagaggaaaattctattcgacattatcgaagatcgcatgtctctatggttctacaccaagatcaactaaggcgaatacgacaaatgttgacaaggctctgtcgcagactctacgcctactcgattactcgagaacggatccaccacataccatgttttatacggaaactgacctcgagggagttccggataaggaaagacaaccagagttctacatggaaacgacaagtactactcagattgtatccatattagttttcctagttctacttggataaggggacacctatgggtataaacataagacccctaggaggagaggggggacggaacaatagatcaagacacaaaatcaacatacaagccaacatacgccaagacaagacgccggatatcgaattcagagataagcatagctagtcccctacggtgtctacagattctgtcaggagagacatagcgccgtctgtgatctcgccgggcacggattcgaagaggaagactaccctattgtcgactacgtgatgatacttcagaccaccaagtcgataacagatagatatgctaccccaaatattgtattgtctcgcatataccctgataccaacaatccccatactatgcaaataccggaatcgcgacatcaaacgtcgacactgcagagggggtacactttacccacacgacattactaacccggatcacccagcccgtggggatcagccacgtcgggagacctccaagctttcatgacaaggcatttcgaaagccgacacaggtttaccatatgccgacgagaggggtcccagaccaacaacagttttacccaagttgttactcagattttaagtttgaaggcgaccgtcgatactcgcacagagtgcacgaatatcgaggcgcaactgggtggttacaaggggacatggccgaggtggcgccgacgtggcgcctacgtggcagccacgcgggccggcgggaggtagacgacgaaccggccgcgaatggacggcgggcgacagcggcgagcggcgtagcgagccacggcgataccggcgaaagcgagcacaccgggtggctgcacaggacgaggggagacgagccaacggctcggattcgctggaggttgctcgacggcggcggattacggcggcggcaaccggcggcgagggaagagggaaacggcgacgaggccacgaggggccgattcccggcggtgagagcatctacgcggcttcgggaactcgacgctagcgtcggattgggcggaactacgccgagcgaggccggcgacgagcgggtgctacggagctcgggcggcgatggcggcgagcacacggcgagcgatggcaacggtcggggcggcgccagc

SEQ ID NO: 85637 - DNA, 214 bp, Oryza sativa
  Clone ID: PAT_MRT4530_84756C.1
gtgtaaattttccccaagcaatgagatcaaagactcaaagctaccaagacggccccgagcactggtgtcatctaaggactccagagtcgacagcccgcctccaggagagcagtttttgggttataaccttatccaaccaactcaggactggccaagcatagaatcccgcatagttccaggatgatagcccaaaaccccgagagccccgggaaaa

SEQ ID NO: 85638 - DNA, 411 bp, Oryza sativa
  unsure (1)..(411): unsure at all n locations
  Clone ID: PAT_MRT4530_84757C.1
gaaactgaaatggtgtgatgcaatgggtnggctgaagtgggaggtgcagcgtgtgtgncgctttgttgcgggacagccaaaagtgggatatagtgtgcgcacacaatgcgccacaaatnggcaatggccagtgtaagatgtgtaggatgaatntgtgatgaggatgccantaccctggcatagtgaaatngggctttgcgtggataagatctatcggtgtntaagtgcagctatngttngctgcgttaattgtattttaggtgcctggaacttttcagggggaaataataggggagataactgacccccaaaaggtcatgtgatgctggccgactggtggatgcnccgttggttgggctgttgttgctatagcaaggnttatttagttttgaaaaaaaaaaaaaaaaaaaa

SEQ ID NO: 85639 - DNA, 193 bp, Oryza sativa
  Clone ID: PAT_MRT4530_84758C.1
atgccgcaaaagacattttgtccccagctttgtgctctgttgatcgaccgattggtcaagacgaacggatgccgagacagacaaggcgggatacatcactctctctccaaaaggtgggagaagaacggggaggagaggacgccggccctggaccacgctcaagctctctctgcaaatccatctcctcgatccg

SEQ ID NO: 85640 - DNA, 1770 bp, Oryza sativa
  Clone ID: PAT_MRT4530_84759C.1
atggcggtggcggcgagagtagtggaggaggaggatccagatgtcgtagagatgatgaagaggagggatgatgaggaggaggtggtgggtgaggcgtgggactacaagggaaggggtgccatccgggggtcgacgggcgggtggcggagcgcggcgatgatcctgtgcgtggagctcaacgagcggctcaccaccctcggcgtcgccgtcaacctggtgacctacctcaccgggactatgcacctcggcagcgccgcctccgccaacgccgtcaccaacttcctcggcacctccttcatgctctgcctcctcggcggcttcctcgccgacacctacctcggccgctacctcaccatcgccatcttcaccgccgtccaagcggccggcatggccgtcctgaccatctccacggcggcgccagggctccgtccgccaccgtgcagtagcggcgggagcggctgtgcggcagccaacgggacgcagctgggagtgctgtacctgggcctctacatgactgcgctgggcaccggcggcctcaagtccagcgtgtccgggttcgggtcggaccagttcgacgagtccgacggcggcgagaggggcagcatggcgcgcttcttcagctggttcttcttcttcatcagcatggggtcgctgctggcggtgacggtgctggtgtacgtgcaggacaaggtagggcggcggtggggatacggcatctgcgtggtggccatactcaccggcctcctcttcttcctcgccggcaccaccacctaccgcttcaagaagctgctggggagccccctcactcagatcgccgccgtcactgccgccgcctggactaaccgcaacctgccactgccgtccgacccatccatgctcaaccacgacgactcggcccacaccaccgcaaagcccaaccaaaagctgccccactccaaacaattcaggttcctggaccatgcggcgatcgtggagacgacgacggcagaggcgaagaagaggaagaggtgggcggcgtgctgcacggtgacggaggtggaggaggtgaagcagctggtgcggatgctgccgacgtgggccaccaccatcctcttctggacggtgtacgcccagatgaccaccttctccgtctcccaagccgccgtcatggaccgccgcctctccaccagcttcgtcatccccgccggctccctcaccgtcttcttcgtcgccgccatcctcctcaccgtccctctatactaccgcctcctcgccccgctcgtccgccgcctcaccgccaacccgcggtacgacctctccccgctccaccgcatcttcgtcggcctcctcctcgccgccctcgccatggtcgccgccgcgctcaccgagcgcgcgcgccgcgacgccgccgtgacgctgtcggtgttctacctcctgccgcagttcctcctggtgggcgccggcgaggccttcacctacatcgggcagctggacttcttcctgcgcgagtgccccaaggggatgaagaccatgagcacgggcctgttcctgagcacgctctcgctgggcttcttcttcagcacggcgctggtcaccgtggtgcacaaggtcacggcggagtcccggcggccatggctcgccgacaacctggacgagggaaggctggacaacttctactggctgctgggtgggatcagcgtggtgaacctagcggtgttcgtggcagcagcagccagggggtacgtctacagggagaagcgcctcgccgacgccggaataatacatatataa

SEQ ID NO: 85641 - DNA, 781 bp, Oryza sativa
  Clone ID: PAT_MRT4530_8475C.1
atgggccgccggcccattctctcctttttctccccctcctccctgctgggccggccgcaggccgaggcccagccaggccgccccgcctccctcctctcccggggtcgccgacaggtggggcccacttgtcgggtccttccccaacctcccgccatccgtgccggtcaccacccccgaaaccgcccgccgcgcccacgcctccgcctcctccgggccacgtcgcccacgctcgcgtgtgcgccgcgttccccgcgcccactcccctctctctcccgctcgtgcccgcgcccgagatggccgggattcgattttcgaatcccgcctctctctcctcccccacttccccacgttggccggcgattcccgcctctcccggccacgtccggccctctctctccctatttaagcttccccgtcgctccctctcgctttttccccatttcgccgaactctcccgagctccccatcgctcccgcgccgtgcaaccacccgccgccgccgtttccgctactccggccgccgctagccgccgctagggtcgccgccgcaccgcgctgtcgccgccgtcgggttcgcgaggctaagctccaccccggccgccccttgcccgtcgagtttcgtcgccgggattcgcatcccctcgcgctccgggcaccccgaatcccgtccgccggtggccgtcgtcctcccgtggctcgcagtcgccgttcgccatgtcttcctccgcgtcggccaccctcggtgaggcatcctctcccttctattcccctccctctccctc

SEQ ID NO: 85642 - DNA, 251 bp, Oryza sativa
  Clone ID: PAT_MRT4530_84760C.1
aaagcaaaagacaatgcaagtcacataaagagggggcccaatacacacgaatttatattacaaccgacaccacaggcttgatcgtactgactatcaggcgcaaattacaaatccgccataattgtgtgcggatatagtgtgtctgtaaaggctcatcattcttgggcaattcccacattacagtgcataacgtggaccttggagtaatccgcaaacgaaggcgtactaatccccagcatatttctccacca

SEQ ID NO: 85643 - DNA, 662 bp, Oryza sativa
  unsure (1)..(662): unsure at all n locations
  Clone ID: PAT_MRT4530_84761C.1
ttngccggacatgatggagacagctntcatctccagtcccagagctcacgaccactttgattagtcggatccaagatttgggttttgtgccaagttgtctttatttggcacctgtgaccgacatatgcctagagccgacagtactagagttgctgaaaagttgacgaactcaagctgggagttgtcaaaattacgtcatgtacctcgtcgtcaagtgcaaagccatggtcaagtaaatacgagcgtgacagtctcagttatagtcgagagcaagtgatggtggcctgttatcttagaccgcccagttgatcggagtgagtttgtcgagaatctcctttccgcacggcatcatgatgtgcttggtgatgctatcgatgttgtcgtcagaaatttgcttaaaatggaggaacacctgctcgctgggaccttatctcgacgttatgggtggagatgattttgttacatggcgccacaactgtggtgtttgcttttcacgcgaaaccagcttatgcctggtggggattgggtcacccagtcaagatggctccttatgatcctaagatttcctggtagtttaaaacaaaataattgtgctatatatacttaaaacatatccaagcgtgcaacaggaataatatcattttttaaaaaaaaaaaaaaaa

SEQ ID NO: 85644 - DNA, 249 bp, Oryza sativa
  Clone ID: PAT_MRT4530_84762C.1
atgctagttattgtaatgttcacaaaagcaaactcacacgggtccatgctctccagatcattaagaaaaaccgtcggtgttatcaacaatgcatttcatttcagtacgttttctgtggtcagcaacctgcagattgtttatcggtttccgaataaaaagattgcagataagttccattggtccttcaaagaaaaggaaaaggaatggatggccaggtggttcttttcgctacctgtaatgactggctga

SEQ ID NO: 85645 - DNA, 771 bp, Oryza sativa
  Clone ID: PAT_MRT4530_84763C.1
ctactccgacaatgtggctcctccctcccctagtccctctctgcggctagcaaggtggaaacggggaagatggaggccgatgcttgatggagatggtgatgatggtatcctagatccgtccgcctctcctcgcagcaaggagccctgggcgatggccacgacaatgccgaagcagcaaaggaccaaggaaagagcggtgaagagtggccacttctcctctctgacgagctcctgcacctccctcaccacgctcgcagctgcccgatgcgccatcattgccttctctggtccagcaactgcctcttgatccacctcgtcaccgatggccacctcgatgcccgagcccgacgcagtgaggacggccttcgtgaagagcaccggtggacacgtggtcagcacaatagggtacctagcctccgagctagggcacactggcaggccatcaaaggcatccgacatcttcgccttcggtgtgttcatgctagaggttacttgcggacggaggcctgtctcacaagacacgaacacggcggtaacctcttgttggtggacatggtgctggagcattggcggcaagggacggtcactgacgctgtggacccaccgctgcaaggcgactttgccgtggaagaagcaagccgcctccaccattctcgccgtcaccgccagatctgggagggaaggagggcagccgccgccgtccgccccggcccgctgcgccccgccgccgtccgcctgccatgtcgcgagggatgggagcgccgccgccat

SEQ ID NO: 85646 - DNA, 632 bp, Oryza sativa
  Clone ID: PAT_MRT4530_84764C.1
gttgccacgtcgggtcttttaactgaaatgcatcaatccacaatactagtacctgctctacaatctcagtggttaatgatgcatgtcagtatgatgttactaagctatgcgactcttttgtgcggatccttattatccgccgctcttctaatgattagatttcgaaagaatttagatttcttttcgaaaaagaagaaaaatgttttgcttaaaacatttttctttaatgagattgaatatttctatgcaaaaagaagtgctttaaaaagcaccttttttcctttatttccaaattattacaaatatcaattaattgagcgtttggattcttggagttatcgtgtcattagtctagggtttacccttttaaccataggtattctttgtggagcagtatgggctaatgaggcgtggggatcctactggaattgggatcctaaagaaacttgggcatttattacttggaccatatacatatacatatacatatacatacatatatatgtataatgtatataaattccagaaccctttgcgaagcaaagattatatatattcatagcatagccgataggataaatctaatatgtatcggctagtactctgataccactttgtactaagatatcaat

SEQ ID NO: 85647 - DNA, 217 bp, Oryza sativa
  Clone ID: PAT_MRT4530_84765C.1
gatgtaagaaaccagttagtgatgaagacatggaatctcctgagtgggagtatggtgtatcatgtccatatagctttgcaaccaaatccgaggaggagaaggaaagggcaagggcacggcagagacagttagagacatggggagttattggcggccctgataaaggaagaagtccaaaaaggctggaagctaatcacacagctaaagagcccaaaca

SEQ ID NO: 85648 - DNA, 1283 bp, Oryza sativa
  Clone ID: PAT_MRT4530_84766C.1
cccagatccggcggtgatgcggcgtcggcgggtgggtcgtcggcggtggcggcggccacgggccggcagcggctccctcctcccctcttgcctccctcccgccctagatccggccgcgagggatccggcggccgtggcggcgtcggcggcggccgcagatggatccgtctccctctccccgtcggcgtcgacggcgacggcggcgtcgacggcggcgtcgacggcggcgtcgacggcgacggcggcgtcgacggcgacggcgtcggtttcgtccgagggtggatccgtcggcagtggcggccaccacgggcggatccggcgatgggtaatgtaaatgaaccataactatgtaaacctattcctaatagattgataccaaaataacagatccaaattataagaaatcctatggaagctacaaatgctgacttcgtacccttccaatttggatttgttctactatgtaaataaattgcaaatatggtccaagtaataaatgcccaagtttctttaggatcccaattccagtaggatccccacgcctcattagcccatactgctccacaaagaatacctatggttaaaagggtaaaccctagactaatgacacgataactccaagaatccaaacgctcaattaattgatatttgtaataatttggaaataaaggaaaaaaggtgctttttaaagcacttctttttgcatagaaatattcaatctcattaaagaaaaatgttttaagcaaaacatttttcttctttttcgaaaagaaatctaaattctttcgaaatctaatcattagaagagcggcggataataaggatccgcacaaaagagtcgcatagcttagtaacatcatactgacatgcatcattaaccactgagattgtagagcaggtactagtattgtggattgatgcatttcagttaaaagacccgacgtggcaaagccttgcgttaaaatagtactcggcgtagttattgtgcttaaatcatttttagagttctgtatcttaggaatcatatgaagaatatacagagcccatgaaaggaagatcaatgactcatataaattacttaatggaaaatgtcccgaagaagcccaacgagaaactaagaatcctgttatacagaaaaaagtggctatcattcctttttctgacgaatcacgcaatcccccaagttcacgaactaataaggttattaaatgaatcgtaatcacaattgaaattgttgagaaagaaatatgagttagtatatgttctaaagttgcaaatagcat

SEQ ID NO: 85649 - DNA, 334 bp, Oryza sativa
  Clone ID: PAT_MRT4530_84767C.1
caagctgagcacccgcgcccccgcgttgctctgttcttagccgccgcgaagtttttccggccgcaatcagtcgtttcaacccatctccgtgagttcttccatttcaaccatctgcatactactgccaccgctcgccgtcaccggagatccctagcaccctcccctcgtcggctgcaaccactttccccctccatcgccgcctttggggaacggctggaggttgaagaagagaagagagagagagagactgacaggtcttgaggattcttctgacacactagataatatcaatcaatctcaggacatcgagcaaggcaacttaccatataccttt

SEQ ID NO: 85650 - DNA, 211 bp, Oryza sativa
  Clone ID: PAT_MRT4530_84768C.1
gggggcacaaaccaaaaacaacacgccctttatacttgacattgcacacggccttttataaaaaaactttcaccagggaccacgtttggtatacctaaagaaaatctacacccgtatttttctaacgaatcgaatattgtcagggagcacacagttccacttttttagaccggttgatcgttacatttgttctggagcataaaaaagaaac

SEQ ID NO: 85651 - DNA, 649 bp, Oryza sativa
  unsure (1)..(649): unsure at all n locations
  Clone ID: PAT_MRT4530_84769C.1
gactttatttaatctctcggtttatttccatatatacaggatacatgcatactcaacatgttcgatcgagagatctcatacataggagtagtacggtagtactggtggtggtggtatagtagcttatttgctgatgtaagctagagttcagggccggcatcatgcacgcttacagcgtaagcacttatgcgcgccggccgtttatttatccttcgaaattaaccggtggaagcgagcagggggcggccgctgggacaccctagcgagagcggttgttgctctccgggacctcgacgccgccggcgccggcctttctgcccgccatcccggcggcggcctcgccgccgctgccccagcacggccctgactggcacccttggccacagtatgcttcggtcgtgccacagtacccccattggctgcagcagtagccgtcctggcagccgcagttctgcgcggccgccggggcggcggcggagaggaggagcgcgaggccgaacaccagagccaccatcgtcgccatctttgccgccattgcttgccactacgttcgatctgtttaaatttgtgttgtgtttggctactagcttaaggttgctctcgcgcccgggaccccttttcccttntaggntnatcactggtannaagn

SEQ ID NO: 85652 - DNA, 2970 bp, Oryza sativa
  Clone ID: PAT_MRT4530_8476C.1
atggcctctcgcaagccaaaccctgcttcggcgaaagggccggatcccggccgagtcgatgacgacagcaccgcctttttgggggtctctcttgtagacgacgtcgagctggcgaagctggtcagctctggggcgttggtcgcggggcaggctttcgccccagggaaagccgtggtgccgaaacctatcgacaatcggacggtggtattcgccgtcttttttgaggcagggctacggtttccctgcaacgtgttgttgccggagatccttcgcctcttccagatcgctatcttcgactgggcgtgccggacttccgggtttgagcctaacgccgagctcttcggcgccatatttttcgtcaccgtgaactcgaagaaggtgattaccccggctgggacgaagaagacagtgttcgggagcgtgaactttaacgttcgtcccgagcggtccgatctctggccggtgaacgctggcatgtcgaagtgggaccgccaatggatggctaggtggttctatcacaccatcccctttgaggctggcactgactcggcgaaagccctctattgccgacgtagggcgatcgcgcctaaccagaaacccaagatcgccgtggacggcgctatggaggcgcggttcgttcttctgtggaaggtttgctcccgccttagctgccttgacttggtggaggaattctgtatgcttcgtatctttcccctctcccagtcatggcaagtcagagttgatcaaggcgaagaggttgacggtttgccaaacctggttcttcctgaggggatgaacacgttgaccctcgaccaggctgaaaacgaggcccgtaggatgatcggcgacgtgtcggtcgtcgagtatagccagttgttaacacgacaagcggctggacgggcgaaccgggtttacaacggcgaattgcctcctcggcttgcccctaggaagcgaagggttcctgcttcgtcggactccgacgccgacgacgaggacgatgccgaagaacgcgacggcgaggaggaggaagaggaggaggccatggccgataaggccgtgaacgaggcgatcgaagaccgcgtcgacacccctagctacactcctaccccaagtcccggtcacaacgagactggggtggagtcgaacagctcccccgttcgacggaaggatttggaaggagcgaaggctctagttgcgttctcctcgggcacggtggcgaagggaggtccggtgaagaagatctccaaaaagaaaggactcgtcgacatcgcccgcgttttcagcgacgatgagtcttctgacgagactccgacctcgcctgctggccgcagtttggacctctcgactgctccccttgctccgctcggcgttgctggtgcaggcggtagtgccgccgccagggcttccgcctccgccaaacggatcgtgtcggccgcggcgatggttttcgggagccctatgcgtgagccagctatttcgccgctggtcaaggcgaaggggaagtgtgcggccgccgaagcatctgcctcggagtattcccttgcggcgccccactttacccctggtgatttcgagactcgggcggaccttattccctttgtggagggtgtgagcaaccttgtcttgcctgccggcaccccgagcctgttcaccgaacttaatgagttcgacgaggggtgttccaccattaaaagtttggcggttcgaattcttgcggctcactgttcgatggagcgaaccgtgcgggcccgttttgacggtttcaaaaaccgtctttgggccaaggatgatgaaataagccgcaagaacttggaggtggaggccctggcccacaccttcaaggaggcgaagactgaagtcaaacgccttcagtccgaattagataaggggaaagaggccagggccgaggttgatcgcctcaaggccgaactggagaaggagaaggcccattcggcggtgctcatcgattactacaaccttactgagccgaagatggaggctcttcgccagaaggctagcagggccgaagcgagcgccacggaggagtcgcagcggttttcgcgggagatggcgaagaccaccgaatccgcgagaatggcttgccaaacgctccgcctcgcccttaccgacataggcacgaaggtgcgaggggtccctgccgaggatgcctcagccttcgacttctccgagtggacccagcaggctggcggattggtttcggactgcgccaccgtgtacggcgattgctgtgcacgtgtatcggcggccttcaccttaggccttttgcagcagttcggctgcgagcacattgccgagttccctacctatgcgaagggggactgggagattagtgcgcagaacatttcgcccgctcttcgcgcgtggcgaaaacagttctggcagaaagacggccggtccgctgccaaggcgcgccttctggagcaactggcgaaggcggaggcggcagatcggtgcgaagaagagggcgcggtgggcgaagaggttggaggcgctgcccaggatcacctagagggggttcgccgaaagtcgtgcatccggccctcttccgggagctggcgaagtcaaaacgagaaatttgtggcagtgaagggtctgccgaaagtgcgatgtccatttcggcctgtttatcgcgaaatggagataaacggtcgcaactataaggctttcaaggttgccgactggctgcgggcgcaccccgggcgaaccttagaagattacgatcttgttcattcaagacatttggaggatatggctcgcttttggcgaaaccatcagaagactaaacgccaggaaacgatctttcagcgtcgttacagtttagtctgtgtttcgccccctactcctcttaaggttgtgtacggtattagtagtgatgatgaacctagttcgcctgatcattccttagggagggatagtgattatggggacaaagatgtaatttacttgtaa

SEQ ID NO: 85653 - DNA, 3217 bp, Oryza sativa
  Clone ID: PAT_MRT4530_84770C.1
cttatacttagaaggctcactccgtctccccctccggccgccgcaaggagaagcagcagcagcgatgcaggccgccgccgggcgcgcgcgccgcctcctcacgtcgccggcggcctccggtatcctctccgcgccgcgccccgggtgcgcggcgctcgccgggagcggcgcccttcttccccgtctcgatggtgtcccgtcctcgccgtcgccgtcaccggcccctccgctcctggctaggagcttctccgccacgtcctcgtctcgcctaccccgtaacttgctatcgccaagtatatcttctcaatggcggaatgagaaatcggtgtgctatcacatggctgcaactcactactcaacagaagcaagtgacattgatcaacctacagaggctgtagtggagctgtatcagaaaatgttgaaatctgttgaagccgagaccatgcctccgaatgcctggttgtggtcaatgataagtagctgttccaataaggaggacatcaaactacttattcagattttgcagaagctaagagtatttagactatcaaatcttcgcatcgacgcaaacttcaacgatcatctttgcatgaaagttgcagaggcttgtgctcgtgttggtgcccttgactatggtttgaaggttttatggaagcataatgtttatggaattacgcctaccattggttctgctcattatctactgaaacatgctaaagagaaaaatgacactaaactaatgggaagtataatgcaagtccttcagagaaattcgatgccattgcaaccaggcactgctgatatagtcttcagcatctgctataatgctgatagatgggatttactctcaaaatatgcgagaagattcgtgaagtctgaagtcaagctgcatggtgcttcatttgacatttggatggacttcgctgccaaagttggagactcccaatctatatggaacatcaatagcctgagaggcaagtcagtcaaacgctataatcttgcaacaggttttgcatgtgtaaaggggtttctgcttgagcgcaaaccagaaagcgccgctgccatgattaaattacttcacaagcattcacctgatgagaagaaacaattggtgacggatgagctccagaagcttgttgctgaatggccagcagaggtgataaaaaggcagaagaaagatgataggaagaagcatgctttagaatacctaattgtccataacggctggtgtgactggagtttcggtgattattgttttgtagaaaaccttggtgaaattgcacgcatgaaattcagaatgcagactgggaatttcagcatgagaagaatcagaggctttgtttttgttgtgatcttggtgatgatatcatcactgtgctctgcaaccaatgctctctcatggagcatgttctcttcgtcatccaagaagccatcaatggcgccgccgccgccgctagacggcggcgttccggtggccgaattctccatcgacggcggcggggacgcgagaggtgataagctgatggagaacgcgcggcgcaggatcgccgccggcgatgggcggccgggcaccacctgctggagcgaggcgtaccggagcctgttcgcgagctgcggcgacatcatggccgacaaggagctgcaggcgaggctcgcgtggcgcctcagcggctgcttccaggaggactccggccggccgccgctgccgccgtgcgacgccgcggcagcccacggccacggccacgccgacatggtgcactgccgcgagcgcctctccgactccgagtccaaggtcttcctcgccttcttcctcgagacgaacaccctctgccaccaactgcaggccgaggcgttcaagcggagcacggagaggctcgtgaacgacctgacaaggtcggcgaggtcggcgcgcgagaagctggaggcgatcgaggagaggtcggagaagatcatgcgggagtccgaccatctccggcgatcgctgtcgtcgatcatgtcgcagacggagcacctcgccacggcgtccgaggacgtccgggcccggatcggcgacgttcttgatcggtcggcggcgatcttcgagcggtcgagggagatcgccgccgcgcaggccgagctgcggggagggcaggcggcgatgagggaggagctcgccgccgggatggcgcaggtggaggcgtcgtacaggagcatcggcgaggagatggggaggctgagacaggaggccatgggcatcgagagggaggtcagggccgtcggcgacgccatggcggcgaggatggtggacttgcagagcgccgccgacgacatcggcgccgccgccgggagatcgctggagaatcagatgctgttgttggatggacaggcaaaagcgatggaagggctcaatcatctctacagttttcaggcacaagctcttcaggagagcagggaaaccattcagaagctggcgcaattcgggcagcaacagcaggaggagctcctgtctcggcaagaacagatccggcacgctcacgatgacctcatgaaaaattcagaatctatactggaagctcaggaagagttcagagctaagcaggcgagcatcttcgcggcgctggacaagctctacgtcctccacaacgctgttcttgtggagtcccgtttcatcaaggccttcttcttctactgctgcatcacattcctcgtctacttgctcaccagcgccaagcagaccttcgccattagaggccacctctacttcggactctgcatcacgctcgtgctggagaccgtcgtcatcaagctcggagccgacgacttcagtaagcagttcttgatcatgtccaaagtgctgttaatcagatcggtgttcctcgccgccgcagcagctcagatcttgcactcaattttcacatacaaggattacgaagtactgaaccatcaattactgcagacattgatggagaaagtccgggcgattgaaggcaatggcagtggcggagaccagatgaatccatggagtactgggagtgattgcagcagcattggtgactgctcatggttcttcgacgagcagctgcaggacgaagtggacagcgaaatcgacccagatttcgcgttgccgagagaaatctgtggaaatggcagcattttgccggaagaattcggcgaaaattcagtcaccacgtccatctcgaggaggtacaacctccggccacgcatcaggccgcggtga

SEQ ID NO: 85654 - DNA, 793 bp, Oryza sativa
  Clone ID: PAT_MRT4530_84771C.1
ctatagtttaacatctaccctccctctcccttctacaactgccgcatccccccaacgcatcgccccacaaatcacgccgccgtcgccaccccttcctttccaatagcattccctttgcctcgccatcctgctgctcgtgcccctccgcccatcacactgatccgcaccggagtcgcagtcgccacccccgagcctctgcccatcgcatcgatccccgccgtccctccacccattgcacctatccgtgccgccaccgatgacgatctcgtccgcaccgcccctccgcccatcgcaccgatccgcgctgccaggccagtttgccctcgccgcccccgatgtacgccagggcgcccgcctccacgcccccatatcaccgtcggccggagtcgccgggctcgtcctcaccaagccgatcccctccgccaccgatagaaggtacaaaaatcctcctcccctaccagatgatttgtcttgctttgtattaatgggtgcatggactggtggtggatcctcccacagatcgaagggatcaaataacctcctgctgtcccgcaccacccccacctccgtatcgcactgtcctcacactgccccctccatcgcacgcccccgtcactcctccttcgtaccgccttcgccgctttcccagcgccgccgtcgcgccctcggcggctcctccgccgcgctgccgccacatcagtcgcgaccccggcagctcctccgccgcactgccgccacctcggtcgtgaaccccggcgcctcatccgccgcgctgctgccacctccgtcgtga

SEQ ID NO: 85655 - DNA, 204 bp, Oryza sativa
  Clone ID: PAT_MRT4530_84772C.1
atggcgatattgttaacgccagaatttggtaagcccaaagtaatcatcggtctagagttagtatcggcttcagagtcttggaatcagccgatgggaatcgtcaaatcgccagcagttgtgttcttggtggagtcggatcaattaaagaaaatttatctagaagagtccgagtttaaggaggatacagcacgtgtaacgccctga

SEQ ID NO: 85656 - DNA, 570 bp, Oryza sativa
  Clone ID: PAT_MRT4530_84773C.1
aacctctgcagagggggtacactttacccacacgacattactaacccggatcatccagcccgcatttcgaaagccgacacaggttcaccatatgccaacgagaggggtcccagaccaacaccagattaggtcccagaccatactgtgccaggaaacccgggggttctccccgacaccaccccgttgaatccacatgtctcttggcatcatggctcccccgattagctagttactcagccaggggtgtcccattccacccatgtggtcgcacttgtcttatgttcggatgaaattccaaggaaacggtccttaagtgcaagagcgggaaaccgtacacccgtttttaagtttgaaggcgaccgtcgatactcgtgcagagtgcacgattaccgaggcgcaactaggtggttacaagggaacatggtggcttgccttgctcgagatcttgagcttgatcctcgaaatcctcgcactgcgggtcttcgggctccgaaactacacgcgaaacgggacaactcagcaaacggcgaaaataaggccctattattgacctctaagcgtgccattaga

SEQ ID NO: 85657 - DNA, 1755 bp, Oryza sativa
  Clone ID: PAT_MRT4530_84774C.1
atgtggtcgtacttgtcttatgtttggatgaaattccaaggaaatcggtccttaagtgcgagagcgggaaaccgtacacccgcctcacggctcaccgcggaccacacgaacggggagaaacggagggagcggctggccgggtcggcttatccggttgcggccgaggtggcgccgacgtggcgcctacgtggcagccacgcgggccggcgggaggtagacgacgacccggccgcgaatggacggcgggcgacagcggcgagcggcggagcgagccacggcgataccggcgaaagcgcgcacaccgggtggctgcacaggacgaggggagacgagccaacggctcggattcaccggaggttgctcgacggcggcggattgcggcggcggcaaccggcggcgagggaagagggaaacggcgacgaggccacgaggggccgattcccggcggtgagagcatctacgcggcttcgggaactcgacgctagcgtcggattgggcagaactacgccgagcgaggccggcgacgagcgggtgctacggagctcgggcggcgacggcggcgagcacacggcgagcgatggcaacggacagcttaaggccattcagcttcttgatggatcaaattacattgaatggagaaataatgtgcttattaacttagccatgttggattatgacttagccataagagaggatcctcccgaggaacctcaaccggccgaagaactcaatataattggggaagaatatgataatctcatgtgggcctacaataagaagttagccaactgggagaagtccaacagaatgtgcttaatttatgtcaagggtgccatctctccagaagttattggaggaatcattgactctaatgacattaagacgtatctggcaaacattgaagaaagttttgaatttgcacctgagactcatgccaatacgcttgtaaatgagatgatcactagtcattacgatggcaaaagtggtataaggaagcacatccttgagatgactcatatggcaaatcaactcagatccatggatatgaaaatatctgatggatttttagtgcacatcatcatgagatctcttggtcctaactatgatccattcaaaataaaatataacactcagaaagaggagtggaccatacaagaattgatcttacactccgtggaagaggaagagcgccagaaagctgaaaagcagaagattaaagaccggctcaacctcactaatgcctttgataaaggcaaaaaggtctatcaaggggaatcctctaataagaatagtgagccagagggtgagcagaagcaagaagggatcaaggcctccacttcagctgttcctttaagtacaagtccctactgccacttcttcgagggggacaaggagggcggcaccatcgagctgttgtcaccgccgtgccgcccagagctcgccggccgctccgaggtcatcctgtaccgccagatccgcgttgccggcctgggaggagagccgccggtcgtcggagcaaagaaggggtggtccccgtcgtgggagagtgacgaagatcagggtggtggtggggttgccgctcggactgcccaccggcgccgcctccgtccgccccaccgcccagcgccgtcgccgcccgggccctgccgcactccggtcgccgcctcgcttcctccgccgcatcgacttccagtgcctcgctttgttcggttcgactgggccgtggaggcgaggtctttagcatacacatactaa

SEQ ID NO: 85658 - DNA, 1916 bp, Oryza sativa
  Clone ID: PAT_MRT4530_84775C.1
acgacattactaacccgggtcacccagcccgtggggatcagccacgtcgggagacctccaagctttcatgacaaggcatttcgaaagccgatacaggtttaccatatgccgacgagaggggtcccagaccaacaacaggaatcggtccttaagtgcgagagcgggaaaccgtacacccggtacgttccccggtccgcggttttggaaattcatttagttcgcaagcaccgacccaggtgtcgggttttccaagtcttttgtaaaactccagttttacccaagttgttactcagattttaagtttgaaggcgaccgtcgatacttgcacagagtgcacgagtatcgaggcgcaactgggtggttacaaggggacatgggcgcggcccaagagaaatggagcggtccggccgagctaaatgggccggccggcccaaggcggcccaaactcgcgcgcgcgcgggagggaggagagagagagccggtggaccgggctcaccacgcgcggtcccgggtgggacccgcttgtcagcggctcggctcaccgtgcggagggagcacgcgacgcacgcgcgcgggcggggaagggacgcggtgcatgcgcgcggtccgcggtggacgcaggtgcggcgggcccacgcgcagcctcacggctcgcggtggatcgcgcgcacgcggagggaccgaccggggtcggcccgacccggtctggctgagctggcgccgacgtggcgcctacgtggctgccacgcgggccggcgggaggtagacgacgacccggcctcgaatggacggcgggcggcggcggcgagcggcggagcgaaccacggcgatacgggcaaaagcgtgcacaccgggcggttgcacgtgacaaggggagacgagccaacggctcggattcgccggaggttgctcgacggcggcggattgcggcggcggcaaccggcggcgggagaagagggaaacggcgacgaggtcacgagaggtcgattcccggcggtgagagcatctacgcggcttcgggaactcgacgctagcgtcggattgggcggaactacgccgagcgaggccggcgacgagcgggtgctacggagctcgggcggcgacggcggcgagcacacggcgagcgacggcaacgaggaagaagagggcgcgcccggagtccccttccgcgtccacgaacgcaccggctctcccggcgcttggcgatggacggcggaggcaaggcagagcacgggagcggcggcaacgggcggtcaagccggcgagctggcgctccggctagcgtccaaagcggcgacaggaggtgtcgccggtgagaggggaaaaaggggagaaaaagaggaaaaggagggagagaaagggggctcgcccctttgccgattcgggaaaaggagaagggagcggggcgactcggcagagggagaggggctctctgcctccgccccttggaggctagcgtgcggagtggcgggggccgggcgatgacgacggcgatgacggtgggatggtttggagcggcgcgacgacactagcgacaggcgcgggctggcgcgacagagggtgacggcggcggtgaccaggcggtcggccactcggcatgcgcgcgcgggaagcaacgggcggcgcggctgggcagcgggaccgggtgacgcggacggcgcagacgacgcggctcgggcaggaaaccgcgcgggcgcgcgcgcgagcaacggcgtgcggggccggctttgcgagcggggagctcgcgcaagagatgggggcgctcggcgcggctctcgcacgcgcgagcagcgagcgggaagggaggaaacgcgccggggtggggagggagcgagagagagagagagagagggggggagacgcccgggagagagggggccggggaagagatgggccgagcggaattcggcccatct

SEQ ID NO: 85659 - DNA, 390 bp, Oryza sativa
  Clone ID: PAT_MRT4530_84776C.1
atggcgaatgcaaaggcaacggggccgaatggatacgggaatcggggaccagaacaaagtgttatgagatctataatgaagagagagctccaccctatatatgtgttcattgtctacttctgcaatgttcttgaggacaaagggatgggcgcgggtgttattgatctcctgtttctctgtatgcgcgacctgcatgagccaccgtgtgctgttgacggcggccggccgagcgcgccgccggatcgcttggccaccgcggtctctagcatcggttcaagctccagcgacacgcgcacaggagcgagcgtcgctgatttggatcttggactcggccgattggttctggtacggttggtcgacgcacacacgcacatcaaccgcgcgatctaa

SEQ ID NO: 85660 - DNA, 571 bp, Oryza sativa
  Clone ID: PAT_MRT4530_84777C.1
aacctctgcagaggggggtacactttacccacacgacattactaacccggatcatccagcccgcatttcgaaagccgacacaggttcaccatatgccaacgagaggggtcccagaccaacaccagattaggtcccagaccatactgtgccaggaagcccaggggtcctccccgacaccaccccggcgaatccacatgtctcttagcatcatggctcccccgataagctagttactcagccaggggtgtcccattccacccatgtggtcgtacttgtcttatgttcggatgaaattccaaggaaacggtccttaagtgcaagagcgggaaaccgtacacccgattttaagtttgaaggcgaccgtcgatacccgtgcagagtgcacgattaccgaggcgcaactaggtgggtacaagggaacatggtggcttgcctcgctcgagatcttgagcttgatcctcgaaatcctcgcactgcgggtcttcgggctccgaaactacacgcgaaatgggacaactcagcaaacggcgaaaataaagccctattattgacctctaagcgtgccattaga

SEQ ID NO: 85661 - DNA, 3247 bp, Oryza sativa
  Clone ID: PAT_MRT4530_84778C.1
atggcgccgccgtgctccatctcctccgcctcccacctcctcatcactgcctccctccccaagccctccctccgcccacctcgcctcccccaccccaagcccctccccgccgccctcctcgccctcgccgccgccgcccccacgctccccgccctcgccgacgtgcccgcgccacccccctccccgacccaggatgtccaggtactagaggccccctccccggccgccaaccctttctccaacgccctcctcaccgcgcctaagcccacctcctccgccgccgccgacctccccgagggcgcccagtggcgctacagcgagttcctcagcgccgtcaagaagggcaaggtcgagcgcgtcaggttctccaaggatggtggcctactccagctcaccgccatcgacggccgccgcgccaccgtcgtcgtccccaacgaccccgatctcattgacatcctcgccaccaacggcgtcgacatctccgtcgccgagggcgacgccgccggccccggcggattcctcgccttcgtcggcaacctcctcttccccttcctcgctttcgctggcctcttcttcctcttccgccgcgcccagggcggccccggcgctggacctggcggcctcggcgggcccatggacttcggccgctccaagagcaagttccaggaggtgcccgagactggcgtcaccttcgtcgacgtcgccggcgccgaccaggccaagctcgagctgcaggaggtcgtcgatttcctcaagaaccccgacaagtacaccgcgctcggggccaagatccccaagggatgcctgctcgtcggcccgcccggaaccgggaagacactgctggcgcgtgccgtcgccggggaggccggagtgccattcttctcctgcgccgcgtccgagttcgttgagctgttcgtcggtgtcggtgcctccagggtcagggacctgttcgagaaggccaaggccaaggccccttgcatcgtcttcattgatgaaattgatgccgtcgggaggcagcgtggtgctgggctcggagggggaaatgatgagagggagcagaccattaaccagctcttgactgagatggatggatttgccggcaatagcggtgtcattgtgctcgccgcgacaaacaggcctgatgtgctcgacgcggctcttcttcgccctgggaggttcgatcggcaggtcaccgtagacaggccggatgtcgccgggcgtgtcaagattcttgaggttcactcgagaggaaaggctctggcaaaagatgtcgactttgagaaaattgcccggagaacccctggtttcactggagctgatcttcaaaacttgatgaatgaggctgctattcttgctgctcgtcgtgatctgaaggagattagcaaggatgagatctctgatgctttggagaggatcattgctgggcctgagaagaaaaatgctgttgtttcagaagagaagaggagacttgtggcttaccatgaggctggtcatgcccttgttggtgccctcatgcctgaatatgaccctgttgctaagatttccatcattcctcgtggtcaagctggtggactcacattctttgctccaagcgaggagaggcttgagtctggattgtacagcaggagctacctagagaaccaaatggccgtagctcttggtggaagggttgccgaagaggtgatctttggccaagaaaatgtgacaactggggcctccaacgattttatgcaggtttcacgtgttgcaagacaaatggttgaaagatttggattcagcaagaagatcgggcaagttgcgattggtggacctggtggaaatcctttcttgggccagcaggtgcggcgggcccacgcgcagcctcacggctcgcggtggatcgcgcgcacgcggagggaccgaccggggtcggcccgacccggtctggctgagctggcgccgacgtggcgcctacgtggctgccacgcgggccggcgggaggtagacgacgacccggccgcgaatggacggcgggcggcggcggcgagcggcggagcgaaccacggcgatacgggcaacagcgagcacaccggacggttgcacgtgacaaggggaggcgagccaacggctcggattcgccggaggttgctcgacggcggcggattgcggcggcggcaaccggcggcgggagaagagggaaacggcgacgaggtcacgagaggtcgattcccggcggtgagagcatctacgcggcttcgggaactcgacgctagcgtcggattgggcggaactacgccgagcgaggccggcgacgagcgggtgctacggagctcgggcggcgacggcggcgagcacacggcgagcgacggcaacggtcgcggggaggagatggagcgaggaggaagaacggagagagacatcaccgagaagaggaggggcgctgtgacgagaggccggcggcgcgggagtaatctctccggcctcgggctgaggaagaggaagaagagggcgcgcccggagtccccttccgcgtccacgaacgcaccggctctcccggcgcttggcgatggacggcggaggcgaggcagagcacaggagcggcggcaacggtgaggaggcgaatgggagaggaaaggaagggagggggaagacgggtttaaaagggcggcaatgtcggtttgagagaggggaaccgacatgggcaggaggaggggagcgggggcgacgcggcagagggaggggggcgctgcctccgtcccttggcggcttgcgcgcggagtggcgggggccgggcgatgacgacggcgatgacggcgggcggtttggagcggagcggcgacactggcggcaggcgcgggcaggcgctgacgacggtggcgactgggcggtcggccactcggcacgcgcgggctggcgggaccgggcggcatccacgcgggcgcgcgcgagcaactgcacgcggggagcggcagcgagggatggggagacggagagcgagggggcgctcggcgcggcggcacacgcgcggcggcacacggcggggcggagcggagcggagggagagaggcgctcggggcgactctcgcacgcgcgagcagcgcgcgggcgaggctgagcggggggggggggggaaaggagcgcgccggggggagagagagagagagagagagagatagaaagagagcccgggagagagagagagatgggccgagcggaattcggcccatcgaaccccgggggaggcaaactaaactttgcggagggaacg

SEQ ID NO: 85662 - DNA, 1216 bp, Oryza sativa
  Clone ID: PAT_MRT4530_84779C.1
cggagaaaggagtagatagggctctcctctctcacaaggacaccacagtggctagggagccgtggcgacccaaggagatagaggcaccacccctcaaatccaggccggatccggcgaggagcaatgctgcggaatggaggctcgtggcaggagaacggtgcgaggaggcactatagctcagagacgattgcctgctgccgtggaggtaggggtctagccacggcggcgaggccacgggaaagcggaggaggcgaaactacgggtcagcagcgcgaggcggcggtggatatggccgtggaggctgaggcgtgggtccggacggtcgcctgcggggatgcggcagctgctccttggcttggggagaggcggtgatgaccacacatgaccggacctccatggtgttgtggtgcatggaggatggttgagtgccatcgagctggtgcaggggtgctggccggtggaggggtgccggtgcggcgagccagtcccaggaaacagtgctggtatcgcaggaagacggattatcacagcaacagaggtctctttattatagagtagaggtacagtcatgttgggctgcggacagatcccgagctcacaaccggccaacagcttttcaaacggccacccgggccaacaacttttcaaacggccacccgggcctagctgatcccatcagctcacatccgcccatgaccgtgggcacaggctgttcgaacacgtttgttaacctcatatgccgacgagaggggtcccagaccaacaacaggttaggtcccagaccatactgtgccaggaagcccaggggtcctccccgacaccaccccggcgaatccacatgtctctcggcatcaaggctcccctgataagctagttactcagccaggggtgtcccattccacccatgtggtcgtacttgtcttatgtttggatgaaattccaaggaaatcggtccttaagtgcgagagcgggaaaccgtacacccgattttaagtttgaaggcgaccgtcgatactcgcacagagtgcacgaatatcgaggcgcaactgggtggttacaaggggacatggtggcttgccttgctcgagatctggagcttgatcctcgaaatcctcgcactgcgggtcttcgggctccgaaactacacgcgaaacgggacaactcaacaaacggcgaaaataaagccctattaatgacctctaagcgtgccattaga

SEQ ID NO: 85663 - DNA, 430 bp, Oryza sativa
  Clone ID: PAT_MRT4530_8477C.1
cgatgggggcgacggagaacttaaataggggaggggagggccggacgtggccgggagaggcgggattccgccggccaacgtgggggagtgggggaggagagagaggcgggattcgaaaatcgaatcccggccatctcgggcgcgggcgcgggcgggagagagaggggagtgggcgcgggagatgcggcgcacacgcggacgtggctgacgtggcccggagaaggcggaggcgtgggtgcggcggcgcgcggcggggttgggggaggacccgataggtgggccccacctgtcggcgaccccgggagaggagggaggagcggcttggttgggcctcggcctgcggccggcccagcagggaggagggggaggaaaggagagaatgggccgaaaaaaaagaaaaagaaaaaggaaaaaggattttccctgcaat

SEQ ID NO: 85664 - DNA, 2475 bp, Oryza sativa
  Clone ID: PAT_MRT4530_84780C.1
atggagcgaggaggaagaacggagggaggcatcaccgagatgaggaggggcgctgtgacgagaggccgacggcgcgggagtaatctctccggcctcgggccggggaagaggaaggagagggcgcggccgaagtccccttccgcgtccttgctcgtgctgactccttcgacacgcgcaacaacgaacggcgacggcgaacagagcacgggggcggcagctatggcgaggaggcgaaaacgagggagattggaggggaaggagctggggtttaaagggggcggcaatgtcggtttgggaaccgacttagggcggtcaaggcgcgagctggcgctcggcggtcgcggccaaagcggcgacagggaggatgacgccggcggtggaaaaggggaaaaaggagggggagaaaggggcttgcccttttgccgattcgggaaaaaggaggaggggagcgggggcgacgcggcagagggaggaggggcgctgcctccgtcccttggcggcttgcgcgcggagtggcgggggccgggcggtgacgacggcgatgacggcgggcgatttggagcggcgcgacgacacgggctgacagacgcgtgcagaggctgacagcggcggtcgtgctgagtggcctgagcctccgaaagctcaaccatgcgagtcagcactggctgagactcgctgtacggacaagggtatctggcgtctgcgtggctagaaggaaggcgtggaagctgccggaaggcagagcccctgaggcggtggctgtagtcgtgggccaggcgacgaagcgcagtccaggagaggtcctggtacgcgatctggagagtaggcctggccacggtgaagtggtgtgggcgaaggccagctccgtgtatacctccacgagggtaaaggcggccgtcgatactcgtgcagagtgcacgatttccgaggcgcaactgggtggttacaagggaacatggctcaagatattcaaagcctcacggctcgcggtggaccgcgcccgcgagcggggccgaggggagcggctgaccggggtcggctcgacccggtcttggccgagctggcgccgacgtggcgcctacgtggctgccacgcaggccggcgggaggtagacgacgacgccggccggaacggacggcggacgacagcggcgagcggcgagcggcggagcgaaccgcggcgatacaggcgaaaacgagcacaccgggtggttgcacgggacgaggggagacgagccaatggctcggattcgccggagggagcttgacggcggcgaatcgcggcggcggcaaccgacggcgggaaaaggggaaaacggcgacgaggtcacgaggggccaattcccggcggcgagagcatccacgcggctacgggaatccgatgctggcgtcggattgggcggagctacgccgagcgaggccggcgacgagcggcgcttccgagctcgggcggcgacggcggcgagcacacggcgagcggcggcaacggtcggggcggcgccggctagctacggggaggctactcgcactaccgtgcgggcggggcgcagtgacgagaggccgacggcgcgggagtaatctctccggcctcgggccggggaagaggaaggagagggcgcgcccggagtccccttccgcgtccttgctcgtgccggctcctccgacacgcgcaacgacgaacggcgacggcgaacagagcacgggggcggcggcaatggcgcagatgagaaacggggaggaagggggggggaagaggaagggagggcgcctggggcttttaagggcggcaatgtcggtttggaaaccgactttgggcggtcaaggcgcgagctggcgctcggcgctcgcggccaaatcggcgacaggacggagggaggatgacgccagcgggagaaaaaggggaaaaggagggagagaaaggggtttgcctccttgccgctttgggaaaaggaggaggggagcgggggcgacgcggcagagggaggaggggctctgcctccgtcccttggtggcttgcgcgcggagtggcgggggccgaggcgatgacgacagcgatgacggcgggacggtttggagcgagggtgacggcggcggcgaccaggcggtcggccaccacggcacgcgcgcgcggggggcaacgggaggcgcggcggattgagcggcgcggctcgggcacgcgcgctggctgcggggccgagcggctgcaggcgcggcagagcagcggggccgggcggcgcagacggcgcaggcgcgacgcgggcgacgaccacgcgggcgcgcgtgcgaacgacgcgcggggagcagcagcgagggagcgaagaggagggctcggctcggcggctcacgcgcacgcgcgcgcggtgcgcgggcggagcggagggggagggggagagggagagagagagagagatagccggcaggaaggggggagatgggccgagagaaatttggcccatcgaccctgggggaggcaaaa

SEQ ID NO: 85665 - DNA, 284 bp, Oryza sativa
  Clone ID: PAT_MRT4530_84781C.1
atttaatcactataaattggtctgtgaagaaaagggcgtttgtacattgtgaaggctgcaagcatcaggttggctcaggagtccgaggtgctcgtgggcctgatactgttttatatggcccacgccgcgcggcccgtgaagaaacccgccgtcattttttccttcatcttctccatctttgtcgaggatgttaatgccgccatttaactcctgttattatccttggggtttcgaatatgcatgattgtcaatccatacatttcgcggttgaaatctagatcaac

SEQ ID NO: 85666 - DNA, 1976 bp, Oryza sativa
  Clone ID: PAT_MRT4530_84782C.1
tttttttttttttttttttgataaaattctttttcttcgtatgtaccggtggcgaatttacatttgcatgcgaatgcctccacccgtccctttctcttttgtatacaaaatgaatttttccaattgtgtgaaaagaagatctccaaagaaggagaagaaaaatgaacaaaagaatggggaaaatgtacagccccccctctataacctaatctatttacacatcggccgccgtactcctcgccggagccgccacctcctcctgctccctcttctgccgggccatcctgttcagcttggcgaacatgccgaccatgggcgccgtgttgtacgtgcacgcctccgtctgcatgtagttctcccggttgtccctgaacctgtcccgccggtccggcccaccgacgatggcgccgacgaggacgttcgggttggagctccggcgaccgaaccagtggtcgaacccctgcgtgcacccgatgaactccttgctgtgcttgtacggcacgatggacgcggcgcggtggtgcaccctgttcgggtacttggcgccgtacccgaccaggtagctgatccccctcgggttggtgcccagcacgtagtccacctgcgccctcgcgagcgccgccacctcgcccgcgcccgccgtctcgccgcccgcgcacgacacggcgccgtccgcgtcgtcgcccaggtagtccgcgtacgccgcgaggaggaacgccgcgttggtcacgtactgcatgttgttccactgcctcacgtacagcatcccgcccgggctccgctccacgttcgcgtccgcgccgccgtccgcgttccgccccaggcacccgcacacgtagtgctccgccttcgccctgtactgctccagcgtgctcctgtgccgctcctcgtgctctcctctcagcagcagtcttgcggcgaggatctggacgccggcgtacttgacgtcccagctgaactcggtgatggcccagccggtgccaccgaagcagtcggcgttgtccacgacgtagtcgaggtaatgggccttgccggtggcccggtgcagccacaatgcggcccaaaggagctcgtccttgtacccgctcaccgacgcgtagtagctcttcacctcggcgatactgctgtcatacttccctctgtacttgtcggcaaactcgaacagctgctgggcgtggtgcaggaggaggctcgcgtagtgcgggttggacttgcggaagacgatggacgcggcggccatcgccgccgccgtctcgccggcgacgtcggagcccggccgctcccggtccaccttgtacgcctgcctcgacgtcgtcatgtcctccggccgctgccagcagtagtgatccgtgtcgccgtccccgacctcagcccagagctcgttgggcttggtgtgcgccttgatgaagtagtcagtgccccacttgatggcctcgagcgcgtggccgagctcgccggcggcctcgacgtcgtcgccgtactcgatcatgctccacgacagcatcgtcaccgtgaacgccatgggcagcccgaacttgacatggtcgccggcgtcgtagtagcctcccaccaaatccaccccttgctcgaggccgtcggtgaggccggagtggtcgcgccacgcgacgcgctggttgtgcgggagccgccccgaccgctgcgcctcgaagtagagcaggctcttccgcagcgcgtcctcgtagttgtgcgccttcctctccgtcgccgccgcgcccgcgccaccggcagcggcgaggagaagcagctgcagcagcagcgcggccacgaggaccagcgcccggcctctcatcgcgcccggcggtgtcgtcgtcgtcgtcgtccacgcatgtgcccgcccctgcaccgccgcgcgcatgtgattggcggcgcgttgcttgtgcgctgtggctatcgatctctctgcgcgagtgatggtggatgagatgagctcttctcggttctttgcgcgatcaacc

SEQ ID NO: 85667 - DNA, 3054 bp, Oryza sativa
  Clone ID: PAT_MRT4530_84783C.1
gggtcaatgtcaatgatattacacattatcactttgtttttcctccgagaacccattctcatcatcattaccttcttatgatcaagttaaaaaagaagaaaactccattttttctccccggacttcccttgaggaaatagaagggcaatgaaagaaagaaaaatatctccctagctagcttatctacattaaacgcctaatcaaaccattgctacgccattgtcgtcattatcaccgttctggcaaccatctgtttccacactgacactatcatccctccataatttcgcgagaaggccatgcttgggcacagggaatgggctgtactcaacctcgtcgctggaaccaacaatctcccacctgtagccagtgaccaggtggtggatgaggacgagcatctcgagcttggccagctcgttcccggggcacgcgtgcacgccgttcccaaatggcatgaaggtgttcggcctcggcgacaccttgaatctagaagggtcgaacttctgtggatcctggaagtagtctgggttgtgatggatgttcctgaagagcggcatcaccttccatcccttggggataaggaaccctttgtactccacgtcagccacggcctccctgaacgtgaacgagatgatgctggccatccttaagctctccaaaatcaccttgtgggttagggccatgctccgcgtctgcgcccacgtcagcggcagccggccgccgtcgttggcggcgcggatcgccgcctgctccgccctgacggcctcgagcagcttgggatggtcgtggaggtacttgacgatccaggtgagcacgctggccgtcgtgtcctgcgccgcgaacagcacgccgatgatgttgtcggcgacctgctcgtcggtgaggagcgcgccgtcgtcgcccgcccgcgactgcatgaggcagccgaggaggtcgctgccgggctccccccgcgcccgccgctcccgcatgatgtcgctcagcacgccgtgcagccgccgcctcgcctggatcgccttgtagtacagcgtcccggggaagctgttggggaaggagttgtagcccttctccacgatggcgtagttctgcctcagctccgctttccgccgctcgtccagccgcccgccgaagatggtcacgatgccgacatcgaacgagagcctcttcatggcgtggaaggtgctggagacgttgccgtcccaggaggcgagcgtggagcggacggcggcctcgacgtccggcacgagcgcgcgcagggcgtcggggccgagagggccctggacgagcttgcgaaggcggaggtggtagtcgccctggtggaagaagagcgccgacgggccgatcatccgctccttgctccgcgggtacgtcggcttgaacaggtgcgcctgcgtcaccagcacgaaccgcgccgcctccgggctcgccagcatcacgcacgggcaacccagaatgtgcgtcttgaagatctcgccgtacctcttctgtttggaggcgaagaagacgttggggtcttgggagtagagctgaagggtctcgccgatgtaaggccaacccatggagcccggcggcagcctgacggctttctcatggccgtagccatggagtttcctcctctgccggctcgtgtagtggacatagcacataaaagcaagagaaatgaagaaggagatgacgatgacgatgacgaaggaggctgccatccaaatgacccatatgccgacgagaggggtcccagaccaacaacaggttaggtcccagaccatactgtgccaggaagcccaggggtcctccccgacaccaccccggcgaatccacatgtctctcggcatcaaggctcccctgataagctagttactcagccaggggtgtcccattccacccatgtggtcgtacttgtcttatgttcggatgaaattccaaggaaacggtccttaagtgcaagagcgggaaaccgtacacccgattttaagtttgaaggcgaccgtcgatactcgcacagagtgcacgagtatcgaggcgcaactagatggttacaagggaacatggtggcttgccttgctcgagatctggagcttgatcctcgaaatcctcgcactgcgggtcttcgggctccggaaatgagtgacaacgctcatagtcctgattcctcgtcattacataatcaattctcctgttgatctcatggcatccaccaaaacaagaaccctggaggttgtggatagagacgacacacatgggctcgatatcatcagcacatccaacaatattaggatcaaggctcaactctgcaaagcgttccatcctctttgccagaagatccggattcaatttgagctctgcaaagtacaggctcttcttagcctgatcatcattctgagccctggcagtaaagttgacatgggcgtatgtggacccacagacctcatgaaaacagtttgataaaagaacagtacaaagctcaatcttaacaatgttcttctcaatattgttgtaatggttaattgctaaattggcgaagcgatgagcttggggacaaactttcttgccagcgagctctgcctccatctcttctgcggtcaaatgttgctcaggtgtatcggagaggacgcggggtcggaagatttgttcgattttgttcttctcgatgtcgatcatcctctgatagaacctggccatctgcgccttggactcgcggaaagcgggcttatcctcctccctgaagcagtgagccttatcgctcatgtccaagctgtccgcgagaagctcctcccatgtcatgggcctctttctcaggcaaggatggggtagcgtgcgagggatcctcctccacctccctggcgtcctcttcttcctcgccggggcctcgcatgcagaccccgccgccgccggcaggaaggtggaggaattggcccccgattgcgacggcgacggcggcggcggcggcggcagagagtccagccattcccgcgcggtgatcgggacggtggatccctgacgaacctggaacatggagtaggtcgccagtttctcttctatggtgggccttctcat

SEQ ID NO: 85668 - DNA, 540 bp, Oryza sativa
  Clone ID: PAT_MRT4530_84784C.1
atgggggaaagcacgggtggcaccaacggcgaggatgcggcgggaagcagcagggcgccggcgaggctgctctcgcgaggacggagatcaacgcagggacgcaggcacacggatcggactcgccctaatccgccgggaaacaggctgagaggcggcggcgcggcgggattttggccggcggcggggcaccggaagcgcgagagagggagacgagacgaagctttacctcggatcgggaccaccggcggcgaggcaggcaggccgggccgcgaggcggaggcggaggcggatcggatcggcgacgaggcggggaccgggatgatacagtcaaacaagtttgaggacctgaacgcaccgctcggccaccgcgctgcccgcgaggccgcctgggccgccgcgccgcccggccaccgcgctgcccgcgaggccgcccgggccacccccccttcccgcccgcgaggccgcccgggcctccgcgccgccggccgccaggccctccgcccgctggccgccaggccctccgcccgccggcgctggtag

SEQ ID NO: 85669 - DNA, 409 bp, Oryza sativa
  Clone ID: PAT_MRT4530_84785C.1
ttaagccgtgctcccgtggcmdcagcgcgctgtcggaactagaacgcggaacacggdcgatcgacgaagccgccgccgccaatagaagaargckagacattgtcggggckagttctttcctaggttgggtggatcctccwgattggacttgcamgattactcaagtttcgatcattgtagtggagactwtaggtacctcgtccctgtagatctcgttggagacgcgctagggtccgcgccgcctcstctgtacatgtatccccaatagaggggagctgcgaggagcccgaagcggaaaggacttggaagttgagccccataccgtcayatgtctagtctatctctgaaaccgtkggkagaagaagcaccagaagaggatgccaactggagcatagmgagaagatgaagg

SEQ ID NO: 85670 - DNA, 626 bp, Oryza sativa
  Clone ID: PAT_MRT4530_84786C.1
atggtgatgatggaggggatcttgatggaattctttgcggtctaccagcttgtttggagcagcgaaatagcactgatagaggggactagagacacaatcatttggagatggacaagtaccggcaaatacatgacaaaatcggcttacctggcccaattcgccggcaaaaggtggaattaagggcaaccaccatgatttggaaagcatgggcgccgtctaaatgcaagaattttgcatggttattgctgcagaacaaaatttggacaatggatcgattgcaaatcagacagtggccaaattgttacttttgtcaactctgctacagagacctgtaaacaacacaacatttgttcaaggattgtccgttcacaaggaaggtctgggacagagtagccacgagactggagtgcaaccaagcattcccggcgcacaattcagaggagatactgattgaatgatgggaaaagaagacgctgcagcaagacaagagcaaaatgaaaggtatgcgatcactgcacatgctcctctgctgggaagtgtggtgtgaaagaaataggcgagtcttcaagaacgaggaactcttaatgtctcagctgatgatgaaagtgctggacgaagtgcagcta

SEQ ID NO: 85671 - DNA, 178 bp, Oryza sativa
  Clone ID: PAT_MRT4530_84787C.1
ggaagacataccagatgtgacttacaatgactacgctggatgcatggagctgattgataagatacgtatggtggatgtgcttcctatacttgatctagacatgctcagcaatcttattgtcgatatttttaatggagtactgactctttgacgtctacttactggtgctacacttttt

SEQ ID NO: 85672 - DNA, 449 bp, Oryza sativa
  Clone ID: PAT_MRT4530_84788C.1
tttgtttttttttttttttgttttttttttttttttttttttttttttttttttttttttttttttttttttgggggaaggaaaaaaaaaaattttatttgggaagggacaaattacagaattggaaacaataaaaaaatttttttgaaactatttctgaaactggaccacaaataaattttggttatttagggccccaaaaggaaaaaaaaatgcttaaaaaagggccaaaaaccgcaggggggccctcgggttggaggcgaactgggggaaaaaaagggtttggggcgggcattgggctaggggacaagctttaccaaaaacggggaaagggacgggataaacccttggggggggaaaaaaggctcctttttgggcctcgggtgaagggccccggttttggggggcgggtccggggggtacccaatggagggccccagggggggggg

SEQ ID NO: 85673 - DNA, 945 bp, Oryza sativa
  Clone ID: PAT_MRT4530_84789C.1
ggctaattaaagccattattggactaaacagacacttcccaattgttccgccaaatataatgtcctacaagcagcatcgtgtgctttccaccatgctgcgttctcatgcatttgttaattccctgctcttttttttaacgaagttctattgatagagtataagattacaaccctgaaaggtcgtaaccaggaaaaaaacgaaaaattccctgctcttgatctgtagggtacttatgcaagccagcttcatctctctctgatcattatgcatgtaatcaactgatcatgcttctatatatttacatatccacacagtacccagccggacattcaagacatatgtttgcttttgaagattcatctcatggcaattgtatcaggtagtccaattgcaaatatcagtcatacttgtttgtactatctgataaccgtataaatatccggattgttatacctcgcaatcttcgtttgtcccatgaaactaatgtggccggcatacctaaacaattcatgcatgttttgacaatcaatcccatgttgtgacgagatgacgaccgacgtcgctgatcgagcgagagatccacaaaattaaggcatgcagaggggtatgtactgaatttagcaagtgcttggaccattcacttggctctaatcattcatctccatgtaccaaaatatcaactgccttttccgaagctcaaataaaggtagcttccttgatcctgatgttcttcttcatgcatatatacgtcgtcatatcattcgagctatctacaagctgtctctgcacctgagcctaatcaacctgaggctaaaaagatgagctctcccagctcgatctgtctgtgcatattgccatagatcatagtgcccccggcggcggcgaagccatgggacggcggccggagctaggatatggctcttcacttgcggatttgggcgtgt

SEQ ID NO: 85674 - DNA, 2208 bp, Oryza sativa
  Clone ID: PAT_MRT4530_8478C.1
atggaccctcgcaagccaaaccctgcttcggcgaaagggccggatcccggccgagtcgatgacgacaacatcgcctttctgggggtctctcttgtggacgacgtcgagctggcgaagctggtccgctctggggtgttggtcgaggggcaggctttcgccccagggaaatccgtggtgccgaaacctatcgacaatcggacggtggtattcaccgtcttttttgaggcagggctatggttcacctgcaacatgttgttgccggagatccttcgcctcttccaggtggaacttccacagctgagcccgtcggcgcttgttcgggtcgctatctttgactgggcgtgccggacttccgggtttgagcctaacgccgagctcttcagcgccatatttttcgccaccgtgaacttgaagacggtgattatcccggctggaacgaagaagacagtgttcgggagcgtgaactttaatgttcgtcccgagcggtccgatctctggccggtgaacgctgccatgtcgaagtgggaccgccattggatggctaggtggttctatcacaccatccccttcgaggctggcactgacttggcgaaagccctccgttgccggcgtggacggcgctatggaggcgcggttcgttctgctgcgaaagcgttgaccctcgaccaggctgaaaatgaggcccgcaggatgatcggcgacgtgccggtcgtcgagtatagccagttgctaacacgacaagcggctgggcgggcgaaccgggtttacaacggcgaattgcctcctcgggcaaacccccacaaagctgacgacgatgcaggggcttcgcgaaagcgaatgcgcggacaagtgaagcttgcccctaggaagcgaagggttcctgcttcgccggactccgacgccgacgacgaggatgatgccgaagaacgcgacggcgaggaggaaggagaggagaaagaggaggccatggccgataaggccgcgaacgaggcgatcgaagaccgcgtcgacacccccgactacactcctaccccaagtcccggtcacaacgagaccggggtggagtcgaacagctccccccttcgacggaaggatttggaaggggcgaaggccctagttgcattctcctcgggcaaggcggcgaagggaggtccggtgcagaagatctctaaaaagaaaggactcgtcgacatcgcccacgttttcagcgacgacgaatcttctaacgggactccaacttcgcctgctggccgcagtttagacctttcgactgctcccctcactccactcggcgttgctggggcaggcggtaacgtcgccgccggggcttcagcctccgccgaacgaattgtgtcggctgcggcgagggttttcgggagccctctgcgtgagccagctatttcgccgctagtcaaggcgaaggggaagtgtgcggccgccgaagcatctgcctctgagtattcccttgcggcgccccacttcgcccctggtgatttcgagactcgggcggaccttattccctttgtggagggagtgagcaaccttgtcttgcccgccggcaccccgagcttgttcaccgaacttaatgagttcgacgaggggtgttccgccattaaaagcctggcagttcggagccatcttcgggccaaggacgacgaaataagccgcaagaacttggaggtggaggccctggccaacaccctcaaggaggcgaaaactgaagtcaaacgccttcagtctgagctagataaggggaaagaggccagggccgaggttgatcgcctcaaggccgaactggagaaggagaaggcccattcggcggtgctgattgactactacaaccttactgagccgaagatggaggctcttcgcctgaaggctagtagggccgaagcgagcgccgcggaggagtcgcagcggttttcacaggagatggcgaagaccaccgaatccgcgagaacggcttgccaaacgctccgcctcacccttaccgacatgggcgcgaaagtgcggggggtccctgccgaggatgcatcagccttcgacttctccgagtggacccagcaggctgacggatcggtttcggactgcgccaccgcgtacggcgattgctgcgcgcgtgtatcggcggccttcaccttaggccttttgcaacagttcggctgcgagcacgtcgccgagttccctacctatgcgaagggggactag

SEQ ID NO: 85675 - DNA, 2100 bp, Oryza sativa
  Clone ID: PAT_MRT4530_84790C.1
aaataattcctggacaaaccaattataatgggaagacatagcacgtcggtttacccccttcatttccggctggatgatgaagattttggaatgaggatgaaaagatatggttttgattttgactactcttgatgaatgatgacccaagaagagaacatttcattagaattcaggtaagagcatcacacaccagctcatgatgcatttgatacctctgtataccttcgtttccatgcagtttctgttggacttctaagaatggcggcgactccggcggcggacagccgcctcctcgtcatatacgcctcggagactgggaacgctatggacgccgccgaacgggtcggccgccaggccgagcgcggcggctgcccggccgtcgacgtcctccccatggacagcttcgaccccagttgccttccgagcgagaggttcgtggtcttcgtcgtgtccaccacggggcagggtgatcccccggattccatgaaggggttttggaggtaccttcttaagaagaatttgggtgctaggtggcttgaaggggtcagatatgctgtgtttgggctcggagattcaggctatcagaagtacaattttgctgcaaaaaagctcgataaaaggcttttacaccttggtgcagaaccaatcatacaggtaggcttgggagatgatcaacacccttcaggatatgaaggagctctagatccctggttgctgtctttgtgggaatcactgaatcaaacaactccatcgctgttaccaagaatgtatgatatcattaatccagatttgagtgtcttaggagatgcaaaagtcgaagtcatctatcactcttctgacgaggctcaacaagattctaaccttttggatttcaagaatttaattcagagagcgcgctcaatgtccccttctctacagttctataataatgacaaagaaccacattacatgttacagatggtatcaaatcggtgtttgactaaggaaaattctgacagagacgtgcgccactttgaactggaaaatccatcttctggcatcacttatcaagttggcgacgcgctagaaattctaccaagtcagagtccatcagctgttgactctttcattgaacgctgtaaattggatccagattgttacataacggtcatgagcttttttgcaacggctgaacatgaaaaggaaaagcttcagtattttgcatctccggaaggaagagatgacctttatcagtacaatcaaaaggagggccgaactattctagaagtattggatgattttccctctgtacaaatgccttttgaatggttggtgcaactaacgcctccattaaagaaaagagccttttccatatcatcatctccattagcaaaaccaaatcaaatacacttgactgttagcatagtgtcatggcgtactcctttcaaaaggatgcggcggggtctctgctcttcatggctggctgggctaaatccaaatgaaggaactggatgtgcaccattctgtgcatttgttgcggaaagggctgcacagagtacatcagaagcaacagcacccattctattcttctttggctgtagaaatcaagaaaatgattttctatacaaggacttctggtatgctcatgcccatgaccagggggtattgtcctcgaaaaatggcggtggtttctttgttgccttttctagagatcagcctcaaaaagtctatgtgcagcacaggataagggagcagagtgcaagagtgtggaatttactaaagtctggggctgcaatatacattgcaggctcgtctaccaaaaggccaactgatgttacagctgcactggaagaagttatctgtcaagaaaccggttgttcagaagaggaagcctcgatatggctcaggaaactagaaaggaacggcaaatttcacactgagacctggtcatagatcagactgttgacaccggttgatagggattctttagttcttgctacaatatggttaatattcatttcaacaatcattttgcatagcgaaatgttgctagtaatgttgtttgtcctgtggttgtgaatttagcccctacctgccatctaaagtattatcctcaacatt

SEQ ID NO: 85676 - DNA, 924 bp, Oryza sativa
  unsure (1)..(924): unsure at all n locations
  Clone ID: PAT_MRT4530_84791C.1
gcacgaggaaagactaccgcgttgatgtcctagtcatcatcgacactcggtggtgtgaaacaagcttttttacctgctcaagtacgactctgccctcgcgataactgatgctgatgtgaagcctgctgtggatgatggcatttcagttgaggcactatcatcgacggcgtcgcagacaggaaccatgtccaccttgactggaatgaaatgaacatctatttgatgatagaagggaccggactgatgatggcatagacggtgcatgtagcactcgaacccggtgctataaggctctataactgctccatgaaggacgatgtccacctatgtggatgggtcaatangatagtatgacctctgagaccatatcgtaacacctctgtacactactggtgaaccctngtcaagactgagagacattggatctctaggaacgtgaccactaccactcctacctgatgacacaggctctgagccatgtaccgcgatctatgcgtgcatagctgcacgctcacatgatcgctctcactagtgcagcanagcgtgctatgttctgctcacactaccgcaggatcacaggatcgacttcgagcccactctcatgactgattgttgaccttgttgtcagtcaccagtataaccttgctgcgactggattgctgcttacagaggatgttcacacnatctctgagcattcttctgaatgtacgagccctctgtatctggcgattcacatgcactgacgcatctcactctcgatgctccctccattgctatgagaggantggntangccatcgcagaatgaacataatngagtacatctacagagtgcgactctccacattctctcactaggtgataancatccagctgcggagtgtcaacaactgcctcgtataccgtgnttctctttattnctcag

SEQ ID NO: 85677 - DNA, 491 bp, Oryza sativa
  Clone ID: PAT_MRT4530_84792C.1
gcttaaggttgaggataatactttagatggcaggtagggtctaaattcacaaccacaagacaaacaacaatactagcaacatttcgctatgcaaaatgattgttgaaatgaatattaaccatattgtagcaagaactaaagaatccctatcaaccggtgtcaacagtctgcatccttagaagtccaacagaaactgcatggaaacgaaggtatacagaggtatcaaatgcatcatgagctggtgtgtgatgctctcacctgaattctaatgaaatgttctcttcttgtgtcatcattcatcaagagtatccaaaatcaaaaccatatctcttcatcctcattccaaaatcttcatcatccagccggaagtgaaggggttaaaccgacgtgctatgtcttcccattataattgttttgtccaggaattatttttcatttatgaatgtggacgtgaatatacctctccaattttaacaacactgatctacacc

SEQ ID NO: 85678 - DNA, 510 bp, Oryza sativa
  Clone ID: PAT_MRT4530_84793C.1
caagaatttaattcagagagcgcgctcaatgtcccctgctcgacagttctataataatgacaaagaaccacattacatgttacagatggtatcaaatcggtgtttgactaaggaaaattctgacagagacgtgcgccactttgaactggaaaatccatcttctggcatcacttatcaagttggcgacgcgctagaaattctaccaagtcagagtccatcagctgttgactctttcattgaacgctgtaaattggatccagattgttacataacggttcgagccaaggacagggttaaaatttccaaaggttcacttttgaaagatcgtatcaagttaaaaacctttgttgctttgacaatggatgtcgcatcagcttcccctcggcgatatttctttgaggtcatgagcttttttgcaacggctgaacatgaaaaggaaaagctttagtattttgcattttccgaaggaagagatgacctttatcagtacaatcaaaaggagggccgaac

SEQ ID NO: 85679 - DNA, 343 bp, Oryza sativa
  Clone ID: PAT_MRT4530_84794C.1
gagcatcattataggcttcgaagcataaagctgggagaaaacgtagttaggggtagaacaagttcatcacatcatgcccacggaatacatatacttaaatcctcgcgcaaaaaaaccaccagttctgtttggaacaaaaaatccaagaaaaaatcacgatggttcgagcaataatgacaaaaacatcgagcgtgacaaaacccccgaacatgattgtttcattatccatcctactcatgaaggagatacatgcctagctgctaatcatctcgtaatcccacgggcggaggtccaagcttaaagccttgctagcactgtcactggaaaaacaatccaggcccca

SEQ ID NO: 85680 - DNA, 491 bp, Oryza sativa
  Clone ID: PAT_MRT4530_84795C.1
cccacgcgtccgatcaaatacacttgactgttagcatagtgtcatggcgtactcctttcaaaaggatgcggcggggtctctgctcttcatggctggctgggctaaatccaaatgaagaaaatcttataccatgttgggtacaccacggttctttgcctcctccacatccatcgactccacttattcttattggaccaggaactggatgtgcaccattctgtgcatttgttgcggaaagggctgcacagagtacatcagaagcaacagcacccattctattcttctttggctgtagaaatcaagaaaatgattttctatacaaggacttctggtatgctcatgcccatgaccagggggtattgtcctcgaaaaatggcggtggtttctttgttgccttttctagagatcagcctcaaaaagtctatgtgcagcacaggataagggagcagagtgcaagagtgtggaatttactaaagtctggggctgcaata

SEQ ID NO: 85681 - DNA, 589 bp, Oryza sativa
  Clone ID: PAT_MRT4530_84796C.1
cccggggatccggaggttgccccgatcgccacccagcaaatggccgagttgattgggcgattttttcctttggatacttgtcggcgattcaagtttttgcccttagcccagcaggaaggcgacccccccagtgtgctagtggccatggtggaccccgataacttggctgcccaggacgagctaaaccgaattttgcgggttaaaggttttgaattgcgccgcttggtggtcacccaagatgattttaaccaactgttggaacagtactatgccatccgggaagagtgggaggcggcccaggaaaaaagggaccaggaaagggcccttgataaacttaatgatttgacggatattgtcggctccatcgacatgaatctgggggaggacaaagaagatgtagataatgctctagactccaacgatgctaaccaagcaccggtgattaacctggtcaacaaaattttggctaaggctctccaggaaggaacttccgacattcacgtggagccgcagaaaaaaaccctgagaattcgtttccgcaaggatggggttttaaatcaggctttcgatcctctagagtcgacctgca

SEQ ID NO: 85682 - DNA, 852 bp, Oryza sativa
  unsure (1)..(852): unsure at all n locations
  Clone ID: PAT_MRT4530_84797C.1
actactaacgccagtcccggaacccgactgtacagcaaaaatgtctgacaacggcgagatcgaggtcgagaactccgccctctacgaggtgcttcccaaggatgttgtcaaggaggttggcaacgtcaagctcttcaacaagtgggactacgatgttgaggtccgcgacatctccctgactgactatatttccctgcgaaaccccgtctacgtcacccacaccgctggccgatatgccaccaagcgattccgcaaggccaactgccctatcattgagcgattgaccaactctctgatgcaccacggccgcaacaacggaaagaagctcatggctgtccgaattgtcgcccacgccttcgagatcatccaccttatgaccgaccagaaccccatccaggtcgctgtcgacgccatcgtcaactgcggtccccgcgaagactctacccgaattggttccgccggtaccgtccgacgacaagccgttgatgtctctcctctccgccgagtcaaccaggctatctctctcctcaccactggtgcccgcgaggcctctttccgcaatgtcaagtccattgccgagtgccttgctgaggagcttatcaacgctgccaagggttccagcaactcttacgctatcaagaagaaggatgagtttggagcgtgtggccaagagcaaccgataaagggtgcatgggtgtaccaacgtntttgaaagggttggcctttggcgtgttccggcttctttcaaatttgcattttgcgtttcatcgggtctggaaccgcgggctatggattttcttaagtggtacgaatcanttaaaaagcgggctccctgagagttaaatgaatgta

SEQ ID NO: 85683 - DNA, 636 bp, Oryza sativa
  Clone ID: PAT_MRT4530_84798C.1
atgggcggcggcggcggcagcagcagaagcagcaaggtgtatcacgagaggcaacggctgcagttctgtctcctccacgccctcaacaaccttatgcaggaaaactggaatagtgttctttcgcatctgaaagctacagcatacttaagtcggtcactctcagtgttatttgttggaacggaaaaggaatctttcacccgagctgagttagatgggattgctggaaatctcgtccagattgatccaaataaggagcactggactcctatgtcattgatttttaagccccaccacaacgtattcaccgggaactatgatgtaaatgtactcatcacagcattagaagctagaaagaagaaggtaatctggcatgatcatcggaaaggggcttcttcaatcgatctggatgcagatgcattgtttggtctgatgatcaatgtacccgtcaggaggttcagagggctttggactggccggcattgggtggcaattcgaagcattaatggcacttggtttaatttggatagtgatttttctgcacccaaggagtttcaggacaaagaaaaacttattgcatttctagacagcattctcagtcaaggtggagaagtcatgatagtgctgcaagatgaataa

SEQ ID NO: 85684 - DNA, 366 bp, Oryza sativa
  Clone ID: PAT_MRT4530_84799C.1
tatacagcccctgaaacccaacctccggcgcccggcggcgtcgcgcaaccgctcggcatgccgccgcccgcccccgcccccgccacgctcgtctccctcagcgcgctcgttacctcgctcgcgcgcttgggccgacccgtggacgcgctgcgcgccttccgcgacatgctcgcgcggggtgagcccgccgaccacttaaccctcccacctgtactccgctactgcgcgctcaccggttcggcggtgctcggcgactacgcccacgcgctggccctaaagatcggggcccaaggtaaccctcttgtggcgttcgggctggtgctctgctactcgggcctgcccaaactttcccgactcccggaggct

SEQ ID NO: 85685 - DNA, 463 bp, Oryza sativa
  Clone ID: PAT_MRT4530_8479C.1
atgggccgccggcccattctctccttttctctccctcctccctactgggccgaccgcaggccgagacccagccaagccgcccctccctctctccccgggacgccgacaggtgggccccacctgtcggacccgtccccttcctccagccgcgcccgcaaccgccgcaaacgcctccgccttctccgggccacgtcagccacgtccgcgcgtgcgccgcatctcccacgcccactcccctttctctcccgcccgcgcccgcgcccgagatggccgggattcgattttcgaatcccgcctctctctccttcctcactccccacgttggccggcgaaatcccgcctctcccggccacgtccggcccttccctcccctatttaaccttccccgtcactccctcttgctttttccccatttagccgaactttcccgagctccccatcgctcctgcgccgtgcaaccacc

SEQ ID NO: 85686 - DNA, 261 bp, Oryza sativa
  Clone ID: PAT_MRT4530_847C.1
atgggtaccattccctggtctccgaagcagactaccattccaaagtatggtcgtaacctgtggcagcgctggagtttggcggcggcggcggcagctggggatgacctcagctccgtcggcggcggcagatggggaggacgtcggctccagctgtggccgatggggaagaggaacgacctcgtctccagcgtggccagcggtggaaccatatcttgcactgttgcagagttaggcattttgcaacattacacattgggttag

SEQ ID NO: 85687 - DNA, 2727 bp, Oryza sativa
  Clone ID: PAT_MRT4530_84800C.1
atggcggcgagccagctcctcgccgccgccgtcgccgcggcggtgttcttggccgcgctgctcgtcccgccggcgcgatgccagcagcagcaggtcgccaccccgccgcccgcgtccgccacgccgccggtgcggctcccgccgtcggcgccgccgccgctggtgggcgtcccgccgggggttctcatggccaggatcgacgccgtccgcgacgagctcgccgccgaggtgcaggccaagtacggcttctgcatggccaacgtgcaggaggatttcacccaggcgttcagcttctccaacgccagcttcgtctccgactgcatggaggagacgcaagggcaaatgactggaatgctgtgcgggaaagcggaaatagaaatatatgtcaaaagcttgggtaaaaagcccagcacgaggggcatcactgtccaacaacaacccaaaaatttaactgtactgaggggtactattgccgtaaaggctccacagaggaacataagtgtatttggaaaaacacatgttatcttgagcgttgttttactactggtgtacaactgctctgatcaattcatcaaaattcgagctaaaatattgtccaaatctcgtagaaaggctgcaacgattgcacaagaatcagcaacagcacgtggaagatggaaattagcaaaagaacttgtactaagtcatgagttagaaatgtctgagtccgatcaattagctgcatcatctaatgaggcacggcatgctactgaaggtaatggtaagagatccaaaaatcgcaaaaagctagcacatgcacgcactgaaaggttcaggcgtgcctatagtcaaattggtagggaaagagttctgcagccagacaatgataaaataacactatctggagtagtggctctagctgctgaaaacagatcgagaaggccaatgtttgaagtggttttcaaaggtctaacactgtccattggaaaaaagaaacttctgcagtgtgttactggaaaactttcaccaggtagggtaacagccatcatgggtccttctggagcaggaaagactacttttctcaatgctgtgttaggtaaaacaactggatataagaaggacgggttagttcttataaatggaaaatctggatcaatgcagtcatataagaagatcattggttttgtgccacaagatgacattgtccatgggaacttgacggttgaggaaaacttgtggtttagtgcgtgctgcagtttgaaattcagttttgccaacccccatccctggtcaagcaaaggcatgtcaaaatctgataagattatagttcttgaacgggttatcgggtcattagggcttcaagaaatcagaaattcccttgttggaacagtggagaagcggggtatttccggaggacaaaggaagcgtgtaaatgttggaattgaaatggttatggaaccttctcttcttattttagatgagccaactacaggcttggacagtgcttcctctcagctacttttaagagctcttcgtcatgaagcactccaaggcgtaaatgtttgtgcagtgattcaccaaccaagctatactttgttcaacatgtttgatgactttgttcttttggcaagaggtggtcttattgcttaccttggacctataagtgaagttgaaacatacttctcaagcctggggattaaggttcctgagcgtgagaatcctccagactactatattgacatcttagagggaataacaaaaactaaaatgaggggacatgctgctcctaaacacttgccacttctttggatgctacgtaatggatatgaagttccagaatatatgcagaaagatcttgaggatatcaataatgttcatgagttatatactgttggatccatgtctagggaagagtcttttggtgatcagtcagagaatgcagattcagtgcaccaaaatgtcagggaaccatacagtttacttgataggaaaacacctggtgtacttgcacaatacaaatattatttggggagggtaactaagcaacgcctacgtgaagctacactacaagctgttgattacttaatattgtgtatcgccggcatatgcattggaacaattgctaaagttaaagatgatacattcggtgtagcttcatatggatataccataattgcagtctcgctgttatgccagcttgcagcactgcggtcattttcaccagaaagattgcaatattggagggaaagagaatctggcatgagcactctagcttattttcttgcaagagatacaattgaccatttcaacaccttggtgaagccagttgccttcctctcgacattttatttcttcaacaacccacgttctgaatttaaagacaactatttggtgtttttggcactggtttattgtgtaactggcataggttatacttttgctatttggtttgagctcggattagctcaattgtgttctgcgttaatacctgtggtattggttttggtaggcactcaaccaaacattccaaactttataaagggattatgctatcccaaatgggcactagaggctctcattattgcaggagcaaaaaaatattccggcgtgtggctgattactcgatgtggagcactgctaaaaggtggttatgatatcaacaactttgttctttgcatcgtcattgtcatgctcatgggggtactcttccggtttatcgctctgcttagcctgttgaagctaaaatag

SEQ ID NO: 85688 - DNA, 2103 bp, Oryza sativa
  unsure (1)..(2103): unsure at all n locations
  Clone ID: PAT_MRT4530_84801C.1
ccacgcgtccgctcgtcacttcttgcgtgttcaaacgtgaactaatcaactctccgcgactccgcctccggccgtcccgtccccgtctccgggattttaatttcttggcacctcgcctcagcatattccatgtcccctctccatccgccccacgcgcccactttgaccgacccatcgatcgatcacgatatttagtagtagtagtagtattacaaatccagcaagcgatcccaatatcccattcccaaaaccccaatccatcctcggagcacgccaccttcacgaggaagagagaatcgaggaagcagagcgctcggaccagaggaggaggaggaggtgccagccatggtggaccggatcggcgccgcgtggtggtgcgcgtgcgccgtggggatgctggtggtgggggcgtgcctcgccggggagaccagcgagtaccggcgccagctcggctccgccgtcgacatgccgctcgacgccgacgtcttccgcgccccgcccggccgcaatgcgccccagcaggttcatatcacacaaggaaatcatgatggcactgccatgataatctcatgggtgacaacaattgagccaggctcaagcactgtgctctatgggacttcggaggataatcttaatttctctgcagatggaaaacacactcagtatacgttctacaactacacctcaggatacattcatcactgtacaataaaaaagttggagtttgacacaaaatactactatgctgttgggattggacaaaccgtgaggaagttttggttcagaacccctccaaaaagtggcccagatgttccatatacatttggtctcataggtgatcttggtcagagctacgactcgaatattacgctggcccattatgagtccaattcaaaggcgcaagcagtacttttcgttggggatctgtgttatgcagataactacccataccatgacaatgtgaggtgggatacatgggcaagatttgtagagaggaatgttgcctaccagccttggatctggacagctggaaatcatgagatagattttgccccagaacttggtgaaacgaagccattcaagccatacagctataggtaccccacaccttataaggcttccggtagcacggcacctttctggtattctgtcaaaagagcatctgcttatattattgtcttggcatcatattcatcatatggaaagtatactcctcagtacaagtggcttgaagctgagtttcccaaggttaacaggagtgaaacgccatggttgatagtgctattgcatgctccgtggtacaacagctataactatcactacatggaaggtgaaagcatgagagttatgtatgagccgtggttcgtcaagtacaaagttgacctcgtgtttgcaggacatgttcatgcctatgaacggacacacaggatatcaaatgtcgcgtacaacattgtgaatggccagtgcactccagtccatgatcagtctgctccagtctacataaccatcggagatggaggaaaccaggaaggactggccaccaacatgacggcgccgcagcctggctactcggccttcagggagtcgagcttcgggcacgccatcctggacatcaagaacaggacgcacgcgtactacacgtggcaccgcaaccaggacggcaacgctgtggcggctgactccatgtggttcaccaacagatactggcagccgacggatgaatctttggacgactcccagtgatctgagtcgttcgtacatggtttactcacacctgctcctcctccctagcttgtgttgtggttcttctacgtgaataagcactggctcgatttgaacacacaggacggactcacggacgcctccggtgcaggcgtcgtgatctaggtggttctttctccgctccagctccctcgtggccgtgtgctgcttgtgtatagaagaagcgcagctcacgtgcagcgagaggaaaagaaagctgagaaattgcgagttgatacttgataggcttgtgtacgttcgtactcgtctagatgttgaataaacacattggtttcgtggccttgcaactngcattggacaaaaaaaaaaaaaaacgggtcg

SEQ ID NO: 85689 - DNA, 208 bp, Oryza sativa
  Clone ID: PAT_MRT4530_84802C.1
gagaaacgaacaagaacacgagcacacacgcttctagtaaagttgttggattgcaggcggcgaaggccgatgatgtgaagggacccaatctgcagaaataggcttctgaatgggtaaatgggcgcgttctggtggttgaaaatgttagagcatacaaggctgaggagaagaactacacatataacatctagaagcttgccatggtagc

SEQ ID NO: 85690 - DNA, 564 bp, Oryza sativa
  Clone ID: PAT_MRT4530_84803C.1
accacagcctgagagagagggggggtggaagagggaaagggagagagagggcgggcgcgcgaatgtaaattacacaaatgtaaatgcgacaatcaaatgagacaaggagacaagagatttttcaccgaggttcggaaactcgccggtttcctactccccgttgaggcgagcccaactccaccacttaaccacgaagccaccgcacgcccccttcgtaaaggggtgggcaaggcgggagccagcccacggacaggactacccaagcctcgatcactcgaggtagttcttccttcactccgaagaccgtgctactctgcaacggctagaaaactagccattgtagccctgtcagagagccccattggcttggctggtcagaccacagttgattggccggtcagaccagcctcggctcagtcagaccgccatcagctcggtctgaccgaatacggctccgtcggctctgtattggccaccccgagcaacaccatcccggcctccagggggccggtctgaccgcacaagtgccgccggtcccgccggtcagaccggccttatgcaccg

SEQ ID NO: 85691 - DNA, 397 bp, Oryza sativa
  Clone ID: PAT_MRT4530_84804C.1
cacacgccagatctcgacataagagattagcctagacataccccatccgatgcctacagaggttggcaagagggatctagcgccatctctgatctcgacgaattcatattcaaggaggaagactaccttgtcgtcgactacgagttgatgaataaaaacaacaccggcttcggccaacaggatgtagggctattgcctgtcagataaggggcccgtatgtctccgtctctttaacctcaatctcgcatataccctggtaccgatgatccctataccatccaaataccgtagtcgcgatctcgaatgtcaaacagttagaatgatataaacagacaggaactggattagaagtgaagaaacagatgcccttacgttttctaaacgaacaaagaaaaaa

SEQ ID NO: 85692 - DNA, 263 bp, Oryza sativa
  Clone ID: PAT_MRT4530_84805C.1
caaggggcccacaatgcctgcacacaaaggtggtgccagaggggctggcgccacacagtgcactgcacgactgcacagactgggtgcgcttgaggttaccccaggaggccaaggccaatatgagagtcaagctatgtacagactccaggtggatgatgcagggcattaaacgcactggatgagatggcccaacagcacatagatcaaagaggtggttccagatggatggatgatttgaaatgtatgggggggaaagtatatca

SEQ ID NO: 85693 - DNA, 604 bp, Oryza sativa
  Clone ID: PAT_MRT4530_84806C.1
aaatgtaaattgcacaaatgtaaatgcgacaatcaaatgagacaaggacacaagagatttttcaccgaggttcggaaactcgccggtttcctaatccccattgaggcgagcccaactccaccgctcaaccacgaagccaccgcacgcccccttcgtcaaggggtgggcaaggcgggagccggcccatggagaggactacccaagcctcgatcactagggtagttcttccttgacttcaaagaccatgctactctgcaacggctagaaaactagccgttgtaacgctgtcagagggccccatcggcctggccggtcagaccggcgttgagtgggcggtcagaccggcctcggctcggtcagaccgccatcggctcggtctgaccgaatacggctccatcggctctgtatcggccaccccgagcagcacaatcccggcctccagggggccggtctgaccgcgcatgtgccgccggtcagaccggccttatgcgccggtcagaccgccgttgtggcgccggtcagaccggccagggcatgccggtcagaccgccacaatgtggccggtttgaccgcccctggtcctcttcgatctcttacctattcc

SEQ ID NO: 85694 - DNA, 1200 bp, Oryza sativa
  Clone ID: PAT_MRT4530_84807C.1
tgatgactggattgccacgttagcgccacgtatgcaagctcaagtcgaaaacaactcaaaacaaaaatgtaaattgcacaaatgtaaatgcgacaatcaaatgagacaaggagacaagagatttttcactgaggttcggaaactcgccggtttcctactccccgttgaggcgagcccaactccaccgctcaaccacgaagccaccgcacgcccccttcgtcaaggggtgggcaaggcgggagccggcccacggagaggactacccaagcctcgatcacaagggtagttcttccttcactccgaagaccgtgctactctgcaacggctagaaaactagccgttgtagtgctgtcagagggccacatcggcctggccggtcagaccgacatggggtggccggtcagaccggcctcggctcggtcagaccgccatcagctctgtctgaccgaatacggctccgttggctctgtatcgaccatcccgagcagcaccatcccagcctccagggggccggtctgaccgcgcatgtgccgccggtcagaccgcccgcttgggccggtcagaccggccagggcatgccggtcagaccgccactatatggccggtctgaccgcccctggtccgagccaagtcctcggggccagaggaataagccatcgccgaagaaagcctcgacctcgccggaaccctaactcgccgttggcagcagcggtggctctgggaggagaggtgcgtgggggcagagcagaaggcgccattgtcagagaggatcccgagcttgctgacggcagcaccgcgaggaggaggtgtaatcatcgtcgaagaggaccaagctccgtggcggtggcacctacatcgctcgaagatgcatccatcaccggttagggccccaagctcaccgccagcagcggcacggccacgaggaggcggtgcgctggacagagcttgagatgccatggcctgagagggcttccctgtgctcaacacggccagcaggtcaccttctgcacaactccacagctccagcccggccggtccggctcccgcggccttggcttttggctccacacctccactccacgactcccacgcgcgcgcgggccgcggcctccccccgcttccgaggccacggtattttatcgtctcgccccccattccattctggatcttagttgtagtcactccccgtctgtccggcat

SEQ ID NO: 85695 - DNA, 1026 bp, Oryza sativa
  Clone ID: PAT_MRT4530_84808C.1
ttaaaaaattgtggggcccacgtggaccccacctgtcatcctcagtacccctctttctctgttcttttttctttctctctctctctatcctctctccttccttctcctcagtcctccgtcgcgtcgccgccttcttcaacgtcgctatccgtgtcgccgccgccgaccacccagacaccctccgcgcgcgccgggacgatggactgcacgaaagcgaggcgacgaggccaaagatggtgagcatctcggcgagcagcgcctcgggcctccccatggcggcctgcacgaatggcaccgccgcggtgctgttcgaagatgcggcgtccctccaccccgctgcgacgtctgccaccgccgagacggcgtccccggcggcggcgaaggcgggtgatagtggctcaagtatatctctagaaatgtaaattgcacaaatgtaaatgtgacaatcaaatgagacaatgagacaagagattttttaccgaggttcggaaactcgccggtttcctactccccgttgaggcgagcccaactccaccgctcaaccacgaagccccgcacgcccccttcgtcaaggggtgggcaaggcgggagccggcccacggagaggactacccaagcctcgatcactcggggagttcttccttcactccgaaaaccgtgctactctgcaacggctagaaaactagccgttgtagccctgtcagagggccccatcggcctggccggtcagaccggcatggggtgtccggtcagaccggcctcggctcggtcagaccgccatcggctcggtctgaccgaatacggctccgtcggctctgtatcggccatcccgagcagcaccatctcggcctccagggggccggtctgaccgcgcaaatgccgccggttagaccggccttatgctccggtcagaccgccttcttgcggccggtcagaccggccagggcacgccggtcagaccgccactatgtggccggtctgaccgcccctggtcaggtgtatttgaaaaatggaaggtaatcatcg

SEQ ID NO: 85696 - DNA, 641 bp, Oryza sativa
  Clone ID: PAT_MRT4530_84809C.1
gcaagctcgagctaaccagctacaagctacaagaagcagcctagcaaattaagctcgatcgatagcaatggcggcgaaggcggcgcttgttctggcggtgagcctcctcgccgtggccgtggcggcgagcgcctgcggcaccgactgcccgccggcaccgaggccgaggccgagcaccgggtcgtgcccgcgcgacgcgttgaagctgcgggtgtgcgccaacgtgctggggctcgtcaaggccaaggtcggcgcggtggcgccgtacgagccctgctgctcgctgctcgacggcctcgtcgacctcgacgccgccgtctgcctctgcaccgccgtcaaggccaacgtgctcggcatcaagctcgacctccccgtcgacctcagcctcatcctcaacaactgcggcaagatctgcccatccgacttcaagtgcgtgcactagagctggttgttgcacttgtttctccatgaccatggctgcgagcttgagagtactactgtatcttgatgttgtttggagtactttagttcttgatctatctcttggttccatgtgttgtttgattcccatgaatgattcgccaataaaatgaagctctacttttaaaaaaaaaaaaaaaaaaaaaaaaaaaaaaaaaaaa

SEQ ID NO: 85697 - DNA, 402 bp, Oryza sativa
  Clone ID: PAT_MRT4530_8480C.1
cgaacagtgggtggccttaacgcgcacgtgcttgaggctaatgaacagcaacctgagcgcgatcttcaatcacaccaagagggagctcgagctctgcaggaaataccaatgcgctgatgaactactccacgaaggtgccaatgccggtgaagacagactacttattgcacttgtacctggtcaccaacaccgtcacatcagcgagcgggacgaaagtgtaagacacgatggaccaccgagttctattgcggatgaacgtcacgaataacaagtgaaaaacagcgaagctttagcatcctgtcatctcctccgtgagaggcgctgcaagctgcaaaaacaacaattactacgtttaggtcatttactcaatgaacaatgactacatgttcaacagcttttata

SEQ ID NO: 85698 - DNA, 563 bp, Oryza sativa
  Clone ID: PAT_MRT4530_84810C.1
taaattgcacaaatgtaaatgcgacaatcaaatgagagaaggagacaagagatttttcaccgaggttcggaaactcaccggtttactactccccgttgaggcgagcccaactccaccgctcaaccacgaagccaccgcacgcccccttcgtcaaggggtgggcaaggcgaaagctggcccacggagaggactacccaagcctcgatcaccagggtagttcttccttcactccgaagaccgtgctactctgcaacggctagaaaactagccgttgaaatgctgtcagagggccccatcggcctggccggtcagaccggcgtagagtgggcggtcagaccggcctcggctcggtcagaccgccatcggctcggtctgaccgactacggctccgccggctctgtatcggccatcccgcgcagcatcatctcggcctctagggggccgggttcactcctcctgtggtgcctgtcttggccgctctgtgcttcgtcggggtcgtcgccctcggtttttttcgccggcgcgtcggtttccgggcgggcgtgcgggggggcgggcggggg

SEQ ID NO: 85699 - DNA, 635 bp, Oryza sativa
  Clone ID: PAT_MRT4530_84811C.1
aaatgtaaattgcacaaatgtaaatgcgacaatcaaatgagacaaggagacaagagatttttcaccaaggttcggaaattcgccggtttcctactccccgttgaggcgagcccaactccaccgctcaaccacgaagccaccgcacgcccccttcgtcaaggggtgggcaaggcgggagccggcccacggagaggactacccaagcctcgatcactagggtagttcttccttcactccgaagaccgtgctactctgcaacggctagaaaactagccattgtagccctgtctgagggccccatcggcctgaccggtcagaccggcctcggctcggtcagaccgccatcggctcggtctgaccgaatacagctccgtcggctctgtatcggccatcccgagcagcaccatacccggcctccagggggccggtctgaccgcgcatgtgccgccggtcagaccggccatggccagtcagaccgccgttgtgaggccggtcagaccggccagggcacgccggtcagaccgccactatgtggccggtctgaccgcccctggtcaggtgtaaagcctggggtgcctaatgagtgagctaactcacattaattgcgttgcgctcactgcccgctttccagtcgg

SEQ ID NO: 85700 - DNA, 560 bp, Oryza sativa
  Clone ID: PAT_MRT4530_84812C.1
tgatctcaagtatgtctctagaaatgtaaattgcacaaatataaatgtgacaatcaaatgagacaaggagacaagagatttttcaccgaggtttggaaactcgccagtttcctactccctgttgaggcgagcccaactccaccgctcaaccacgaagccaccgcacgcccccttcgtcaaggggtgggtaaggcgggagccggcccacggagaggactacccaagcctcaatcactagggtagttcttccttcactccgaagaccgtgctactctgcaacggctagaaaactagccattgtagtgctgtcagagggccccatcggactggccggtcagaccggcgttgagtgggcggtcagaccggcctcggctcggttagaccgccatcggttcggtctggccaaatacggctccgtcggctctgtatcggccatcccgagcagcaccatcgcggcctccaaggggccgcggcccggcagaggcagcagcggcagcagccgcaccctcctctccgcaagatccggccagagaggaggcggcagacctcggggacggtag

SEQ ID NO: 85701 - DNA, 671 bp, Oryza sativa
  Clone ID: PAT_MRT4530_84813C.1
ggaagaatagggtgagaaaatgtaaattgcacaaatgtaaatgcgacaatcaaatgagacaatgagacaagagatttttcaccgaggttcggaaactcgccggtttcctactccccgttgaggcgagcccaactccaccgctcaaccacgaagccaccgcacgcccccttcgtcaaggggtgggcaaggcgggagccggcccacggagaggactacccaagcctcgatcactcggggtagttcttccttcactccgaagaccgtgctactctgcaacggctagaaaactagccgttgtagccctgtcagagggccccatcggcctggccggtcagaccgacatagggtggccggtcagaccggcctcggctcagtcagaccggcctcggctcggtcagaccgccatcggctcggtctgaccgactacggctccgtcggctctgtatcggccatcccgagcagcatcatctcggcctccaggaggccggtctgaccgggaaagtgccgccggtcagaccgccactatgtagccggtctgaccggccagggcacgccggtcagaccgccactatgtggccggtctgaccgcccctgtttagaaaatcacacgcagaatcgagaaaatagggcgagaggagaaggaagtactaatctagaagcctccggccaca

SEQ ID NO: 85702 - DNA, 375 bp, Oryza sativa
  Clone ID: PAT_MRT4530_84814C.1
atggctttccccggcgaaagcggcggctcaacaacgaggggaggcgtcaaccgtgacaaggaggggaagggaggcggcggctcggctcctccctctcccagcaacggcggcatcttagcgacgaggaggttgagacgacgacgccgtcggctcgcctcggacgcgcggatccgccgtctgccggccgccggtgcacagatccgccgccgaccggccgccggcgcacagatccgccgccgaccggccgccggcgcacagatccgccgccggccggtatcggggaggggagggaaggggatgaggcagctcggcttctccctctgccggcaactacggcggctcagcgatgagaagggaggcggcgctcagcgatga

SEQ ID NO: 85703 - DNA, 1113 bp, Oryza sativa
  Clone ID: PAT_MRT4530_84815C.1
atggagacatcaattttacgcagcgaagtacgccgtgccaaagcttttacgttgatagtttttgataaggaaaaagtatatttggactccctcaactaccgcctggagtatgattcatatcctccaaccataaaaccagatatatcggctcctccaactatcaaaaccagtacaaacaatgtccctcgatggttttcgagcggtggcggtggggacaaggcggaggggagcagtggcggtggggagcggcggcgggcaggaggaggaggagaaggcggaacggatgtcggccaaatcaccgatgctgctccatcggaaggacaagaagaggcggccgatggtgttctgcttcaccgcgtgttaacgaccaaatttggcctcgtgtttttcaccaacactgtgtgctgcatcctcttctggctgctcgtcatcgccatcagcgtggccgtgctcatcatctttctcatctaccacccgcagtcgcccaagatgcgggtgaccactgccaccctgaacaccgggtatgtcgatgagcttgacctcgtcggtggcgcccgggcactcaacgccgacctcaacgcgccgacctcaccgtcctcgctgccatctacaacccgaacaccaagctccacgtccccaccgccaccgctcccctctgcctcgtccccaccgctacagccgccgctcctttttgccgataaagagaggtcatgggccacggcccatttatgcaggctatctcgtgtgggccttattgtggtccggcttcgtttcattctgcgccaaggagcatcctcggcaattgtttgttttgaaaaatatgaattgcgtctactcctctatccggaacatcgtcgacgtagatgtaacctatttcgatataacgggattgaaactcctatcgatgttgatagtaaatgggaatgggaagaatatatggacggttacgatgtcattgtcctggctgttcatgtctgcgtttacattctctttatgattgatctttgcatgctagaatggcaaaactttaacatgcatctaaacaccaactattacttttgcaatgccaaaacttttgccacaaaaacttttgccatttaccatttgctattc

SEQ ID NO: 85704 - DNA, 609 bp, Oryza sativa
  Clone ID: PAT_MRT4530_84816C.1
aaattaaactaactctgtgttgtacggcaacatctctagaaatgtaaattgcacgaatgtaaatgtgacaatcaaatgagataaggagacaagagattttttaccgaggttcggaaactcgccggtttcctactccccgttgaggtgagcccaactccaccgctcaaccacgaagccaccgcacgcccccttcgtcaaggggtgggcaaggcgggagccggcccacggagaggactacccaagcctcgatcactcggggtagttcttccttcactccgaagaccgtgctactctgcaacggctagaaaactagccgttgtagccctgtcagagggcctcatcggcctggctggtcagaccgacatggggtggccggtcagaccggcctcggctcggtcagaccgccatcggctcggtctgaccgaatacggcaccgtcggctctgtatcggccatcccgagcaataccatccctgcctccagggggccggtctgaccgcgcatggccttcttgcggccggtcagaccggccagggcatttgcatgtaaatcacgacacgaatattttgagcctagttagtccatgattagccataaatgctacagtaac

SEQ ID NO: 85705 - DNA, 534 bp, Oryza sativa
  Clone ID: PAT_MRT4530_84817C.1
atggctgatagcttctacggcgcgagtgaggaggatgacgacgtccaccagtggttgccatcggagatcctcagggacattggagccgtcatcgacccttgtgagggtcgccgcgccattgtcgaggacctcgccgcttgtcttgccgatgtcctctttggcagcgctgtgcaaagaacgacgacacaacaccatgctactgttggtcctctaccagctatggtggacaacaaataccaatgctaccatgccccaccatcaatgggggtgaggccgttcatgagcaacggtggcatgatgctagatcgggtgcctattgcaccgccaaggcttgctccggagatgaggacgccactgctgctggtagccaccagtgccccagccttgccacctcctcccacaaagcagcgcgatgccggtggcaccgggtttttcttgccacacaccgaggcgtataacaaacgcacaagcaaggcgcctagggcgacaaaaacgcctcgtcatgtcaagcgtcagcagtggttgtcaaagtag

SEQ ID NO: 85706 - DNA, 1748 bp, Oryza sativa
  Clone ID: PAT_MRT4530_84818C.1
actccagtaccaacccctactttgactaaataatagtaatagtacaacatgatcatacacccaattctcttacccatggattacttcagataagaggttgctaaaatgctaaatagaacagtaagtagactaaatggttcatccttcatttctggagtaatccaagtctattacacatgtaattaagcagctactactacaacacttgcttccaccaatcaactactccagctaaggaagaggcgatccgtgcattgcgtatcctgtcacggtcggccaccgcgcggcacgaggtagacccgggctcgcaccacggcgccattgcccagccggaagccgggcgccacggcgaacccgacgaccatgccggcggcgccgccgccgcgcccgccggcgacgctctccatgtaatccgggtggaactcggcgccgcggccggcctcgaagtggctgggcggcgtctcgagcgcgaacgccagcaggtgcagcatccacaccgccttcgcggcgcgcaggaactccccgtagaatggcgtccgcgggtgcgcgccgccctccaccgccctccggtgctcgccgtcgccgaggacggcctgctccacgcgcggcgggaggagcgccgcgaacttgctcgcggcgtagcggccgaaggggcaggtcgggaggaggcccaggagctcggcgggctccatgccccgcatgtcgcggaactgcgtgtaccgctcccgccggaacgcggcggggtcgagcagcgaggagagggagccgtcgaggtagaaggattcgtgctcgaagccgacgaggaggacgcgggtgacgtgcgcctcgagcgcgtgcttggccagctgcggcgaggacaccgggatcttggtgagggaccgggtcgccgccgcgaggtcaagccccgccgcgcgcatcagctggaggaggtgccccgcgaacgcccggatcgcggcgcgggcctgctcggcgcaggcggcgaacagctccgcggtcggggcgccgccgccgccgccggaggcattgtgcttggaggggtggtggcgtgagttgcggcggttgctcgcgacggcgagcttctccttgaggccatcgacctcggcctgcttggcttggagctggcggcggaggtcgtcgagcgcggcctcgtacggcgcgacggcctcgcggagcggcggcgcggtggggatggggccggggatgtgcccccccgtggcgacggagcggcggaagcggtcgcggagccgcgagaggtggcggagcttggcgacgacggcggcgtcggcgctccgcatcttgtcggggtcccacgggcagtgtgccccctggaggtcagagtacgcgcggcgcacgccggagaccgcgtcgaacacctccgccatgagcgtctccgcctccctcgcccgctcagccccactcgccgccaccgccgccgccgccttcaccttcctcttctcctcccagatcttcagattctcctcatcctcctcctccccaccctcaccaccatcctccccctcatcatcagcctccgcctccgcctccgcctcctcggaagaagagggagtgcgccgccgctcgccaccggcccccgagatggcgtcagcgaaggggtcgtcgtcgtcgtcgtcgtcgaagtcggtgtcgccggagtcgctgaccgcgtagctgccggggaggcggttggagaggcaggaggtggcgacgcggtggatcagatcgccaatggtgacagccttgttcgccat

SEQ ID NO: 85707 - DNA, 630 bp, Oryza sativa
  Clone ID: PAT_MRT4530_84819C.1
atggggcaaacttctagaacagaagctagggttaacgcaaattcgagaaaaaggggacggatgcggcggaagcaggaggacgagggatggatgggggatcggcggtggcggaggatgcgctcaccagggtggaagcggcaggacgaacgacggcggcgtggtcgctcgcgggatggatggggatcggcgggggcggtgcgcaaggccaaagtgacgaggagtcgaggaggaggcgccgccgtcactgcaaggccaccgccgcacagggtgctcggggaaacaaaagaagaaacagcatcggtgcttcgatgctgccggtgttgtgcttgccttgggcagcgacagccctggcagcctgggcggctagcccctgcctctaagaatggtagcggaggtgctgttcctgtgcgcccatcagcggggattcgatggagccatgcttctcgtagaggaggcgatgtgccgccgggcgcggcggcgacacaactgcacgcctacacccggcgtgtgaggacgaccttactaggacgcgtgcgagatgcatcgggctgggaggcggcgaggcccagcggagggcggctctgcacagcgatgacggaagccgggggcacgcgctgcaagggcggatag

SEQ ID NO: 85708 - DNA, 1017 bp, Oryza sativa
  Clone ID: PAT_MRT4530_8481C.1
ctgagcccgttggcgcttgttcggatcgctatcttctactgggcgtgccggacttccgggtttgagcctaacgccgagctcttcggcgccatatttttcgccaccgtgaactcgaagacggtgattaccccggctagaacgaagaagacagtgttcgggagcatgaactttaacgttcgtcccgagtggtccgatctctggccggtgaacgctgccatgtcaaagtgggaccaccattggatggctaggtggttctatcacaccatccccttcgaggctggcacttactcggcgaaagccctccgttgccggcatagggcgatcgcgcctaactggaaacccaagatcgccgtggacggcgctatggaggcgcggttcgttctactgcggaagtcatggcaagttacagttgatcaaggcgaagaggttgacggtttgccgaacctgattcttcctgaagggacagacagagaggaggaagaggaggaggccgtggctgataaggccgcgaacgaggcgatcgaagaccgcgtcgacaccctcggctacactcctaccccaagtcctggtcacaacgagaccggggtggagtttaacagctcccaccttcgacggaaggatttggaaggggccaaggccctagttgcgttctcctcgggcaaggcggcgaagggaggtccggtgcagaagatctctaaaaagaaaggactcgtcgacatcgcccgcgttttcagcgacgacgaatcttctgacgggactccaacttcgcccgctggccgcagtttagacctttcgactgctcccctcgctccgctcggcgttgctggggcaggcggtaatgccgccggggcttcagcctccaccgaacggattgtgtcggctgtggcgagggttttcgggagccctctgcgtgagccagctatttcgccgctagtcaaggcgatggggaagtgtgcggccaccgaagcatcttccaccggagtattcccttgcggcgccccacttcgcccctggtga

SEQ ID NO: 85709 - DNA, 994 bp, Oryza sativa
  Clone ID: PAT_MRT4530_84820C.1
attgtcctcttgatcttgtcgatcgatggagatcgcggcggcggcgagccgtgccgtggtggacacctcccggccgttccagtcggtcagggaggccgtcgaggtgttcggcgaaaggtgcctcagctccaccagccgggcgagcagcgagtccgccggcggcggcggcgggaggccgtcgccgccggcggtgctgggctgcctgaggaagctggaggcggagctggccgaggcgaagggcgagctggagcggctgcggcagaggcagtcgcacatggagacggccgtgtccagcgtcgccgcgcagctcagcaccggcctcgccatcctctcggccggcgccgcccgcggcaagggcaaggagctcgccgtcgtcgacatcgacgtcgacctcggcggcggcggcggcagggtccgcagcgaccggtgggacgagagccgcgccgaggagtggatggcggcgagcctggagtacctgcccagcctgtcggaggcgctggccatcaagatggtcgacgacgatcgccacctcggagagaggaggcaggggaatgcgaggaagaagaacaccaagaacgccatgaacagcaagaagaagcagcagcagaagaagaatggcgtctcatttgttggaagaatcttctcatcaaggaaagataaatccaggaattctgtagaaatttttcgaaacggaaacacggattaagacttctttgggaaagcaggaattttgcattaattagttcaaatgctatgaaatttctctagaagtttgtatgttacaaatgagccctaaatgtccctgttggaatgcaggatttctgtagaaatttttcgaaacggaaacacggattaaacagtttatactgtgttcagtttcccaacaaaatttcttcggaaatcccgcgttccaatcggaattgtgagttttgactctttcatctaattggagtgagctttgtgactcaaaaaaaaaaaaaaaaaaaaaaaaaaa

SEQ ID NO: 85710 - DNA, 300 bp, Oryza sativa
  unsure (1)..(300): unsure at all n locations
  Clone ID: PAT_MRT4530_84821C.1
gcacgagggttattctgtcaagtctttttttttgcagcaaacaaaaataacttctgtttttgtcaaacagtattcgtagcactctcattttcaagttgggcaatacattcactgttttgtgtgtaagcatgcatttgctgtttgcttctcaataatgatgttggttgcattttgctaaaccaagnagaaaataatcaaataatcttctcaaattatttaaataacacttttatcttgtattgacatgtattggtttgggtggttcggacagtcttttctttgttatccatttctaaacat

SEQ ID NO: 85711 - DNA, 243 bp, Oryza sativa
  Clone ID: PAT_MRT4530_84822C.1
atggcgctgaagtggccaaggggcctcggggtaccacgtcacacccctcgggcttttgaagcatactaccccgaggccctcgcccggccaccatgtggtgaggagagcgggcgcgcggaaggcgcggttcagcgccttcaatgcgcggcgccccaaccatccctcaccgcatttaatgcggtgtgggtggacgtgcggcgcagcgcgactgacccctgtcagtcgggcatgaccggtctatga

SEQ ID NO: 85712 - DNA, 369 bp, Oryza sativa
  Clone ID: PAT_MRT4530_84823C.1
atggcacgacaacggacagtgacagtgacggcgaaggggcggacgaggtgcgtctcctcctcacgaatccagcggtggcgatgcgagcggaggcggtggctacagcggcgccgcagcacagctagaccggcggcggcggcggcgctagggctgaggcggcagtcgggacttgagggaaagcggattcgactgagaggcggcggtggctcggactcggccaggcggccggaggttgaatacgaccccgacgtgtggggcccacatatcggtgggagggagattgagattgagagagatagagaggagtggcacggctgggccacgcagtgcgcgcgcgggagggaggagttgggcagagattctaaataa

SEQ ID NO: 85713 - DNA, 789 bp, Oryza sativa
  Clone ID: PAT_MRT4530_84824C.1
atggctcatcacagagtcacagatgacatgtcatctgtgacaggtgttaaatatatgttgaatgattcagacaagcatagacaaaataataacattgggtactacctgaaggaggcagtgtcggagggagggacagcattcgacaaggcgtacggcacgtccttgttccagtacctgggccaggacggcaacgagccctccaacacgctcttcaaccaggccatggccagccactccgtcgtcatcaccaacaagctgctccaattcttccgcggcttcgacgccggcgccggcgtggatgtgctcgtcgacgtcggcggcggcgtcggcgccacgctgcggatgatcaccgctcgccacccccacctgcgtggcgtcaactacgaccttccccatgtcatcgcgcaggcgccgccagttgaaggtgtggagcatatcggaggcagcatgtttgaccatgttcccagtggaagcgcaatcttgctcaagtggattctgcacttgtggggggacgaggagtgcgtgaagatcctgaagaactgctacaaggcgctgccggcgaaggggaaggtgatcttggtggagtatgtgctcccggcgagcccggaggcgacgctggcggcgcaggaagcgttccggctcgacgtcatgatgctgaaccgcctcgccggcggcaaggagaggacgcagcaggagttcaccgacctcgccgtcgacgccggcttctccggcgactgcaagcctacctacatcttcaccaacgtctgggctctcgagttcacaaagtaa

SEQ ID NO: 85714 - DNA, 4415 bp, Oryza sativa
  Clone ID: PAT_MRT4530_84825C.1
ggataaaagtcgtaatttcaatactaattaatagccaaggttattctaagtaactacggtttcttaattttacagacagaacgcaattttctttcagacatctttgattctaatactacagtgctaaatgtcaatgtgcaatatgccccctcataaatcaatagcacaaaccttatcccaactagtacacgagcatcattttgaaccattcagcagcacaagcattgcccgactattttgtttgtcatctctttaaatccaaatccacaagcaccaaatttcagattacaatgcttttatctttctctacaatttctcaaaatcaaccatagatcaatgggtatcatcatttgataagctcccatgatgcatgctgcatgcgatgctcaaaattgttgcgcccttttacaggttgcgtttagaaataccactattatgagttggagggagctcaagtataaatacaaatattgtattgagttccttcctgcctgcaagacaaatgtagagttgtagttgtagaccaggttaagttccgagatcaccaaccaaacgactcccagttcagatgctttgtcaatgaaataccatcaaagagctgctccagttagtcacgagctgctacgttatactgcctagcctgtcatgactagttcctgagatgctatggcatgctttaacatggttctggaagatgcagggtgaactgaggtcagcaccacactagttaccaatattactgtacaaaattatgagatgttcgcctggcaataaaattatggcactagaattatgaatattggctgaaaaaattcactatcagacattgccttgaaatatagacatctttgcatccgttcagtactgaacaccacgttcggcatggccatgttatccaaagtataaacgccgttgagatctaaatattcatttcatgatgcggcagagccagtagagactgggctatctctaagctgcaataggctgagttgcagttgcttttgaaccatctcagcaaccatcctcagtcttccctggctcatatctccaactgctgcggacccattcatagtctccactgctctggaaaccctctgtttacacctctcccaatcctcatgttgtaaccaacaagccctgccgctatggctcccatccattgcaaggaatgcaatgtgactatcttctccaaaggtgtaccttactctcacagaaacacaatatggcaaccaagcagctccaccagatatgctcatgtggggtacaagggcctgatcaagtacaaaagttagggcaaaatctactgaattgttggctctatcatgatgaatattgctctttgatgatgaagagcttgcagtgtaatcatctgaaaccaatctagggtgcttttccaaacagatctcaatccgtgccctgtgtgtagtagcattgtccgcatgagcttggggcaaacttttcttccatgcaattagttttataaattctcgaagaactgaaataggcaaagtaagcaaagtgataaaagatgcaaccctagaagcatcatagggttcagaggcaacacgtctgctgaaatagtcacagatctcgcttatctcaggaactgttagctcttcctggccattgttctgaggagtttgctgttgctgttgttgctgatggtgaaaccgtttcacattgagaacttgaagcagcagttgaactctatgaacactaacagcaaatacataaccacccacgaagaagcgcaatgccggttgctcatgatctaaatttagaagtgcgccttcattatctttcaaaactgaacccagtatttccttcaggagatcaggcaactgcgcaaacaaccatagaactccaaggtacttaaggatgcctcgcaaaaccttcttaagagcagcaagaggaacccagccaccaccatagccaccatcatcaccaagcccaataaaagctgtgttcaactctcctttcatatgagcaggaacgtttccaggagaaaggtgcgcaggagctccagcaattcctgaagcaaatcccgaaggcatcatggcattgcctgcacgactcaaactacttgctacctggttagcaacagttgaagttggcctagctaccccaggagcaccaccaaaacggttaggagcagaagctaattgttggtttccagaaacagtgttggcactggcattcaacggtggaccagtatgtctagcattcagcagatttggctccagagcatttagaccctgtgcaacatgttccattatgaaaggtcgaaattgtgggcaaggtaatgatccaccaactgaaggtccacctttaggaggtgttgctggctgaagccagacctgatccccagcaaagcagcgcatgtcaacagagaacttgttgcggtatataatacgtatccagtaaggcccacggagcacaacagaaacatcaaaaggtagcaaggagctaggaactagtccaggagcagtccgtcctgcaacagacagcatggaagaagtctgaagctggctgtttgaatgtgctactgcagcaccctgcgggacagacatattgtgcacagtacttgatgatagactgtttgctgatcccgctgttgtaagaatattgttttgctttggtagagcactgtaaccggcaggaacagttacaggcatctttgcaggacgaatagcgccgccaagggcaagtaaaggtcctgctgtgagcctgatgcaatccaagaatgatgctatctcatccccattcacaaaatcttccaaaaacttcgtgtgtggccatagttgatctggagaaactcgcattgtgcaaccactcttaccggtctcccattcaacgacaaagtaaaccataggcacagcaccataactgaaccacaagctcatcaaaccaacagcctcaattctaaaagttttcctcatctgttcagataacctgtccctgctagcttttcttctagagtgtaattttgtctctgcagctgtctgatgctcagctagcttgccatctaattttacaccgatcaatctccgcattccacaagaaaatgcacgagcatgtgagaggcgttgtaaatctgagacaagcctctgtatactatcagcctcaacagtgttgtaagtcaagaggaccccatcatcatcaaaagagatatgtgaatccacctcagatgtgtttgcaacacgaacaccagaaccccattctgtagtagtgctaccaccatggagtttccacagtgcaccatagtgtggatcattgatccgaacatcccaagacatacttccagctttaccaaggtgtaagcaaatatgtttccaggaagcatcgtgagcaaaaggtaagcgcaaccaaagattagaggatgatgtcggcatgcccacttcttctacatgtggaatattacgagaatccatctgagcagtcaactgagcatatttaatgcaaattgaacagtgctttatgacatgaagaagcacagaggaataaatattcgctgtaatgcaattatttacttcttcaagtaattttccataggtgagggacgtcctaggttgcatgttgggtgaattagccttcaaaggaaggccatccagcataaattctgacagctttcttctcttacctggcccatcaccaattatagattgctttgacgatgggatattttgcaagaactcagaaagagaacgctttttatatgcaccttcagagcgtgaactggagacattacccaaacctgcaggaactgaaccagagaaggcacttgtactttgtgcattctttgaattactgagcagataattgttcaaaccagtaccagaagtaacttttgcagcattaatgttagattgtagagacccataatcttgatcaggtgagccagctccaccactaaacccatgaagaccaacttgataactcgaatgactagagggtaaactattgggtgggagtcgttgactttctgttattggagaacctctgtcacatcgaaatacttcatcaacaatggaaaaaaatgaaggtcgtgcaggaagaggctcatcagctccactttgtctttgaggtctatcttccacattttgtagcgccagtaatttatctttatcaaaaaaattgccaatttgcacatcttcatctatttttaatttgttaatgtcaatcctgataaaccttatagcttctttagcatcagtagttgcatcagcattattattgtcaccttcattactttgtatctcaagcaaacaaaaaacaggcttaaagctcttatcaagttgcatcaacagataataggcatttgcgcattgaggaaatcccatgaccatgaattctgagccacatagtattgacttcgcaatcttcagagtaacttgcgactgagagtaaaccttcat

SEQ ID NO: 85715 - DNA, 114 bp, Oryza sativa
  Clone ID: PAT_MRT4530_84826C.1
atggccgagtggcttgtcctgctcctgctcagtgggagcagcacgctatccttcggtagtgttcgcatccttgggatcctccatgaatgcttcactatctacggctcagtgtag

SEQ ID NO: 85716 - DNA, 239 bp, Oryza sativa
  Clone ID: PAT_MRT4530_84827C.1
gtgacgcgtagtcgctggtggatcacaagatgaacaagggcacctacccataaatagagaccaggaagacaggtatatcatgtgtacatttcacttataagagcaattcatgtgaggtctacttagactgtgtcatatatgaaagacataagtgagctgcctacttatctgaccgtatgtgaaataaagggaccgtcagaattaaaggccttgttgatgagagatctaacgtatgcgac

SEQ ID NO: 85717 - DNA, 371 bp, Oryza sativa
  Clone ID: PAT_MRT4530_84828C.1
tcgatggttcaacgtgctcgactaaggcgaggtggtgcgtggcacggatgtttgcgagacggcgttcacggcaagcactagatcagcgaggatggcatgttcagcaccctatgctgcaatatgcgtgccacgcccggtggccggtggcggtgatcgccaatcgtcatggcgaggatggcgagcatgcggacatgagcagcgagatgacaatcgaagacgcgctctggagtctagactcgctcgacgacgtcggctggcgcgcgcgtacacgtaccggaatcgcgcaaaggaacatcgatcatcgtaatggcggattccatatccccacagcgcgttcaacgtgctcgacctcagcgtgtctgacttggggc

SEQ ID NO: 85718 - DNA, 1209 bp, Oryza sativa
  Clone ID: PAT_MRT4530_84829C.1
atgccgcctgattggcatggatacgcggcggccaacgctggggtggcctcgatggctgatttaaacaacgacaacgtcttccctgccccgcatcttctcactcatccagcaaagcatcatcttgtttctaagactattcactctgttttcaacatcgaggtgaatgtgaggcatcaagaggaagataacaagtctgctttccgtcacttctgtagaatcttaaaaaggctccccattaataagaatctggatagagccgaaatagaggaaactactattccgactgagctctgcactgggtttgttattgagcagaggggaaatatactttatcttctaaccacagcccatgctttggatgattactatgatgcaaagaaccatgaccttaccccaaaagatcttaataaatcatttattttcaaagtcttgtgcatccatcaggagaggcaccttctttctctccaaggagtggatgataagagtgagcatctgaacagatacttctgcgatgcaaaagtagttgcggttaacactcaagttgatctgatgcttcttaagttgaaccgtgaggatatctactactcatatcaagatgcggataattttatcatttgtcccgaggaccatacacgtatcaagctaggaaaatcaccaccagttgagtctgagaatgtctttttacaagggtggccagcattgcgatcacaaacttcagtttgggggcacattagtcatactaacagaagatacgacacacttactagcttgaatgtgaaaggatataagatgaatctgattgaagtgcctgagtttcaatgtgcagccggaacatcgggaagtgcaattctgaatggggcagcacgttgtgttgcggtttatcacggtatacaaaagaattgtaaagccggatacgcaatcagttatcaagatgtgaaaacttttgtagatactgcacttgcaaatctgccaggtgatggtgatggtgatggtgatggtgatggtgatggtgatggtgatgatgatgacgacgaggagaatgacgataacgacagcgacagtgactatgatgaaagtgatgaggaagaggaagagagaaagaggaagaggggcaagggcattggcagcggcaggggtaggggaaggggcagggcgagtgggagtgaaaaggggaggggcagtgggaaggggaaggcgaagatgagatga

SEQ ID NO: 85719 - DNA, 781 bp, Oryza sativa
  Clone ID: PAT_MRT4530_8482C.1
atgaaccacggcgaccggcattcatggccgaaagcggcggtagcggttgaactcaccggagcgcgagggggggaggagagcctcggacgtggccggtaggggcgagatttcgccggccaacgtgggtagtgggggaggagagagaggcgggattcgaaaatcgaatcccggccatctcgggcgcgggcgcgggcgggagagagaggggagtgggcgcgggagatgcggcgcacgcgcggacgtggctgacgtggcccggagaaggcggaggcgtgggcgcggcggcggttgcgggcgcggcggcgccggctggaggaaggggacgggtccgacaggtggggcccacctgtcggcgtcccggggagagagggaggggcggcttggctgggcctcggcctgcggccggcccagcagggaggagggagagaaaaggagagaatgggccagcggcccattcgaaaaagggagggaaaaagaaaaacaaaaaggagaaaaggatttcctggaattaaaatattgcttgctcaattttaattggttaaaattatttctagggctctgccatggcctgaggggctaggcccaggcccaccatgtgtgtggcccttacaactggctcccagcacaaggaagatcataagcattagtgctaatctctttgccatttttgatcttagagtggttgtgctgagtgatataactcgacgcatcaagatcaatggaagacatagacgttgtactccacgatggcgtcaagtccatttgagtcaagaaagtaggt

SEQ ID NO: 85720 - DNA, 402 bp, Oryza sativa
  Clone ID: PAT_MRT4530_84830C.1
ccaagcctagtcccgatccatcgccagctatactctcatagtcttaagcaacacatacacatgaataacaaagaaactccatatccgaatacaagttaacaccaacaatatgactcacatcagcatacaatagtatcacatacgaaaaccgactcccttctggaatcacccggtctgatcgggtgcctccgtggcccgggtctgacaggcacccaagtgctgaccgcatgtttaccatccgaaaatactatccaccgtattttcaacaacacttaccggtgtgacaatggttcatcaccaaaattaatcatcatatgattctacaacagtcagatacagtcagatataggcagtgttcggagagatgccccatcacctagaaattgcaacatgtcccaacat

SEQ ID NO: 85721 - DNA, 325 bp, Oryza sativa
  Clone ID: PAT_MRT4530_84831C.1
gccgccgccacggccccgcaacgccacgccgccgccgccgccacgccgccgcgccaaccaccgccccgatgccgccacaccaccgttaacgaacgagaacgagaacgatcgaacgaacgagagcgagaacgaacacgtcaacgtacgttgccgcgagaacgtgaacgagaacgagaacgatcgaacgaacgagagcgagaacgagaatgatcgatcgaagacaagcgagaacgagggaacgaacgtgaatgagaacaagcgaacgaacgtgaatgagaacgagcgaacgaacgtgaacgagcgaacgaacgaggacgaacgttaa

SEQ ID NO: 85722 - DNA, 453 bp, Oryza sativa
  Clone ID: PAT_MRT4530_84832C.1
gatctctccgatctcgatctctctccgtcgccttcgacgccgccgccttcgacgccgcgcaacgccgccgccgcatgccaacgccacgccgccgccgccgtcgccacgccgccgccgccttcgccgccgcgcgcgcaatgccgccgccgccacgccacgccgccgccgccacgccacgccacgccacgccaccgccgccacgccacgccgccgccgccacggccccacaacgccacgccgccgccgccgtcgccacgccgccgcgccaaccgccgccccgatgccgccacaccgccgttaacgaacgagaacgagaacgatcgaacgaacgagagcgagaacgaacacgtcaacgtacgttgccgcgacaacgtgaacgagaacgagaacgatcgaacgaacgtgaacgagctagggaacgtgaacgagcgaacgaacgaggacgaacgttaa

SEQ ID NO: 85723 - DNA, 523 bp, Oryza sativa
  Clone ID: PAT_MRT4530_84833C.1
agtgcgaagccggtccccgccgtatccgctttctgccctggccggggcatttaggggcaagagcccgccacccacgaagcctcctttcttctggccgccgccttcgccgccgcgcgcgcaatgccgccgccgccacgccacgccgccgccgccacgccacgccacgccgccgccgccacggccccgcaacgccacgccgccgccgccgtcgccgccgccgccacgccgccgcgccaaccgccgccccgatgccgccacaccaccgttaacgaacgagaatgagaacgatcgaacgaacgagagcgagaacgaacacgtcaacgtacgttgccgcgagaacgtgaacgagaacgagaacgatcgaacgaacgagagcgagaacgagaacgatcgatcgaagacaagcgagaacgagggaacgaacgtgaatgagaacaagcgaacgaacgtgaatgagaacgagcgaacgaacgtgaacgagctagggaacatgaacgagcgaacgaacgaggacgaacgttaa

SEQ ID NO: 85724 - DNA, 834 bp, Oryza sativa
  Clone ID: PAT_MRT4530_84834C.1
gccgcggccgccgccaccgtcgaatgccgcagctcagccatggcctccgccgccgccgctgccgccgccggtgggggcagcgccggcagtgggagtggtacttcagcgggcgggctgccggcgtacgtgttcgacgcgctggtgcagtacgcggcggcggcgggggcgaacgcgacggcgagcatgccggaggaggacgtgcgggcgatcgcgtcggtgctccggcggcgcgcgccgtgcaggctgctggtgttcggcctcggcgccgagacgccgctgtggcgcgcgctgaaccacggcgggcggacggtgttcctggacgagaacccgttctacgtggcgcacgtggagggcgcgctcccgggcctggaggcgtacgacgtctcgtacgccaccgccgtccgcgagttccccgacctcctcgacgccgcccgcgccgcccagtccgccgactgccgccccgtccagaacctcctcttctccgactgccgcctcgccatcaacgacctccccaaccagctctacgacgtctcctgggacgtcatcctcgtcgatggcccaagcgggttcacggaggggtcgccggggaggatgtcggcgatcttctcggcggcggtgatggcgaggaccaaggggtcggagacggaggtgctggtgcacgactaccagcgggaggtggagatcgcgtgcgcgagggagttcctgtgcccggagaaccgcgtggaggccaccgccacgccgtcgctcggccacttcctcgtccgcggcggcgccgccgccaaccgggacgccttctgcggcggcgccgccggcgccaccaccaagaaggccaac

SEQ ID NO: 85725 - DNA, 702 bp, Oryza sativa
  Clone ID: PAT_MRT4530_84835C.1
atgccgattattattcaaggccccaagcaacctgatctcccttcatctcgatctctccgatctcgatctctctccgtcgcgccgcccgccacgagacgccgcgccacgacgacgacgcgccacgccgacgccgcgccaagccgccgccggcacgccacgccgccgtcttcgccgccgcgcgcgcaatgccgccaccggcacgccacgccgccgccttcgccggcgcgcgcgcaatgccgccgccggcacgccacgccgccgccttcgccgccgcgcaacgccgccgccgcatgccaacgccacgccgccgccgccgtcgccacgccgccgccgccttcgccgccgcgcacgcaatgccgccgccgccacgccacgccgccgctgccacggccccgcaacgccacgccgccgccgccgccgccgccacaccgccgcgtcaaccgccgcctcgatgccgccacaccgccgttaacgaacgagaacgagaacgatcgaacgaacgagagcgagaacgaacacgtcaacgtacgttgccgcgagaacgtgaacgagaacgagaacgatcgaacgaacgagagcgagaacgagaacgatcgaacgaagacaagcgagaacgagggaacgaacgtgaacgagaacgagcgaacgaacgtgaacgagctagggaacgtgaacgagcgaacgagcgaggacgaacgttaa

SEQ ID NO: 85726 - DNA, 552 bp, Oryza sativa
  Clone ID: PAT_MRT4530_84836C.1
atggcgtccgatctatcccaatcacttgatttaagtatatgtcaatatagggagtatatattgttaatatctacagccgatcgagtagatttagtttttccttatttattcatgattgccgatcgatgcatatatgacatcggctcaaaggatcaaatcaactggcacgctcatacacccgaaggcgagttttggacctgcactggagttaagcaaatctcccaggccgccgtgttcgatttccacatcaacacccatgcgcttctatcaagagaagtcttcgtctgccctaggtctacgtctattctcgatttagtaagccaggtcttaattggggccactgccagcgacagtcatgaatggatgatggcgtggttgttgatgatgaatgagttcttggatgtggtgctcgggatgcttaagggatgttatcgcttgggatgtgttctctgtgttgatgctttggggatgttgacgtgggtgttggtgattccccgcgttttgctgcgggaattactaagtaattctcaatttgttttacatttaagttag

SEQ ID NO: 85727 - DNA, 300 bp, Oryza sativa
  Clone ID: PAT_MRT4530_84837C.1
gatgccgccacaccgccgttaacgagcgagaacgagaacgatcgaacgaacgagagcgagaatgaacacgtcaacgtacgttgccgcgacaacgtgaacgagaacgagaacgatcgaccgaacgagagcgagaacgagaacgatcgaacgaagacaagcgagaacgagggaacgaacgtgaatgagaacaagcgaacgaacgtgaatgagaacgagcgaacgaacgtgaatgagaacgagcgaacgaacgtgaacgagctagggaacgtgaacgagcgaacgaacgaggacgaacgttaa

SEQ ID NO: 85728 - DNA, 204 bp, Oryza sativa
  Clone ID: PAT_MRT4530_84838C.1
gatactgagaaactggacccgaatcagccaaggaaggcttatgacaacaatcgacccaacgacggtcatcttgtctataaagaaggagaagttgcaacaaagcaagatggtcatacggaaaatgggaaagaacacatcaaggttgaaggtgcaaaggaatatgcaggaagtcaaatgatgacaacacgaagagaaaaatggcaa

SEQ ID NO: 85729 - DNA, 505 bp, Oryza sativa
  Clone ID: PAT_MRT4530_84839C.1
ccgccttcgacgccgcgcaacgccgccgccgcatgccaacgccacgccgccgccgccgtcgccacgccgccgccgccttcgccgcagcgcgcgcaatgccgccgccgtcacgccacgccgccgccgccacgccacgccacgccaccgccgccacgccacgccgccgccgccacggccccacaacgccacgccgccgccgccgtagccacgccgccgcgccaaccgccgccccgatgccgccacaccgccgttaacgaacgagaacgagaacgatcgaacgaacgagagcgagaacgaacacgtcaacgtacgttgccgcgacaacgtgaacgagaacgagaacgatcgaacgaacgagagcgagaacgagaacgatcgaacgaagacaagcgagaacgagagaacgaacgtgaatgagaacaagcgaacgaacgtgaatgagaacgagcgaacgaacgtgaacgagctagggaacgtgaacgagcgaacaaacgaggacgaacgt

SEQ ID NO: 85730 - DNA, 1773 bp, Oryza sativa
  Clone ID: PAT_MRT4530_8483C.1
atggcccctcgcaagccaaaccctgcttcggcgaaagggctggatcccggccgagtcgatgacgacagcaccgtctttttgggggtctctcttgtggacgacgtcgagctggcgaagctggtcagctctggggcgttggtcgaggggcaggctttcgccccagtgaaggccgtggtgccgaaacctatcaacaatcggacggtggtattcgccgtcttttttgaagcagggctacggtttccctgcaacgtgttgttgccggagatccttcgcctcttccagcctaacgccgagctcttcggcgccatatttttcgccaccgtgaactcgaagacggtgattaccccggctagaacgaagaagacagtgttcgggagcatgaactttaacgttcgtcccgagtggtccgatctctggccggtgaacgctgccatgtcaaagtgggaccaccattggatggctaggtggttctatcacaccatccccttcgaggctggcacttactcggcgaaagccctccgttgccggcatagggcgatcgcgcctaactggaaacccaagatcgccgtggacggcgctatggaggcgcggttcgttctactgcggaaggtttgctcccgccttagctgccgtgacttggtggaggaattctgtatgcttcgcatctttcccctctcccagtcatggcaagttacagttgatcaaggcgaagaggttgacggtttgccgaacctgattcttcctgaagggacagacagagaggaggaagaggaggaggccgtggctgataaggccgcgaacgaggcgatcgaagaccgcgtcgacaccctcggctacactcctaccccaagtcctggtcacaacgagaccggggtggagtttaacagctcccaccttcgacggaaggatttggaaggggccaaggccctagttgcgttctcctcgggcaaggcggcgaagggaggtccggtgcagaagatctctaaaaagaaaggactcgtcgacatcgcccgcgttttcagcgacgacgaatcttctgacgggactccaacttcgcccgctggccgcagtttagacctttcgactgctcccctcgctccgctcggcgttgctggggcaggcggtaatgccgccggggcttcagcctccaccgaacggattgtgtcggctgtggcgagggttttcgggagccctctgcgtgagccagctatttcgccgctagtcaaggcgatggggaagtgtgcggccaccgaagcatcttccaccggaggggtgagcaaccttgtcttgcccgccggcaccccgagcttattcaccgaacttaatgagttcgacgaggggtgttccgccattaaaagcctggcggttcggattcttgtggctcactgttcgacggagcgaaccgtacgggcccgttttgacggttttaagagccgtcttcgggccaaggacgacgaaataagccgcaagaacctggaggtggaggccctggccaataccctcaaggaagcgaaaactgaagtcaaacgccttcagtctaaggccagggccgaggttgatcacctcaaggccgaactggagaaggagaaggaccattcagcagtgctgattgactactacaaccttactgagccgaagatggaggttctttgcctgaaggctagtagggccgaagcgagcgccgcggaggagtcgcagcggttcacaggagatggcgaagaccaccgaatccgcgagaacggcttgccaaacgctccgcctcgcccttactga

SEQ ID NO: 85731 - DNA, 422 bp, Oryza sativa
  Clone ID: PAT_MRT4530_84840C.1
ctctatcctctgtcctttgcgtgggcgccgttgcgaccaacagaggggaaccgctcacacggggctcggacgcgaggacaaataggcgcgtacgcacctcttccaggcagacaacgcttggcggctcttcccggctagccgttggcgaaagatgccaagagctcatgctgcgggggggtcagccggacgacggggcgcactcctggtacgccgccggggttgccgtggagcgctagcatgatgccagccatccggtgacggctcaatacctagggtgtatctcatccggataccgcaggggggggacatggacgaggcgaccaccgcgttctgcgcggcctccaaccgagcgaccgcaggaggtgaccagatgatacgggttcaggatctgaagcatatgaacaaccaagacctgcaggctg

SEQ ID NO: 85732 - DNA, 531 bp, Oryza sativa
  Clone ID: PAT_MRT4530_84841C.1
atggggataggacgcagccgccggagttgcgcggtggttggcaccagtcatctccacggcagcagcggcaattggagaggcggggcgacggctagggggagtagaggaaggaagcggtaccaggggcaggcagcaccggccatctcggcggcggcggcggcggcggcagggagtcgagcatccagggacaattggccaagggaatcagagaggagagcaacctcggccttcctactttatctccccatctcttcaccggatgacaaagagggagaggcggggaggccggcgaggcgccctcctctctcccgccggccgccgccgtgccgctcctctcccccgtcgccacgccacacggcgttcatctctggtgccgagctcatgcgctccatggcggacaccgacctccgcacgctggatctctctgtgtgcagcagcctctccctctccaccggcacagcgctccctccgaacgcccttttctccgcccgcagacggctgtcagatgccatccaggagaagaagcaataa

SEQ ID NO: 85733 - DNA, 499 bp, Oryza sativa
  Clone ID: PAT_MRT4530_84842C.1
gttctttttttttttttttttcccttgttaaccatttgtaattttattttcttgtttttttctttttggaagttggaaaaaacttattgatatattggttaaagtcacaattcttacaaatcttgctcgaagcccttattaaaccggcttataatttcaaaccgatttctagcaaaagggtcattgcttttatccttatcacgagaagctcactgaaattccctttttaggggaagccgcgtttacccccggataaaactcgggaaaaatttttcctagagatggttgttgtttgggaggcaaaaaccgccggcggcggggtggccattacccgaaagggagcacctttttgacgatctcgtccttgagggagggcatctgggtgtaacgcgccttgaaggcctccttcttttgagccttgaggttggccagcgcctcccccagcttagtcctggagcgggggagccccttgttcaactttgccctcagctaccggggg

SEQ ID NO: 85734 - DNA, 147 bp, Oryza sativa
  Clone ID: PAT_MRT4530_84843C.1
atggaccacgtgttggcaagatatcgttgtaacaagctgacatggcgcactgggtcgcgtggcatgaggatgcggctggtggcgtcagtgacagaggatgtgggcgttggaggcggcagcgaaggatataggagttggcagtggtag

SEQ ID NO: 85735 - DNA, 252 bp, Oryza sativa
  Clone ID: PAT_MRT4530_84844C.1
atggggataggacgcagccgccggagttgcgcggtggttggcaccagtcatctccacggcagcagcggcaattggagaggcggggcgacggctagggggcaggcagcaccggccatctcggcggcggcggcggcggcggcagggagtcgagcatccagggacaattggccaagggaatcagagaggacggctgctggagggcgaccggagttggagtccggtagccggcgtgaggaagcgcggcggcgctag

SEQ ID NO: 85736 - DNA, 417 bp, Oryza sativa
  Clone ID: PAT_MRT4530_84845C.1
atgagctcaccggagacgacgacggatcagagcggcagcaacaagcagcagcggcggcggcggcgccaccacttcatcctggtgcacggcgtctgccacggcgcgtggtgctggtacagggtgaccaccgcgctctcctccgccggccaccgcgtcaccgcgctcgacatggccgcctgcggcgcgcgcccgggccgcgccgacgaggtgccgtccttcgagcggtacaccgcgccgctgctcgacgcggtagccgatcaggacggtgaggagaaggcggtcgtcgtcgcgcacagcttcggcgggcagagcctcgcgctggccatggagaggcacccggagaagatcgccgtcgccgtgttcgtcaccgccaccatgcccgccgccggcaagtccatgtcgttcgcatttaagcag

SEQ ID NO: 85737 - DNA, 838 bp, Oryza sativa
  unsure (1)..(838): unsure at all n locations
  Clone ID: PAT_MRT4530_84846C.1
cgatcgcaagaaccatcgccacgcgcgcgcgagagaaatctgtgtctgctcgatcggatcagagcacagcagtagccatggcctccgccgccgccgccgccgccgccgcgcaggaagggatcactcaccgcgccgtgagaggggatggcggcgatgctgcggcgacggcgggtggtggcgaggcggcgagccgggatccgaggaaggcggggcgcgccaagcgcgggctgcggtcgctcgccgccgccgtgtccgtgtcggttgcgctgatggccgcctcgttctacggctccgggtcggcgtcggcgtcggcgtcggcggcgagggtgacggtcgcgcgggcggggtcggtggcggcggaggcggtgatggcgctggcggcgtggatggtgtgggcggagggcgggctccaccgccgccccggcgcgacgctggcgccgttcgtggcgcagctggtcgccgcgctggcgtgggcgccgctcgcgctggggctcgccgcgcccgcggccgggctggcgtgctgcgcggcgatggccgccggcgccgcggcgtgcgcgcgcgggttcggcggcgtcaaccccgtcgccggcgacctcgccaagccgtgcgtcgcctgggccgtcctcctcgcagtcatcaactacaagatgatgaactgatcgatcaaaagcttgtgtcttttacgacgacatgtgtgtgcagtgtttgctatgtttgatctcctcctgtgaatgtaatggaacactgcctgcagtggcagccacagcttcctgaatgttttgctacattatataaatacaacttcagctgcttgtatgtaaaaaaaannaaaanaaaa

SEQ ID NO: 85738 - DNA, 1016 bp, Oryza sativa
  Clone ID: PAT_MRT4530_84847C.1
cccctcctcctcctcctcctcctcctccggcgccacttacatcgcctctgccaccgccaccaccactactctcccagccgccaccgccatcaccgctttgcgcattgtcgctaccgccatcacctccacctcctttgtttccaccaccgatgacatttctgctaccaccattagatccttttattttgcctctgccaccactgttgattcctcgatctccgttttgaccatttccacgacctatgccactgcccatacctctacctctacccctacccctcccctttccccctcttccccccgcatctccatctccatcttcaccatcgtcaccattatcaccgtcatctcctccgtttccacccccacctcctcctccgccaccgccgccacctccacctcctcctccaccaccgccaccgccacctccccctcctcgtccaccccccccaccaccaccaccacctcctcctcctcctcctccaccaccaccaccgccaccgccgccaccaccaccacctcccccgccaccaccaccgcctcctccacctccaccgctccataccccccatccccgcaagctcgtatggcgcttaacatcgtccacgtccccgcgcaccgcattctcccccttcttgagaaccacctcatcttcgcactcctcgacgccgccgttggagttgccacggcggaggtcgccgcttgcagctcctcctccgccagcgcgagccgcaggagcaacgcgccggcggcgaggaagagcaggccgagccacggagctctcctcctctggcccatattgcctcctgcatgcataatatgcatcagtgcgtcgtgttggtaggtcaattatattagtcatttgagttcgaatgaaattatgaactcctttgcaatgccaatgcatatatagtcagttagtaacacaaatacactagctagtagcaagtacatgagcaataattgcgagccggccgccatcgtgatgattgctctggccttttagctaagaaaca

SEQ ID NO: 85739 - DNA, 855 bp, Oryza sativa
  Clone ID: PAT_MRT4530_84848C.1
atggaccgcactgcgactgcaagctgggaggtcatgagccggcgaggtgagcagcagcagcagctgatgatgcaagctccggccagccataatggtggcagcggcggcggcgagccggcgaggtcgcggtgggcgccgaagccggagcagatcctgatactggagtccatcttcaacagcggcatggtgaacccggccaaggacgagacggcgcgcatccgccgcctcctcgagcgcttcggcgccgtccgcgacgccaacgtcttctactggttccagaaccgccgctcccgctcccgccgccgcgcccgccagctccagcaagcctgcggcgccgccctccatcagctcccctccgccgccgccgccgccggagccggaggaggaggagattactatcaccaccaccaccaaccttcgtcttctcctttcctcatgcacggcggtggcggcggcggcgtggtcacttcgacgaccgcggcgccagcggtggcggcgtccggccacttcttggcggacgaggtcgacggcggcggcgacgacgacctcttcgccatctcccggcagatgggcctcatggctcgccacggcggcggcgaccaccattacagcagctacgcggacagcgacgccacccagctcagctaccaaccaaccgggacgatccaagtgttcatcaatggcgtcgcatacgatgtgccgagcggcggagcgctggacatggccggcacgtttggccgcgacgccatgctggtgcactcctccggcgaggtccttccggtggacgagcacggcgtgctcatcaacagcttgcagatgggggagtgctactacctggtttcaaaatcgatctga

SEQ ID NO: 85740 - DNA, 903 bp, Oryza sativa
  Clone ID: PAT_MRT4530_84849C.1
atgggccagaggaggagagctccgtggctcggcctgctcttcctcgccgccggcgcgttgctcctgcggctcgcgctggcggaggaggagctgcaagcggcgacctccgccgtggcaactccaacggcggcgtcgaggagtgcgaagatgaggtggttctcaagaagggggagaatgcgcggtggaggtggaggaggcggtggtggtggcgggggaggtggtggtggtggcggcggtggcggtggtggtggtggaggaggaggaggaggaggtggtggtggtggtggggggggtggacgaggagggggaggtggcggtggcggtggtggaggaggaggtggaggtggcggcggtggcggaggaggaggtgggggtggaaacggaggagatgacggtgataatggtgacgatggtgaagatggagatggagatgcggggggaagagggggaaaggggaggggtaggggtagaggtagaggtatgggcagtggcataggtcgtggaaatggtcaaaacggagatcgaggaatcaacagtggtggcagaggcaaaataaaaggatctaatggtggtagcagaaatgtcatcggtggtggaaacaaaggaggtggaggtgatggcggtagcgacaatgcgcaaagcggtgatggcggtggcggctgggagagtagtggtggtggcggtggcagaggcgatgtaagtggcgccggaggaggaggaggaggaggaggaggggatgatgctaatggcgttcgtcaattcattgtacctggtccgagcatctgtagcagccaccgttgcaagcatggtggagatggcacaggcaatggccaacgtaagatcaccacaaccggtggcaaccacggcagcagcggcgtcacaaaaccaaaaggggagccatga

SEQ ID NO: 85741 - DNA, 810 bp, Oryza sativa
  Clone ID: PAT_MRT4530_8484C.1
atgctagtttatgtaactttcaagttatttactccctccgttgtttcacaatccgttgatttgattgagattaaaacaaaccagagagcctatcccgtacatctggagcagtacccgggccgcacgtccaggacgcccgtggcgttcgcggagagcggcggtgacatccccgcgtccgcactgcccactcaccaggttgtacggcctggccgctcagcccagcaccgcccggcttgctgcctctccatcctattcgtcccctcgtctcgccgcttccctgcccctgcgccgtgcagcccgacgcacccccttcatctatctcacacgcgtagtttgcttgatgagtggtttgctccatgtcagaagcttggtattgcagcaaaacatggctattttgtcagatggaacaaagcagctgaatgggaatcaagctatccaaaccatgattttgagtggaagcacatcgctgaaccggtcatgcaagtttacaccgaaacaactgatgggtcctccatagagccaaaggaaaagtgccccaatggaacatctgcctatcatccaaatgaaacgggcatcaccaccgagaggtcagctcttctggccttcagagcaggtttattagaccctgcaaacctcctctcgtcatgggagggtgacggctgctgccgatggaagggcgtcgggtgcggcaacagaaccggccgcatcgtcaagctcgctctccaaggctccgattgcggccaaaatattatcactgcaacacgttcagtgccctacaagtaccagagttcctatcttcgctgcgcaact

SEQ ID NO: 85742 - DNA, 244 bp, Oryza sativa
  Clone ID: PAT_MRT4530_84850C.1
gagacgctgatcacctcacctgccgaggaatattagtatcatatgataaggcgaacttttttgctcctttagtgtgatataccaataccatgttggatacaggggttatagaaaactttacagatgtccatcagcagaccgaaccctcccccccccctccccaaacttataatcctttcatttttgcaggccgagatcaccctttgcacaaaaggggacactaatttgaataaatccctcccta

SEQ ID NO: 85743 - DNA, 1454 bp, Oryza sativa
  Clone ID: PAT_MRT4530_84851C.1
tcgacccactcgtccgcgaggctttcttccgatccaagctactctctctctcctctcctcccctcccctcaccaagcgagccttctagagagagagagcttcccccggggggatcgagctcgccggaggactccacccgccgcgcctcggctgccgggagatccccccgcccgcccgccggtccgtccaacggaattgaaaggaggtagccttcttgtcagctagtatgtatttcgaaggctatggctaccgtggaagtaccttcgagcagacatatcgctgctaccctgcgtctttcattgacaagcctcagcttgaaactggtgacaaaattattatgccaccttctgctctggatcgtctagcatctctgcatattgaatatcctatgctatttgaagtccacaacgcggcagcagaacggacttcacactgtggtgtcctggagttcattgcagaagaaggcatgatctacatgccatattggatgatgcaaaatcttcttctaacagagggggatatggtgttcataaaaaatgccaatctccctaaaggaacatatgtgaagccttggagaaacattgcggaattactcttgtctaaccactggtgacagcattatggtagcatataataacaagaaatactacattgatatagtggaaacaaagccttccaatgctatcagtattattgagaccgactgtgaagtcgactttgctccaccacttgactataaagaacctgagcgacaaaaagctgctgttcctccaagtacagcgcctactgctgaagaggcagctgaagaagaaccaaagttcatcccctttactggacctgggaggcgtctggatgggaaggctcctaaagataaggatgtatcagcttcatcccctgcaaaacggcaagctaatgcaacaaacagcgtgcagccctcaacagcgtccacatcacagagcagttcatctcgtaaaaccacggaaaagcttgtttttggccctggtgggaaccgcacatctaaggaaacagaaaaggtgcctgaaaaggaaccgaaggaggatcccaagaaagatgaaccgaaattctcagcttttacaggaaggaaatactcattgaagggctgatagccagatagtgtattatcacttatcagtatttccagagacagacatgattatggagaaggagtttgattgtttagttacctccttgaagcctcttttggttggaccagtggcatctttgaatgtttaatttctgtcttaactatgaatcatcctcgtgccagcaacggagaggcaactgatgtataaaaaaaatctattcatgcctgtttatggatttgtactgagcttgtctgtacataaaaaaaattccccccaaaaacaaaaaaaaaaaactggtgtgtggcggtaaaagttgtggatgcatgctgcatagattcgcacgttttg

SEQ ID NO: 85744 - DNA, 252 bp, Oryza sativa
  Clone ID: PAT_MRT4530_84852C.1
atggcagcagcagcagtaaggcggagccgcgaaggggcgccagtgagcagttgcggcctgcagctaggcaacgcatccacgccaaagcggacgcgcggcagcgggctatcaggggcaacaggtgcgacgcggcacgacaagcaggaagcagcagggcagggcagcaacaacaaaagagtagtgcagcagacagcaggagcagaccgattttttttcgtcctccgccactgctgctacaccgacgctccccgc

SEQ ID NO: 85745 - DNA, 519 bp, Oryza sativa
  unsure (1)..(519): unsure at all n locations
  Clone ID: PAT_MRT4530_84853C.1
gccaccttctgctctggatcgtctagcatctctgcatattgaatatcctatgctatttgaagtccacaacgcggcagcagaacggacttccactgtggtgtcctggagttcattgcagaagaaggcatgatctacatgccatattggatgatgcaaaatcttcttctaacagagggggatatggtgttcataaaaaatgccaatctccctaaaggaacatatgtgaagctgnagcctcacacaacagacttcttagacatcttaaacccaaaagcaatcttggagaaaacattgcggaattactcttgtctaaccactggtgacagnattatggnagnatataataacaagaaatactacattgatatagnggaaacaaagncttnnaatgctatnagnattattgagaccgactgggaagncgactttgcttacnacttgactataaagaacctgagcgacaaaaagntgctggggctttaagnacagcgnctactgctgaagaggnagnngaagaag

SEQ ID NO: 85746 - DNA, 1237 bp, Oryza sativa
  Clone ID: PAT_MRT4530_84854C.1
gacacgcgaccgccctcgcgtttgcccgggcgattcaaaaaattcgaagccatccaccaacgaagaaaaaaaaaagggagaaaaaaaaatccacgcacactttgcgtgcgaggcgaggcggttcgattcgagaggagagagagagagagagagagagagagagatggacgccttctactcgacctcgtcggcgtacggagcggcggcgagcggctggggctacgactcgctgaagaacttccgccagatctcccccgccgtccagtcccacctcaagctcgtttacctgacactatgcgtcgccctggctgcgtcggcggtgggcgcatacctgcacgtcgccttgaacatcggcgggatgttgactatgctcgggtgcgtggggagcatcgcctggttgttctcggtgcctgtctttgaggagaggaagaggtttgggattctcttggccgctgccctgctggaaggggcttcagttgggcctctgatcaagcttgctgtagactttgactcaagcattctcgtaacagcatttgttggaactgccattgcatttgggtgcttcacttgcgctgccatcgttgccaagcgtagggagtacctctaccttggtggtttgctctcttctggcctctccatcctgctctggctgcagtttgccgcatccatctttggccactccaccggcagcttcatgtttgaggtttactttggcctgttgatcttcctggggtacatggtgtatgacacgcaggagatcatcgagagggctcaccacggtgacatggactacatcaagcacgcactcaccctcttcactgacttcgtggccgtccttgtccggatcctcgtcatcatgctcaagaacgcgtctgacaagtcggaggagaagaagaggaagaagaggtcttgagagcttctcttcccgctttgcacataagaaaaaaccaccgcggctattgcctctacgtattatgacagagccgcacttcaactgggttttatggtgaatacaagttcttttgcattttgttgatacggtgtgaatcttctcaggtttgtcgtcgtagtagctttgcaaatactagcatgctacatgacacggatctttctgtaatggtggtcgcgttgatcgaaacgtgaaaacacatcttcatttgcgactaatttgtttgccttttggtgattgatgatgatcctttccccaaaaaaaaaaaaaaaaaaaaaaaaaaaaaaa

SEQ ID NO: 85747 - DNA, 399 bp, Oryza sativa
  Clone ID: PAT_MRT4530_84855C.1
gcggggcgacgcaacaagcgcggcggcacggggctcggcgcgatgggacgggtggcgcggcagcggcgcaaggcgacggcgactggacggccgcgcggcggggcgcaggcgcgaggacgatgggtggcgatgcgacggcacgtggcgcgcggggcgcgagggcgacggcacgcggcaggggcgcggggcgcaacgcggcaggcgcgcgacgcggcgacgggacggcggcgcggcgcggcagcggcgatggcgacggcgcgcggcggctcgaggcgacaggcgcgcgacgcgcgaggggacgcgatggctacggtggcgcggagctcggggtggctaggcgcgtacggcaaaggagggggcagggctaggggacctcgtcgagcacctcctgcgcaatga

SEQ ID NO: 85748 - DNA, 1259 bp, Oryza sativa
  Clone ID: PAT_MRT4530_84856C.1
atgcagggcgagcggtggccggagggcactgtggacgtggagcaccgtgcggcggtggcggtggtttgggcggagaaggccacggcaaggagggtcgccaccgttgccgccacctttgcacgggggcgagctctcggccactgggggcgtggtgatcgtggaaggaggaaggggaatgggcgaggaggcagacacgcgaacgggatcgtgctggcgtgctacaccgcggtcctcgacgagccaggcgcgcccccgcgcgacaccagttctgcttccgccgccgcctgcctggtccgcctccgccactacagtcggccgcccaagcggattcaagccaaagacgtcaagaccattcgggcgaagccctatggcgaaagccataagcgaagctggcgaaggctggaaagccgcatcggtactccgcaagtaaaggcatctcgggcgaagggcatacgttgtccattcgacaacagctggcgccgtccgtggggaacccagactaaaaggctgaaatgggagccttttgccacacccacacccttcgccatgttaccaataaggtacgacgtcaagggctgtgggcgaacaggttttgccacacctaggcccttcgccgcaataccaataaggttccgccacacccagacccttcgccacaataccaataaggtgcggcgtcaagggctgcggatgaacaggtttcgcccgcccacgcccttcgccatagtgctaataaggtacgacgtcaagggctgggggtttcgcccacccacgcccttcgccatagtaccaataaggtacggcgtcaagggctacgggcgaagaggtttcgcgacacctaggcccttcgccacaataccaataaggcacggcgtcaagggctgcgggcgactaggtttcgccacacgccacgcccttcgccacaataccaataaggtacggcgacaagggctgggggcgaataggttccaccacacacagacccttcgccgcaataccattaaggtgcggcatcaagggctgcgggcgaacaggcccttcgccacagtaccaatgaggtacggcgccaagggctcagggctaattcgccaagggtaatcttcgcccttgagcatcttcttcatcgccttgcccatgaggggcttgttggaggcattccatgaagcctttcggccggacctaccaaaaccatagtaccagcaaggattcaagtcaaagacgtcaagaccattcgggcgaagccctatggcgaaagccat

SEQ ID NO: 85749 - DNA, 238 bp, Oryza sativa
  Clone ID: PAT_MRT4530_84857C.1
tgttatcactcgctgagcattgcaaagcttcgattgtaccttgcaaaagcgctgccgaaggcccatacgaaagtattctttcaatgtcccaagtagattatgaaggagcctgtaacccaggtaatggatttcaatattatgggtctggtccccaaagtgcgacggggttacagcccgtttttatacacgaccgtggagttctatgcttcattaaaggatgagtctttaatgactgggg

SEQ ID NO: 85750 - DNA, 938 bp, Oryza sativa
  Clone ID: PAT_MRT4530_84858C.1
aaaaaaacttggcagttggcaagcgcgcgtcaccaactcagcagcctgagccgccgagggagaagacgacgacgacgaccaccaccaccaccatggaggccgcggcggcgaggcccgtcatccgcgtcgccgccatctgcggctccctccgcaaggcctcctacaacggcggcctcctccgcgccgccgcgggggtgtgcgaggagtccatcccgggcctgcgcgtcgaccacgtcgacatctccggcctgccgctgctcaacaccgacctcgagaccgccgatggcggattccctcccgccgtcgaggccttccgcgacaaggtccgccaggccgactgcttcctcttcggatcccccgagtacaactactccatcgcaaccccactgaagaatgcacttgattgggcttctagagggcaaaattgctgggcagacaaacctgctgcaattgtcagtgcaggaggtggctttggagggggtagatcacagtaccatcttcgtcaggtcggggtatttttagatcttcacttcatcaacaagccagaactagccgtaaaagcatttgagcagcctccaaagtttgacagtgatggtaatttgattgatgcgcaaatcagagaacggatcaagcaagttctcttatcccttcaggctttcacactcaggctccaaaagaaagattgaaccagtgaagtgatacataatcttgttaatctgcatttctgaagcatggctccttggatattacatattacagcctatttgatggtattttactttcaatcaagcaatgtgtcgtggaaaaaccgaaaattgtaataaacgcttgtggaattgtttcccctgttcatttgaaggtttaatgttttggtcacatctatacaaaatatattaataaagatttatattttacccgttcccctgtactgtaaccac

SEQ ID NO: 85751 - DNA, 532 bp, Oryza sativa
  Clone ID: PAT_MRT4530_84859C.1
cttccacctcgagatagacagggagctccctccactctgttcatctctccctgactctactgtttcctcggtacacgctaatgtgaccatgactaccataggtattgcccttagtcactgctgccgtctactggaggacatcgagaccatgccacatcaacgagcatacaaatgtgcatacaatgtctgttttctgctagtgagtacttgatggaaagctcttcaagtcctctttctaacggatgaagccttatctctaaattctatatcaatcggccgcaatcaaggaaacaaggtgttgcatcacctataatgggcctatgagcttgtaactttatctgggaccccgaccaaagtggggaacttgtggggtgctccacaacatagtggagcacgaccctagggaccccttggtcatcctcccacctccagaaatagctatctcttccctacccgtgggtgcacacacgcagcagccgtgagtgagcagcgaacaagccgagcaggcgggtggcgtgagttggcggcgggt

SEQ ID NO: 85752 - DNA, 588 bp, Oryza sativa
  Clone ID: PAT_MRT4530_8485C.1
atgacgccgccgaggctggccgccgcatcgccgccgccacgccggccgtcggcctcactgcaccgcgccccgacccgtcgccgcacgacaggtccgcgccgtacccctacacgccgccgcgcgccgccgccggacgcgctctgcacgacgccgcccgcacggccgctgccaccgcgccctcgccgccgcgcgccgccgccggacgcgctctgccctgcgccgcccgcacggccgctgccaccgcgccctcgccgccgcgcgccgctgccggacacgccctgcacggcgccgcccgcacggtcgttcccgtcgcgcccccgccaagcagcgcagccgcggccccgcatggcctcgccgcaccgccaccgcagcccggccgccgcgccgctgccaccctaccgcagcccggccgcggagctgcccagaccggccactgccacactgccggttgcaccgttgaccactgtgcgccggcgctgcttggccgccgcgcctcccgcacaaggcaactgcggagtcaacgggaagagaagaaggaaagaggaggagaaaaggaaagaaaaaagaaaaatggaaagattcccgtga

SEQ ID NO: 85753 - DNA, 249 bp, Oryza sativa
  Clone ID: PAT_MRT4530_84860C.1
atggggcgaggcgtgcgtcagaccgcctgtcgccacctaacccacgatctgaccgaaacccacaaggggtcggggcgcctcggccctcggggccgaggcggaaccggtccgatcccctcggggagataaagaggagggcgaacacatcaccctcgggcccgacgccccccgagggtgccaggccacgtaggtgattgtgtctgcctcaagcctctagtcatgatactcccggtcccatgtcaccgacag

SEQ ID NO: 85754 - DNA, 933 bp, Oryza sativa
  Clone ID: PAT_MRT4530_84861C.1
atggcgttatttggggtaagagagatgagacgatttgagagaatgacgccggaaaggcgagctgaatatctactaggcatggccggtgtcgtgacgttggtaacgtcgatcctcctcctgttaagcggcagcacctatgggtacggccctaaggtttgcaccggccgtggcgtcttctttagccccacgatcgctctcggcctcctgctgatggccgccttcattttgggtacgtgcggccagaggtacggtgatgagtgcctctttggttgctacctcctcggtctcctcatcgccttccccctcctccttgccttcataatcttcggctacgtcgctgttggaggcatcgacctcggcggcgtaagtattcgcgagtacaatctggaggagtacagcgggtggctcaggggccgtgtggccgacccgcactactgggaaacaaccagcgcatgcctacgcgacgggaacgtctgcagcggcatgacgcggttggtacgcgacccagacaccggcatattcgtccctgagttatcccggtatgaaaggtggctcaaggaacatgggattaaaaaaggcgtgcacgtaatgtcgcctatcgagtctggatgctgcaagccaccgacatcatgtggtttcagatatgtcaacgggacgacgtggataccaacaccagcagcagcaggcacccctgccgcggcgaccaacgtcgactgcagcaggtggagcaacaaccaacagacgctctgcttccagtgcgactcatgcaaggctggcttcctggacgacatcaagaaagcctggagtttcgatgccctgtatccaattctcgcgttggtcggagcctttctttcatgctttgcaggcgtcaagtattggagaccaagactagacactgggtactcactaattagagaacgagcagtggcttaa

SEQ ID NO: 85755 - DNA, 302 bp, Oryza sativa
  Clone ID: PAT_MRT4530_84862C.1
gaacaaattcatcaattttatcccccaatcaccaagaatcaacttacagtaatgttgtcatcttctttttacatgagagtttctccaaaatttcttctttttttttcttttttgaaatgtaaaagaaaatatcagaaaagaatagtaggaaagaaagaatgaacacatgtgtacgctccggtgatcggcgaggcgagccaatgcatctcggagctccggggagaaggatcagttcgccggcggcggcgtcttgggcgtcttcggcggagcgccggcgagcccctgctcgatgtcgccgccgc

SEQ ID NO: 85756 - DNA, 138 bp, Oryza sativa
  Clone ID: PAT_MRT4530_84863C.1
atggccagccaagaaacactgaagaggctggatggcatcgggaggaaagtggtgcagggacgtgttgtgatcagagaagacaccatgagagacaagctagcagaggaggaggcccggatgtgggcctccagaatttag

SEQ ID NO: 85757 - DNA, 1406 bp, Oryza sativa
  Clone ID: PAT_MRT4530_84864C.1
ccggccgggctccgctccttcctcccctctcccgattccccaattcggaggccaagcctgcaccggcaagcggcggcggcggcggcgacgaggcgagagggttcccttccgcggagccggcggagatggaggccacggcgaagtacaaccggggcaacccggcggtgaagcggatccttcaggaggtcaaggagatgcagtccaacccgtccccggacttcatggccatgcccctcgaggaggacatcttcgagtggcaatttgcgatcctggggccacgagacagtgagtttgagggaggaatctaccatggaaggatccagctgccatcggactatccgtttaagccaccatcattcatgctgctcacgccaagtggaagatttgagattcaaaagaagatttgtttgagcatatccaattaccaccctgagcactggcaaccatcatggagtgtgcgcacagctcttgtagctttgattgcattcatgccaacaccaggtggtggggcattgggttcgttggacttcaaaaaggaagatagacgggcactagctatcaaatcacgtgaaacaccaccaaagtttggctctgcagaacgccaaaaagtaattgatgagatccatgagcaaatgctcagtagggctccccctgttcctcagctgctgacaaatgaaactaatgaggagactaaccaattgcctgcatctgatgcttctgatgagcatgcacacaaggcagttggaggcgtgaacacggctgggtccaactcagactctgttaataatgaccttccaaggcctgattctgagtcagaaattgtacaacacattgttgaaggtcggacagaaggggttagcaaccattcaagggccaacttgagcagagaaaacattccaagagttgctccaacgccacagaatcctgttgttgcaatccagaagccaaagcatgacagattattgaccttggctgcatttggactcactcttgctattatggcccttgtgatcaagaagttcttcaaaatcaatggtctggccggttacattgagggcaagttttaggtaggtttgtgcatagatttgataagagctatactaccccattcggtgtctgagcggctgctatgcttaccataagttataaacccctaagaattgtaaatggctgtttagttatagacgaagttgaattggtccattggtactacccgtaccttattgtatatgcagtacacctgatgaaaatcgttctaaggtcttaaaaaaaaaaaaaaaaagtatatgcggtactcctgaaaatcattacaagatattacatgatgtgcgcaactgcacgtatgttgtgcggtggcctccggcccgttcctgctgcccgggcatgaaaaaaaaaaaaaaaaaaaa

SEQ ID NO: 85758 - DNA, 440 bp, Oryza sativa
  unsure (1)..(440): unsure at all n locations
  Clone ID: PAT_MRT4530_84865C.1
ccaaagcgtccgcccaagcgtccgcccaagcgttcagaaaaagaggnngnggacgtttaggtaggacgggtagaaaaaaatcgaaattaattgatggaacttgcaaacgtaaaaggtttaaatataaagagtggaattagaggtagataaaattatggttataaaaacttaatagataaaattgttattggttgagaatattacttataaatttaaaataaagaaagggttgttattttaaaagagaataaataatgaagtgggtttatataaaaaaaattttttaaatggcatttaaccaataaaaaagaatgtgttggcatctatattggagaatttaataatgagcataaagaggtgttttaaatttaggggagttttgggatggtaaaagggaggagtgtgagggatttaaataaaataaattttaacttttggga

SEQ ID NO: 85759 - DNA, 390 bp, Oryza sativa
  Clone ID: PAT_MRT4530_84866C.1
attctcataactttttttttgggggggggttttatatgtcttttattcttttttttttcatatttttttacacacattgtatttgttgaggctaatctcgtggaaaaaaaacaagggctcttttttttttcgggggagggaccccatgctgaaaaaacttaaaggggccgcaaaagggattaatgcagcgtaggggcaactaaaaggggcgaaaaaaacccgcccctgtgacgggggggtggctacaaaaaatttaaagtgctaaaaggagggggggagcttttttaagaaacagcagttttagcaagaccactgcctagaaaggaaaaatacagggtcagggggggggggcaaaaaaaaaattggggggggtgttattggccgccttta

SEQ ID NO: 85760 - DNA, 197 bp, Oryza sativa
  Clone ID: PAT_MRT4530_84867C.1
acaacagtcaaacgcggtggcactttccaatgaaaagtaggtaatacaacgatacaaatgttacaaacttacaaagatcaaaccacatcacaatgtatcaggcaatgtattatgtactggaaacggatcagaagtgatagcacatatcaaagcataacaaaaaagtctgcagaaaggggtgataaagaaagaaggac

SEQ ID NO: 85761 - DNA, 444 bp, Oryza sativa
  Clone ID: PAT_MRT4530_84868C.1
atggaggcgctcgtgggcaagtatattccgcaccttgccgaagattgggacagtatgttagaattggatgatttccgtgtggctagaactgtctcgatcgatatagttattaccagccgtactcatggaattgagtaccgggactcatatggtaccctgattgtttattactgcttttatacctccctagtcagaatgtatagaaacttccgccgtatattagatctacgtaggattaactatgacacctcgcgaagtgacttatgggggaagacactctcaaaagtgaaatttgctggtgaataccgcacccaccatgcacccatgatgaggaaggcggcgccggagtatgggtcttccatgatgccatcaggaggcgccgtggtgtcaggaagcagggcaaagaagagcagggcatgggggtgcggggttcggaggtcgtaa

SEQ ID NO: 85762 - DNA, 1524 bp, Oryza sativa
  Clone ID: PAT_MRT4530_84869C.1
atgagatcgggaccaggatccaaggtgccggattccaggactagaagagcggcgagcgacgaggaccaggagaggccttcgttgcccccttcgctggagccaggtatgtctaccatgccaccgtcgtcgtctgcgccatgcgggtcgccggcttgtggaggcactagcatggaggagccaagccgggaggaactccctgctccatcatcgcgggcgtcgccgtcgcaaagcctccccgctgttacggaggctcctccgacatactggttcgctcgccctcgtagagccgagtccctgacagtgtcatatgatccacagtcaactgagtccagacaatcagctttgaatctaccactttcgacacctcaatcgccattcaacggctcctccatttctttggaagagtagcagtaggaggtagcaaatgatcaccaagactcggattcctctgcagatagctctccacttcgtgaaccgcaggccccactcgtgcctatcttgagaactccttccggtgaggtggtgtatggcattactgatgatccagtagctgcacaagcttatcactgggcctatcgcaagtacgaggagaaactagatggtacggagattaaccaatgtactggtattgttgttgagtgggatgatgtaaaaaaaactgctataattctcacttctgcttggattatttgcacaaagaaacccttcgatgattggtcatacaaggattatgctcctgaggctaaggttattgttcgcataccggatgacacagcctcagattgtcgcttgctgtacttcagcaagcatttcgatattgccttctttgaaactatgggagagttgactctaccaattgtaccgttgaaacctgatttggagtatggccagaatttgtgtgtgctagctagagataataaaacagatttgatttgcactacagtcagagtgaaatacgtggatccttatgagtatcagcacaatcactatttgttcatagatggttccattcctaagtgtggtactggaggtgcattggcagattttagtggaaacattgtggggatgttattctgcacgttacctattgttgctttcataccaagctctctaatccttacgtgtatgagattgtggagaaattttgggcaacttgttcgacctcagcttggcttgaagttaagaacagtggattttctagaaatggcgcatattgagctattgtcccgtaaatacaacattgcctctggtcttattgtaagagaggttttttctcagtgtgctgctgagaaacatggcattcgagttggtgatgttattctctcatgccaaggagagaacatttcaaatgtaactcagttggaagatatactgttgggtgttggtgagagacaccttgagaagggtaatgactcgggctctaaagttgatgttgaggttggtgtatttcatgtacgtaaatgttctagaagacttgtcactttgacagtagagttgtccgatggtattgaagtctttcactaa

SEQ ID NO: 85763 - DNA, 428 bp, Oryza sativa
  Clone ID: PAT_MRT4530_8486C.1
ggcttggcgtcgcatgactgataggtgaacgccgctaacctatggaagaggattgtgcgctgggtggaggacgaggagaaggccgtgggcggccagtatctgcgatacaagcttacttacatctgcgtgcgagacggataatctatagtataggggatccaaaagctaattcaggggcacggggagctcaacaggaaggctgtgaaaatcgtggcgacaaacaacttgatggccttggaggacaagctggtgctgtccggtgtcgtagagctcaacaggcagagatcgatggtcctttccaatggttacgcattgtgcgtgtgcaatgacacgctccatgcatcaagcattaagcgcgcctgcgtgtagatacgcacatcgaggccgctgcattgtacgcgcgtagcgtatgttcagtacacatgctt

SEQ ID NO: 85764 - DNA, 419 bp, Oryza sativa
  Clone ID: PAT_MRT4530_84870C.1
agggggtaaaaaaaggggccccccacgaggggggcccttattgcccggggggggggggggggggccaaaaaacaaaccccccccccaaaaataaaacggggcgggcgaacaaaaataacccttaactaccaaaaaagggggggggctagcaaaaaaaaaaaattctgccccaaaatcggggaaaaaaacctgacccctgaaaaaaagcgggatccatgtatccaccaacccaaaaagagggggggatcttccaacgctggggggggcccccccaccacttccaaaacaaaaagtgggggcccccggggaccccccccgaaaacttgtccccggggaagggggcaaaattgagggaaatgttgttaaccatggggaggcacccgaaccccttccccacggggggggtttccgaccacaaa

SEQ ID NO: 85765 - DNA, 802 bp, Oryza sativa
  Clone ID: PAT_MRT4530_84871C.1
ggggtccggcgagtcgtcggcgacaacggccgcgtcgaggagtcccacctcggcgagctccactacatgcgcgccatcatcaaggagacgttccggctgcacccggcggtgccgctgctcgtgccgcgcgagtccgtcgcgccgtgcacgctgggcggctacgacatcccggcgaggacgcgggtgttcatcaacacgttcgccatggggcgcgacccggagatctgggacaacccgctggagtactcgccggagaggttcgagagcgccggcggcggcggcgagatcgacctcaaggacccggactacaagctcctgccgttcggcggcgggcggcgagggtgccccggctacacgttcgcgctcgccaccgtgcaggtgtcgctcgccagcttgctctaccacttcgagtgggcgctgcccgccggcgtgcgcgccgaggacgtcaacctcgacgagacgttcggcctcgccacgaggaagaaggagccgctcttcgtcgccgtcaggaagagcgacgcgtacgagtttaagggagaggagcttagtgaggtttaagttaaattaagtaatgattagcgatagatagatttttattatttttattatgttttgggataataataagggttaaagttttgtgcttgctaagtaacctggaggctggagctggtaatattgtgactaagcagagaagcaagcctgtgtgatttcgatgtaaaagtacaggatatggtgcctaatgaataaaagaagtcaataagtggcgtattctcttgtaaagaaaaaaaaaaaacagagg

SEQ ID NO: 85766 - DNA, 636 bp, Oryza sativa
  Clone ID: PAT_MRT4530_84872C.1
atggagtcgtcgtcgtcggcgtccctcccggagtacgtgcagttcgacggcgatctactccccgtggcgtggttggagggcgaggtgctcgccgaattcttggcgtttcttgatgacgccgcggcggcggcggcggcggaggatgaggcggagccgtacgaggtggagttcgaggaggaggaggaggagccgcaggaggtagagttcgccgccgatgacgacagcgacgacgacgttggcggtgacctcgtggatgatggcggcgtcatggaggaggatgggttggattacgtatacgacgacgacgacgtcgagctcgtggacgccgacttcgaggacggcagcttcgacgacggccttgtgtccgacgcggacgccgacggaggcgccgccactgcgacggcggaggagcacgccgcacgagccgcagagccaccggcgcgcaacgcgaggatgagcgtggggcccgtgaagcagttcggcggggactacgaagccatcaacgagatgatccgcgagtacctgcaggcggacaacaagcggcggcgcgctcgcagggtcgccgcggcgatgtcgcgcctcagtcgccagcggcggcggccggcggaggacggcggtgcaccgacgtggccgtag

SEQ ID NO: 85767 - DNA, 342 bp, Oryza sativa
  Clone ID: PAT_MRT4530_84873C.1
atggccgcgagtgtcttcacacggcgacggtggagcacgggaaggaagcgggaggctattggcagcgtgacgcagcggcgcacaagcgcaggcgtcgatgtggtggcgcacgggcgaaggcgatggctggcggcactgctgtggatggcgacgcggcggcgccagggcacaggtggcggcgcatgggagcaggcggcggctggcgacacggcaatgcacgggcatggggttaagatatttactgtgatacccaatgggtatccgttgggcatgcccgtgcccaacgggcatggggttttgcccaagagacttcgcaggcgtgggtcggacacgggcacgtga

SEQ ID NO: 85768 - DNA, 1681 bp, Oryza sativa
  Clone ID: PAT_MRT4530_84874C.1
atggcggcggcggtgctgaacgccctcgcgccggcggccaccgtcgcgcagctcgccggcgcggacgcggcggggctggtgtcggcgatcctgcaggcggtgcgggcggcccggcggaaccggagggagtgccgcctcctggcgcggcgcgcgatgatggtgggcgacctgctgcggctgctgccgccggagtcggagacgatgcggcggccggaggtgaggcgggcgctggacgggctgggcggcgcgctccggcaggcgctggagctcgtggaatcgtgccaggagagcggcgccgtgcgcggcttgatgacggcggggaggcaggcggagcagttcagggaggtgcagggcgagatcaacgactacatgctactcttccccgtcgtcagccacatcgacatcacccgccgcctcgacctgatttacggcctgctgcttcctgcagactctcaaccccaccagatgccagaggatgcgccaggttcacctggcgaccattttgaagctgatgttaggaatgtggagatcactgcagctgaggtaattccgtttgaaagcaatcaaactataacagagccttttgagttcggtgaacaccatgtagcaggtcatcaggaaggtttggaagagctgctgtccaaagtgcagaggttgaaatggctttgctggtggtctcagcatgattctctagagcgtccatcaacttatgacttattaaaggctgctacaaataatttctcatctaaaagtaaaattgcaagtgggggttgggctactgtttacaaggatattcaaacacttacaatatgcaaaagctttgctgcacagattgataatcaatctcatttagagaaaatatcttttgacttcactttccaggctcaaatgcgtaatagtcttgagattgcaatcaaagtatatcctatgggcacgggagaaaaacgtgtattttcccagtacgaaagggagcttaatttacttacgaagcttcagcatacgaatataattaaacttcttggacactgcactggagaatgggagctgattttgatatatgaatatatgcccaatgggagcttggacaaatttatacatggcccaaatagagaagtatcgtttgactggttttcgtgcttcaaaataattcaagggatagcagagggtctgctctatctacacactgggtatattgctcctgaatatcttcgtggaggtattttatcaacaaaggttgatgtatatgcctatggtgtcattcttctagagattattactggcaggaggtcctgtattccctgtctaaaagatgatgagtatgtgcatttaactgagtatgcctgggatctatggagaaccggaagatcagctgagcttctagatgcagcattgcgcaatgaggctcgaattgctgagataacaagctgcattcagatagcgttgttgtgtgttcagaaggatccggctgaccgggccttccatgttggatgtgcttgcgatgctaagagatgagaagattgtagctgcccctaagaaaccaggtgatcttctccttggagacgaaacgagcgtagagtcaggtgatcttctccttggagaggaaacgagtggagagactgcacattggttcgcaagcagcggcgctacttgcagttctactgagttcacggtgccccggtga

SEQ ID NO: 85769 - DNA, 126 bp, Oryza sativa
  Clone ID: PAT_MRT4530_84875C.1
aggccttacttaggcttagtggggacacgaaccagggttccaaccggggccacccaattccgctgattaaccaagcggtaatacgatgggagggtaccgggagacaagaatcgctgtggagtggtt

SEQ ID NO: 85770 - DNA, 241 bp, Oryza sativa
  Clone ID: PAT_MRT4530_84876C.1
ataacccgaactttatttaaacaagggaaaattaaaaggggataactgggtttttacatttaaaggtggtcaaaacttcctggtcccttttgggggttttaaaccccctaactggggggataactggatccttggtgacaatcccttcaattatttgggggaaaaacagtaccaatatcttaaaaacatgacagtttttcaggaacccaatgggggcatttttggaaccatttaaacccca

SEQ ID NO: 85771 - DNA, 429 bp, Oryza sativa
  Clone ID: PAT_MRT4530_84877C.1
ggtcgattgctattcgggctattttacacaatgggtggggacccttatactacaccggtgcccaatatatggctgtgcaagaggttgatgatgcttgcactattggacctgctacttaatgtcttgctgggcttgcttggtgttacaaagtgagccatgatgcctatgtgtgctattggtatgagcattgtcctcagctttagccttgctgccatgtctggtgttgctgtggctggtcttggaatgctgagcacaattgccacaggtcttgctatcgatgcctatggtcccatcagtgacaatgctggaggaattgctgaaatggccggcatgagccacagaaattcggagagaactgatgctctggatgctgccggaaacacaactgccgcaattggaaaggggttttgccttcggctttgcaagctt

SEQ ID NO: 85772 - DNA, 568 bp, Oryza sativa
  Clone ID: PAT_MRT4530_84878C.1
ataacactaggagccgaaaacctacattttacaagttatcactggaaatttattcccacgtgctattgctgcatgaacaccacgaacataaacaacaaaaagacaattggaccaaattaagatcgaatgtttgttttttcacattttgaaaggtattaatactaattaggtgaaggtgattagaagcccccgccgccacctcctccaaagccgccaccaccaccaacacctccaccagcacctccacctacgccggcaccagctccaaacccgccgccgtgaccaccaccaaggcctccgccgccaccaccaccaaatcctcctccaccaccaacacctccaccggcacctccaccaacaccagcaccgcctccaaatccgctaccatgtccaccaccaaggccccccccaccgcctccaccaaatcctcctccaccaccgacacctccacctgcaccactgccaacaccagctccaccaccaaagccgccaccatgtccaccaccgaggcctccaccaccaccaccgccaaagccgccacctccaccaagggggccaaacggccaaa

SEQ ID NO: 85773 - DNA, 521 bp, Oryza sativa
  Clone ID: PAT_MRT4530_84879C.1
cctgaagtagccatggcgaccttctggggattggaggggaagcccggtgaggcctacacccatcactccgcgcccgcccgcctccggattacccaggctgtgctgggcagttgtgatcaaggttggactacactacaatgtgataccaatgacagggagactgtgcgcctctgtgttttaaatcctgggcttgctgtggcatgtcacctagagctggaattacagaaggatgagaatgttctcttatcagttgacggacagaactcgatacacctgtccggatactacacctgttcccatagtggcaatcatgggcgcaatagtcagaagcccactagtaaagctgtaggaagtactggcttcaataaaaagcatcaagatatttctgacaaggcaccagtgatagaggagatactagatgaccagacagtacagcagcaacagcagcaaggtgttaacatcagctcgaaggatgtagaaccttctcataaaaatggtcatggacaaaatagtgaatgggc

SEQ ID NO: 85774 - DNA, 293 bp, Oryza sativa
  Clone ID: PAT_MRT4530_8487C.1
acggtacataaatattccccttcgggcaaattaaacagggaattttttaggtcttgacaaggaaaccgggggaataattttgggatgaaaacgggcaaaaaagaaaagacaaggcccctaaggacgtatttggtcgaaagggggtctgaacaagtattgggggtggtaaagcttttttttgcctgaaaatttccacccccaaaaaggcgaggactccctggacagcaacatggggtttttaaacctttacttgaactggaaaaatttgggggaactcttaacagggttgagtt

SEQ ID NO: 85775 - DNA, 1545 bp, Oryza sativa
  unsure (1)..(1545): unsure at all n locations
  Clone ID: PAT_MRT4530_84880C.1
cccccgacaccacccacccttcttccttctccagctctcgcctctcgcctcgtccgtctccggcatccccctcgctcgatttctcctcctcctctctctcgatcccctctactgcgagagattcccttgcttgaattctcctcctcctcctcctctccctccggtgagcggtggcggcggcggcgaatccgagctcctggtggtgtcgtggggggcggggtgattccgtgatggtcgcccgccgcgctctgcggcggtacacggacatgcagcgcaacctctcctccatctcctcctccgccgcgtcgccttcgccgctctcaccggccgacggcttcctctgcgtgaaggacggggtggacgagatgatcaagtacgtggccaacgagccctccgtcgggctctacttcgtccagcagcacgcgcaggcgtccatgcccctcctcctcgacgtcaagggtcaggttgggatcgcaggtcatattatttgtgtgaaacaggttttttaccaatacattgtacaacaattaaagggaagctcttacaaaaacatggaagaacagatgaacacgggaaaggttgcagaaaagattcatgaggtaacattgcatactgaagatatagaggactctatctgtgcagtgaggtccatggcagagtttggacttccaattgctgatgatatgatcaaggacataaataaatctctcaagataatgtcaaagacccaaccaaagagggggttaatccagaaccccacttgggggttccaatcagggaaaagctcaggaacatgggaagaagatttgggcacaaccgacggaggaagcagccgtaattatttctcttccatgttcaacactgcgaagcagaaggcatccactctcagatggccacagcctgatttcggaacaaaagatgacaccactgaggagtcagagtcatctgcagctcctgaatcatcacaagctggtggacatggtgcatcgacaccctcagatacagagaaggatgatcttcctgtttcaagccagcttttagataacaatacagctactatgaaggagagctcttcgactgatatctccaaatcggtggagaattataacaagttcaaggaagaacaagaactcaaactacaagaatggcttagacagtctgaagaagctgatgataataaagagtgagngtggttctagctggtgcaacctagtacatttgctagagcacataccatgccatgttgtatcctatacatgcttacttgatgcacttccagaacttcagatggtaactgtttatgaagcagagcttgtaatcatgatgaggtacataatttatctgcctattagggaacgctgtaaattgccatactctgtttgccgttgatttatttattgccaaggcacagagaccatcaatgtactgtagaatagcctgaactattgatcatgcattttttttccatgtctcttcacatctattttcggtaatcatgtcggtggcatcagcaaatgaatatccttaaaaaaaaaaaaaaaaaaa

SEQ ID NO: 85776 - DNA, 2075 bp, Oryza sativa
  Clone ID: PAT_MRT4530_84881C.1
gatatggattgaagaaatttgcagttttagtagcaaagtcaaaagtggtacgaattaaatagcatatcatgaaagtgctctgaatcggatggcaaatactgaaaatcctctgtttattttggccatgggcgtcccgcaccctgctatgcttcctcttctcctccgccaccatcgtcacgtgtccaactatttgtttctttcttcttcctcaccgattgcaaatttaccatgaatagtcttgatacatctactccagatagcaggtcttttttatttattacaaataacaaaggaatatccttcctccgaattccatctctaggctattagttacagtacaataccgctagtttcgaataaattgacagcagtttttgttaatactaccttactaattaaacagataaagtagctaggcagccacggtccacaagtcatcatgaagaatctaattaatctggaacattatcaagaattgtggatgggtgtgagcagaatggggcatccgttctttaacctggggaacattgcccatttctcaaggcttggatcgtcatctgccatctcccatctgaaattggtgagaaggcggtgtaggaagataagcatcatgatcttggcgtggttcatccccagacatgtcctcccgcctgctccaaataccagcagcctcctcttctgtggttgtgcacgcccaagcttcgcatcatctccctctccctcttcgtcgaacctagaaggatcaaacaccgttgggttgtcgaaaacatccgggtcgtagtggagagacctggcgtcaatatttacaatccagtccttctttatgtgaaaccctgcaacctggcagtccttgagcgccacccttggaaaccaggaaactatagtggccatcctcagcgactctttcactgccttgtacgcatagtccatggcgtttaggtgttgcatagtaagagaataatcacccttaagctccagccgaaatgcttctgcccgtagcttgtcctggattaggcggttgtcgctgagatacttgaccatccaggtgatggcggtggccgtggtaacctggccggcgatgatgagggtgagcatgttgtccagaatctggtcctcagtgagggcgtcgggatggccaagctgccgcctctgcatgagcacgctgagcaagtcgtggtgatggtgatggtgatggtgatggtgatttctggccgccatctcctccctgagcgccgccatgatgcgcttcctggcgtgcaggcccctgcggaagcgcgtgccgggcagccagcgcagcggcagcgccagcatggcctgcgtgacggcgaacacgtcgctctgcagcggcctcagctttccgccgccggcgcccagcagcatctcgcagatggcgcggtagcttatgtggagagcggcgtccagcaccacgacgacttggttttgattatgaggcggaagaagcgtagtccagtggcggatgacgaggcggtcgaaggcggcggcgaaagcggcggtggaaggggtggcgaagagggtggtggcgagggcgcggcgggcgtggcggtggtgggcgtgggaggtggagcagaggatgctgtgggggccgagcaggtcggcggcggtgcgggcgtagcgcttgggcaagtggggaggttcggcggtgaggagttgggaggcggcggggtgggaggcggacacgaacacgtggacgcgccccatgagcgcggtgcggaagcagcaggttgcctccccctccccctcccccttgtacaacttgtagcgctcctgcacgaagtggtagaatccccgcccgctgccatgggaggccaggaaggccgccgtctcccgccactgccacacccacacccaccatggacctgcaccagctgccggaggaggaagcagcggcccccccgcttcggtcgtcttccaccatgaccggtaccaggaggccacaattgtaaggacgagtagaagaagcacaaccacccaccatgctcctgctgccagggactccatattcatcgatcgatcgatcggtatacgactagctagctaggttgctgagcttgttc

SEQ ID NO: 85777 - DNA, 423 bp, Oryza sativa
  Clone ID: PAT_MRT4530_84882C.1
aaggtgaaccatcaatcaaattccagatttccagtacaaataaaagctgtctccactacacaacacacgaccacacaacccccggcaaccgatgccgggccggtaggctaaaataaactgcccgcttccgaaccacacgaaagcgccatcgacgacgatctactgggctactcccctgctggtgtacgatcgatcgcgagagatatatacgaactgtacctataggtcggtaaaatcaaggaccaccaccaacaaaaacgcttaattcggttgcccaaccaatgcacgccgcagcgccggacgcgcgcgaggatccctacctagacgccaccgccgcggccgctgccgctgcgacatccaaatcgtctgctagtacagtacacggaatgcatatatatgcgtacgtgcgatgaactgagtagg

SEQ ID NO: 85778 - DNA, 612 bp, Oryza sativa
  Clone ID: PAT_MRT4530_84883C.1
atgcaggcggcccgtgcggccgtgcgcggcggcgtctccgtggttattggtgatcttcgcagaagttatccttctttgacatttggggttggcacggtcttgaatcctgaagatgcaaggaaagccattacagctggtgcacagtttctcatgagtcctggtacagtcatggaaatacttcatgctcttaaagaaagtgaagtcctgtgtattccaggagtgctgacaccaactgaagttatatctgcttccaatgctggagcagaagtcgttaaggtctacccagtttcagtaatgggtggggaggtctatatgcttgctttgaagaaaccatttccttttctaccaatggtcgcttctcaaggaataagcatagactcaatcaaggggtatttggaggcaggggcatctgcagtggtgctatctgatgctattttcgacaaagaattgatgagagaaaggaaatttgatgaaatttcagaacttgcaaacctggccactctacgggcatcgcaatcaggaacatgaagcagaagtcgttaaggtctacccagtttcagtgatgggtggggaggtctatatgcttgcattgaagaaaccatttccttttct

SEQ ID NO: 85779 - DNA, 2657 bp, Oryza sativa
  Clone ID: PAT_MRT4530_84884C.1
atgaaatttggttcctcaaatatttacgggccgtgttcaggagatttacgagatgattttgttgactggctaaatggcatagttatccaacctgatgaaaactggctgctcatgggagatttcaacttcattcgatcaatgcaaaatagaaacttgcctggtggcgatatgaatgatatcatgatttttaatgaggccatcagtaacattggactgcaagaattacctctcaagggcagaacctacacatggagtaatatgcaaagtcagcctctccttcaacagcttgattggttcttcacttcgccctcctggacaactcattatcccaacacaatggtcactgctctgaacaaatgtgtctctgaccatgcaccatgtgttatttcaattgaaacctctataccaaagtcaatcatcttcagattcgagaactattgggttgatatgactggtttcatggaggttgtcaagattttttgggatatcccagtcagagcaactaatcaagggatagttattaatgggaaattgaaaaatgtccgaagaggcctcaaacgttggagtaaaaggttgtcaaatttaaatcaattaatccaaaactccaatgaagcaattgatatgttggataaaattgaagaggtcaggccactgttcatccaagaatggaatttcaggactattgctaaaaaacatgtgctcaaacttctgcacttcagaaatatcttttggaagaaaaggtgcacaattctgtgcgttaaatttggagatgacaacaccaaatttttccatgctgcggcaacgcaaaggttcagacagaacaagttttctcatttaacactaaatgatggtaacattgtcacctctcaccaggagaaggccctggcattcctaagctgttttcaagccagaatgggaacctcaaatggttatcaaatgataatcaatctgcaagacctctatcatccttctaatcacttatcagacctgtcaacaatgccttcaaaagaagaaattgacaaagtgataagaacaatgccaacagacaaagctcctgggctagatgggttcaatggcttattcatgaaaaaaggctggtctatcatctctgaagattactgtaaacttgcccatgatttctttggacagaaaatttctatccagaacctgaatagctcatttatctgccttgttccaaagaaaccatcacctgaatctgtagatgattacagaccaatctcactccagagctctagcacgaaatttctaaccaaaattatggcagaaaggctacaagcagtcatcctcgatctcatccatgaaaaccaatatggctttatcaagcaaagaacaatccaaggctgtctggcatgggcctttgaatatatccatcaatgttatcaaagcgaaagagaaactcttatccttaagattgattttgagaaagcttttgactctgtagaacactcagccattcttacagtactgaaagccaagggtttcactaacacttggataaattgggttaaagatatcctaaccacttccacaacttctgtccttctcaatggagtgccaggaaagactttcaaatgccttcgaggtgtcaaacaaggagacccaatctctccccttctctttgttttggttgctgacctgttgcaatcaatgataaacaaagctcccgaaataggcatcctctccctgcctattccccaacctgatactaagttcccaataattcaatatgcagatgacactcttattatcatgaaagccagtcaaaaggagattttctgcttaaagggcatccttcagtcttttgcttcatcaactggactaaaaataaattatcacaaatcatgtatgattccgatcaacgtatctgaagaaaattcaaagatcctggctgaaacttttggatgccaaattggaaacttacccttcacttatctgggactgcctgttggaacaactaagcctaaaattgcagactttgcgccccttatagacagagtggaaaggaggctcccagcgataacaatgtttctgaaccaagggcagaggctaactttggtaaactctgtactttcctcccttccaacttactacatgtgcactctcaaaatcccaaaaaaaagtaattgagcacattgacagagcaagaaggcattgtctttggaggaagtccagtgaagttgatgctagatctctgtccctagcagcctgggacaaagtttgtaaaccaaaaaaaagagggggaatgggtatcataaatctggagttccaaaactgtgcattactaatgaaacatctggataaattctacaataagagggatctgccctgggtgaagctcatttggaatacatactatagtaacaactcggtgccaccgcatgccctgcaggaaagaggatcattttggtggaaggatatctttcgtttaataccaatcttcagaggggttagtaaaattcagataaacacaggagattcggttctcttttggaaagacccatggacagaagacctacatcaaaatgctttcccaacattattctcctttgctatcaatgaggatatcacagtacaaaattatgttcagaatgatgtgacaaaatttcaatttgccactatcctctcaagcgttacag

SEQ ID NO: 85780 - DNA, 183 bp, Oryza sativa
  Clone ID: PAT_MRT4530_84885C.1
atgtcctctgcctatcgcttcctcatcatggaaaaggcgatcctttctcattgggtgttgacgaccctatttcgtgaagacatgataacggtgttaactaaggggcgaattgtcctgtcccaacatcacaccaacgaccaccacagccatgctgggcttgggatgctggacgagctagcagcg

SEQ ID NO: 85781 - DNA, 620 bp, Oryza sativa
  Clone ID: PAT_MRT4530_84886C.1
ccggccgcatgaagaacatttcggtttattatgtactactgcgacatgttatccttaaatcgccccatcactttcttcccagttctgcttgatcctctggagcaacggctctctataccgacagatataactcccaataactacgcaatgctcaatgtctcctctcgaaactccaagacaatgcatgccaccatgaattagtgaatatttcaaccaattcggaagtagtgaggtctcaagatggcacaattgacctcttccacgtcccttgagaccaagttctctgtaccgtcagtatgctgttgaccggtatagttatcgtccctagaggccttctactaccccattacactaatggagcatctctaatatatattgtccaagggagagcaataacagggccaactttcccagaatgtcctgatgcctaccaacaaccgtaccaaccatcaccccgaccctaattgaccgaacgacgctccaaagtcaagagttcaaggctgaacatcctaagatccaccgattcagaccaccctatgaaattgcattggctgtcgccggatctcattgtggctactatgatagagaagtgccacttgctgccatatatgacactgatc

SEQ ID NO: 85782 - DNA, 492 bp, Oryza sativa
  Clone ID: PAT_MRT4530_84887C.1
atggtgcggctcaccgacggcggcggtggcgacgacggcggcggcgacgacggcgcacggcgcggcacactgaggcggcggcgcggcggtcacgaatgcggcggcacgacagcacgagggcggcggcgcggcggctcgaaggcggcggcgcggcggtgcgtggagagggggaagagggagaggagggggaacatggacggggctcggcgcgcggtgagggcgacgggcgacgcgatgacgacggcggagcgtcgacacgacggcgacgggacggcgcggcgcggcacggggctcggcgcgcggcgatggcgacagggcggcgcggggctcgagatgacggcgacacgacggacgcgacgcgcgggcgcaggacgacatgacagcggcggcgcgcggcgcgaggcagtgacggcaacgcgacggcaggcggcgcggcgtggggcgcgggcgcggggcggcgtggcagcggcggcgcgcggcgcgaggcagtga

SEQ ID NO: 85783 - DNA, 276 bp, Oryza sativa
  Clone ID: PAT_MRT4530_84888C.1
ataatattatggacaattgttaaaaaaaaaaaaccaccaaaggttttagaggaaaaacgagaggagaaccggggaaaaaaggacgaaccgggcccaattttgacagacccacgcccaggacggccacaggggggggacgccacacggccccccgggagagcgacgggggggaaccaaagttacaagggccgaaaacaccaaccaaaggcgggcctaaagccaaccacagatgaacgagggccccaccccccccaagggggggaaccccccacccca

SEQ ID NO: 85784 - DNA, 1068 bp, Oryza sativa
  Clone ID: PAT_MRT4530_84889C.1
ttgcctcgcgcgcgcgcccgcacggtcgccgcccgtgccgcgcctgcgccgcctagccgctgctctaccgcgccctgccccgcgagccagcgcgcgtgcccgagcagcgtcgtccgcatccgtccaaaaaccggaggcagcgcctcccgctcccatctctctccctccccaaatcggcatggtttccgcgccatggacgcagaggagcagccacgccagccgtcgcccctgccgtttgaccacgcccgtgaacccatcccttcccctcgaagctccctcgccccagtgccgctcgagcgcctctcgtcgccggcctcgctcggcgtagctccgcccaatctgacgctagaaacggactccggtggccgcgtagaagctctggtccgaaggaatcaaactcccgtcgcgccgtcgccgtttcccccttttctcgttgccggatgccgccgccgcaatccgccgccatcgagcatcccccggcgaatccaagccgttggctcatcccctctcaacccgtgctacctcccggtcgccccgccgttcgcagccgccgtccgcccagccacgtaggcgccacgtcgacgccacctcggccaggaccaggtcaagccaacctcggcccgccgctcccctccgccccgcttgcgcgcgcggtccaccgcgagccgccgcgctgcctgctccctgctcacggtgagccgagccgccgacaagcaggtcccacggccacgcaaggtggacctggccatcaataatcttagaaattcaatatcttctcaaccatacatccgattgactccgttcaacctccaaaattcctcaaatctcaagatctatctaatgccacgcttagagtatggtctgggacctaacctgatgtcggtctaggacccctctcgttggcatatggtgaacctgtgtcggctttcaaaatgtcttgtcatgaaagcctcaaggtctccagacgtggccgttctgtacgggctgggtgatccggttgctggagaagatggagtggatcccgctgatgaggagttcttccaggagtaagtcagctatgatgagttt

SEQ ID NO: 85785 - DNA, 1500 bp, Oryza sativa
  Clone ID: PAT_MRT4530_8488C.1
cctctcctccacaaccacctcgcacttatactctcagatcgatctccctctcctcctccccctccgcctactccccttcctcctcccatccccggccctctcctccctgtcctcccttcccatccgctcagatcgatctccctctcctcctcccctcctccctctcagatcgatctccctcctcctccccctccgcctcctcccctttccctcccatcccatccccggccctctcctccccctcctcccttcccatgcagcaggcggccggctgggccgccccctcctcctccccctcctccccttcccccacctagccctgtagccccaaagtcaatccctacacctggccacaaagcaaacagagggtggaaatcaatccccgcagctggcccttatgagccccttccgcacccgcatggcgatgatcctccggacaagccccccccgccgcgaaccccatcggaatatcccccgccgggcccaccaccgccacctcctcctcccccccccccccccaaattcgccggccggttcctgagacctcgccggcggcgagccggcaccctctcgacacccacgatgcgctgcctcctcctcctcgtcctcgcgctcctccgcctccgactccgccgtcgccgccgcggactccctcgccttcgccgcctgcgccagcagcggcgccgccagctcgtagagcggcccgccggcggcgtgcccgccaccatccagctgcatcatctcctcctcctcctcgtcgtcgtcgtcgtctgactccaactccaactccgactccgacgaacacgaaaacgagcagtagtcaccaccaccaccaccgtcagccgacgtccacgacgtcacctcgccgccatcgtcggtcaggctcgacgacgccggcgaccgcagcgtcgtcgtcgccgacgaatcgccgctggagaacccggacgccgccgcctcgccgtcgccgccggcagcagcagcaacaccaccttgatctcctcctcctcgtcgtcgagctatcccgccccctccccatccgtcgtcgtcctcatcccccgccgccgcttcaagccccccgtcgccgctgactccgccgccgccgcccgagttcgtcgcagccgccgccaccgctcccgtcgtcgccatcgccgtcgctagccgctggtacaaccaccccgcccagatccactccagccacagctgcttgagaccgctgccgtccccgccgcctaccgtcgtcgtcgttgtcgctacgcccgagctcgccgccgccgcccgccgccttcgtcgtgcccgaggtcgtcgtcaccgcgggggaggtcgtcatcgctgcgcccgagccggatccgccgtgcccgagctcgccgccgtcgtcgtcgtcgtcgccgcccccatatccactctggccgccaccgccccccccacacgtgccgcctctcgagcctgccacgcgccgcctcctgagccccgcgccgcgctcgagagtcatccgacaaagtg

SEQ ID NO: 85786 - DNA, 184 bp, Oryza sativa
  unsure (1)..(184): unsure at all n locations
  Clone ID: PAT_MRT4530_84890C.1
ggttggggtttttttttttgggggaaaaaaaatggttttttattgggtacgaaaaagtttaccatactggggggtttacaagggggggggctcccccaaggaaacatagatgccaatagtacccagcggaaggtttagtncnttctaactaggaagggataacccctaaggattttctaagtta

SEQ ID NO: 85787 - DNA, 451 bp, Oryza sativa
  Clone ID: PAT_MRT4530_84891C.1
cccacgcgtccgaaaaattcagtactagtagtacatatatatagtcatataacaaatcaaaataatctgtatatgaacatgacaggagttccgtggagcgaggaggagcaccggctgttcctcgtcgggctcgagaagctgggcaagggcgactggcgaggcatctcccggagctacgtcacgacgaggaccccgacccaggtcgccagccacgcccagaagttcttcctcaggcagagcagcatcggcaagaagaagcgccgctccagcctcttcgacatggtacaatcccaattccttggcctccttaaattaatccgagttcttgaattttttggctaacagccagttcgattctaatatatatttacatgcaacaggtgccgatttgcgagaacggtgcgcgcgtctcggagcatctgagcggcgaatgcgcggcggcggcggctgc

SEQ ID NO: 85788 - DNA, 304 bp, Oryza sativa
  Clone ID: PAT_MRT4530_84892C.1
tttgtgttttttttttttttggttttttttttttttttttttttttttttttttgttttttttttttccccaagaacaacctttttttttcaaagaaaagggccctttctcaacctttaaaattttttttttttgaaacctccaagcttccaattttttttgaaggacggggttaattttttcccaccatttggatcaaaccccttcttgccaaaccggccggtcagccggtcgcgtggaaaaaagaaaaaattcttcactggctgaacatattagttggccaatgggcccaaccgtgtattat

SEQ ID NO: 85789 - DNA, 507 bp, Oryza sativa
  Clone ID: PAT_MRT4530_84893C.1
atgtcatcctctctctctatctcttcccttcaccggtctgcaggggcgggagtcgaacaagcagcgacggcagcaagcgacactagggcggcggctgcgccggtcgagggagtggtcggcggcggcggcgaggccagatcggcgttggcggcggcgacggacgggggtcgggttggcagcggcggcggacgggggccggagcgagatggtgtcactaccgccctcccgcccgccggcgtcggcgccggcaacgacgccgcggggaggggccttggaggctgtggcatctggaccgataaggcggggcggcaacggcaccgtgggcaggggcgggggaggatgtcgacgacccgtttggatgagagaaggaggggcggcgagggcaactcccggcagctcaatcgagagtatttgccggcgtcgggtgaactccgggcgggatggggttggaggaggcgccggccaccgccgctcggcccccgtccgccgccgccgccgacgatctag

SEQ ID NO: 85790 - DNA, 320 bp, Oryza sativa
  unsure (1)..(320): unsure at all n locations
  Clone ID: PAT_MRT4530_84894C.1
agaagaccgggaaggggcgaagccggccccggcccccaagacnccgagggaggcnccggcaaaggcgaccngcgccacccgcaccgccagcccgccccncgnnncggncntnnnccacgccacctcccacatcccacgaccccccaaacccctcctcctccgccgccgccgccctccccctcacctacctccaccaccggccatggaccaaccggatcaccgccggcgcactccaatcgaggtggttggaaaccaaatcgcgcccaaaaccgccgcagtttctaggctcacactcgcggaggaggaggaggagaaaaagg

SEQ ID NO: 85791 - DNA, 352 bp, Oryza sativa
  Clone ID: PAT_MRT4530_84895C.1
ggaaacaaaaccaggtgccaaacatttagccaacaattaatcttagggatccgggataggtccaaaagatatatatggccacaagtcccctatagaaagggatcggactaccggtcataggttcacgtaaggcacataacacaaaagggttaattttttcaggccaatgggaacataaaaatcacaggtgacgggatgacatactttacagggggggcttttttttttccatcagaactgggaacgaaaaacaaacacccatgggtcattcccagggctactattgggtggggggaaaggccaaaacggaataggggggggaaatcgggtaaaactgggctcgacaaagggg

SEQ ID NO: 85792 - DNA, 2706 bp, Oryza sativa
  Clone ID: PAT_MRT4530_84896C.1
atggctggagctatagtgagtgtttcaactggtgccctgagcaccctgcttcctaagctctccctgttgatccaaggggagtacaagcttctcaaaggcgtgaagggtgggatctcctttctgaaggatgagctgaccagcatgcatacccttctagtgaagctggcaaacaacgaggagaacttggatgagcaggtgaaggattggaggaacaaggtgcgtgagctgagctatgatattgaagactgcatcgaccttttcctgcacaaggtgagcagttctaatgctaaagcgggccttgtccggaagacggcagctaaaattagaaagttatggtcgcgccacaaaatcgcaaacctaattgaagaacttaaggctcgtgttatagaagaaagtgatcgccgtttgagatataattttgaagaagttgctgataattttagccatgttcaaattgatcctcgactgccagcactctatgtggaagcagagaagcttgttaggattgatggtcctagagagaagattatcgagtggctggaaaaagatgaatctcagaaactcaaagtagtatgcattgtgggctttggaggtcttggaaagacaactcttgcaaaccaagtttatcacaaaatgaaaggtcaatttgattgttcttcttgcatgccagtttcacggaatcctaatatgacaaagatactagttgatttgctcaaagaattgggaagtcgtgttgatacatcagatgatgagcgtcagctcatatgcaagctcagaacattcctacagtgtaagaggtacttggtcattgttgatgatatttggagcacaaaagcatgggaagttgtcaagtgtgctctcccagagaacaatttatgcagtagagtaatttcaacgacaagaaatgcagatgttgcaacatcatgctgctcctgtttagcaggatatatccataacatgcagcccttaactgagcaggactctcagaagctattttttaagaggatttttggggacaagtcagcatgccctccttaccttgaacaagtctcccatggaatcattagcaagtgccatgggttgccattagctattatcagtatagctagcctgctagctggaaaatcacatatgaaggagcaatgggagcaagtgcacaattctattggttttgtgtttagtcaacaaggaattagagatatactgctgcttagctactatgatcttccgataaatctgaaaacttgcttgctatatcttagtgtgtttccagaggattacaagattgatagagaagagctaatatggagatggatagctgaagggttcatcagtgaagtgaagggtcaaacactggatcaaattgctgataattacttcaatgatcttgtaaacagaagcatgatccaaccatttgacatcaagtacgatggcagggcagatgcttgtaaactgcatgatatggtgctcgaccttataatttccctgtcaacacaggagaatttcacaaccataatggaagggcaacaatataaatgttcttctaataagattcgtaggctgtcagtacattcaaaatatctggaagatgaagtaatgcacgagattatgatgaattgctcgcaagttcgttccatcagcttctacgaattgcaagatcaggaaattagtcttctctcaactcttaattctttgagagtgctagcttttaataattcccaccatcttggtaacaaaagcattaaatatcttggaaggtttttccagctgacatatttgagcatcgcttctcgtggtatcactgatcttccagagcaaataggaggtctgcagaatctactgacactagacattcgtggcagtagtgttgaaaaattgccatcaacaataggttgtttgaaaaatctggtgcgtctacttgtaaatgaagctgtgaaattgcccaatgaggttggagatctacaagccttgcagcagctgtcatttgctggtaactataattccatagtatttgtggaacagctgaagcggttggcaaacctaagggcgatttccatacgactgcatgatagcgcacgacttggtcatcatgatatggcaaggtatatggaagctttgaagtcatctcttgctgtgatggataaacaagggatccaatcattggaaatatcctgctttgatagtgtgataggagaaaaactcatggatttattatgctactcaccatgcctccaaaggcttgtcatacatggttgttgtatcggtctgctatcaaagcagatgacgttgcttgttaacctcaggcatcttgaaatatgggttagaaacattaagcaggacgatctctgcgttctaggaagcatacccactctgctcttcttcagggagcaatgcctgagctccgatggttctcttgaattccgcgcacatgaatcagactgcaagatgggttttgagttcagcttaaagcaccttgcaagcctggagcacctcaaagtcacaattttttgccatgttgccaccagaagccgggtggaggctgcagaagcttcggtcaggaatgcagccagtgcccacccagggtgtcccatatttgaaatcaatagatgtggggaacaaaacatggtagatgataaggtcgacaaggaggagatactcaaggatatagatgctcatgaagtggttcggcgtgacatgaataactga

SEQ ID NO: 85793 - DNA, 1997 bp, Oryza sativa
  Clone ID: PAT_MRT4530_84897C.1
atcacattttctcaatgctaaccaggtacttggtcattgttgatgatatttggagcgcaaaagcatgggaagttgtcaaatgtgctctcccagagaacaatttatgcagtagagtaatttcaacgacaagaaatgcagatgttgcaacatcatgctgctcctgtttagcaggatatatccataacatgcagcccttaactgagcaggactctcagaagctattttttaagaggatttttggggacaagtcagcatgccctccttaccttgaacaagtctcccatggaatcattagcaagtgccatggattgccattagctcttatcagtatagctagcctgctagctggaaaatcacgtctgaaggagcaatgggagcaagtgtacaattctattggttttgcatttagtcaacaaggaattagagatatactgctgcttagctactatgatcttccgattcatctgaaaacttgcttgcgatatcttagtgtatttccagaggattacgagattgatagagaagagctaatatggagatggatagctgaaggcttcatcagtgaagtgaaaggtcaaacactggatcaagttgctgagaattacttcaatgatcttgtaaacagaagcatgatccatccagttgacatcaagtacgatggcagggcagatgcttgtaaactgcatgatatggtactcgaccttataatttccctgtcaacacaggacaatttcaccaccatagtagaaggggaacaatataaatgtcctcctaataagattcgtaggctctcaatacattcaaaatgtctggaagatgaagtaatgcaggagattatgacaaattgctcacaagttcgttccatcagcttctacggattgcaagatcaggaaattagtcttctcccaactcttaattctttgagattactagcttttgaaaactattggcaccgacatggtaacaaaaacattaaatatcttggaaggtttttccagctgacatatttgaagatcaaatctatcactgagcttccagagcaaatcggagacctgcgaaatctactgacactagacatacgtagcagtagggttgaaaaattgccatcaacaataggttgtttgaaaaatctggtgcgtctacttgtagattataatgtggaattgcccaatgagattggagatctacaagccttgcagcagctgtcacgtgcttccgtagtatttgttgaacagctgaagcggttgacaaacctaagggcgattgacatagacctgcgtggtagcgaacaacttggtgatcatgatacggcaaggtatatggaagctttgaagtcatctcttgctgtgatgggtaagcttcaaatattgcaaatatcctatggtaatgatacggtgataggagaaaaactcatggatttattatgctactcaccatgcgtccgaaagcttgtcatagataattgcatattcagtcggctatcaaagcagctggggttgcttgttaacctcaggcatcttgaaataggggttcgcaacattaagcaggacgatctctgcgttcttggaagcatacccactctgctcttcgtcaggttatttgtaaaaaatgaacctgatgaaaggcttgccatcggcagccatcaattccgatgcctcaagcagttcatcttcaaaaaccacggaggtgggctggagatgttgtttatgcaggaagcaatgcctgagctccgatggttgtctcttgaattcagagcgcgactaacagactgcaagatgggttttgagttcgacttcaagcaccttgcaagcctggagcacctcgaagtctcaatcaattgccatttcgccacctggagtggggtggaggctgcagaagctgcggtcaggaatgcagccagtgcccacccaggatgtcccacagtagaaatcaatagagtctgggaaagttacatggtagataatgagcaaggaggaggcgtgacatatgatcaataa

SEQ ID NO: 85794 - DNA, 739 bp, Oryza sativa
  Clone ID: PAT_MRT4530_84898C.1
cccacgcgtccgctctcccccaaactcctcctcgtctcctcctccgctcccccaaccaaatccccaattccgcaccaccccgagcgcggcgacggaagcagatcgcggcgatggaagcagatccggccccatcctcgacgccgccgccctcctccccggcgcccgcggcttctccgtcccggcatcctccaggtgaggaaggaggaggggctgagcgcgtggaggtggaggagtacgtggatcccccgagcccagattgctgcggcggagccgacccggaccatgcgccgccgccgtcgccgaaaggtgaggagccggtggtgagcgctgaggaggagcaggcggcggttgcaggaggtgaaggggaggctcttcgcagcttcttggaggaatttggagaccaaggggatgattcccttgtcccgtcaccgaagctgaagcagataaacacccctgaccgcctcgctgctcttcgttttcttgggggaaagtataacagcttgttagagaggtacaagcagcaggtggctaagtgtgccgaggagtgtgcgccgaggtacgatggcttgaagaagaagtacgcagatgagtgtgcagaacggcgacgattatacaatgagctcattgaactgaggggtaacatcagggttttttgtcgatgccgccctctaagcactgctgagatctccaatgggtgttcatctatagttcagatcgatccatcccatgagactgagct

SEQ ID NO: 85795 - DNA, 379 bp, Oryza sativa
  Clone ID: PAT_MRT4530_84899C.1
ctctcgggttagttcggtcatgaccgagaccgaaccgaactaccgaagtgctcggtcttcatttttttttggaccgatcggtcttgagtttttgatgaccgaaattttaaaaagaccgaaagaccgaaccgaatttctcggttagaccgaatgcccacccctgaccagaaagaccagaaatgtgtacccctcaactcacacaaaccgttcaaaggaggtcccataacagtatatgtgggtggtttcgctgacgtggcatcctagtcagcaaaaaaaattaaaaaagtacgtggggcccatatgtcagttgcacattttctttcttttcctttccttctcttctctttatctcagcgatgggcgggcagcgtgcgagcac

SEQ ID NO: 85796 - DNA, 2358 bp, Oryza sativa
  Clone ID: PAT_MRT4530_8489C.1
atgccgccgccgccgccgttcccgtcgctggacgccttctacctccacctcctccgcgcctgcacctcgctgcgccacgccgccgccgtccatgcccacatcgcccgcgcccacccggccgcctcccttttcctccgcaacaccctcctcgccgcctactgccgcctcgggggcccactccccgcgcgccgcctgctcgacgaaatgccccgccgcaacgccgtctccttcaacctcctcatcgacgcctactcccgggaagggctcgcgcccctctctctggagaccctcgcgcgggcgcggcgcgcgggggtcgacgtcgaccggttctcgtacgcggccgcgctcgccgcgtgctcgcgggcggggcacctgagggccggcagggccgtgcacgcgctggccattcttgatggtctctccagcggggtgttcgtctccaattcgcttgtcagcatgtactccaagtgcggcgagatgggcgaggcgaggcgtgtgttcgacgttgccgaggagagggatgatgtctcctggaactcgttggtctcagggtatgtgcgcgccggcgcgcgcgaggagatggtaagggtgtttgctatgatgcgccgcggtggaatgggtctgaattcatttgctcttgggagtgtcatcaagtgttgctctggccgtggagatggaacaatggacatcgctgaggcagttcatggatgtgttataaaggctgggcttgactctgatgtgtttcttgtgagcgccatgattgacatgtatgccaagaaaggtgccttagtggaagctgccgcgctctttcggtcggtgcaagagcccaatgtggtcatgttcaacactatgattgccggtttttgtcgtactgagactgtaattggtaaggaagttgcaagtgaagcgctaactctgtattcagaggtgcagagtcgtggaatgcagcctactgagttcacattctctagtgtgttacgggcttgcaaccttgctggttaccttgaatttggaaaacaaatacatggccaagtgatcaagtacactttccaggaagatgatttcatcgggagtgcgcttattgacttgtacttcaactctggctgtatggaagatgggtttaggtgcttcagatccagccccaagcatgatattgttacctggacagcaatggtttctgggtgtgttcaaaatgaacttcatgagaaggctctgagtttgtttcatgaatctttaggtgctggattgaaaccggatctttttactatatctagtgtgatgaatgcatgcgcaagtttagctgttgcaagggctggtgagcagatccagtgctttgccacgaaatctggttttgaccggttcactgtcatggggaactcttgcgtgcatatgtatgctagatcaggggatgttgatgctgcaactcggaggtttcaggaaatggaatcacacgatgttgtctcttggtctgcagtgatatcatgccatgcacagcatggttgtgcaagggatgctttacatttttttgatgaaatggtggatgcaaaggtggtgccaaatgagatcacttttcttggtgtccttactgcctgtagccatggaggattggttgatgagggactcaggtattatgaaactatgactaaggattatgggttgagtccaaccataaagcattgcacttgtgttgttgatctccttggacgagctgggagactagctgatgctgaggcttttataagcaattcaatcttccatgctgacccagtcatttggcggtctttgctggcctcatgtcgaattcatagagacctggagagaggtcaacttgtcgcgaatcggataatggaactagaacccacttcgtcagcgtcctatgtaattctttacaacatgtacctggatgctggggagctctcgttggcttcaaaaactagggatctgatgaaacagcgaggtgtgaagaaagaacctggcctgagttggatagaactgaagtgtggagttcactcttttgttgctggtgacaagtctcatccagagagcagtgcaatatacacaaaactggaagagatgctttccaggatcgagaagttggcgaccactgatactgaaatctctaaaagggagcaaaatctgatgaattgccatagtgaaaaactagctgtggcattaggaatgattcacttgcctcagtcagcacctataagagtaatgaagaatctgagagtttgtcgtgattgccactcaacaatgaaactgatatcaaagagtgaaaacagagagatcatattgagagatccaattcgcttccatcactttagagatggttcatgttcttgcgctgattattggtag

SEQ ID NO: 85797 - DNA, 414 bp, Oryza sativa
  Clone ID: PAT_MRT4530_848C.1
caacggataaaaaattggagtgtatatagtctactgtggatgtatgtgtatcagtgtatacagtacccataccgaaatgaaaaagccatgaagaaaaatgaaaaaaagaaagtatgtttttccccatcggaccatacaagcaaaacgccaaattggactagtgactacagatctttgctgaaaacaaataaagattcttaacgaacactaaagatatactaaaccaagcacggtggtgaccacaaggaacacatatatttgttatcaaatgcgctaaatgggccctagtggtctagcagatcaaagccaatgtagcgagcacaaagcatttgggaccacggccctacgctgctcaacattgcacgaccaactgacctggaatcatcgaaaccacaccccactaaaaaatcccca

SEQ ID NO: 85798 - DNA, 2914 bp, Oryza sativa
  Clone ID: PAT_MRT4530_84900C.1
ctagtggatccccggcccccggctgcggcacgtcggagagagagagagagaactagtctcgagttttttttttttttttttatcaaggaacactaacatcaatcattttaagaaaagaactgatgaatgggtacaacccttatcacagacattttatcaacacaaagccacgagtacagatggatggctttcaacgggttaaacaaagtaatcgtcaacattcctactctgcatcactgtttgaacatccaaacattggtcttcagttctggtctggaaaaggtacttcagaggacagacttcctcctgttggtgttgaacacgcgctgcgcattccctattttcgccgccatcattttctcgcgcagagctggattgaagatgccagtaccagagagcagactgcttttcactggagcaggtgaacctaggatcactctcttctgaacactgaagcatattttgctggcatttcctgagccagatgctagccgcagcttctgctgaggtgacaaggcgttattccttgagttgaacctggccagcgctggagggcttctgaacttgctactgctgaactcgattctcctcaattgccgtgcttctggggtgccatcaacctgtttatgtgcagcagctgctaatggtgttgctggaattgaattaaatgttgcaattgatctccttggcatctgaatatgggacagacgggacactgatctcttatcaggaaatatggacagctgttctctctgggttggtagtaccgcgagtgaggatcgcctcttgggctgcagaggtatgtgtcgaatcacaggagtcagagaaactcgccgtgccttgccagcaacagccttgctggtatcagccccagaggatcctttgttcaacatgacaggaatgttctctttattttgaattgtgggtgctttactgagcctcagtctaagaggagccttaggtggaatgtgattgccaattcttccaagaggtggtctctgcctcataggagcaagtggtggctttgttgatctagctgtatccctggcagccttcttctcattggctaattcattttctagctctctaacccgctgctgataagttttggacgtttgttcagcctcccttatcttctcttgaagtgtcttgatgacattctctcgagaagcatacttaagctgcgtcagttgcaagctttcaagtaactttgcattttccttctcctcatgacgaattttctctgtcatctgcttgagcttaaaagtttcagctggatctgcttgtttacgagcagggccatgatctatagctctaactctactagcaaagttaagtgagcagagagtctctcccgagtctgcagaacttggacttatctgcacgaacatgagtgtcttgcaatccccacctaaagagctttggagcagatgagtcaacttggaatttctataaggaatgtgtgcattttttgaggcaagggcagaaataacatcgcccaaagcagagagcgacttgtttatgaactgtgactcctttagcctgtccccttctacttctgttttattcacacgctcacttccagctaggtcgaccaaccagatatggctcctccacttttgccctgtcaccagatgctcactcctgacggtaaccttaaccaagctatgagagcggctgcttagttcattggcactagttgctccaaccgatctatttttagctccaactttcagtttctcccaaacaccatctatagtataaattggagcttcaatcaaaccagccacctcttgtgttccatcagcagtttgctttatgtccaattttcttcctgtttgctcagagctttcatctagaagatccctgattttttcattatagacttccaaaatgctcacagcaaatgtgtaggcaacagaagagcttctttcttcagacaacctgaataattcttccaatgctctgtagttaacacccctatcctctggaatcccttccatggtgaaggttttcccagttccagtttgtccatatgcaaagatgcatacgttgaaaccgtccatgacagaccgcacaacaggcaagctttcagcaaagacagtctcttgattgtcagatggtccaaaaacatgatcaaacttaaaagccttcctgtctttatcagatggaacaaactgcagctcagtctcatgggatggatcgatctgaactatagatgaacacccattggagatctcagcagtgcttagagggcggcatcgacaaaaaaccctgatgttacccctcagttcaatgagctcattgtataatcgtcgccgttctgcacactcatctgcgtacttcttcttcaagccatcgtacctcggcgcacactcctcggcacacttagccacctgctgcttgtacctctctaacaagctgttatactttccccctccatgagcaaggtaaaaagtatatttcattgtgcaaggtgtaccaagaaaacgaagagcagcgaggcggtcaggggtgtttatctgcttcagcttcggtgacgggacaagggaatcatccccttggtctccaaattcctccaagaagctgcgaagagcctccccttcacctcctgcaaccgccgcctgctcctcctcagcgctcaccaccggctcctcacctttcggcgacggcggcggcgcatggtccgggtcggctccgccgcagcaatctgggctcgggggatccacgtactcctccacctccacgcgctcagcccctcctccttcctcacctggaggatgccgggacggagaagccgcgggcgccggggaggagggcggcggcgtcgaggatggggccggatctgcttccatcgccgcgatctgcttccgtcgccgcgctcggggtggtgcggaattggggatttggttgg

SEQ ID NO: 85799 - DNA, 1230 bp, Oryza sativa
  Clone ID: PAT_MRT4530_84901C.1
atggtggagatgcagcctgaaagctacttcccgatcctgtcaaggtgccagcggatccacacggtgctgccgctgctgggcaaaggagacggcgatctgggcgccatcgccacggtgccgcagctattgagtctttctatggggagaatacgcccagccgccgtccttgcgaccatctggcttggccaacgagctgcttggacgcgacaggagggatgggaatcactccagccggctgttgccactgacctcgtcattgtcgtcagtcagcgccgctaccgctacctccctcggcactgcagcaagtactgccaccgtggcgccgtcctccttctccagccaagccgcgtcaccgattgcttcatcgccagaggtcaccgcgaccaccatcgggttcacaaggagaaggagcacctaggactcccaattgttctcgttgcaagctgccagaacgctgttgtcgtcatcttcccaaagccaccctctgccctccgtttctgccaccgtgctgtcatccgctgtgcaccgccgttctcgtgccgggcaccacatcatcacctcatcagcaacatgttcgtcgggtggctgtggcggcacggtggagaggttcgtcatggaggcgtgtgtcgtggtcctcaccccggcgtcgtggaggacgtcgcggagaagcacagcgacgagcggacgagagggactggagggaggccgtgggtgtgctgtcccattcggaatcggccatggaggtggagcttcggcgagttgctcgggcgagcggatggggagatcgatcccgatttcgcctccgcctccacctcgaattcatctcccgctcttctgccgccgccgccgccgaggttgagaccccacgacgtggcaagctcggcggcccccgggcatctggagaacccctccacggacaccctcgcctccacaccagaggtgcacccaacgcagaggaacctggcctccctacacacgccgccgcatcctccagctccagtgacggcgacacgcgccgccgcagggcgcgctttgtacccgacgccacgtcacccccttcggccactaccacgtcactcctacccaacaacacgccaccccgctgcgtctcaggaggaggaggaggcacggaagcccgcagtgtctgccgtcaccatcacggcgttggcgtcatcctccgccgccacgaccactcgacgccacgcatcagacgtgggaaggaggggatag

SEQ ID NO: 85800 - DNA, 269 bp, Oryza sativa
  Clone ID: PAT_MRT4530_84902C.1
cacacatagaaccagacagagagagagagagagagagagagagagagagagagagagagaaggcatatgttcactccaacacttcgaactacgcacacagaggaagaggtagggaaggagtgggtgcgttgtatatggcatcaacgatcatatgcgcacgaacagatgcgacgccaagctcaccatgttgaaatataaaggcacaactgcgctaagctgtaactgtggaagagccataacgtcaagggtggtgatgcattcactcctat

SEQ ID NO: 85801 - DNA, 518 bp, Oryza sativa
  Clone ID: PAT_MRT4530_84903C.1
atgcgcttgactaagacgaacacgagcacgaggacggcgggggcggaggtggtgggttcaggcgggctgggccggagccaccgcggcgagaggctgctcgcatgccggccgacgggtagggagcagacgcccgggcggcggccggcggaccgcagcgtgcgaaggcgtcctcgccctcgtcttcgtatgccgaggacgagcgccgcgttgaggccttccaccagcggttcggcaccggcgcgacggagatgccaacttgcttggcaccgctcgccgccgccctactggagatggagatggaggacatcgaggacgtgctggggctggctaggctcaccggcggcgaggcgccttcggggctccgtctcccgctcgccgccgtcgccggtccgctcgcccacgcgacatggaggacgctgccgctccccatccgccggcgccgtgcgcgcgtcctcctgccaccaccgccgcttcgctggtcgccgtgcgcttgcacgctgcctccgccggccgccgct

SEQ ID NO: 85802 - DNA, 791 bp, Oryza sativa
  Clone ID: PAT_MRT4530_84904C.1
gcagaaaggtgcataaaaagaaaaataaaagccgcacaaaaaaagaaaaacaataacaacaaaagtctgtttccctaagtgaaaaaaaagcgtagatccgaatggaaaaaaatcgattactataaaaggcaaaaaaaagtggtgaaaaaaaaacgctagatctaattcctttaaaaaagaaaaaagagaaaaaaagtgattcctttaaaggcgaaaaaaatccaaaaaaaacatctaaaaaagtctgtccgattcccttaaagaagtggcgaaaaaaatggttcgtaaaaaataagaagctggtttgtataaaataaaaaatgcacgtgagaaaaaaaatggaaagggcgaaacaaaaaaaaaaaagcaaaaaagaacatttaacaaaaagacaagaaaaaagcgcgcgagaaaatgattgttagaaaaaacatgcaaaaaacacacgagaaaataaaagcaaaaaaaaggggagaaaaatatggttttcatcgtcattaaaaaaagaaaaaaaacatgctaggaaaaaactattagaaagaaatgcgccatttctgaaaaatagtttgagaaaatcgcgcaagaagaaaaacactaagaagtcatatccccggagccttcgaatcaaaaagagaaaaaaagaaaagaaaagaaaagaaaaatcccgcaaaaaaaaaaagacgcaaagcaggcaggtaaaagaagagacaggaaagacagggtgggaaaaagaaaaaaaaaacagacgggataagcactctcgctctctcgtttcttcctttctcaaactc

SEQ ID NO: 85803 - DNA, 303 bp, Oryza sativa
  Clone ID: PAT_MRT4530_84905C.1
atggggaaggggaaggaggaattcgtcgaccttagagggatggccatgggaggcggcggaacgggtgggtggcaaggtggcgacgccgctgctgaagtcgtggagttggtagccggcggtgggccagtgctagtgatgggggcaaagcggagcgacaggattatgaggcggccggtgatagcggatccggtagcgaggagccactggagatggggaagacggcggggccaggcggtggtgctgtgtgggggcgactgtgacagaggaggtggggggatcgtgagctttccatggcaacggtga

SEQ ID NO: 85804 - DNA, 226 bp, Oryza sativa
  unsure (1)..(226): unsure at all n locations
  Clone ID: PAT_MRT4530_84906C.1
cttctccttctcagccagcttcgcctcgctcgctagctatccatctcttcctcctcttcttctcccttcccttgtttgcttggaaggagagggggaagaaaagtaggaggancgcggtgcgggnnggtccagagctagggcaaggcggagggcaacgcaagaggcgcggccgacagagccgacataaaggataggctaacaagacaacttgactccatagcctgag

SEQ ID NO: 85805 - DNA, 177 bp, Oryza sativa
  Clone ID: PAT_MRT4530_84907C.1
gacacgacctaccgatctatcctatgagctgagctttatgctgaagctgattaataagctaactaattgctaaccagctaatgagctagcttatccatcaagatggcccacgtgtatgcgctggtccgtgcgctgattgttgtcctcaccgtgctcttgaccacacagatggatgca

SEQ ID NO: 85806 - DNA, 129 bp, Oryza sativa
  Clone ID: PAT_MRT4530_84908C.1
gccccaatagggagaggcgtacctagctctcagggacccgacacaacgtcaagcgtatcactcatatggccaatctggtttttcaacgggcgcaatgattgatccagctgcaattattgcaatgctgaa

SEQ ID NO: 85807 - DNA, 606 bp, Oryza sativa
  Clone ID: PAT_MRT4530_84909C.1
gcatgcaaattcaatatttaaatatcctttacacccttatgttttcatatgaaataaagaaaaactattgagaaaacacacaaaaaaaagcttttgaccattggcaaaaatgtgtagtaggggtgaaaacggttcggaatttttccggattccggacctgttttcggaaacggaatcagccggtcgaaattttttcggaatttctcggaaacggaaatattttttcggaaacggaatcgaatatgataatagcagtttccgtcggaactcggaatcggcatccaggaggttgagtcgagcacgccaccgctggccgccgtctcgtcgcccttcctctctcgctcattttcgccgccgccaccaccgacgatgacgccgacgacgccggccactggccacaccgccgacgccggccacaacaccacactgccgacgccggccacagccacaggaccgacgacgccgccgccgacgcggatgacgccggccactagccacaccgccgacgccgccgacgcctcgccttgcaggcagcagcagccagtagcccagtggcagcagctcccagatctgcacctgccgccgccagagctgaccggcggctag

SEQ ID NO: 85808 - DNA, 1106 bp, Oryza sativa
  Clone ID: PAT_MRT4530_8490C.1
cgcgcccccaccaggctaccgccgcccccccccgagtccggcccggccgccgccaccgctcccgtcgtcgccatcgccgtcgctagccgctggtacaaccaccccgcccagatccactccagccacagctgcttgagaccgctgccgtccccgccgcctaccgtcgtcgtcgttgtcgctacgcccgagctcgccgccgccgcccgccgccttcgtcgtgcccgaggtcgtcgtcaccgcgggggaggtcgtcatcgctgcgcccgagccggatccgccgtgcccgagctcgccgccgtcgtcgtcgtcgtcgccgcgggggaggggcccggcgccggatccgcgtgggaggagggcggcccgaccttggatccgctcggggggagggtggtcgtccccatatccactttggccggccaccgcccccccccacacgtgccgcctctcgagcctgccacgcgccgcctcctgagccccgcgccgcgctcgagaggtccccaccgacgccgcctccaccaggtctaggaggggtggggagacgctgccgcccatgaacccttcgcccccgtcagtagccgccacctcctcaccggcgccgccctccaccgtcaccaccgcccatgcaccctccgcctcccgccggtagccgccacctctgtgccgccgccagcctccacgccatcagccgttgcccctgctagccgccgccacaactcccgggagaggagagtattcctcgctagtccctcctaccgaagaaagatctcccgccgcgtcctcgtcgtcggcgccgcaccaccaccgccacgcgcccactccttcccccgttttctcccccacaacccccatccgcctcgctttccatccccatcccctcctctccacctcccctcgccgcctccgccgccgccgcggcgggccaccgggagcggcgccgcctgccgtccccgcgcgcgggcggatcgcctgatccgctcccgcccccccacccgcgccttcgatctccatggcggcctgtaacgccgccgcagcggctgccgtcgccgagcagccacagaagcagtatggaattacgaaaccgatatcgttggctgagccggcggagg

SEQ ID NO: 85809 - DNA, 1256 bp, Oryza sativa
  Clone ID: PAT_MRT4530_84910C.1
acggcacgaggatattgaagagatcaacgtgcaaaaaaccgaagtgtaagtaacacgccgagcagtttccctcgcacgcttcttctccctccatctctccttgaatcctttaatttgctccgtttcttggcagtggccagccaatgatgatgggtggccagcagagcgcgctcaaccagctggtgtcgtttctcctcggggtttcggcggcggccgtgttgatcttcttcttctcgtcggccggcggcggctggtcgacgacgacggacttgtcgagctgggcgaatgggactgtagcggcgacggccaaggagaccaacctgacgagcaccgctgctcatgtcgaggagaaggctaacctgacgaacagccaggcggcggcggcggaggcggcgaaggaggaggaggagaaggagctggagaagctgctggcggcggtggccgacgagcacaagaacatcatcatgacgtcggtgaacgaggcgtgggcggcgccggggtcgctgctggacctgttcctggaggggttccgcgccggcgaggggatcgcgcgcttcgtcgaccacctcctcatcgtggcgctcgacgacggcgccttccggcggtgccgggacgtgcacccgcactgctaccgcctcgccgtcgccggccgcaacttcaccgacgagaaggtgttcatgagcgaggactaccttgacctggtctggagcaaggtcaagctgcagcagcggatcctcgagctcggatacaacttcctcttcacggacgtggacatcctgtggttccgtgacccgttcgagcagatgtcgatggcggcgcacatggtgacctcgtcggacttcttcgtcggcggcgcctacaacccggccaacttccccaacacggggttcctgtacgtgcggtcgagccgccgcgcggtgggggtgatggaggcgtggcgcgccgcgcgggcgtcgtacccggggaggcacgagcagcaggtgctgaacgagatcaagcgggagctggtggagcggcgcggcgtgcggatccagttcctggacacggcgcacgtcgccgggttctgcagcaacacgcgcgacttcgccacgctctacaccatgcacgccaactgctgcgtcggcctcggcgccaagctgcacgacctccgcaaccttctcgaggagtggcgcgcgtaccggcggatgcccgacgagcagcgccgccaggggcccgtgcgctggaaggtccccggcatctgcattcactgaaacaaa

SEQ ID NO: 85810 - DNA, 1144 bp, Oryza sativa
  Clone ID: PAT_MRT4530_84911C.1
ctcgctctcgctctcgctcgcgcacatcacatgcgcctcctcccgttataaggagagccccgcgccattggccgccccactcaccctgccatggacgggtaggaaggtacagtggcggcgccgacacgcggtggaggaggaggcggcggcggcggcggcgatggggctgctgtcgaacagggtggagcggtcggagatcaggccgggggatcacatctacacatggagggcggtgtacgcctactcccaccacggcatttatgttggaggaagtaaagtggttcattttactcgaaagaaagaagcagaaggatcagattcatccaattccacctccagcctattattagagccttcatcagagtgcccaacgttcccagattgtgggtttcagctgcctgatagtggtgtcgtcctcacctgcttggattgcttccttcggaatggctctctatactgcttcgagtacggagtgccatcagccgttttccttgcaaagctgcgtgggggaacctgcaccattgcccaatcagatccatcagaagttgtggtacacagagccatgtacttacttcaaaatggctttggaaattatgacatatttgagaacaattgcgaggactttgcactctactgcaaaactgggcttcttcctgttgaggaacctggcattggaacaagtgggcaagcatcttccgccattggagtgccattggcagctcttctgtccactccacttaagctttttgctgctggtccacttggaatggccactgtcacagctgggatgtactgtgctggtagatacatcactgacataggagtaagaaaggatgtggcgaaaattgaagtggagaatttatcatcacaccttggtagacgcctgattgaagatgaaggatcagtgaacgtacggtcagagaaaccgaaaaccttgctgcctatgaagagaaagcgtgagaggtgatggcgactatataccgcccttcgtcgataattggttcagaactgtgcataatttaaactttactcttcgccataataagtttgatatagatatgtacctctgaagcgtgttctgattcagttaagaccacacttcacatgatcaattgagctacattccaaaaaaaaaaaaaaaaaa

SEQ ID NO: 85811 - DNA, 135 bp, Oryza sativa
  Clone ID: PAT_MRT4530_84912C.1
atggcgcagcgacacgggagaggtgagggtggcggcgaggctcaccagagcagcggggacggcaatgaaacagtgatggagcaggacaagccactcggccatggtgaggttattgtgcactgtgaatgctcctag

SEQ ID NO: 85812 - DNA, 399 bp, Oryza sativa
  Clone ID: PAT_MRT4530_84913C.1
ataccaaatttttggaacttacactggggacaaaaaaaatatatcatgagacagtggttaagagcacctataaggccaaaaatgtcttagggatcctttacaaaaatttttttcaataatatattagccctgctgagaccaatatatttttcatccctaaataaagataacttccaaaaataaccaatttgtcctaacgtgaaaacaacgcactgacagcttaaaatccagcctttgaaaaggatggtgctgacctatcaccttgggtagttgaaaacccatctctgactttgaatgcatcataaattacgcattaaccttcaggatggataccgatcttaactttattttggggcaatacacgagtgaatagaccccagagatccagcttcttaacat

SEQ ID NO: 85813 - DNA, 647 bp, Oryza sativa
  Clone ID: PAT_MRT4530_84914C.1
ggctgcagggggctgcatccatggctgccgaaatcaaaacttgagggtggcaaagcttttttggctgtggggacgagctcagtggcagctgaatttgtaatcaatggcacatcgttggggctgggagaggtgagggaggcaactaaattacatgggtgattatgtgattgggataggagagggaagtccagcagttgagccgcttagagtaccttgtggaccatggtagcgtgccatctggcatggtgggtgaataagagagaggagtatttagtgcagctggctgtaggttgatattagtgctagtagagtagggtatggtcgttttattttttattggtggcacattggtaatgttttgatactaaaatgtactaatgtttctcttccgcgtattcgagaaaaatgaagaagagaggagagcagaaagagattggatgaagatgataagtggccgtgtaagggcaagaataggattttgccaagaaaaaaaaaacctgaccactaacaatgcgtcgtcctaccagagtaataaatggactagggcaagaaagggttattaaatatgggtcggtggaaaataagtgaacatcaaattttagatggtaaataggggatttaagtaacactcaatggtacataaggaa

SEQ ID NO: 85814 - DNA, 933 bp, Oryza sativa
  Clone ID: PAT_MRT4530_84915C.1
atgaggacttctcgggacttgttatctcagaggaacatcatgtaccctaggaatacaaggataacgagatgtcaagaagtatcactgcaacatcaccgcaacaacatcactccagccgcaccacagccgcgacttgccactgtcagggacgagtaccccacgcaccgtgaccgagactacttcatgggggccgacacggcacgagctgtgaacgccgatattacctcgataatagtgaggttggacgccgggctatacttgagtgatgctgagcagaggattaccttcgaccggatgcaagagaagatgcacgctgtcatgcgcgtcttctcttgttgcagcgccatggacgcggtacctccacctggtccagtaccaccatgtccacgcgcccctagtaccggagttgtgcgacctacagctggttcttcgcacggtactgctccgcccagaggtcctactgtccggttctacgatgacgacttgcacggggcgccagaccaggagatacttgggtcctcacagcttggtggagctccgaaggcgcacacccaggagcagccactgacataccgtacattgtgcaactacattgagtgggtagatacagagaacccacaaaatgacagaacacgtccatatgcacgtagtgaatcaagatcggactacctcaggcggaaggatgagcatgaacgtcagattgctgcggaagctttagaatggcaagtaaaccccctaggactccccacatggcgggaacgtccagagtgtcgttgtggtgaccgttgtcaggtgataagggcaatccaaggaggtgcgcattcattatggatcgacaatgtcaatcctacatatgatggccaaaagataactgagtctgaaacacaggtttatgtaaaatacctatttcgtaaaattttaagtgcaaaatag

SEQ ID NO: 85815 - DNA, 481 bp, Oryza sativa
  Clone ID: PAT_MRT4530_84916C.1
actatagcctctaagcaagttatatgggtggggaatgtttgaagaccacgggtgttcgcatgcagcaagacaacatcatttgaaaggaagacatcaagaattagcccaccatgtgaagaacaagaacttgctattgggagtcatgatagtgatattgaggctgactgtgctcatttgcaagaagtgcttttcaattacaatgaaaacattgtgcacagaagagttgtacaaaggggaacttcacgatgtgtttctgtcactccaagaggccgcacaacctcttgcaatgaagatgaaagccttgttggcaaggatgttatactctatgctgtcacaagaaatgatgtcccagtagccaaggcaacaattgtctcaacgaacccaataacaacagtgggaggtcaagctcttggagtccaatactatgaggtggttgtgaatgtggtgctaaagaaggacaccgcgcttccttggccatttt

SEQ ID NO: 85816 - DNA, 3741 bp, Oryza sativa
  Clone ID: PAT_MRT4530_84917C.1
atgtcaagtaaggtcatgtttcagatagttcacggtgaaggcaaccttagatttggtcctgatggtgttgatctgtcagattttgtaatgacatcgaagggcatcgataggcctgccgagagatcatttcagtcaatttataattggttgatgcgaggatttagaatagactcagaagtctacacaatgtcagtatcggttgtagtgagtcatgcaacggaaggttatttttgggaactcgtgccgatgcatagcactgttgcttggaaacggtatctggagatggcttttgaaaggtcatggcccctggttatttttgtgtcggtgcatgaaaatgatagaaatattgcaatggaaaccgaagatgtggagggtccaagccatgagggggattttgttaaaccatcgggggaagatgagggaaatgacacaggggtggtgcaggccatgggcgtggcggatgagggggagagaatcagtacaatcgttgatgaaatggagagggaagattcggataacgagcaaacggagggcgatgcatcatccgatgaggaaggtgatgtaatgcccactgattggacaaacgaggacttctcgggacttgctatctcagaggggcatcatgtaccctgggaatacaaggataacgaggtaattgagggtgctacgtatgctcataaggaggaaatgaaggaggcagtgaagcattgggcggtttcattgatgagagagtttagggtggtcaagtcaaccaattatgtgtatgaagtgaggtgcgtgaaagaagattgtctgtggcgtgttcatgcatataagggtaaatggaaagattattggaaagttagcattgtgaccgagcaccagtgccacttacaaggggtcgagaagtatcaccgcaacatcacatcagcttttgttgcaagtgagatgtacagcagtgttgtcggtaactctggctttgaaccaagagcaattattagccacattgaagacaaattcaagtgcaccataacctatgccaaggcttggagagcaaaacagaaggttttagagatgaggtatggcacttttgaagcatcatatgataatttgcagcgtctgttagccacaattgcccagaggaatagcaatacatactatgacgtgcatacatttccatcgactgttgatcctaacaagagtgtgctgcaaagagcctttttctcattgggtgcttgcatgaaggcttttgtgcactgccagcctgtgttatgtatagatggaacatttttgatcggtaaatacagaggtcagatattgacagcgattggagttgatgggaacaatcagctgttaactatggcttttgcatttgtagagagtgataacactgaaaactggtactggttcttggaaagagtgcagagaaaagtcgtgtgtgtgaggcccaatgtttgccttatacatgatcgtcatgcaggcatgttgcgggctattgactacttgcagaacggttgggatgagaagggaattctagctaagtggcccgatgttcggagtcggtggagcaggcgtggaatcatgcgcaagcacgccgtgcaggaatgtgtactgaaggttgatggaggatgcagttgcacctgtatgaagcctaagcttcgacatctgccttgctctcacgtacttgccgcggcagctattgcggacgacacacctgagctcttcagttgtggcattgacaggagccaccgctcgtacctctctgcagtccagggtgcgcagctcggcaccttccgtccacgtcctttacgccagctgttgcatgtcgacccgtggcacgttccgtggttgcgtgcggcaggccttctacctctttgtaggcttgttgaggcgagggcagacgacagagacccagcgaggcggtgggatgcagaccggtcactccttgccgctctggtagattgctggaggcctgagacgcacacgttccatcttccctgtggggagatggctccgacactgcaggacgtgtcgtacctactcggactaccactggcaggagacgcagttggtccggtagacggtggtgctgactggaaggaggatatcactgagcgctttttgcccatgatgcgccgtccagatctcccaccgcccactgcactacacgcgtacactacagtcgggcctacgaaggcttggttgcttcagttcactgtggacaagttccacccggacgctgatgagtacttggttcaacgcacccttgaggtgtacctgctctgcctgttcggttggatgatgttcaccagcacccaaaggcacgctgtggacaagggtttgatccactacgcatgtgccattgcggatgttgagccagagaaccgcaattacgcccacgtgcaggtgagacggagttaccctgagttcgtgttcgagttcgaccgtctccagcccaacgacgttgtttgggagccgtacacggaggaggccgtcgcaatgagagcactgcttggactttcgtccttgtgcacacgtgacatgacctactggctcacgaccataccgatggtgttcgacatctacatcgagcctcactgcccccagcgtgtgatgaggcagttcggcgtgaggcaggttgactcgccggggacaactacccgccacactgtgggcaccacgcgtatagcagtgatcgacgagttcgtaccacactcagaggacacctacagggactacctccggtggtacttgcctcgcactcgtggccatgtgacattcactccagccacgccacagccgcgacttgccactatcagggacgagtaccccacgcaccgtgaccgagactacttcatgggggccgacgcggcacaagctgttaacgccaatattacctcggtactagtcaggttggacgccggattacacttgagtgatgttgagcagaggcttacctttgaccggatgcaggagaatatgcacactgtcatgcgcgtcctttcttgtcgcattgcagtggacgcggtacctctagctggtccagtaccaccacgtccacgcgcccctagtaccggagttgtgcgacctacagctgttgcttcgcacggtactgttacgcccagaggtccctatctgccttccggcgtctttgttggaggtagcagttcatcacagagatcgccgagccctcgtcctgacacgcagccgcgagggatctttgctagtggagcctcttcctcacacgccggtggcacaggccctactgcccacttctatgacgacgactttcacggcgcgctggaccaggagatacttgggtcgtcacagcttggcggagctccggaggcgaacacccaggagcagccacaggtcacaccagtgcaggagggacggacaggccgtgttgtaccaccggaccatctgacatactcccagggacacgttagggcgcagggcaggagggacagggagagaatggaagcaccatttctggagcgtctcaactggcgaagcgatcctttcaccggttggtttccaccatggtgtgaccggtcgttatgcacttgtggggatcggtgcatacttaagtcaagcctcatgacataccgtacattgtgcaactacattgagtgggtagatacggaggacccacaaaatgacggaacacgtccatatgcacgtagtgaatcaagatcggactacctcaggcggaaggatgagcatgaacgtcggattgatgcggaagctttagaatggcag

SEQ ID NO: 85817 - DNA, 3684 bp, Oryza sativa
  Clone ID: PAT_MRT4530_84918C.1
atgtcaagtaaggttatgtttcagatagttcacggtgaaggcaaccttagatttggtcctgatggtgttgatctgtcagattttgtaatgacatcgaagggcatcgataggcctgccgagagatcatttcagtcaatttataattggttgatgcgagtatttagaatagactcagaagtccacacaatgtcagtatcggttgtagtgagtcgtgcaacggaaggttatttttgggaactcatgccgatgcatagcactgttgcttggaaacggtatctggagatggcttttgaaaggtcatggcccctggttatttttgtgtcggtgcatgaaaatgatagaaatattgcaatggaaactgaagatgtcgagggtccaagccatgtgggggattttgttgaaccatcgggggaagatgagggaaatgacacaggggtggtgcaggccatgggcgtggcagatgagggggagagaatcagtacaatcattgatgaaatggagagggaagattcggataacgacattgtgaccgagcaccagtgccacttacaaggggtcgagaagtatcaccgcaacatcacatcagcttttgttgcaagtgagatgtacagcagtgttgtcggtaactctggctttgaaccaagagcaattattagccacattgaagacaaattcaagtacaccataacctatgccaaggcttggagagcaaaacagaaggttttagagatgaggtatggcacttttgaagcatcatatgataatttgcagcgtctgctggccatcattgcccagaggaatagcaatacatactatgacgtgcatacatttccatcgactgttgatcctaacaagagtgtgttgcaaagagcctttttctcattgggtgcttgcatgaaggcttttgtgcactgccggcctgtgttgacaagcaagttgtggaataagttggatgagttgacaagcaagcaaactgacgagcaatctcgtcgaccacaagctgaaggcgacgagcctccagtacttcttggtgcactacatgatgacccacccacaatgagaaggaggtcaggatcatctatccgaaagttcagtcattggattgagaatgaaccaaaggagaagtggtctctattgttcgacaccgatggttctcgatatggcataatgacaactaatctagccgaggtttacaactgggtaatgcgaggagtgcgaggactaccgttggttggtatagtcgaatttatccttcacggcacgcaggcctacttctgggatcgatacaagaaaattggtccctcaatggtagataacaagataatatttggcagcgtagtgactaagaaggaagcaatctttcatacttggagtgaggagatatatgggttcgggatctcaggatctaacacaactcagaggtcccaagtttttttcattcccgatccatcaaagttaagggtgaaaaaggggcggcgtcggactagacgcatcagaaatgacatggacgagtcggaagctggtgggaggactctacgctgcagcaagtgtgaccaacgcggccgtacttacaagaaatgcctgaagactgcacagggtccaagcgtcgaggatgttggtccatctggagaggcaagtgatgaaagaagaccagctggggaaggaacaacaaccaggcgagcacgtcccaggcgtcctcgtgcggcagctatggcgaacgacacacctgagctcttgagtcgtggcattgacaggagccaccgctcgtacctctctgcggtacagggtgggttgcgtgcggtaggcttcctaccactttgtaggcttgttgaggcgggggcagacgagagagaccctgcgaggcggtgggatgcagaccggtcactccttgccgctctggcagattgctggaggcctgagacgcacacgttccatcttccctgtggggagatggctccgacactgcaggacgtgtcgtacctactcggactaccactggcaggagacacagttggtcccgttgacggtggtgctggctggcaggaggatatcactgagcgctttttgcccgtgatgcgccgtccaggtctcccaccgcccactgcactacacgcgtacactacagtcgggcctacgaaggcttggttgcttcagttcactgtaaatcagctggtcgaactggcggagatgctccactcggacgccaatgagtactcggtccgacgcgcccttgaggcgtacctgctctggctgttcggttgggtgatgttcaccaacacccatgggcatgctgtggataagggtttgatccactacgcatgggccatcgtggatgctgagccagagaacctttgggcaacagagaggttcgccataggacggcttgtggtggaccccacagcctacacgataggtcgcagcgcggagtggccagaggacggccccacgatggggacgtactggtgtcgacgtgggcgcagttacgcccacgtgcaggttgactcgccggggacagctacccggcacactgtgggcaccacgcgtataacaccgcaccacagccgcgaccgacttgccactgtcagggacgagtaccccacgcaccgtgatcgagattacttcatgggggccgacgcggcacgagctgtgaacgccgatattacctcgataatagtgaggttggacgccgggctacacttgagtgatgctgagcagaggattaccttcgaccggatgcaggagaagatgcgcgctgtcatgcacgtcttctcttgtcgcagcgccatggacgcgatacctccacctggtccagtaccaccacgtccacgcgcccctagtaccggagttgtgcgacctatagctgtttcttcgcacggtactgctccgcccagaggtccccgtctgccttccggcacctttgtcggaggcagcagttcgtcacagagatcgccgatccctcgtcctgacacgcagacgcgagggatctttgctagtggagcctcttcctcacacgccggtggcacaggtcctactggccggttctacgacgacgacttgcacggggcgccagaccaggagatacttgggtcctcacaacttggcggagctccggaggcgcacacccaggagcagccactggtcacaccagtgcaggagggtcgagcaggccatgccgtaccaccggaccgtctgacgtactcccagggacacgttagggcgcagggcaggagggaccggacataccgtacattgtgcaactacattgagtgggtagatacagagaacccacaaaacgacggaacacgtccatatgcacgtagtgaatcaagatccgactacctcaggcgaaaggatgagcatgaacgtcggattgctgcggaagctttagaatggcaggaggaggttaggaaatgtcaattcgtacaatggatcgatacagtcagagttacttccattggacaaacgataacgcaacctgagacgaccacgcaattcattcaggcatggatggagtacgaacgtcagggcaatccaaggaggtgcgcattcactttatggatcgacaatgtcaatcctacatatgatggccaaaagataactgagtctgaaacacaggtagagtaccagcgagagaaggaccatcaaaatgcaatacatgttgaacgacgcggaaggggtcggtag

SEQ ID NO: 85818 - DNA, 3684 bp, Oryza sativa
  Clone ID: PAT_MRT4530_84919C.1
atggcttttgaaaggtcatggcccctggttatttttgtgtcggtgtatgaaaatgatagatatattgcaatggaaaccgaagatgtcgagggtccaagtcatgtgggggattttgttgaaccaacgggggaagatgagggaaatgacacaggggtggtgcaggccatgggcgtggcagatgagggggagagaatcagtacaatcgttggtgaaatggacagggaagattcggataacgagcaagcggagggacgattgcatcatccgacgaggaaagtgatggtcgagaagtatcaccgcaacatcacatcagcttttattgcaagtgagatgtacagcagtgttgtcggtaactctggctttgaaccaagggcaattattaaccacattgaagacaaattcaagtacaccataacctatgccaatgcttgtgagagcaaaacagaaggttttagagatgagcgtctgttggccaccattgcccagagaggtcagatattgacagcgattggagttgatgggaacaatcaggtgttacctatggcttttgcatttgtagagagtgagaacactaaaagctggtattggttcttggacagagtgcggagaaaagtcgtgtgtatgaggcccaatgtttgccttatacatgattgtcatgcgggcatgttgcgggctattgactacttgcagaatggttgggaggagaagggaattccagctaagtggcccgatgttcggagtcggtggtgcatgcgtcacatgggtgctaatttttacaagcaattcaagaacaagcatcttatggatctttttaagaggctctgttcacagaatcaagagaaaaaatttaatgagttgtggaataagttggatgagttgacaagcaagcaaactgacgagcaatctcgtcgaccacaagctgaaggtgacgagcctccagtacctcttggtgcactacatgatgacccacccacaatgagaaggaggtcaggatcatctatccgaaagttcagtcattggattgagaatgaaccaaaggagaagtggtctctattgttcgacaccaatagttctcgatatggcataatgacaactaatctagccgaggtttacaactgggtaatgcgaggagtgcaaggactaccgttggttggtatagtcgaatttatccttcacggcacacaggcctacttcagggatcgatacaagaaaattggtccctcaatggtagataacaagataatatttggcagcgtagtgactaagtacatggaagataaaattgcaaaggcacagaggcatagagttgtgcctcaaggaacaaaagttcatcggtatgaaataatgtgtgttgataggagcaggcatggaatcatgcgtaagcatgttgtgcacgaatgtgtattgaaggctgatgggggatgcagttgcacctgtatgaagcctaagcttcgacatctgccttgctctcacgtacttgcagcagcaggtgattgcggcatacgtcccgatgtgtacgtgtcaccttatttcaggaaggaagcaatctttcatacttggagtgaggagatatatgggttcgggatctcaggatcttacacaactcagaggtcccaagtttttttcattcctgatccatcgaagttaagggtgaaaaaggggcggcgtcagactagacgcatcaaaaatgacatggacgagttggaagctggtgggaggactctacgctgcagcaagtgtgaccaacgcggccatacttacaagaaatgcccgaagactgcacagggtccaagcgtcgaggatgttggtccatctggagaagcaactatggcggacgacacacctgagctcttgagtcgtggcattgacaggagccaccgctcgtacctctctgcggtacagggtgcgcagctcggcaccttccgtccacgtccttcacaccagctgttgcgtgtcgacccgcggcacgttccgtggttgcgtgtggcaggcctcctaccgctttgtaggcttgttgaggcaggggcagacgagagagaccctgcgaggcggtgggatgcagaccggtcactccttgccactctggcagatcgctggaggcctgagacgcacacgttccatcttccctgtggagagatggctccgacactacaggacgtgtcgtacctactcggactaccactggcaggagccgcagttggtccagtagacggtggtgctggctggcaggaggatatcactgagcgctttttgcccgtgatgcgccgtccagatctcccaccacccactgcactacacgcgttcgttccacactcagaggacacctacagggactacctacggtggtacttacctcgcactcgtggccgtgtgaccttcactccagccgcaccacagccacgacttgccactgtcagggatgagtaccccacgcaccgtgaccgagactacttcatgggggccgacgcggcacgagctgtgaacgccgatattacctcgataacagtgaggttggacgccgggctacacttgagtgatgctgagcagaggattaccttcgaccggatgcaggagaagatacgcgctgtcatccgcgtcttctcttgtcgcagcgccatggacgcggtacctccacctggtccagtaccaccacgtccacgcgcccctagtaccggagttgtgcgacctacaactggttcttcgcacggtactgctctgcccagaggtcctactgcccggttctacgacgacgactttcacggggcgccagaccacgagatacttgggtcctcacagcttggcggagctctggaggcgcacacccaggagcagccactggtcacaccagtgcaggagggtcgagcaggccgtgccgtaccaccggaccgtctgacgtattcccagggacacgttagggcgcagggcaggagggaccgggagagaatggaagctccatttcttgagcgtctcaactggcgaagcgatcctttcgccggtaggtttccaccatggtgtgaccggccgttatgcacttgtggggatcgatgcatacttaagtcaagcctcatggtagaaactcggggcaggagattcttccaatgtgcaaaccttgatcagacataccgtaaattgtgcaactacattgagtgggtagatacagagaacccacaaaacgacggaacacgtccatatgcacgtagtgaatcaagatcggactacctcaggcggaaggatgagcatgaacgtcggattgctgcagaagctttagaatggcagaacaaacaattgccaggtggctacattgtctgccccaatgtagacgacaatttcgttggcaatccaaggaggtgcgcattcactttatggatcgacaatgtcaatcctacatatgatggccaaaagataactgagtctgaaacacagtggcacatcccacttctctcttccccttcctctctgaagcgggggcgagcgacaatggcatggcctcgcgacgcccgttcggcagcggtggccggagagcggagcttggagcttggagccgagaagctaacagcagcggctggagagcgtgggggtgccggcgatgaggatggagctccaatcccccagctaccttgcgatgcatcttgggtggaggcagtggagtacgtggtgccaccggtgatgaggacgatgctctag

SEQ ID NO: 85819 - DNA, 2338 bp, Oryza sativa
  Clone ID: PAT_MRT4530_8491C.1
gtaatatcccccgccgggcccaccaccgccacctcctcctcccccccccccccccaaattcgccggccggttcctgagacctcgccggcggcgagccggcaccctctcgacacccacgatgcgctgcctcctcctcctcgtcctcgcgctcctcgcggcggcggcggcggatgccgagcccgttctccgcacggtgacgggcgtccccacgggagtgtcctccggcggcggcggcgggggtggagaatcttccgacgagctgtactgcgacggatggaggctgtcggtggagacggggaacgcggggccgtggaccgccatccccccgcggtgcctggagttcgtgcgcgcctacatggaaggggagcgctacgcctccgactccgccgtcgccgccgcggactccctcgccttcgccgcgcgggcgctggcgtcgggcggcgggggggccaggccggcgtgggtgttcgacgtcgacgagacgctgctcaccaacgcgccctactacgccgtcaacggctggggatcactagagttcaacgagacctcatttgatgaatgggtggatgtagcaaaggcacctgcattaccagccagcttgaaactgtacaatgagcttcagggtcttgggatccacatcatcctcttgaccggtcgaagtgaattccaacgtaacgccacacaagtgaatcttttatttgcaggctaccattcatgggaaaaactcatcctgaggcaatcccctgatattggcaagacagccgtgcagtacaagtcagaaagacgagcagcactggaagctgagggattcaagatacttggaaattctggggatcagtggagtgatttattgggattgccaatggctacgagatccttcaaacttccaaacccaatgtatttcatcagttgaatttattagtgaaaagtggagaaaatctgtcatgtcgcttggaacctcctttactctttcttttaagttcgtaatgaattcaagaatcattctttggacataattgccgaggatttatctctagacatgttgaacccctagtggggtttgggaccatgcccaatgatggctttgtaatgtatcctttgcccaaagtcaaaataattatgtattagtcaaaataatatatcttatgaatattgcatctatgtacaaacttgatgaaatgtctccagattatgttggcttgatcatgatgtatctaacatcggctcagccattttatcaagtaaaatgacacaatgatccacagaagaaaagaaaactgagcaaaacttccttctgaaagcatcgtttggaggagacctggagacattctatatttctagctccagtgcagctgagtgctgattgctgaagagttcattttgttgaaaaacctcatctccatttttttttcagtacccctgtactgcctttcaactagcatcttgacagctctttcttgctctgttgtgcaggtgtgctgctgctgctgtgaagaggcttgtgctcccttgctcttgacagcaatcgatcggacgagcacctcgtcgccttcttcgccatcgtcttgctgcagggccctggagcgcgacgcgaattcgacaaccgatccacgactccatggcctctgcgcagctgcagcttcatcctggtgatgtaaggggttgtcttctttgcaaggtcttggacgcacctggcgttgcagagcgatgtgaaggattgggacttcccttggtagtacttggatagccctgtcctgagaggaagctgcgccagcagcggcgccgccagctcgtagagcggcccgccggcggcgtgcccgccaccatccagctgcatcatctcctcctcctcctcgtcgtcgtcgtcgtctgactccaactccaactccgactccgacgaacacgaaaacgagcagtagtcaccaccaccaccaccgtcagccgacgtccacgacgtcacctcgccgccatcgtcggtcaggctcgacgacgccggcgaccgcagcgtcgtcgtcgccgacgaatcgccgctggagaacccggacgccgccgcctcgccgtcgccgccggcagcagcagcaacaccaccttgatctcctcctcctcgtcgtcgagctatcccgcccatctcgcacgcatcaaactagtgctatatcacacaagatttgatcaatcgatcgatggatcgatcgaagcttggaatgcaaggtaaagcttatatatacacgcaggtgatccgggaaggaaggcgatggcttggatggatggattaaatggagaggctaataaagagagagaagaggagaagcctcgtgccgatcctgcagcccggggatcc

SEQ ID NO: 85820 - DNA, 604 bp, Oryza sativa
  Clone ID: PAT_MRT4530_84920C.1
gcccgctttttttttttttttttagcagaactacagaaactaacataagacttaactattagcaatgaccaaaaacgacgccgcgggttttttttttttttttttagtattgtaaggtactatataagattccatggtatgatggtaacagcaaaatttttcatactctgatagtcatttgctattccattaggctacgggttcctctgttgacaaatttcgcatgcgggtatgataatgacagcctaggcggaggtgcggtaaagcttgccgaaaacatgcagaagagcaacgacggcaatgaacccaatgctcatgatgaggactgagttcggggacatcttgcgcccagcagcctcatcggtgtagaactggagcattgtgctggcaccgcctccaccagtgccactgctggtggttctacgcctgcgcaagcttgcagcagctgctgcactccctctagccggggcatctccattggccaccatcttgctttatccctctgatgaatctgccctgcgccaatcgctcgtgctcccgtcccaacttggtcactcgtcttctcgcccgaaaatctgagtgcggaattcagaatccccggcgg

SEQ ID NO: 85821 - DNA, 305 bp, Oryza sativa
  Clone ID: PAT_MRT4530_84921C.1
aatgaaccattccttccattggccaaaaatgttaaaagaatacttgtatcttgagggcatggtgacaatatgggaggggagggtggttgttttacaatatctttgaattagagacatgggaagaattactattggtacatccatattggtaggtgtataataatccgggggatcagaaactgtatttgtgtattatgatttcccaacagtagtcacaagtgaaactggggaattctcctatgcagttgttgggggttgtgagggtgcatactcgtaatagttttgagatagaacggatcttattt

SEQ ID NO: 85822 - DNA, 284 bp, Oryza sativa
  Clone ID: PAT_MRT4530_84922C.1
acgcgcacctacgacaactgattctaaccattatatgtgtgctagatatgtactgtaatgtaattataagacactgggttgaaaagatgattggtcgtataacacagaggggagtgtggaggaatggaggtatttacggattgcacaagggggaaatggggaataagaggggttctacactggttggtctggatgaaatgggatggaacttgtctgctagaaaataagcgcatgtgttaagtattagtatatgacgctttaagtgggaaataaatcatcaaatt

SEQ ID NO: 85823 - DNA, 408 bp, Oryza sativa
  Clone ID: PAT_MRT4530_84923C.1
aaaatataaaaaaatattttaaggggggggtacaaaagctaatagaggtataaccaccattttctttcctatttttcttttatatttccctatatggatagaggccatgcccaagaaggaacataactttttttcttgaattcagaaaagctaaaatgtttgtcaataaagctaatttcacctttgaacggaaatggggaatcattgaattccaaaatttccggagaagggggcaccttgttgagagaatcagggggtggcacaatttaaaaagttttatacaggtcaagaactttcactagaagagagaatgctttctttttacgggaagcatttatgatttccgggggctgtttaaaaaattgggtgaatatttggaagatttatccgtttaaaattaacattttt

SEQ ID NO: 85824 - DNA, 1840 bp, Oryza sativa
  Clone ID: PAT_MRT4530_84924C.1
ttttttttttttttttaccgtcactcttgtgttcgcttgattattgtactctattttacaaaagaaaggattaacttcagcagttcagccacaggattccaagtacaaaataacaaaaacttcatcttatgctttagcttcaacacgaaacaccttaacaatcaggtaatacttgattgtagtaccaacgaaaggattaacttcagccacaggattccaagtacaaaatagaaagaaaacgtcggcatatgctgtagcgaacgagaaaccacctcctagatgatcttaggtactgataacggagtcaatgctaaacaacaaaactccaaaagtttagaggattgtctctacttaaataattccgggcgcctcaaaactgtggtcttctctgtcaatctcaccgagctgcctgttgtgctgcttgagccggctccacaatgttctttgctagcaggaaagtccgcatgttaagattctttaagctttcgataacctgctcatggatgttaacatgattggtcgtcatgataagagttccagacactgaatcaatcttggcgtcgagctttgaattcctaactaagttcataatccacaattctgcctcatcgtagctcatgttcagcttctgagaaagcatgccaatatcaatgcaccgatgaatacggcagtaagtttcaaagataaacagacgagcattttcaaggaattcatctctcaaaggaacagtgacaaaattcccttcctcaatgcgctttccaaggaaaggatcattcaatatgacctgctcacactctatgagtttctgttgtgcaccatcaaaatcatagttaacatacaagcattccaagaattcagtgatgggatccttgtagctgtgctgctcctgctgaatgactttaatcaactctttaagcatgttccttctccttttgttcacgacaactgctgtagcaaggtatctcagaagatggggtgcatttgtctggattgcgttcaagtacctatcctggaagaacagatcgatgatcccatttctgccgttttcatggttaaagaagataaaaatactccaatgcatcagccatatcctattctggagctgatttagtggtgatgagaagttctttgaatcaataatctccttcaaacggttgagctcatccagtgcaacatcccagttctgcatcaaaatctcggctgccagctttccccacagggcactcaagctcctctcgctgttcgtgcacaaagcacggtattgatacaagtagacagcagcatctgagtaattaccgcagtcaaactgaaacttggcatactgatacagagtctcaatctgctcaggaccaatctggaagcggtcctggagcatgtggaggttgtactgcttgtctggcctgagctcctggacgagctgctggttctggaggaaggagacgatgggggcggtggcctcgtcgagcgccctgagcctggagacgacgtcggtgcggcgcctgaccatgtcgtcggggacctcgtcggtgtcgtggagggacttgtggatgtccatggcgtagtccaccatgttggtcccgctgaggaggcggagcttcgcctccaggatctccttgttcgcgtacagcgcacgctcctgcaggaactccagcagcgggaacaccaggtggcagtccatctgccccgccatccgcgccgtcaggtcgtgctccgccatggccgcccgctccccggtgctcgccgctgctagggttttctagggttccgcgtgtggcggcggcgggaggaggaggaggaggagggagagggagaaggtagagaggaatggaatcccggccgg

SEQ ID NO: 85825 - DNA, 1649 bp, Oryza sativa
  Clone ID: PAT_MRT4530_84925C.1
agtacagtctagtacaaaagaaaggattaacttcagcagttcagccacaggattccaagtacaaaataacaaaaacttcagcatatgctgcagcgaacgagaacacacctcctgggtttccttttgccccgggatattgctgtattagtagctttgatacgtaattagaaatatttctgtacactagttgttgaatcctttttctttatagaggaatcgcaagtactaataacgcgacgtcggtgctaaaagtttaatagtttgtctaacttcacgagttctgggcgcctcaaaattgatgttctctgtcaatatcaccgagttgcctgttgcattgcttgagctggctccacaatgttctttgctagcatggaagtccgcatgttaagattcttcaagctttcgataaactgctcgtggatgttaacatgattggtcgtcatgataagagttccagacactgaatcaatcttggcatcgagctttgaatttctaactaagttcattatccacaactccccttcatcatagcgcatgttcagtttctgagagagcatgccaatatcaatggaccgatgaatacggcagtaagtttcaaagataaacagacgagcattttcaaggaattcatctctcaaaggaacagtaattgaattcccttcctcaatgcgctttcccaggaaaggatcattcaatatgacctcctcacactctatgagtttctgttgtgcgccatcaaaatcatggttaacgtacaggcattccaggaattcagtaatgggatccttgtagctgtgctgctcctgttgaatgactttaaccaactctttaagcatattccttctccttctgttcacaacaattgctgcagcaaggtatctcagaagatgtggtgcatctgtctggatcgcattcaagtacttgtcctggaagaacagatcgatgatcccgtagctgccgtttccatggttaaagaagatgaagatactgcagtgcatgagccatatcctgttctggagctgatttagcggtgaagaggagttctttgaatcgatcatctccttcagacaattgagctcctccagtgcaacatcccagttgttattcagaatctcggccgacagcttcccccactgggcgctcaagctcctctcgctgctcgtgcacagagcacggtatcgatgcaagttttcagcagcatctgggtagttcccgcagtcgaactgaaacttggcatactgatacagagcctcgatctgatcaggaccaatctggaagcgctcatggagcatgcggatgttgtgctccttgtcggggccgagatggtggttcttgagggcggaaacgatgggggcggcgggggcggcgagcgccccgagcctggtgacgacctcgtggcggcgctcgaccatgtcgtcggggacggggacgacgacgtcgtcgtctgtgtcgccgtggagcagcttgtgggtgtccatggcgtaatccaccatgttggtgccctggatcaggaggcgcagcttggcctggaggatctcctcgaccgcgtagacccgaccaggtcgccactgcaggaactccagcagcgggaacaccaggtggcagttcatgtgcgccgccatccgcgccgtcaggtcgtgctccgccat

SEQ ID NO: 85826 - DNA, 315 bp, Oryza sativa
  Clone ID: PAT_MRT4530_84926C.1
caaaaacaaaaaaaaggggggggaaaaaacccaaaacccacaccccaaaaaaaaaaaaggggggccccccccaaagaaaaaacccgggaaaaccccacccgaggggggcccccccccccccccatttcaggggggggggggggaaaaaaaacaaccctgttaaaaagggttggccccgggaaccccaccaaaaagagggttctgccaaaaatacactggccgccacaccatgggaggcacaaacaccgaaaaaaaaaaacggatcgctacttacgcttgccggccacaaaagaacacattggctccggagcaagc

SEQ ID NO: 85827 - DNA, 1791 bp, Oryza sativa
  Clone ID: PAT_MRT4530_84927C.1
atggcatcttgggaggatgaacctagcggtggatctcgggaaccctccgagcccagcggctgcacggatctgatcatgccgccgttgcggcctaaatccccgccggaattactagaccggctgcttctccacgacgaggaggaggaggagacgacaagctatgttgcctccgctcacccagcgcccatagaatatggttcagacgacgacgccggtttaaccaggtttgtcgatgacatgtatagctgcgtggaactggatgatgtggtagacaaggagacggtttgcccagccgtcctctttgtgttccccgttgatccatttcagactttcctatttaatgttggcctggaatcaattaaaaagatcaacaaccatattcatttcttgcattgcatgcaacgagttgaggtggggccagctgatgtggagcagggttttctgaaattcactccaaaggaaataagtcgcaagtggctagcaacatacatcaggaggaatgcagaacacacggaggcatataaagagtttgtagcgtcgggatatgattatgctcaacttctacgatatcctttgaggctgtttcccaagacatcatatcactgcatcaaaaaaagcatttactgtgatcatcacgaatacctgaccttcactacttctgagactgcatcaactattgggatgaatgagccaaatgatacgctccaaatcttctctttgaagttatccagtaacgaatcataccccattagtgtctatgggatctttgcggtacgcgatgaattggacaggctacggaattatgtctttaaccgcacaagagataatcctgtcttgattgagcaggattccattaccttacctctttgtagcccttgccgaggaatgtatatactaagttttgcattgttcgaagtcgatctttgggtgaaggcagaatcagaaggtggcggatcagatgacaagcaattgctttctgagtatgctgagatcgagaaccgtggcctaaaagatcctatgatatatggacggattccaagtgatcgttgcctgctagacgtagactgcatgttccttctcaacagtgttgaggctgtcatacaagtctttacaaaggatgacagtgataatcctcatcgcgtgagattcaccgccttcagcagcggctttgatcatgagatcgtgttgtacgatgacagattatgtaagaaggggaagttgttccagaatgttgtcgcggtgaagtctaaggaaaaactggttattcgcttagaattcgagggatcgacgtttcggtggacttttcaggatggcgctgttgcagctgttagttctcctgatgattcggtctcgaagctgtttgatgtggtggttcaaataattcaacaggaaacaaaagataaactatgttggaaattcacaaacaatggtatctgcagtacaaagagtgcttacaaggaggtttacaaaagagaaatttcaaatgctcatcagctttggaaagctagaaatgatcttaagtttcagggaaaaatcaaggagccaactcaagtttgcatggaagcaaaagcaatgattaaaacttatacaaacttcctttcaaatgatttgatgcaggaggatcttgatgaggaagatacaaacagaagaatggggggagctgctagcatttcaactggcaatggagattgccagattcttgaagttcactttctcacagatagtgccatcatcgcgcggacacttgcaagagaagaaactttcaagaagaaccagggcattggagcttaa

SEQ ID NO: 85828 - DNA, 3836 bp, Oryza sativa
  Clone ID: PAT_MRT4530_84928C.1
atgccgcggagacacgacgccctccgcctgctgctgctggtggtggtggtcgccgcggcggatgcggcgacggaggccgacgcgctgctggcgtggaaggccggcctgcaggacggcgcggccgcgctgtccgggtggagccgcgccgcgccggtgtgcgcgtggcgcggcgtggcctgcgacgccgccgccggcggcgcccgcgtcacttcgctccggctcaggggcgccggccttggcggcggcctcgacgcgctcgacttcgcggcgctcccggcgctggccgagctcgacctcaacgggaacaacttcaccggcgccatcccggcgagcatctcgcggctccgctcgctggcctcgctcgacctcggcaacaatggcttcagcgactccatcccgccgcagctcggcgacctctccggcctcgtcgacctccgcctctacaacaacaacctcgtcggcgccatcccgcaccagctcagccgcctccccaaggttgcccacttcgacctgggagcaaactacctcaccgacgaggacttcgccaagttctcgccgatgcccaccgtcacgttcatgtcgctctacctcaactccttcaatggcagcttcccggagttcatcctcaaaagcggcaacgtcacctacctcgacctgtcgcagaacactctgttcgggaagataccggacacgctgccggagaagctcccgaatctgaggtacctcaacctgtccatcaatgcgttctccggcccgattccggcgtcgcttgggaagttgacgaagctgcaggacctgcggatggccgccaacaatctcaccggcggcgtcccggagttcctcgggtcgatgccgcagttgaggattcttgaactcggcgacaaccagctcggcgggccgatcccgccggttcttggccagctccagatgctgcagcggctcgacatcaagaactcggggctctcttcaactctgccgtcgcagctgggaaatctgaagaatctcattttcttcgagctgtccttgaaccagctctccggtggcttgccgccggagttcgccgggatgcgggcaatgcggtacttcggcatttccacgaacaacctcaccggtgagatcccgccggtgttgttcacgagctggccggagctcatatccttccaagtgcagaacaactcgttgacaggcaagattccgccggagctcggcaaggcgagcaaactgaacatcctctacctattcaccaacaagtttacgggctccattccggcagagctcggcgagctggagaacctgacagagctggatttgtcggtgaactcgctcaccggaccgatccccagctcgttcggcaacctcaagcagctcacaaagttggcgctattcttcaacaatctcaccggcgtaatcccgccggagattggcaacatgacggcgttgcaaagcctcgacgtcaacaccaacagtctgcacggcgagctgccagccaccatcacggccctgaggagcctccagtacctcgccgtgttcgacaaccacatgagcggcaccatcccggcggacctcggcaagggcctggccttgcagcacgtgagcttcaccaacaacagcttctccggcgagctgccgcgccacatctgcgacggcttcgcgctggaccacctcacggcgaactacaacaacttcaccggcgcgctgccgccgtgcctgaagaactgcacggcgctggtccgtgtccggctggaggagaaccacttcaccggcgacatctcggaggccttcggcgtgcaccccaagctggtgtacctggacgtctccgggaacaagctcaccggcgagctgtcgtctgcctggggacagtgcatcaacctcacactcctgcatctcgacggcaatcgcatatccggcggcattccggcggcatttgggagcatgacaagcttgaaggatctcaatttggctggaaataatctgacaggagggattccacctgtgttgggaaatatcagggtcttcaatctcaacctgagccataactccttttccgggccgattccggcgagcttgagcaacaattccaagcttcagaaagtcgatttctcagggaacatgcttgatgggacgataccagttgccattagcaagcttgatgctctgatattgcttgatttgagcaagaacaggttgtcaggggagataccaagtgagcttggtaatctggctcagctgcagatcctgcttgatttgagcagcaattctctatcaggcgcgatccctccaaatcttgagaagctgataactctgcagagactgaacttatcacacaatgagctcagtggttcgatcccggcagggttttctcgcatgtcaagcctcgaatcagttgatttctcttataatcgactcaccgggagtataccgtcagggaatgttttccagaatgcttcagcttctgcatatgttgggaattcggggctctgtggtgatgtgcaaggtctaactccttgtgacatcagttctaccggatcatcttctgggcatcacaagagagtagtcattgcaacagttgtgtcagtagttggagtggtgttactactagccgttgttacttgcatcatactgttatgcaggaggaggcctagagagctaacatacgttcgggccctccgcttttttgaacttgtcactggaacgatctatcaggcagtattccagaaagaattggcatttgaatatcttggagtcccttgacttgtcatggaatgagctttcaaggtgttatccccgcaagcatttcaaatctgtcatgcctcaggtgtgttaaatctctcaaacacccacttattggggaagcatacccacaggaagacatcttcagacagtttgtggatccctcaatttatagcatcatttgggcctttgtggcttccctttgataatagcctgccaggcatctagattggatgagagaaatgaagatcataaagaacttgatatatgtttattttactctttaattcttggcattgttttcggagtttggctttggtttggagttctaattttacttaagccattaagagtttttgtttttcattctgttgaccacatagaaagaagctatgcaagttgcagaagatgtatgcactaagtattcttcagatgcaactcagcaaccaaataatatgcccctgttgcttttcctcgacaaaaaaaaaaaaaaatcgacgaactggacttctgtggcaggatcatatggatacatggctccaggaaaaaatgagagaaagaaactcagatccgatctatttaagattgttttgcacattattgtgattcatgaaagtactgaagtcattactatttgcagaactttgaaagattgtcattgggaaaaggaactgctcaaattccgacaagtacggcaccgcaccattaacacttaccgacttcgattatttcttgcagaattcgcatacacgatgagggtgacggagaagtgcgatgtgtatagctttggcgtggttgcgctagaggtcatgatgggaaagcacccaggtgacctcttaacatccctgccagccatctcatcatcagaagaagatgatctactgctcaaggacatactagaccagcggctggatgctccaacagggcagctcgcagaagaggtcgtgttcatcgtgagaatcgcgcttggttgcacaagggtgaaccctgaatccaggccttccatgagatctgtagcgcaggagatttctgcgcatactcaagcctacctctctgaaccattcaaactgatcacaattagcaagctaacagactaccagaagtga

SEQ ID NO: 85829 - DNA, 255 bp, Oryza sativa
  Clone ID: PAT_MRT4530_84929C.1
atggcacaagaggaggctacctactttagttttaagggtaggagcaaaacctgctgtgtggtgcacttgtttggggggagttatgtgaagggtcctgtcatagatcctttccgttccccgccaaagcaagataccgatgagaaactactattggagaaggagtcggcagacaacgaggacgagaatgccattgaggatggcaacgacgatgaccgtttaagctggagcggtggaagaggaggccgaggtcgctga

SEQ ID NO: 85830 - DNA, 1206 bp, Oryza sativa
  Clone ID: PAT_MRT4530_8492C.1
atgagacgcggcaggaaacgcaagcgcgccggcaagccgacctgcctcccgccggcggacgcctcgttcccttcaattgattctctcaacgacgacgtcctcgaggagatcctcgtccgcctcccgtgcatcgcctcgctcgcccgcgccgcctgtgcctgcgcgcgcttgcgagcgatcgcctcctcgtgggcattccttcgccgcttccggacgcttcatccttcgctcctcggccacttcgccaccgacgccgacgacgagtcagtgataccgaccttccaccccgcacgtgcccagtttgatggttgctccgacgccgccgtacgaggcggcgatttcttcctcacccgcgtcgacgcaaacgctgggtggcgcgtccaggactgccgccacggccgcctcctcttcgccaacgagagcgatctcctcgtctacgacccgctctcgcgccgcggagtttccatccgtcgaccatcgtggtacccctccagccacttcacccactgccttctcgccggctacggcggtgacggctgcccgggctccttccgcgtggtgtccgtcgagcacaacggcgagcgcgcggcgcggggcgcggtgtacagctcgtgcaccggcgcgtggcggcgcggccggtgggactacgaccgcgtcatcaacccgaagcgccccagcgagtactcctacttcccggggatgcaggcggcggggcggatctactggaagcaccgcgacacgacgaagctgcaggtgttcgacgcgggacccatgcggttctcgtacgtccacctccccgagggcgtgcacccgcggtccaagtacgccgtcggcgaggcggaggacggcgggtgctgcctcgtcgtcctcgcggacgcaccccacggcacggtgttcaaggtgtggcgcctcaggacagggaaggggtcgtggccgtgggcgtggacgtgggagcttgagaggcggctgccggcatgcgaggtgatagggaaagtacaataccctccgattcgccacgtgtgcgcggtggtcgccggcgtggtgctgatctgcttccagaatcacgctgggcctcaccggcacatcgcattctggctcagcaacatgcaggtggaggccacgttcaggagcgctggatgggcttaccctttcctgatgccatggcgccactcatcacctctcttgttgccttctgcaaaattttag

SEQ ID NO: 85831 - DNA, 426 bp, Oryza sativa
  unsure (1)..(426): unsure at all n locations
  Clone ID: PAT_MRT4530_84930C.1
ccactccagccgcggactcccacgccccctttggcggcgcaaacccgcagcggcgcacgggaccacgcggccgggcggaacgggcgccgccgcctctcccatccaccacgcccgccaccacgcgcgctctcctccacgtgacccgcgccaccaccaccaccaccaccgccaccgctcagcccgcggccgatggcccaagtgcccaacccccccgcacccagaaaaaccgaaccgaccgccccaccaccaccaccaccacccatacccctcctccgcctcccctcaccttatcccccccacacccgaatccgcctccaccaccaccgccgccgccgccgcctcctccccaaaattattgccccccagatctagatctgaatcgacgccgcagccgtgactgagaggatggcgcaggaggcggcgtcn

SEQ ID NO: 85832 - DNA, 560 bp, Oryza sativa
  Clone ID: PAT_MRT4530_84931C.1
ttttgttttttttttttttttttttttttttttttttttttttttttttttttttttttttttttttttttttttttttttttttttttttatttttttttttttttttttttttttttttcatttttttattttttttttttttaaaatgggggtgatcttacaattttttagaatttttttttaagacccatatactttataagctagattacttaattaaatagctaactgatatttattccttttcaataacttaactcttttcatttaagttactttttgaatcagctaaatcacatgaaaaagcccaacttcggatatgagcaccattgcgtgtttttttctaaggagggttatctttaaaacatggttaccgtttacagcttatttctctgaaagggctggcaatcagttaattgttgttagccgcacaagctgaatatactgttcaagggaaaataacgttggattataacataaagcttttatataacttgaactgtcttaataaccggatattcccaataacgcgaattccgaactaaggaatagaccgc
